United States Patent Application Publication US 2024/0182876 A1 - sequence listing, part 2

SEQ ID NO: 1866 - protein, 529 aa, synthetic construct
  REGION 1..529: note = Variant of terminal deoxynucleotidyltransferase
MHQHHHHGGSGSHGIRTIDSDFGKKRQKKMDNHDSSAIYEIKFHEFVLFILEEKMGATRRTFLTDLARKKGFRVENELSDSVTHIVAENNSRSEVLAWLKEHKMEKTKQFELLDISWLIESMKVGKPVDTKGKYQLAESGEMSANPDPTEGRENELPPTMKTISQYACQRRTTLNNHNQRFTDALEILAENYEFKRNDDTALTFRRAASVLKSLPFEVRSLKDTEGLPWIGDEVKGIMEEIIEVGESLEVQAVLNDERYQSFKRFKSVFGVGVKTADKWYRMGLRTLEDVRSSKTLKLTPMQKAGLLYYEDLARGVTKAEADAISLLVQDAVATFDPDALVEIVGGFRRGKPQGHDVDLLITSPGAEKEQDDQLLHKVTNLWKKQGLLLYGRLEWSQFEDGKLPSGKADALDGHAKCFLILKLYDHKVDKSKWEMPTGSNMGEAKPWKAIRVDLVRCPYDGFAFALLGWTGSRMFRRDLRWYATDEKNMMLDNHALYDLTKKIFLKAKSEEEIFAHLGLEYLEPFERNA

SEQ ID NO: 1867 - DNA, 1587 bp, synthetic construct
  misc_feature 1..1587: note = Variant of terminal deoxynucleotidyltransferase
  source 1..1587: mol_type = other DNA
atgcaccatcatcatcatcatggcggtagcggcagccacggcattcgtaccatcgattcggacttcgggaagaaacgccagaaaaaaatggataaccacgatagttccgccatctatgaaatcaaatttcacgagtttgtgctgttcattctcgaagagaaaatgggtgcgacgcgtcgtacttttctgacagatttagcccgcaagaaagggttccgcgtcgagaatgaactgtcagacagcgttacccacatcgtggcagaaaataattcacgctctgaagtattggcttggctgaaagaacacaagatggagaagaccaagcaattcgaactgctggatattagctggcttatcgaaagcatgaaagttggtaaaccggtggacaccaaggggaaataccagttggcggaatcgggtgagatgagtgcgaacccagatccgacagagggtcgtgaaaacgagctgcctcctactacgaagaccatttctcagtatgcgtgtcaacgccgcaccaccctgaacaaccataatcaacgttttacggacgcactggaaattcttgcggaaaattacgagttcaaacgcaacgatgatactgcgctgacctttcgtcgtgctatctccgtgctgaaaagccttccgtttgaggtacgtagcctgaaagacacggaaggattgccctggatcggtgatgaagtcaaagggattatggaagaaatcatcgaggtcggtgaatcgctggaagtgcaggccgtgctcaatgatgagcgctatcaaagcttcaaacgctttaagagtgtctttggagtgggggtgaagacagcagacaagtggtaccgtatgggtctgcgcacgctcgaggatgttcgttccagcaagaccctgaagttgaccccgatgcagaaagcgggtctgctgtattatgaagatcttgctcgcggcgttacgaaagccgaagctgacgcgatttctctgctggttcaggatgcagtcgcaactttcgacccggatgcgctggtggagattgtcggtggatttcgtcgtgggaaacctcagggtcacgacgttgatctgcttatcacatctccgggagctgagaaagagcaagaagaccagctcctgcagaaagtgaccaatctgtggaagaaacaagggttgttgctgtacggtcgtctggaatggagtcagtttgaagatgggaaactcccatccggtaaggctgatgccctggaccattttgcgaaatgctttctgatcctcaaactttatgatcataaagtggacaaaagcaaatgggaaatgccgacgggttcgaacgagggcgaggccaaaccgtggaaagcaattcgcgtagatctggttcgttgcccctacgatggttttgcgtttgcgttgttgggttggaccggaagccgcatgttccgccgtgatctgcgctggtacgccaccgacgagaagaagatgatgctggacaatcatgcgctgtatgacctgaccaagaaaatctttctcaaagctaaatcggaagaggaaattttcgcacatctggggcttgaatacctggaaccgttcgaacgtaacgca

SEQ ID NO: 1868 - protein, 529 aa, synthetic construct
  REGION 1..529: note = Variant of terminal deoxynucleotidyltransferase
MHHHHHHGGSGSHGIRTIDSDFGKKRQKKMDNHDSSAIYEIKFHEFVLFILEEKMGATRRTFLTDLARKKGFRVENELSDSVTHIVAENNSRSEVLAWLKEHKMEKTKQFELLDISWLIESMKVGKPVDTKGKYQLAESGEMSANPDPTEGRENELPPTTKTISQYACQRRTTLNNHNQRFTDALEILAENYEFKRNDDTALTFRRAISVLKSLPFEVRSLKDTEGLPWIGDEVKGIMEEIIEVGESLEVQAVLNDERYQSFKRFKSVFGVGVKTADKWYRMGLRTLEDVRSSKTLKLTPMQKAGLLYYEDLARGVTKAEADAISLLVQDAVATFDPDALVEIVGGFRRGKPQGHDVDLLITSPGAEKEQEDQLLQKVTNLWKKQGLLLYGRLEWSQFEDGKLPSGKADALDHFAKCFLILKLYDHKVDKSKWEMPTGSNEGEAKPWKAIRVDLVRCPYDGFAFALLGWTGSRMFRRDLRWYATDEKKMMLDNHALYDLTKKIFLKAKSEEEIFAHLGLEYLEPFERNA

SEQ ID NO: 1869 - DNA, 1587 bp, synthetic construct
  misc_feature 1..1587: note = Variant of terminal deoxynucleotidyltransferase
  source 1..1587: mol_type = other DNA
atgcaccatcatcatcatcatggcggtagcggcagccacggcattcgtaccatcgattcggacttcgggaagaaacgccagaagaagatggataaccacgatagttccgccatctatgaaatcaaatttcacgagtttgtgctgttcattctcgaagagaaaatgggtgcgacgcgtcgtacttttctgacagatttagcccgcaagaaagggttccgcgtcgagaatgaactgtcagacagcgttacccacatcgtggcagaaaataattcacgctctgaagtattggcttggctgaaagaacacaagatggagaagaccaagcaattcgaactgctggatattagctggcttatcgaaagcatgaaagttggtaaaccggtggacaccaaggggaaataccagttggcggaatcgggtgagatgagtgcgaacccagatccgacagagggtcgtgaaaacgagctgcctcctactacgaagaccatttctccgtatgcgtgtcaacgccgcaccaccctgaacaaccataatcaacgttttacggacgcactggaaattcttgcggaaaattacgagttcaaacgcaacgatgatactgcgctgacctttatgcgtgctgcatccgtgctgaaaagccttccgtttgaggtagtgagcctgaaagacacggaaggattgccctggatcggtgatgaagtcaaagggattatggaagaaatcatcgaggtcggtgaatcgctggaagtgcaggccgtgctcaatgatgagcgctatcaaagcttcaaacgctttaagagtgtctttggagtgggggtgaagacagcagacaagtggtaccgtatgggtctgcgcacgctcgaggatgttcgttccagcaagaccctgaagttgaccccgatgcagaaagcgggtctgtgctattatgaagatcttgctcgcggcgttacgaaagccgaagctgacgcgatttctaccctggttcaggatgcagtcgcaactttcgacccggatgcgctggtggagattgtcggtggatttcgtcgtgggaaacctttcggtcacgacgttgatctgcttatcacatctccgggagctgagaaagagcaagaagaccagctcctgcagaaagtgaccaatctgtggaagaaacaagggttgttgctgtacggtcgtctggaatggagtcagtttgaagatgggaaactcccatccggtaaggctgatgccctggacggccatgcgaaatgctttctgatcctcaaactttatgatcataaagtggacaaaagcaaatgggaaatgccgacgggttcgaacgagggcgaggccaaaccgtggaaagcaattcgcgtagatctggttcgttgcccctacgacggttttgcgtttgcgttgttgggttggaccggaagccgcatgttccgccgtgatctgcgctggtacgccgaagacgagaagaagatgatgctggacaatcatggcctgtatgacctgaccaagaaaatctttctcgaagctaaatcggaagaggaaattttcgcacatctggggcttgaatacctggaaccgttcgaacgtaacgca

SEQ ID NO: 1870 - protein, 529 aa, synthetic construct
  REGION 1..529: note = Variant of terminal deoxynucleotidyltransferase
MHHHHHHGGSGSHGIRTIDSDFGKKRQKKMDNHDSSAIYEIKFHEFVLFILEEKMGATRRTFLTDLARKKGFRVENELSDSVTHIVAENNSRSEVLAWLKEHKMEKTKQFELLDISWLIESMKVGKPVDTKGKYQLAESGEMSANPDPTEGRENELPPTTKTISPYACQRRTTLNNHNQRFTDALEILAENYEFKRNDDTALTFMRAASVLKSLPFEVVSLKDTEGLPWIGDEVKGIMEEIIEVGESLEVQAVLNDERYQSFKRFKSVFGVGVKTADKWYRMGLRTLEDVRSSKTLKLTPMQKAGLCYYEDLARGVTKAEADAISTLVQDAVATFDPDALVEIVGGFRRGKPFGHDVDLLITSPGAEKEQEDQLLQKVTNLWKKQGLLLYGRLEWSQFEDGKLPSGKADALDGHAKCFLILKLYDHKVDKSKWEMPTGSNEGEAKPWKAIRVDLVRCPYDGFAFALLGWTGSRMFRRDLRWYAEDEKKMMLDNHGLYDLTKKIFLEAKSEEEIFAHLGLEYLEPFERNA

SEQ ID NO: 1871 - DNA, 1587 bp, synthetic construct
  misc_feature 1..1587: note = Variant of terminal deoxynucleotidyltransferase
  source 1..1587: mol_type = other DNA
atgcaccatcatcatcatcatggcggtagcggcagccacggcattcgtaccatcgattcggacttcgggaagaaacgccagaaaaaaatggataaccacgatagttccgccatctatgaaatcaaatttcacgagtttgtgctgttcattctcgaagagaaaatgggtgcgacgcgtcgtacttttctgacagatttagcccgcaagaaagggttccgcgtcgagaatgaactgtcagacagcgttacccacatcgtggcagaaaataattcacgctctgaagtattggcttggctgaaagaacacaagatggagaagaccaagcaattcgaactgctggatattagctggcttatcgaaagcatgaaagttggtaaaccggtggacaccaaggggaaataccagttggcggaatcgggtgagatgagtgcgaacccagatccgacagagggtcgtgaaaacgagctgcctcctactatgaagaccatttctccgtatgcgtgtcaacgccgcaccaccctgaacaaccataataaacgttttacggacgcactggaaattcttgcggaaaattacgagttcaaacgcaacgatgatactgcgctggaatttcgtcgtgctgcatccgtgctgaaaagccttccgtttgaggtacgtagcctgaaagacacggaaggattgccctggatcggtgatgaagtcaaagggattatggaagaaatcatcgaggtcggtgaatcgctggaagtgcaggccgtgctcaatgatgagcgctatcaaagcttcaaacgctttaagagtgtctttggagtgggggtgaagacagcagacaagtggtaccgtatgggtctgcgcacgctcgaggatgttcgttccagcaagaccctgaagttgaccccgatgcagaaagcgggtctgtgctattatgaagatcttgctcgcggcgttacgaaagccgaagctgacgcgatttctctgctggttcaggatgcagtcgcaactttcgacccggatgcgctggtggagattgtcggtggatttcgtcgtgggaaacctcagggtcacgacgttgatctgcttatcacatctccgggagctgagaaagagcaagaagaccagctcctgcataaagtgaccaatctgtggaagaaacaagggttgttgctgtacggtcgtctggaatggagtcagtttgaagatgggaaactcccatccggtaaggctgatgccctggacggccatgcgaaatgctttctgatcctcaaactttatgatcataaagtggacaaaagcaaatgggaaatgccgacgggttcgaacatgggcgaggccaaaccgtggaaagcaattcgcgtagatctggttcgttgcccctacgacggttttgcgtttgcgttgttgggttggaccggaagccgcatgttccgccgtgatctgcgctggtacgccactgacgagaagaacatgatgctggacaatcatgcgctgtatgacctgaccaagaaaatctttctcaaagctaaatcggaagaggaaattttcgcacatctggggcttgaatacctggaaccgttcgaacgtaacgca

SEQ ID NO: 1872 - protein, 529 aa, synthetic construct
  REGION 1..529: note = Variant of terminal deoxynucleotidyltransferase
MHHHHHHGGSGSHGIRTIDSDFGKKRQKKMDNHDSSAIYEIKFHEFVLFILEEKMGATRRTFLTDLARKKGFRVENELSDSVTHIVAENNSRSEVLAWLKEHKMEKTKQFELLDISWLIESMKVGKPVDTKGKYQLAESGEMSANPDPTEGRENELPPTMKTISPYACQRRTTLNNHNKRFTDALEILAENYEFKRNDDTALEFRRAASVLKSLPFEVRSLKDTEGLPWIGDEVKGIMEEIIEVGESLEVQAVLNDERYQSFKRFKSVFGVGVKTADKWYRMGLRTLEDVRSSKTLKLTPMQKAGLCYYEDLARGVTKAEADAISLLVQDAVATFDPDALVEIVGGFRRGKPQGHDVDLLITSPGAEKEQEDQLLHKVTNLWKKQGLLLYGRLEWSQFEDGKLPSGKADALDGHAKCFLILKLYDHKVDKSKWEMPTGSNMGEAKPWKAIRVDLVRCPYDGFAFALLGWTGSRMFRRDLRWYATDEKNMMLDNHALYDLTKKIFLKAKSEEEIFAHLGLEYLEPFERNA

SEQ ID NO: 1873 - DNA, 1587 bp, synthetic construct
  misc_feature 1..1587: note = Variant of terminal deoxynucleotidyltransferase
  source 1..1587: mol_type = other DNA
atgcaccatcatcatcatcatggcggtagcggcagccacggcattcgtaccatcgattcggacttcgggaagaaacgccagaagaagatggataaccacgatagttccgccatctatgaaatcaaatttcacgagtttgtgctgttcattctcgaagagaaaatgggtgcgacgcgtcgtacttttctgacagatttagcccgcaagaaagggttccgcgtcgagaatgaactgtcagacagcgttacccacatcgtggcagaaaataattcacgctctgaagtattggcttggctgaaagaacacaagatggagaagaccaagcaattcgaactgctggatattagctggcttatcgaaagcatgaaagttggtaaaccggtggacaccaaggggaaataccagttggcggaatcgggtgagatgagtgcgaacccagatccgacagagggtcgtgaaaacgagctgcctcctactacgaagaccatttctcagtatgcgtgtcaacgccgcaccaccctgaacaaccataatcaacgttttacggacgcactggaaattcttgcggaaaattacgagttcaaacgcaacgatgatactgcgctgacctttcgtcgtgctatctccgtgctgaaaagccttccgtttgaggtagttagcctgaaagacacggaaggattgccctggatcggtgatgaagtcaaagggattatggaagaaatcatcgaggtcggtgaatcgctggaagtgcaggccgtgctcaatgatgagcgctatcaaagcttcaaacgctttaagagtgtctttggagtgggggtgaagacagcagacaagtggtaccgtatgggtctgcgcacgctcgaggatgttcgttccagcaagaccctgaagttgaccccgatgcagaaagcgggtctgctgtattatgaagatcttgctcgcggcgttacgaaagccgaagctgacgcgatttctctgctggttcaggatgcagtcgcaactttcgacccggatgcgctggtggagattgtcggtggatttcgtcgtgggaaaccttttggtcacgacgttgatctgcttatcacatctccgggagctgagaaagagcaagaagaccagctcctgcagaaagtgaccaatctgtggaagaaacaagggttgttgctgtacggtcgtctggaatggagtcagtttgaagatgggaaactcccatccggtaaggctgatgccctggaccatttcgcgaaatgctttctgatcctcaaactttatgatcataaagtggacaaaagcaaatgggaaatgccgacgggttcgaacgaaggcgaggccaaaccgtggaaagcaattcgcgtagatctggttcgttgcccctacgatggttttgcgtttgcgttgttgggttggaccggaagccgcatgttccgccgtgatctgcgctggtacgccaccgacgagaagaagatgatgctggacaatcatgcgctgtatgacctgaccaagaaaatctttctcaaagctaaatcggaagaggaaattttcgcacatctggggcttgaatacctggaaccgttcgaacgtaacgca

SEQ ID NO: 1874 - protein, 529 aa, synthetic construct
  REGION 1..529: note = Variant of terminal deoxynucleotidyltransferase
MHHHHHHGGSGSHGIRTIDSDFGKKRQKKMDNHDSSAIYEIKFHEFVLFILEEKMGATRRTFLTDLARKKGFRVENELSDSVTHIVAENNSRSEVLAWLKEHKMEKTKQFELLDISWLIESMKVGKPVDTKGKYQLAESGEMSANPDPTEGRENELPPTTKTISQYACQRRTTLNNHNQRFTDALEILAENYEFKRNDDTALTFRRAISVLKSLPFEVVSLKDTEGLPWIGDEVKGIMEEIIEVGESLEVQAVLNDERYQSFKRFKSVFGVGVKTADKWYRMGLRTLEDVRSSKTLKLTPMQKAGLLYYEDLARGVTKAEADAISLLVQDAVATFDPDALVEIVGGFRRGKPFGHDVDLLITSPGAEKEQEDQLLQKVTNLWKKQGLLLYGRLEWSQFEDGKLPSGKADALDHFAKCFLILKLYDHKVDKSKWEMPTGSNEGEAKPWKAIRVDLVRCPYDGFAFALLGWTGSRMFRRDLRWYATDEKKMMLDNHALYDLTKKIFLKAKSEEEIFAHLGLEYLEPFERNA

SEQ ID NO: 1875 - DNA, 1587 bp, synthetic construct
  misc_feature 1..1587: note = Variant of terminal deoxynucleotidyltransferase
  source 1..1587: mol_type = other DNA
atgcaccatcatcatcatcatggcggtagcggcagccacggcattcgtaccatcgattcggacttcgggaagaaacgccagaaaaaaatggataaccacgatagttccgccatctatgaaatcaaatttcacgagtttgtgctgttcattctcgaagaaaaaatgggtgcgacgcgtcgtacttttctgacagatttagcccgcaagaaagggttccgcgtcgagaatgaactgtcagacagcgttacccacatcgtggcagaaaataattcacgctctgaagtattggcttggctgaaagaacacaagatggagaagaccaagcaattcgaactgctggatattagctggcttatcgaaagcatgaaagttggtaaaccggtggacaccaaggggaaataccagttggcggaatcgggtgagatgagtgcgaacccagatccgacagagggtcgtgaaaacgagctgcctcctactacgaagaccatttctcagtatgcgtgtcaacgccgcaccaccctgaacaaccataatcaacgttttacggacgcactggaaattcttgcggaaaattacgagttcaaacgcaacgatgatactgcgctggaatttatgcgtgctgcatccgtgctgaaaagccttccgtttgaggtacgtagcctgaaagacacggaaggattgccctggatcggtgatgaagtcaaagggattatggaagaaatcatcgaggtcggtgaatcgctggaagtgcaggccgtgctcaatgatgagcgctatcaaagcttcaaacgctttaagagtgtctttggagtgggggtgaagacagcagacaagtggtaccgtatgggtctgcgcacgctcgaggatgttcgttccagcaagaccctgaagttgaccccgatgcagaaagcgggtctgtgctattatgaagatcttgctcgcggcgttacgaaagccgaagctgacgcgatttctctgctggttcaggatgcagtcgcaactttcgacccggatgcgctggtggagattgtcggtggatttcgtcgtgggaaacctttcggtcacgacgttgatctgcttatcacatctccgggagctgagaaagagcaagaagaccagctcctgcagaaagtgaccaatctgtggaagaaacaagggttgttgctgtacggtcgtctggaatggagtcagtttgaagatgggaaactcccatccggtaaggctgatgccctggaccattttgcgaaatgctttctgatcctcaaactttatgatcataaagtggacaaaagcaaatgggaaatgccgacgggttcgaacatgggcgaggccaaaccgtggaaagcaattcgcgtagatctggttcgttgcccctacgatggttttgcgtttgcgttgttgggttggaccggaagccgcatgttccgccgtgatctgcgctggtacgccaccgacgagaagaagatgatgctggacaatcatgcgctgtatgacctgaccaagaaaatctttctcaaagctaaatcggaagaggaaattttcgcacatctggggcttgaatacctggaaccgttcgaacgtaacgca

SEQ ID NO: 1876 - protein, 529 aa, synthetic construct
  REGION 1..529: note = Variant of terminal deoxynucleotidyltransferase
MHHHHHHGGSGSHGIRTIDSDFGKKRQKKMDNHDSSAIYEIKFHEFVLFILEEKMGATRRTFLTDLARKKGFRVENELSDSVTHIVAENNSRSEVLAWLKEHKMEKTKQFELLDISWLIESMKVGKPVDTKGKYQLAESGEMSANPDPTEGRENELPPTTKTISQYACQRRTTLNNHNQRFTDALEILAENYEFKRNDDTALEFMRAASVLKSLPFEVRSLKDTEGLPWIGDEVKGIMEEIIEVGESLEVQAVLNDERYQSFKRFKSVFGVGVKTADKWYRMGLRTLEDVRSSKTLKLTPMQKAGLCYYEDLARGVTKAEADAISLLVQDAVATFDPDALVEIVGGFRRGKPFGHDVDLLITSPGAEKEQEDQLLQKVTNLWKKQGLLLYGRLEWSQFEDGKLPSGKADALDHFAKCFLILKLYDHKVDKSKWEMPTGSNMGEAKPWKAIRVDLVRCPYDGFAFALLGWTGSRMFRRDLRWYATDEKKMMLDNHALYDLTKKIFLKAKSEEEIFAHLGLEYLEPFERNA

SEQ ID NO: 1877 - DNA, 1587 bp, synthetic construct
  misc_feature 1..1587: note = Variant of terminal deoxynucleotidyltransferase
  source 1..1587: mol_type = other DNA
atgcaccatcatcatcatcatggcggtagcggcagccacggcattcgtaccatcgattcggacttcgggaagaaacgccagaaaaaaatggataaccacgatagttccgccatctatgaaatcaaatttcacgagtttgtgctgttcattctcgaagagaaaatgggtgcgacgcgtcgtacttttctgacagatttagcccgcaagaaagggttccgcgtcgagaatgaactgtcagacagcgttacccacatcgtggcagaaaataattcacgctctgaagtattggcttggctgaaagaacacaagatggagaagaccaagcaattcgaactgctggatattagctggcttatcgaaagcatgaaagttggtaaaccggtggacaccaaggggaaataccagttggcggaatcgggtgagatgagtgcgaacccagatccgacagagggtcgtgaaaacgagctgcctcctactatgaagaccatttctcagtatgcgtgtcaacgccgcaccaccctgaacaaccataatcaacgttttacggacgcactggaaattcttgcggaaaattacgagttcaaacgcaacgatgatactgcgctggaatttatgcgtgctatctccgtgctgaaaagccttccgtttgaggtagttagcctgaaagacacggaaggattgccctggatcggtgatgaagtcaaagggattatggaagaaatcatcgaggtcggtgaatcgctggaagtgcaggccgtgctcaatgatgagcgctatcaaagcttcaaacgctttaagagtgtctttggagtgggggtgaagacagcagacaagtggtaccgtatgggtctgcgcacgctcgaggatgttcgttccagcaagaccctgaagttgaccccgatgcagaaagcgggtctgtgctattatgaagatcttgctcgcggcgttacgaaagccgaagctgacgcgatttctaccctggttcaggatgcagtcgcaactttcgacccggatgcgctggtggagattgtcggtggatttcgtcgtgggaaacctcagggtcacgacgttgatctgcttatcacatctccgggagctgagaaagagcaagaagaccagctcctgcagaaagtgaccaatctgtggaagaaacaagggttgttgctgtacggtcgtctggaatggagtcagtttgaagatgggaaactcccatccggtaaggctgatgccctggacggccatgcgaaatgctttctgatcctcaaactttatgatcataaagtggacaaaagcaaatgggaaatgccgacgggttcgaacgagggcgaggccaaaccgtggaaagcaattcgcgtagatctggttcgttgcccctacgacggttttgcgtttgcgttgttgggttggaccggaagccgcatgttccgccgtgatctgcgctggtacgccgaagacgagaagaagatgatgctggacaatcatggcctgtatgacctgaccaagaaaatctttctcaaagctaaatcggaagaggaaattttcgcacatctggggcttgaatacctggaaccgttcgaacgtaacgca

SEQ ID NO: 1878 - protein, 529 aa, synthetic construct
  REGION 1..529: note = Variant of terminal deoxynucleotidyltransferase
MHHHHHHGGSGSHGIRTIDSDFGKKRQKKMDNHDSSAIYEIKFHEFVLFILEEKMGATRRTFLTDLARKKGFRVENELSDSVTHIVAENNSRSEVLAWLKEHKMEKTKQFELLDISWLIESMKVGKPVDTKGKYQLAESGEMSANPDPTEGRENELPPTMKTISQYACQRRTTLNNHNQRFTDALEILAENYEFKRNDDTALEFMRAISVLKSLPFEVVSLKDTEGLPWIGDEVKGIMEEIIEVGESLEVQAVLNDERYQSFKRFKSVFGVGVKTADKWYRMGLRTLEDVRSSKTLKLTPMQKAGLCYYEDLARGVTKAEADAISTLVQDAVATFDPDALVEIVGGFRRGKPQGHDVDLLITSPGAEKEQEDQLLQKVTNLWKKQGLLLYGRLEWSQFEDGKLPSGKADALDGHAKCFLILKLYDHKVDKSKWEMPTGSNEGEAKPWKAIRVDLVRCPYDGFAFALLGWTGSRMFRRDLRWYAEDEKKMMLDNHGLYDLTKKIFLKAKSEEEIFAHLGLEYLEPFERNA

SEQ ID NO: 1879 - DNA, 1587 bp, synthetic construct
  misc_feature 1..1587: note = Variant of terminal deoxynucleotidyltransferase
  source 1..1587: mol_type = other DNA
atgcaccatcatcatcatcatggcggtagcggcagccacggcattcgtaccatcgattcggacttcgggaagaaacgccagaaaaaaatggataaccacgatagttccgccatctatgaaatcaaatttcacgagtttgtgctgttcattctcgaagagaaaatgggtgcgacgcgtcgtacttttctgacagatttagcccgcaagaaagggttccgcgtcgagaatgaactgtcagacagcgttacccacatcgtggcagaaaataattcacgctctgaagtattggcttggctgaaagaacacaagatggagaagaccaagcaattcgaactgctggatattagctggcttatcgaaagcatgaaagttggtaaaccggtggacaccaaggggaaataccagttggcggaatcgggtgagatgagtgcgaacccagatccgacagagggtcgtgaaaacgagctgcctcctactatgaagaccatttctcagtatgcgtgtcaacgccgcaccaccctgaacaaccataatcaacgttttacggacgcactggaaattcttgcggaaaattacgagttcaaacgcaacgatgatactgcgctgacctttatgcgtgctgcatccgtgctgaaaagccttccgtttgaggtagttagcctgaaagacacggaaggattgccctggatcggtgatgaagtcaaagggattatggaagaaatcatcgaggtcggtgaatcgctggaagtgcaggccgtgctcaatgatgagcgctatcaaagcttcaaacgctttaagagtgtctttggagtgggggtgaagacagcagacaagtggtaccgtatgggtctgcgcacgctcgaggatgttcgttccagcaagaccctgaagttgaccccgatgcagaaagcgggtctgtgctattatgaagatcttgctcgcggcgttacgaaagccgaagctgacgcgatttctctgctggttcaggatgcagtcgcaactttcgacccggatgcgctggtggagattgtcggtggatttcgtcgtgggaaacctttcggtcacgacgttgatctgcttatcacatctccgggagctgagaaagagcaagaagaccagctcctgcagaaagtgaccaatctgtggaagaaacaagggttgttgctgtacggtcgtctggaatggagtcagtttgaagatgggaaactcccatccggtaaggctgatgccctggaccatcatgcgaaatgctttctgatcctcaaactttatgatcataaagtggacaaaagcaaatgggaaatgccgacgggttcgaacatgggcgaggccaaaccgtggaaagcaattcgcatagatctggttcgttgcccctacgatggttttgcgtttgcgttgttgggttggaccggaagccgcatgttccgccgtgatctgcactggtacgccactgacgagaagaacatgatgctggacaatcatggcctgtatgacctgaccaagaaaatctttctcaaagctaaatcggaagaggaaattttcgcacatctggggcttgaatacctggaaccgttcgaacgtaacgca

SEQ ID NO: 1880 - protein, 529 aa, synthetic construct
  REGION 1..529: note = Variant of terminal deoxynucleotidyltransferase
MHHHHHHGGSGSHGIRTIDSDFGKKRQKKMDNHDSSAIYEIKFHEFVLFILEEKMGATRRTFLTDLARKKGFRVENELSDSVTHIVAENNSRSEVLAWLKEHKMEKTKQFELLDISWLIESMKVGKPVDTKGKYQLAESGEMSANPDPTEGRENELPPTMKTISQYACQRRTTLNNHNQRFTDALEILAENYEFKRNDDTALTFMRAASVLKSLPFEVVSLKDTEGLPWIGDEVKGIMEEIIEVGESLEVQAVLNDERYQSFKRFKSVFGVGVKTADKWYRMGLRTLEDVRSSKTLKLTPMQKAGLCYYEDLARGVTKAEADAISLLVQDAVATFDPDALVEIVGGFRRGKPFGHDVDLLITSPGAEKEQEDQLLQKVTNLWKKQGLLLYGRLEWSQFEDGKLPSGKADALDHHAKCFLILKLYDHKVDKSKWEMPTGSNMGEAKPWKAIRIDLVRCPYDGFAFALLGWTGSRMFRRDLHWYATDEKNMMLDNHGLYDLTKKIFLKAKSEEEIFAHLGLEYLEPFERNA

SEQ ID NO: 1881 - DNA, 1587 bp, synthetic construct
  misc_feature 1..1587: note = Variant of terminal deoxynucleotidyltransferase
  source 1..1587: mol_type = other DNA
atgcaccatcatcatcatcatggcggtagcggcagccacggcattcgtaccatcgattcggacttcgggaagaaacgccagaaaaaaatggataaccacgatagttccgccatctatgaaatcaaatttcacgagtttgtgctgttcattctcgaagaaaaaatgggtgcgacgcgtcgtacttttctgacagatttagcccgcaagaaagggttccgcgtcgagaatgaactgtcagacagcgttacccacatcgtggcagaaaataattcacgctctgaagtattggcttggctgaaagaacacaagatggagaagaccaagcaattcgaactgctggatattagctggcttatcgaaagcatgaaagttggtaaaccggtggacaccaaggggaaataccagttggcggaatcgggtgagatgagtgcgaacccagatccgacagagggtcgtgaaaacgagctgcctcctactacgaagaccatttctccgtatgcgtgtcaacgccgcaccaccctgaacaaccataatcaacgttttacggacgcactggaaattcttgcggaaaattacgagttcaaacgcaacgatgatactgcgctgacctttcgtcgtgctatctccgtgctgaaaagccttccgtttgaggtagtgagcctgaaagacacggaaggattgccctggatcggtgatgaagtcaaagggattatggaagaaatcatcgaggtcggtgaatcgctggaagtgcaggccgtgctcaatgatgagcgctatcaaagcttcaaacgctttaagagtgtctttggagtgggggtgaagacagcagacaagtggtaccgtatgggtctgcgcacgctcgaggatgttcgttccagcaagaccctgaagttgaccccgatgcagaaagcgggtctgtgctattatgaagatcttgctcgcggcgttacgaaagccgaagctgacgcgatttctctgctggttcaggatgcagtcgcaactttcgacccggatgcgctggtggagattgtcggtggatttcgtcgtgggaaaccttttggtcacgacgttgatctgcttatcacatctccgggagctgagaaagagcaagaagaccagctcctgcagaaagtgaccaatctgtggaagaaacaagggttgttgctgtacggtcgtctggaatggagtcagtttgaagatgggaaactcccatccggtaaggctgatgccctggaccattttgcgaaatgctttctgatcctcaaactttatgatcataaagtggacaaaagcaaatgggaaatgccgacgggttcgaacgagggcgaggccaaaccgtggaaagcaattcgcgtagatctggttcgttgcccctacgatggttttgcgtttgcgttgttgggttggaccggaagccgcatgttccgccgtgatctgcgctggtacgccaccgacgagaagaagatgatgctggacaatcatgcgctgtatgacctgaccaagaaaatctttctcaaagctaaatcggaagaggaaattttcgcacatctggggcttgaatacctggaaccgttcgaacgtaacgca

SEQ ID NO: 1882 - protein, 529 aa, synthetic construct
  REGION 1..529: note = Variant of terminal deoxynucleotidyltransferase
MHHHHHHGGSGSHGIRTIDSDFGKKRQKKMDNHDSSAIYEIKFHEFVLFILEEKMGATRRTFLTDLARKKGFRVENELSDSVTHIVAENNSRSEVLAWLKEHKMEKTKQFELLDISWLIESMKVGKPVDTKGKYQLAESGEMSANPDPTEGRENELPPTTKTISPYACQRRTTLNNHNQRFTDALEILAENYEFKRNDDTALTFRRAISVLKSLPFEVVSLKDTEGLPWIGDEVKGIMEEIIEVGESLEVQAVLNDERYQSFKRFKSVFGVGVKTADKWYRMGLRTLEDVRSSKTLKLTPMQKAGLCYYEDLARGVTKAEADAISLLVQDAVATFDPDALVEIVGGFRRGKPFGHDVDLLITSPGAEKEQEDQLLQKVTNLWKKQGLLLYGRLEWSQFEDGKLPSGKADALDHFAKCFLILKLYDHKVDKSKWEMPTGSNEGEAKPWKAIRVDLVRCPYDGFAFALLGWTGSRMFRRDLRWYATDEKKMMLDNHALYDLTKKIFLKAKSEEEIFAHLGLEYLEPFERNA

SEQ ID NO: 1883 - DNA, 1587 bp, synthetic construct
  misc_feature 1..1587: note = Variant of terminal deoxynucleotidyltransferase
  source 1..1587: mol_type = other DNA
atgcaccatcatcatcatcatggcggtagcggcagccacggcattcgtaccatcgattcggacttcgggaagaaacgccagaaaaaaatggataaccacgatagttccgccatctatgaaatcaaatttcacgagtttgtgctgttcattctcgaagaaaaaatgggtgcgacgcgtcgtacttttctgacagatttagcccgcaagaaagggttccgcgtcgagaatgaactgtcagacagcgttacccacatcgtggcagaaaataattcacgctctgaagtattggcttggctgaaagaacacaagatggagaagaccaagcaattcgaactgctggatattagctggcttatcgaaagcatgaaagttggtaaaccggtggacaccaaggggaaataccagttggcggaatcgggtgagatgagtgcgaacccagatccgacagagggtcgtgaaaacgagctgcctcctactatgaagaccatttctcagtatgcgtgtcaacgccgcaccaccctgaacaaccataatcaacgttttacggacgcactggaaattcttgcggaaaattacgagttcaaacgcaacgatgatactgcgctggaatttcgtcgtgctgcatccgtgctgaaaagccttccgtttgaggtacgtagcctgaaagacacggaaggattgccctggatcggtgatgaagtcaaagggattatggaagaaatcatcgaggtcggtgaatcgctggaagtgcaggccgtgctcaatgatgagcgctatcaaagcttcaaacgctttaagagtgtctttggagtgggggtgaagacagcagacaagtggtaccgtatgggtctgcgcacgctcgaggatgttcgttccagcaagaccctgaagttgaccccgatgcagaaagcgggtctgtgctattatgaagatcttgctcgcggcgttacgaaagccgaagctgacgcgatttctctgctggttcaggatgcagtcgcaactttcgacccggatgcgctggtggagattgtcggtggatttcgtcgtgggaaacctttcggtcacgacgttgatctgcttatcacatctccgggagctgagaaagagcaagaagaccagctcctgcagaaagtgaccaatctgtggaagaaacaagggttgttgctgtacggtcgtctggaatggagtcagtttgaagatgggaaactcccatccggtaaggctgatgccctggaccatcatgcgaaatgctttctgatcctcaaactttatgatcataaagtggacaaaagcaaatgggaaatgccgacgggttcgaacgagggcgaggccaaaccgtggaaagcaattcgcgtagatctggttcgttgcccctacggcggttttgcgtttgcgttgttgggttggaccggaagccgcatgttccgccgtgatctgcgctggtacgccactgacgagaagaagatgatgctggacaatcatgcgctgtatgacctgaccaagaaaatctttctcgaagctaaatcggaagaggaaattttcgcacatctggggcttgaatacctggaaccgttcgaacgtaacgca

SEQ ID NO: 1884 - protein, 529 aa, synthetic construct
  REGION 1..529: note = Variant of terminal deoxynucleotidyltransferase
MHHHHHHGGSGSHGIRTIDSDFGKKRQKKMDNHDSSAIYEIKFHEFVLFILEEKMGATRRTFLTDLARKKGFRVENELSDSVTHIVAENNSRSEVLAWLKEHKMEKTKQFELLDISWLIESMKVGKPVDTKGKYQLAESGEMSANPDPTEGRENELPPTMKTISQYACQRRTTLNNHNQRFTDALEILAENYEFKRNDDTALEFRRAASVLKSLPFEVRSLKDTEGLPWIGDEVKGIMEEIIEVGESLEVQAVLNDERYQSFKRFKSVFGVGVKTADKWYRMGLRTLEDVRSSKTLKLTPMQKAGLCYYEDLARGVTKAEADAISLLVQDAVATFDPDALVEIVGGFRRGKPFGHDVDLLITSPGAEKEQEDQLLQKVTNLWKKQGLLLYGRLEWSQFEDGKLPSGKADALDHHAKCFLILKLYDHKVDKSKWEMPTGSNEGEAKPWKAIRVDLVRCPYGGFAFALLGWTGSRMFRRDLRWYATDEKKMMLDNHALYDLTKKIFLEAKSEEEIFAHLGLEYLEPFERNA

SEQ ID NO: 1885 - DNA, 1587 bp, synthetic construct
  misc_feature 1..1587: note = Variant of terminal deoxynucleotidyltransferase
  source 1..1587: mol_type = other DNA
atgcaccatcatcatcatcatggcggtagcggcagccacggcattcgtaccatcgattcggacttcgggaagaaacgccagaaaaaaatggataaccacgatagttccgccatctatgaaatcaaatttcacgagtttgtgctgttcattctcgaagagaaaatgggtgcgacgcgtcgtacttttctgacagatttagcccgcaagaaagggttccgcgtcgagaatgaactgtcagacagcgttacccacatcgtggcagaaaataattcacgctctgaagtattggcttggctgaaagaacacaagatggagaagaccaagcaattcgaactgctggatattagctggcttatcgaaagcatgaaagttggtaaaccggtggacaccaaggggaaataccagttggcggaatcgggtgagatgagtgcgaacccagatccgacagagggtcgtgaaaacgagctgcctcctactatgaagaccatttctcagtatgcgtgtcaacgccgcaccaccctgaacaaccataatcaacgttttacggacgcactggaaattcttgcggaaaattacgagttcaaacgcaacgatgatactgcgctggaatttatgcgtgctgcatccgtgctgaaaagccttccgtttgaggtagtgagcctgaaagacacggaaggattgccctggatcggtgatgaagtcaaagggattatggaagaaatcatcgaggtcggtgaatcgctggaagtgcaggccgtgctcaatgatgagcgctatcaaagcttcaaacgctttaagagtgtctttggagtgggggtgaagacagcagacaagtggtaccgtatgggtctgcgcacgctcgaggatgttcgttccagcaagaccctgaagttgaccccgatgcagaaagcgggtctgtgctattatgaagatcttgctcgcggcgttacgaaagccgaagctgacgcgatttctctgctggttcaggatgcagtcgcaactttcgacccggatgcgctggtggagattgtcggtggatttcgtcgtgggaaaccttttggtcacgacgttgatctgcttatcacatctccgggagctgagaaagagcaagaagaccagctcctgcagaaagtgaccaatctgtggaagaaacaagggttgttgctgtacggtcgtctggaatggagtcagtttgaagatgggaaactcccatccggtaaggctgatgccctggacggccatgcgaaatgctttctgatcctcaaactttatgatcataaagtggacaaaagcaaatgggaaatgccgacgggttcgaacatgggcgaggccaaaccgtggaaagcaattcgcgtagatctggttcgttgcccctacgatggttttgcgtttgcgttgttgggttggaccggaagccgcatgttccgccgtgatctgcgctggtacgccgaagacgagaagaagatgatgctggacaatcatgcgctgtatgacctgaccaagaaaatctttctcaaagctaaatcggaagaggaaattttcgcacatctggggcttgaatacctggaaccgttcgaacgtaacgca

SEQ ID NO: 1886 - protein, 529 aa, synthetic construct
  REGION 1..529: note = Variant of terminal deoxynucleotidyltransferase
MHHHHHHGGSGSHGIRTIDSDFGKKRQKKMDNHDSSAIYEIKFHEFVLFILEEKMGATRRTFLTDLARKKGFRVENELSDSVTHIVAENNSRSEVLAWLKEHKMEKTKQFELLDISWLIESMKVGKPVDTKGKYQLAESGEMSANPDPTEGRENELPPTMKTISQYACQRRTTLNNHNQRFTDALEILAENYEFKRNDDTALEFMRAASVLKSLPFEVVSLKDTEGLPWIGDEVKGIMEEIIEVGESLEVQAVLNDERYQSFKRFKSVFGVGVKTADKWYRMGLRTLEDVRSSKTLKLTPMQKAGLCYYEDLARGVTKAEADAISLLVQDAVATFDPDALVEIVGGFRRGKPFGHDVDLLITSPGAEKEQEDQLLQKVTNLWKKQGLLLYGRLEWSQFEDGKLPSGKADALDGHAKCFLILKLYDHKVDKSKWEMPTGSNMGEAKPWKAIRVDLVRCPYDGFAFALLGWTGSRMFRRDLRWYAEDEKKMMLDNHALYDLTKKIFLKAKSEEEIFAHLGLEYLEPFERNA

SEQ ID NO: 1887 - DNA, 1587 bp, synthetic construct
  misc_feature 1..1587: note = Variant of terminal deoxynucleotidyltransferase
  source 1..1587: mol_type = other DNA
atgcaccatcatcatcatcatggcggtagcggcagccacggcattcgtaccatcgattcggacttcgggaagaaacgccagaagaagatggataaccacgatagttccgccatctatgaaatcaaatttcacgagtttgtgctgttcattctcgaagaaaaaatgggtgcgacgcgtcgtacttttctgacagatttagcccgcaagaaagggttccgcgtcgagaatgaactgtcagacagcgttacccacatcgtggcagaaaataattcacgctctgaagtattggcttggctgaaagaacacaagatggagaagaccaagcaattcgaactgctggatattagctggcttatcgaaagcatgaaagttggtaaaccggtggacaccaaggggaaataccagttggcggaatcgggtgagatgagtgcgaacccagatccgacagagggtcgtgaaaacgagctgcctcctactacgaagaccatttctccgtatgcgtgtcaacgccgcaccaccctgaacaaccataataaacgttttacggacgcactggaaattcttgcggaaaattacgagttcaaacgcaacgatgatactgcgctggaatttcgtcgtgctatctccgtgctgaaaagccttccgtttgaggtacgtagcctgaaagacacggaaggattgccctggatcggtgatgaagtcaaagggattatggaagaaatcatcgaggtcggtgaatcgctggaagtgcaggccgtgctcaatgatgagcgctatcaaagcttcaaacgctttaagagtgtctttggagtgggggtgaagacagcagacaagtggtaccgtatgggtctgcgcacgctcgaggatgttcgttccagcaagaccctgaagttgaccccgatgcagaaagcgggtctgtgctattatgaagatcttgctcgcggcgttacgaaagccgaagctgacgcgatttctctgctggttcaggatgcagtcgcaactttcgacccggatgcgctggtggagattgtcggtggatttcgtcgtgggaaaccttttggtcacgacgttgatctgcttatcacatctccgggagctgagaaagagcaagaagaccagctcctgcagaaagtgaccaatctgtggaagaaacaagggttgttgctgtacggtcgtctggaatggagtcagtttgaagatgggaaactcccatccggtaaggctgatgccctggaccatcatgcgaaatgcatcctgatcctcaaactttatgatcataaagtggacaaaagcaaatgggaaatgccgacgggttcgaacatgggcgaggccaaaccgtggaaagcaattcgcgtagatctggttcgttgcccctacgatggttttgcgtttgcgttgttgggttggaccggaagccgcatgttccgccgtgatctgcgctggtacgccactgacgagaagaacatgatgctggacaatcatgcgctgtatgacctgaccaagaaagagtttctcaaagctaaatcggaagaggaaattttcgcacatctggggcttgaatacctggaaccgttcgaacgtaacgca

SEQ ID NO: 1888 - protein, 529 aa, synthetic construct
  REGION 1..529: note = Variant of terminal deoxynucleotidyltransferase
MHHHHHHGGSGSHGIRTIDSDFGKKRQKKMDNHDSSAIYEIKFHEFVLFILEEKMGATRRTFLTDLARKKGFRVENELSDSVTHIVAENNSRSEVLAWLKEHKMEKTKQFELLDISWLIESMKVGKPVDTKGKYQLAESGEMSANPDPTEGRENELPPTTKTISPYACQRRTTLNNHNKRFTDALEILAENYEFKRNDDTALEFRRAISVLKSLPFEVRSLKDTEGLPWIGDEVKGIMEEIIEVGESLEVQAVLNDERYQSFKRFKSVFGVGVKTADKWYRMGLRTLEDVRSSKTLKLTPMQKAGLCYYEDLARGVTKAEADAISLLVQDAVATFDPDALVEIVGGFRRGKPFGHDVDLLITSPGAEKEQEDQLLQKVTNLWKKQGLLLYGRLEWSQFEDGKLPSGKADALDHHAKCILILKLYDHKVDKSKWEMPTGSNMGEAKPWKAIRVDLVRCPYDGFAFALLGWTGSRMFRRDLRWYATDEKNMMLDNHALYDLTKKEFLKAKSEEEIFAHLGLEYLEPFERNA

SEQ ID NO: 1889 - DNA, 1587 bp, synthetic construct
  misc_feature 1..1587: note = Variant of terminal deoxynucleotidyltransferase
  source 1..1587: mol_type = other DNA
atgcaccatcatcatcatcatggcggtagcggcagccacggcattcgtaccatcgattcggacttcgggaagaaacgccagaaaaaaatggataaccacgatagttccgccatctatgaaatcaaatttcacgagtttgtgctgttcattctcgaagaaaaaatgggtgcgacgcgtcgtacttttctgacagatttagcccgcaagaaagggttccgcgtcgagaatgaactgtcagacagcgttacccacatcgtggcagaaaataattcacgctctgaagtattggcttggctgaaagaacacaagatggagaagaccaagcaattcgaactgctggatattagctggcttatcgaaagcatgaaagttggtaaaccggtggacaccaaggggaaataccagttggcggaatcgggtgagatgagtgcgaacccagatccgacagagggtcgtgaaaacgagctgcctcctactacgaagaccatttctcagtatgcgtgtcaacgccgcaccaccctgaacaaccataatcaacgttttacggacgcactggaaattcttgcggaaaattacgagttcaaacgcaacgatgatactgcgctggaatttcgtcgtgctgcatccgtgctgaaaagccttccgtttgaggtagttagcctgaaagacacggaaggattgccctggatcggtgatgaagtcaaagggattatggaagaaatcatcgaggtcggtgaatcgctggaagtgcaggccgtgctcaatgatgagcgctatcaaagcttcaaacgctttaagagtgtctttggagtgggggtgaagacagcagacaagtggtaccgtatgggtctgcgcacgctcgaggatgttcgttccagcaagaccctgaagttgaccccgatgcagaaagcgggtctgtgctattatgaagatcttgctcgcggcgttacgaaagccgaagctgacgcgatttctctgctggttcaggatgcagtcgcaactttcgacccggatgcgctggtggagattgtcggtggatttcgtcgtgggaaacctcagggtcacgacgttgatctgcttatcacatctccgggagctgagaaagagcaagaagaccagctcctgcagaaagtgaccaatctgtggaagaaacaagggttgttgctgtacggtcgtctggaatggagtcagtttgaagatgggaaactcccatccggtaaggctgatgccctggaccatttcgcgaaatgctttctgatcctcaaactttatgatcataaagtggacaaaagcaaatgggaaatgccgacgggttcgaacgagggcgaggccaaaccgtggaaagcaattcgcgtagatctggttcgttgcccctacgatggttttgcgtttgcgttgttgggttggaccggaagccgcatgttccgccgtgatctgcgctggtacgccactgacgagaagaagatgatgctggacaatcatgccctgtatgacctgaccaagaaaatctttctcaaagctaaatcggaagaggaaattttcgcacatctggggcttgaatacctggaaccgttcgaacgtaacgca

SEQ ID NO: 1890 - protein, 529 aa, synthetic construct
  REGION 1..529: note = Variant of terminal deoxynucleotidyltransferase
MHHHHHHGGSGSHGIRTIDSDFGKKRQKKMDNHDSSAIYEIKFHEFVLFILEEKMGATRRTFLTDLARKKGFRVENELSDSVTHIVAENNSRSEVLAWLKEHKMEKTKQFELLDISWLIESMKVGKPVDTKGKYQLAESGEMSANPDPTEGRENELPPTTKTISQYACQRRTTLNNHNQRFTDALEILAENYEFKRNDDTALEFRRAASVLKSLPFEVVSLKDTEGLPWIGDEVKGIMEEIIEVGESLEVQAVLNDERYQSFKRFKSVFGVGVKTADKWYRMGLRTLEDVRSSKTLKLTPMQKAGLCYYEDLARGVTKAEADAISLLVQDAVATFDPDALVEIVGGFRRGKPQGHDVDLLITSPGAEKEQEDQLLQKVTNLWKKQGLLLYGRLEWSQFEDGKLPSGKADALDHFAKCFLILKLYDHKVDKSKWEMPTGSNEGEAKPWKAIRVDLVRCPYDGFAFALLGWTGSRMFRRDLRWYATDEKKMMLDNHALYDLTKKIFLKAKSEEEIFAHLGLEYLEPFERNA

SEQ ID NO: 1891 - DNA, 1587 bp, synthetic construct
  misc_feature 1..1587: note = Variant of terminal deoxynucleotidyltransferase
  source 1..1587: mol_type = other DNA
atgcaccatcatcatcatcatggcggtagcggcagccacggcattcgtaccatcgattcggacttcgggaagaaacgccagaaaaaaatggataaccacgatagttccgccatctatgaaatcaaatttcacgagtttgtgctgttcattctcgaagaaaaaatgggtgcgacgcgtcgtacttttctgacagatttagcccgcaagaaagggttccgcgtcgagaatgaactgtcagacagcgttacccacatcgtggcagaaaataattcacgctctgaagtattggcttggctgaaagaacacaagatggagaagaccaagcaattcgaactgctggatattagctggcttatcgaaagcatgaaagttggtaaaccggtggacaccaaggggaaataccagttggcggaatcgggtgagatgagtgcgaacccagatccgacagagggtcgtgaaaacgagctgcctcctactatgaagaccatttctccgtatgcgtgtcaacgccgcaccaccctgaacaaccataatcaacgttttacggacgcactggaaattcttgcggaaaattacgagttcaaacgcaacgatgatactgcgctgacctttcgtcgtgctatctccgtgctgaaaagccttccgtttgaggtagtgagcctgaaagacacggaaggattgccctggatcggtgatgaagtcaaagggattatggaagaaatcatcgaggtcggtgaatcgctggaagtgcaggccgtgctcaatgatgagcgctatcaaagcttcaaacgctttaagagtgtctttggagtgggggtgaagacagcagacaagtggtaccgtatgggtctgcgcacgctcgaggatgttcgttccagcaagaccctgaagttgaccccgatgcagaaagcgggtctgtgctattatgaagatcttgctcgcggcgttacgaaagccgaagctgacgcgatttctctgctggttcaggatgcagtcgcaactttcgacccggatgcgctggtggagattgtcggtggatttcgtcgtgggaaaccttttggtcacgacgttgatctgcttatcacatctccgggagctgagaaagagcaagaagaccagctcctgcagaaagtgaccaatctgtggaagaaacaagggttgttgctgtacggtcgtctggaatggagtcagtttgaagatgggaaactcccatccggtaaggctgatgccctggaccatttcgcgaaatgctttctgatcctcaaactttatgatcataaagtggacaaaagcaaatgggaaatgccgacgggttcgaacgaaggcgaggccaaaccgtggaaagcaattcgcgtagatctggttcgttgcccctacgacggttttgcgtttgcgttgttgggttggaccggaagccgcatgttccgccgtgatctgcgctggtacgccaccgacgagaagaagatgatgctggacaatcatgcgctgtatgacctgaccaagaaaatctttctcaaagctaaatcggaagaggaaattttcgcacatctggggcttgaatacctggaaccgttcgaacgtaacgca

SEQ ID NO: 1892 - protein, 529 aa, synthetic construct
  REGION 1..529: note = Variant of terminal deoxynucleotidyltransferase
MHHHHHHGGSGSHGIRTIDSDFGKKRQKKMDNHDSSAIYEIKFHEFVLFILEEKMGATRRTFLTDLARKKGFRVENELSDSVTHIVAENNSRSEVLAWLKEHKMEKTKQFELLDISWLIESMKVGKPVDTKGKYQLAESGEMSANPDPTEGRENELPPTMKTISPYACQRRTTLNNHNQRFTDALEILAENYEFKRNDDTALTFRRAISVLKSLPFEVVSLKDTEGLPWIGDEVKGIMEEIIEVGESLEVQAVLNDERYQSFKRFKSVFGVGVKTADKWYRMGLRTLEDVRSSKTLKLTPMQKAGLCYYEDLARGVTKAEADAISLLVQDAVATFDPDALVEIVGGFRRGKPFGHDVDLLITSPGAEKEQEDQLLQKVTNLWKKQGLLLYGRLEWSQFEDGKLPSGKADALDHFAKCFLILKLYDHKVDKSKWEMPTGSNEGEAKPWKAIRVDLVRCPYDGFAFALLGWTGSRMFRRDLRWYATDEKKMMLDNHALYDLTKKIFLKAKSEEEIFAHLGLEYLEPFERNA

SEQ ID NO: 1893 - DNA, 1587 bp, synthetic construct
  misc_feature 1..1587: note = Variant of terminal deoxynucleotidyltransferase
  source 1..1587: mol_type = other DNA
atgcaccatcatcatcatcatggcggtagcggcagccacggcattcgtaccatcgattcggacttcgggaagaaacgccagaaaaaaatggataaccacgatagttccgccatctatgaaatcaaatttcacgagtttgtgctgttcattctcgaagagaaaatgggtgcgacgcgtcgtacttttctgacagatttagcccgcaagaaagggttccgcgtcgagaatgaactgtcagacagcgttacccacatcgtggcagaaaataattcacgctctgaagtattggcttggctgaaagaacacaagatggagaagaccaagcaattcgaactgctggatattagctggcttatcgaaagcatgaaagttggtaaaccggtggacaccaaggggaaataccagttggcggaatcgggtgagatgagtgcgaacccagatccgacagagggtcgtgaaaacgagctgcctcctactacgaagaccatttctcagtatgcgtgtcaacgccgcaccaccctgaacaaccataatcaacgttttacggacgcactggaaattcttgcggaaaattacgagttcaaacgcaacgatgatactgcgctggaatttatgcgtgctgcatccgtgctgaaaagccttccgtttgaggtacgtagcctgaaagacacggaaggattgccctggatcggtgatgaagtcaaagggattatggaagaaatcatcgaggtcggtgaatcgctggaagtgcaggccgtgctcaatgatgagcgctatcaaagcttcaaacgctttaagagtgtctttggagtgggggtgaagacagcagacaagtggtaccgtatgggtctgcgcacgctcgaggatgttcgttccagcaagaccctgaagttgaccccgatgcagaaagcgggtctgtgctattatgaagatcttgctcgcggcgttacgaaagccgaagctgacgcgatttctctgctggttcaggatgcagtcgcaactttcgacccggatgcgctggtggagattgtcggtggatttcgtcgtgggaaacctttcggtcacgacgttgatctgcttatcacatctccgggagctgagaaagagcaagaagaccagctcctgcataaagtgaccaatctgtggaagaaacaagggttgttgctgtacggtcgtctggaatggagtcagtttgaagatgggaaactcccatccggtaaggctgatgccctggaccatttcgcgaaatgctttctgatcctcaaactttatgatcataaagtggacaaaagcaaatgggaaatgccgacgggttcgaacatgggcgaggccaaaccgtggaaagcaattcgcgtagatctggttcgttgcccctacgatggttttgcgtttgcgttgttgggttggaccggaagccgcatgttccgccgtgatctgcgctggtacgccaccgacgagaagaagatgatgctggacaatcatgcgctgtatgacctgaccaagaaaatctttctcaaagctaaatcggaagaggaaattttcgcacatctggggcttgaatacctggaaccgttcgaacgtaacgca

SEQ ID NO: 1894 - protein, 529 aa, synthetic construct
  REGION 1..529: note = Variant of terminal deoxynucleotidyltransferase
MHHHHHHGGSGSHGIRTIDSDFGKKRQKKMDNHDSSAIYEIKFHEFVLFILEEKMGATRRTFLTDLARKKGFRVENELSDSVTHIVAENNSRSEVLAWLKEHKMEKTKQFELLDISWLIESMKVGKPVDTKGKYQLAESGEMSANPDPTEGRENELPPTTKTISQYACQRRTTLNNHNQRFTDALEILAENYEFKRNDDTALEFMRAASVLKSLPFEVRSLKDTEGLPWIGDEVKGIMEEIIEVGESLEVQAVLNDERYQSFKRFKSVFGVGVKTADKWYRMGLRTLEDVRSSKTLKLTPMQKAGLCYYEDLARGVTKAEADAISLLVQDAVATFDPDALVEIVGGFRRGKPFGHDVDLLITSPGAEKEQEDQLLHKVTNLWKKQGLLLYGRLEWSQFEDGKLPSGKADALDHFAKCFLILKLYDHKVDKSKWEMPTGSNMGEAKPWKAIRVDLVRCPYDGFAFALLGWTGSRMFRRDLRWYATDEKKMMLDNHALYDLTKKIFLKAKSEEEIFAHLGLEYLEPFERNA

SEQ ID NO: 1895 - DNA, 1587 bp, synthetic construct
  misc_feature 1..1587: note = Variant of terminal deoxynucleotidyltransferase
  source 1..1587: mol_type = other DNA
atgcaccatcatcatcatcatggcggtagcggcagccacggcattcgtaccatcgattcggacttcgggaagaaacgccagaaaaaaatggataaccacgatagttccgccatctatgaaatcaaatttcacgagtttgtgctgttcattctcgaagagaaaatgggtgcgacgcgtcgtacttttctgacagatttagcccgcaagaaagggttccgcgtcgagaatgaactgtcagacagcgttacccacatcgtggcagaaaataattcacgctctgaagtattggcttggctgaaagaacacaagatggagaagaccaagcaattcgaactgctggatattagctggcttatcgaaagcatgaaagttggtaaaccggtggacaccaaggggaaataccagttggcggaatcgggtgagatgagtgcgaacccagatccgacagagggtcgtgaaaacgagctgcctcctactatgaagaccatttctccgtatgcgtgtcaacgccgcaccaccctgaacaaccataataaacgttttacggacgcactggaaattcttgcggaaaattacgagttcaaacgcaacgatgatactgcgctggaatttatgcgtgctatctccgtgctgaaaagccttccgtttgaggtagtgagcctgaaagacacggaaggattgccctggatcggtgatgaagtcaaagggattatggaagaaatcatcgaggtcggtgaatcgctggaagtgcaggccgtgctcaatgatgagcgctatcaaagcttcaaacgctttaagagtgtctttggagtgggggtgaagacagcagacaagtggtaccgtatgggtctgcgcacgctcgaggatgttcgttccagcaagaccctgaagttgaccccgatgcagaaagcgggtctgctgtattatgaagatcttgctcgcggcgttacgaaagccgaagctgacgcgatttctctgctggttcaggatgcagtcgcaactttcgacccggatgcgctggtggagattgtcggtggatttcgtcgtgggaaacctttcggtcacgacgttgatctgcttatcacatctccgggagctgagaaagagcaagaagaccagctcctgcataaagtgaccaatctgtggaagaaacaagggttgttgctgtacggtcgtctggaatggagtcagtttgaagatgggaaactcccatccggtaaggctgatgccctggacggcttcgcgaaatgctttctgatcctcaaactttatgatcataaagtggacaaaagcaaatgggaaatgccgacgggttcgaacgaaggcgaggccaaaccgtggaaagcaattcgcgtagatctggttcgttgcccctacgatggttttgcgtttgcgttgttgggttggaccggaagccgcatgttccgccgtgatctgcgctggtacgccaccgacgagaagaagatgatgctggacaatcatggcctgtatgacctgaccaagaaaatctttctcaaagctaaatcggaagaggaaattttcgcacatctggggcttgaatacctggaaccgttcgaacgtaacgca

SEQ ID NO: 1896 - protein, 529 aa, synthetic construct
  REGION 1..529: note = Variant of terminal deoxynucleotidyltransferase
MHHHHHHGGSGSHGIRTIDSDFGKKRQKKMDNHDSSAIYEIKFHEFVLFILEEKMGATRRTFLTDLARKKGFRVENELSDSVTHIVAENNSRSEVLAWLKEHKMEKTKQFELLDISWLIESMKVGKPVDTKGKYQLAESGEMSANPDPTEGRENELPPTMKTISPYACQRRTTLNNHNKRFTDALEILAENYEFKRNDDTALEFMRAISVLKSLPFEVVSLKDTEGLPWIGDEVKGIMEEIIEVGESLEVQAVLNDERYQSFKRFKSVFGVGVKTADKWYRMGLRTLEDVRSSKTLKLTPMQKAGLLYYEDLARGVTKAEADAISLLVQDAVATFDPDALVEIVGGFRRGKPFGHDVDLLITSPGAEKEQEDQLLHKVTNLWKKQGLLLYGRLEWSQFEDGKLPSGKADALDGFAKCFLILKLYDHKVDKSKWEMPTGSNEGEAKPWKAIRVDLVRCPYDGFAFALLGWTGSRMFRRDLRWYATDEKKMMLDNHGLYDLTKKIFLKAKSEEEIFAHLGLEYLEPFERNA

SEQ ID NO: 1897 - DNA, 1587 bp, synthetic construct
  misc_feature 1..1587: note = Variant of terminal deoxynucleotidyltransferase
  source 1..1587: mol_type = other DNA
atgcaccatcatcatcatcatggcggtagcggcagccacggcattcgtaccatcgattcggacttcgggaagaaacgccagaagaagatggataaccacgatagttccgccatctatgaaatcaaatttcacgagtttgtgctgttcattctcgaagagaaaatgggtgcgacgcgtcgtacttttctgacagatttagcccgcaagaaagggttccgcgtcgagaatgaactgtcagacagcgttacccacatcgtggcagaaaataattcacgctctgaagtattggcttggctgaaagaacacaagatggagaagaccaagcaattcgaactgctggatattagctggcttatcgaaagcatgaaagttggtaaaccggtggacaccaaggggaaataccagttggcggaatcgggtgagatgagtgcgaacccagatccgacagagggtcgtgaaaacgagctgcctcctactacgaagaccatttctcagtatgcgtgtcaacgccgcaccaccctgaacaaccataataaacgttttacggacgcactggaaattcttgcggaaaattacgagttcaaacgcaacgatgatactgcgctggaatttatgcgtgctgcatccgtgctgaaaagccttccgtttgaggtagttagcctgaaagacacggaaggattgccctggatcggtgatgaagtcaaagggattatggaagaaatcatcgaggtcggtgaatcgctggaagtgcaggccgtgctcaatgatgagcgctatcaaagcttcaaacgctttaagagtgtctttggagtgggggtgaagacagcagacaagtggtaccgtatgggtctgcgcacgctcgaggatgttcgttccagcaagaccctgaagttgaccccgatgcagaaagcgggtctgtgctattatgaagatcttgctcgcggcgttacgaaagccgaagctgacgcgatttctaccctggttcaggatgcagtcgcaactttcgacccggatgcgctggtggagattgtcggtggatttcgtcgtgggaaacctcagggtcacgacgttgatctgcttatcacatctccgggagctgagaaagagcaagaagaccagctcctgcataaagtgaccaatctgtggaagaaacaagggttgttgctgtacggtcgtctggaatggagtcagtttgaagatgggaaactcccatccggtaaggctgatgccctggaccattttgcgaaatgctttctgatcctcaaactttatgatcataaagtggacaaaagcaaatgggaaatgccgacgggttcgaacgagggcgaggccaaaccgtggaaagcaattcgcgtagatctggttcgttgcccctacgatggttttgcgtttgcgttgttgggttggaccggaagccgcatgttccgccgtgatctgcgctggtacgccgaagacgagaagaagatgatgctggacaatcatgcgctgtatgacctgaccaagaaaatctttctcaaagctaaatcggaagaggaaattttcgcacatctggggcttgaatacctggaaccgttcgaacgtaacgca

SEQ ID NO: 1898 - protein, 529 aa, synthetic construct
  REGION 1..529: note = Variant of terminal deoxynucleotidyltransferase
MHHHHHHGGSGSHGIRTIDSDFGKKRQKKMDNHDSSAIYEIKFHEFVLFILEEKMGATRRTFLTDLARKKGFRVENELSDSVTHIVAENNSRSEVLAWLKEHKMEKTKQFELLDISWLIESMKVGKPVDTKGKYQLAESGEMSANPDPTEGRENELPPTTKTISQYACQRRTTLNNHNKRFTDALEILAENYEFKRNDDTALEFMRAASVLKSLPFEVVSLKDTEGLPWIGDEVKGIMEEIIEVGESLEVQAVLNDERYQSFKRFKSVFGVGVKTADKWYRMGLRTLEDVRSSKTLKLTPMQKAGLCYYEDLARGVTKAEADAISTLVQDAVATFDPDALVEIVGGFRRGKPQGHDVDLLITSPGAEKEQEDQLLHKVTNLWKKQGLLLYGRLEWSQFEDGKLPSGKADALDHFAKCFLILKLYDHKVDKSKWEMPTGSNEGEAKPWKAIRVDLVRCPYDGFAFALLGWTGSRMFRRDLRWYAEDEKKMMLDNHALYDLTKKIFLKAKSEEEIFAHLGLEYLEPFERNA

SEQ ID NO: 1899 - DNA, 1587 bp, synthetic construct
  misc_feature 1..1587: note = Variant of terminal deoxynucleotidyltransferase
  source 1..1587: mol_type = other DNA
atgcaccatcatcatcatcatggcggtagcggcagccacggcattcgtaccatcgattcggacttcgggaagaaacgccagaaaaaaatggataaccacgatagttccgccatctatgaaatcaaatttcacgagtttgtgctgttcattctcgaagaaaaaatgggtgcgacgcgtcgtacttttctgacagatttagcccgcaagaaagggttccgcgtcgagaatgaactgtcagacagcgttacccacatcgtggcagaaaataattcacgctctgaagtattggcttggctgaaagaacacaagatggagaagaccaagcaattcgaactgctggatattagctggcttatcgaaagcatgaaagttggtaaaccggtggacaccaaggggaaataccagttggcggaatcgggtgagatgagtgcgaacccagatccgacagagggtcgtgaaaacgagctgcctcctactatgaagaccatttctccgtatgcgtgtcaacgccgcaccaccctgaacaaccataatcaacgttttacggacgcactggaaattcttgcggaaaattacgagttcaaacgcaacgatgatactgcgctgacctttcgtcgtgctatctccgtgctgaaaagccttccgtttgaggtagttagcctgaaagacacggaaggattgccctggatcggtgatgaagtcaaagggattatggaagaaatcatcgaggtcggtgaatcgctggaagtgcaggccgtgctcaatgatgagcgctatcaaagcttcaaacgctttaagagtgtctttggagtgggggtgaagacagcagacaagtggtaccgtatgggtctgcgcacgctcgaggatgttcgttccagcaagaccctgaagttgaccccgatgcagaaagcgggtctgtgctattatgaagatcttgctcgcggcgttacgaaagccgaagctgacgcgatttctctgctggttcaggatgcagtcgcaactttcgacccggatgcgctggtggagattgtcggtggatttcgtcgtgggaaaccttttggtcacgacgttgatctgcttatcacatctccgggagctgagaaagagcaagaagaccagctcctgcagaaagtgaccaatctgtggaagaaacaagggttgttgctgtacggtcgtctggaatggagtcagtttgaagatgggaaactcccatccggtaaggctgatgccctggaccatcatgcgaaatgctttctgatcctcaaactttatgatcataaagtggacaaaagcaaatgggaaatgccgacgggttcgaacatgggcgaggccaaaccgtggaaagcaattcgcgtagatctggttcgttgcccctacgatggttttgcgtttgcgttgttgggttggaccggaagccgcatgttccgccgtgatctgcgctggtacgccaccgacgagaagaagatgatgctggacaatcatggcctgtatgacctgaccaagaaaatctttctcaaagctaaatcggaagaggaaattttcgcacatctggggcttgaatacctggaaccgttcgaacgtaacgca

SEQ ID NO: 1900 - protein, 529 aa, synthetic construct
  REGION 1..529: note = Variant of terminal deoxynucleotidyltransferase
MHHHHHHGGSGSHGIRTIDSDFGKKRQKKMDNHDSSAIYEIKFHEFVLFILEEKMGATRRTFLTDLARKKGFRVENELSDSVTHIVAENNSRSEVLAWLKEHKMEKTKQFELLDISWLIESMKVGKPVDTKGKYQLAESGEMSANPDPTEGRENELPPTMKTISPYACQRRTTLNNHNQRFTDALEILAENYEFKRNDDTALTFRRAISVLKSLPFEVVSLKDTEGLPWIGDEVKGIMEEIIEVGESLEVQAVLNDERYQSFKRFKSVFGVGVKTADKWYRMGLRTLEDVRSSKTLKLTPMQKAGLCYYEDLARGVTKAEADAISLLVQDAVATFDPDALVEIVGGFRRGKPFGHDVDLLITSPGAEKEQEDQLLQKVTNLWKKQGLLLYGRLEWSQFEDGKLPSGKADALDHHAKCFLILKLYDHKVDKSKWEMPTGSNMGEAKPWKAIRVDLVRCPYDGFAFALLGWTGSRMFRRDLRWYATDEKKMMLDNHGLYDLTKKIFLKAKSEEEIFAHLGLEYLEPFERNA

SEQ ID NO: 1901 - DNA, 1587 bp, synthetic construct
  misc_feature 1..1587: note = Variant of terminal deoxynucleotidyltransferase
  source 1..1587: mol_type = other DNA
atgcaccatcatcatcatcatggcggtagcggcagccacggcattcgtaccatcgattcggacttcgggaagaaacgccagaaaaaaatggataaccacgatagttccgccatctatgaaatcaaatttcacgagtttgtgctgttcattctcgaagagaaaatgggtgcgacgcgtcgtacttttctgacagatttagcccgcaagaaagggttccgcgtcgagaatgaactgtcagacagcgttacccacatcgtggcagaaaataattcacgctctgaagtattggcttggctgaaagaacacaagatggagaagaccaagcaattcgaactgctggatattagctggcttatcgaaagcatgaaagttggtaaaccggtggacaccaaggggaaataccagttggcggaatcgggtgagatgagtgcgaacccagatccgacagagggtcgtgaaaacgagctgcctcctactacgaagaccatttctccgtatgcgtgtcaacgccgcaccaccctgaacaaccataataaacgttttacggacgcactggaaattcttgcggaaaattacgagttcaaacgcaacgatgatactgcgctgacctttcgtcgtgctatctccgtgctgaaaagccttccgtttgaggtagttagcctgaaagacacggaaggattgccctggatcggtgatgaagtcaaagggattatggaagaaatcatcgaggtcggtgaatcgctggaagtgcaggccgtgctcaatgatgagcgctatcaaagcttcaaacgctttaagagtgtctttggagtgggggtgaagacagcagacaagtggtaccgtatgggtctgcgcacgctcgaggatgttcgttccagcaagaccctgaagttgaccccgatgcagaaagcgggtctgtgctattatgaagatcttgctcgcggcgttacgaaagccgaagctgacgcgatttctctgctggttcaggatgcagtcgcaactttcgacccggatgcgctggtggagattgtcggtggatttcgtcgtgggaaaccttttggtcacgacgttgatctgcttatcacatctccgggagctgagaaagagcaagaagaccagctcctgcagaaagtgaccaatctgtggaagaaacaagggttgttgctgtacggtcgtctggaatggagtcagtttgaagatgggaaactcccatccggtaaggctgatgccctggacggcttcgcgaaatgctttctgatcctcaaactttatgatcataaagtggacaaaagcaaatgggaaatgccgacgggttcgaacatgggcgaggccaaaccgtggaaagcaattcgcgtagatctggttcgttgcccctacgatggttttgcgtttgcgttgttgggttggaccggaagccgcatgttccgccgtgatctgcgctggtacgccactgacgagaagaagatgatgctggacaatcatgcgctgtatgacctgaccaagaaaatctttctcaaagctaaatcggaagaggaaattttcgcacatctggggcttgaatacctggaaccgttcgaacgtaacgca

SEQ ID NO: 1902 - protein, 529 aa, synthetic construct
  REGION 1..529: note = Variant of terminal deoxynucleotidyltransferase
MHHHHHHGGSGSHGIRTIDSDFGKKRQKKMDNHDSSAIYEIKFHEFVLFILEEKMGATRRTFLTDLARKKGFRVENELSDSVTHIVAENNSRSEVLAWLKEHKMEKTKQFELLDISWLIESMKVGKPVDTKGKYQLAESGEMSANPDPTEGRENELPPTTKTISPYACQRRTTLNNHNKRFTDALEILAENYEFKRNDDTALTFRRAISVLKSLPFEVVSLKDTEGLPWIGDEVKGIMEEIIEVGESLEVQAVLNDERYQSFKRFKSVFGVGVKTADKWYRMGLRTLEDVRSSKTLKLTPMQKAGLCYYEDLARGVTKAEADAISLLVQDAVATFDPDALVEIVGGFRRGKPFGHDVDLLITSPGAEKEQEDQLLQKVTNLWKKQGLLLYGRLEWSQFEDGKLPSGKADALDGFAKCFLILKLYDHKVDKSKWEMPTGSNMGEAKPWKAIRVDLVRCPYDGFAFALLGWTGSRMFRRDLRWYATDEKKMMLDNHALYDLTKKIFLKAKSEEEIFAHLGLEYLEPFERNA

SEQ ID NO: 1903 - DNA, 1587 bp, synthetic construct
  misc_feature 1..1587: note = Variant of terminal deoxynucleotidyltransferase
  source 1..1587: mol_type = other DNA
atgcaccatcatcatcatcatggcggtagcggcagccacggcattcgtaccatcgattcggacttcgggaagaaacgccagaagaagatggataaccacgatagttccgccatctatgaaatcaaatttcacgagtttgtgctgttcattctcgaagagaaaatgggtgcgacgcgtcgtacttttctgacagatttagcccgcaagaaagggttccgcgtcgagaatgaactgtcagacagcgttacccacatcgtggcagaaaataattcacgctctgaagtattggcttggctgaaagaacacaagatggagaagaccaagcaattcgaactgctggatattagctggcttatcgaaagcatgaaagttggtaaaccggtggacaccaaggggaaataccagttggcggaatcgggtgagatgagtgcgaacccagatccgacagagggtcgtgaaaacgagctgcctcctactacgaagaccatttctcagtatgcgtgtcaacgccgcaccaccctgaacaaccataatcaacgttttacggacgcactggaaattcttgcggaaaattacgagttcaaacgcaacgatgatactgcgctgacttttatgcgtgctgcatccgtgctgaaaagccttccgtttgaggtagttagcctgaaagacacggaaggattgccctggatcggtgatgaagtcaaagggattatggaagaaatcatcgaggtcggtgaatcgctggaagtgcaggccgtgctcaatgatgagcgctatcaaagcttcaaacgctttaagagtgtctttggagtgggggtgaagacagcagacaagtggtaccgtatgggtctgcgcacgctcgaggatgttcgttccagcaagaccctgaagttgaccccgatgcagaaagcgggtctgtgctattatgaagatcttgctcgcggcgttacgaaagccgaagctgacgcgatttctctgctggttcaggatgcagtcgcaactttcgacccggatgcgctggtggagattgtcggtggatttcgtcgtgggaaaccttttggtcacgacgttgatctgcttatcacatctccgggagctgagaaagagcaagaagaccagctcctgcagaaagtgaccaatctgtggaagaaacaagggttgttgctgtacggtcgtctggaatggagtcagtttgaagatgggaaactcccatccggtaaggctgatgccctggaccattttgcgaaatgctttctgatcctcaaactttatgatcataaagtggacaaaagcaaatgggaaatgccgacgggttcgaacgaaggcgaggccaaaccgtggaaagcaattcgcgtagatctggttcgttgcccctacgacggttttgcgtttgcgttgttgggttggaccggaagccgcatgttccgccgtgatctgcgctggtacgccaccgacgagaagaacatgatgctggacaatcatgcgctgtatgacctgaccaagaaaatctttctcgaagctaaatcggaagaggaaattttcgcacatctggggcttgaatacctggaaccgttcgaacgtaacgca

SEQ ID NO: 1904 - protein, 529 aa, synthetic construct
  REGION 1..529: note = Variant of terminal deoxynucleotidyltransferase
MHHHHHHGGSGSHGIRTIDSDFGKKRQKKMDNHDSSAIYEIKFHEFVLFILEEKMGATRRTFLTDLARKKGFRVENELSDSVTHIVAENNSRSEVLAWLKEHKMEKTKQFELLDISWLIESMKVGKPVDTKGKYQLAESGEMSANPDPTEGRENELPPTTKTISQYACQRRTTLNNHNQRFTDALEILAENYEFKRNDDTALTFMRAASVLKSLPFEVVSLKDTEGLPWIGDEVKGIMEEIIEVGESLEVQAVLNDERYQSFKRFKSVFGVGVKTADKWYRMGLRTLEDVRSSKTLKLTPMQKAGLCYYEDLARGVTKAEADAISLLVQDAVATFDPDALVEIVGGFRRGKPFGHDVDLLITSPGAEKEQEDQLLQKVTNLWKKQGLLLYGRLEWSQFEDGKLPSGKADALDHFAKCFLILKLYDHKVDKSKWEMPTGSNEGEAKPWKAIRVDLVRCPYDGFAFALLGWTGSRMFRRDLRWYATDEKNMMLDNHALYDLTKKIFLEAKSEEEIFAHLGLEYLEPFERNA

SEQ ID NO: 1905 - DNA, 1587 bp, synthetic construct
  misc_feature 1..1587: note = Variant of terminal deoxynucleotidyltransferase
  source 1..1587: mol_type = other DNA
atgcaccatcatcatcatcatggcggtagcggcagccacggcattcgtaccatcgattcggacttcgggaagaaacgccagaagaagatggataaccacgatagttccgccatctatgaaatcaaatttcacgagtttgtgctgttcattctcgaagagaaaatgggtgcgacgcgtcgtacttttctgacagatttagcccgcaagaaagggttccgcgtcgagaatgaactgtcagacagcgttacccacatcgtggcagaaaataattcacgctctgaagtattggcttggctgaaagaacacaagatggagaagaccaagcaattcgaactgctggatattagctggcttatcgaaagcatgaaagttggtaaaccggtggacaccaaggggaaataccagttggcggaatcgggtgagatgagtgcgaacccagatccgacagagggtcgtgaaaacgagctgcctcctactacgaagaccatttctcagtatgcgtgtcaacgccgcaccaccctgaacaaccataataaacgttttacggacgcactggaaattcttgcggaaaattacgagttcaaacgcaacgatgatactgcgctgacctttatgcgtgctgcatccgtgctgaaaagccttccgtttgaggtagtgagcctgaaagacacggaaggattgccctggatcggtgatgaagtcaaagggattatggaagaaatcatcgaggtcggtgaatcgctggaagtgcaggccgtgctcaatgatgagcgctatcaaagcttcaaacgctttaagagtgtctttggagtgggggtgaagacagcagacaagtggtaccgtatgggtctgcgcacgctcgaggatgttcgttccagcaagaccctgaagttgaccccgatgcagaaagcgggtctgtgctattatgaagatcttgctcgcggcgttacgaaagccgaagctgacgcgatttctctgctggttcaggatgcagtcgcaactttcgacccggatgcgctggtggagattgtcggtggatttcgtcgtgggaaacctcagggtcacgacgttgatctgcttatcacatctccgggagctgagaaagagcaagaagaccagctcctgcagaaagtgaccaatctgtggaagaaacaagggttgttgctgtacggtcgtctggaatggagtcagtttgaagatgggaaactcccatccggtaaggctgatgccctggaccattttgcgaaatgctttctgatcctcaaactttatgatcataaagtggacaaaagcaaatgggaaatgccgacgggttcgaacgagggcgaggccaaaccgtggaaagcaattcgcgtagatctggttcgttgcccctacggcggttttgcgtttgcgttgttgggttggaccggaagccgcatgttccgccgtgatctgcgctggtacgccaccgacgagaagaagatgatgctggacaatcatgcgctgtatgacctgaccaagaaaatctttctcaaagctaaatcggaagaggaaattttcgcacatctggggcttgaatacctggaaccgttcgaacgtaacgca

SEQ ID NO: 1906 - protein, 529 aa, synthetic construct
  REGION 1..529: note = Variant of terminal deoxynucleotidyltransferase
MHHHHHHGGSGSHGIRTIDSDFGKKRQKKMDNHDSSAIYEIKFHEFVLFILEEKMGATRRTFLTDLARKKGFRVENELSDSVTHIVAENNSRSEVLAWLKEHKMEKTKQFELLDISWLIESMKVGKPVDTKGKYQLAESGEMSANPDPTEGRENELPPTTKTISQYACQRRTTLNNHNKRFTDALEILAENYEFKRNDDTALTFMRAASVLKSLPFEVVSLKDTEGLPWIGDEVKGIMEEIIEVGESLEVQAVLNDERYQSFKRFKSVFGVGVKTADKWYRMGLRTLEDVRSSKTLKLTPMQKAGLCYYEDLARGVTKAEADAISLLVQDAVATFDPDALVEIVGGFRRGKPQGHDVDLLITSPGAEKEQEDQLLQKVTNLWKKQGLLLYGRLEWSQFEDGKLPSGKADALDHFAKCFLILKLYDHKVDKSKWEMPTGSNEGEAKPWKAIRVDLVRCPYGGFAFALLGWTGSRMFRRDLRWYATDEKKMMLDNHALYDLTKKIFLKAKSEEEIFAHLGLEYLEPFERNA

SEQ ID NO: 1907 - DNA, 1587 bp, synthetic construct
  misc_feature 1..1587: note = Variant of terminal deoxynucleotidyltransferase
  source 1..1587: mol_type = other DNA
atgcaccatcatcatcatcatggcggtagcggcagccacggcattcgtaccatcgattcggacttcgggaagaaacgccagaaaaaaatggataaccacgatagttccgccatctatgaaatcaaatttcacgagtttgtgctgttcattctcgaagaaaaaatgggtgcgacgcgtcgtacttttctgacagatttagcccgcaagaaagggttccgcgtcgagaatgaactgtcagacagcgttacccacatcgtggcagaaaataattcacgctctgaagtattggcttggctgaaagaacacaagatggagaagaccaagcaattcgaactgctggatattagctggcttatcgaaagcatgaaagttggtaaaccggtggacaccaaggggaaataccagttggcggaatcgggtgagatgagtgcgaacccagatccgacagagggtcgtgaaaacgagctgcctcctactatgaagaccatttctccgtatgcgtgtcaacgccgcaccaccctgaacaaccataatcaacgttttacggacgcactggaaattcttgcggaaaattacgagttcaaacgcaacgatgatactgcgctggaatttcgtcgtgctatctccgtgctgaaaagccttccgtttgaggtagttagcctgaaagacacggaaggattgccctggatcggtgatgaagtcaaagggattatggaagaaatcatcgaggtcggtgaatcgctggaagtgcaggccgtgctcaatgatgagcgctatcaaagcttcaaacgctttaagagtgtctttggagtgggggtgaagacagcagacaagtggtaccgtatgggtctgcgcacgctcgaggatgttcgttccagcaagaccctgaagttgaccccgatgcagaaagcgggtctgctgtattatgaagatcttgctcgcggcgttacgaaagccgaagctgacgcgatttctctgctggttcaggatgcagtcgcaactttcgacccggatgcgctggtggagattgtcggtggatttcgtcgtgggaaaccttttggtcacgacgttgatctgcttatcacatctccgggagctgagaaagagcaagacgaccagctcctgcataaagtgaccaatctgtggaagaaacaagggttgttgctgtacggtcgtctggaatggagtcagtttgaagatgggaaactcccatccggtaaggctgatgccctggacggccatgcgaaatgctttctgatcctcaaactttatgatcataaagtggacaaaagcaaatgggaaatgccgacgggttcgaacgaaggcgaggccaaaccgtggaaagcaattcgcgtagatctggttcgttgcccctacgatggttttgcgtttgcgttgttgggttggaccggaagccgcatgttccgccgtgatctgcgctggtacgccaccgacgagaagaagatgatgctggacaatcatgcgctgtatgacctgaccaagaaaatctttctcaaagctaaatcggaagaggaaattttcgcacatctggggcttgaatacctggaaccgttcgaacgtaacgca

SEQ ID NO: 1908 - protein, 529 aa, synthetic construct
  REGION 1..529: note = Variant of terminal deoxynucleotidyltransferase
MHHHHHHGGSGSHGIRTIDSDFGKKRQKKMDNHDSSAIYEIKFHEFVLFILEEKMGATRRTFLTDLARKKGFRVENELSDSVTHIVAENNSRSEVLAWLKEHKMEKTKQFELLDISWLIESMKVGKPVDTKGKYQLAESGEMSANPDPTEGRENELPPTMKTISPYACQRRTTLNNHNQRFTDALEILAENYEFKRNDDTALEFRRAISVLKSLPFEVVSLKDTEGLPWIGDEVKGIMEEIIEVGESLEVQAVLNDERYQSFKRFKSVFGVGVKTADKWYRMGLRTLEDVRSSKTLKLTPMQKAGLLYYEDLARGVTKAEADAISLLVQDAVATFDPDALVEIVGGFRRGKPFGHDVDLLITSPGAEKEQDDQLLHKVTNLWKKQGLLLYGRLEWSQFEDGKLPSGKADALDGHAKCFLILKLYDHKVDKSKWEMPTGSNEGEAKPWKAIRVDLVRCPYDGFAFALLGWTGSRMFRRDLRWYATDEKKMMLDNHALYDLTKKIFLKAKSEEEIFAHLGLEYLEPFERNA

SEQ ID NO: 1909 - DNA, 1587 bp, synthetic construct
  misc_feature 1..1587: note = Variant of terminal deoxynucleotidyltransferase
  source 1..1587: mol_type = other DNA
atgcaccatcatcatcatcatggcggtagcggcagccacggcattcgtaccatcgattcggacttcgggaagaaacgccagaagaagatggataaccacgatagttccgccatctatgaaatcaaatttcacgagtttgtgctgttcattctcgaagagaaaatgggtgcgacgcgtcgtacttttctgacagatttagcccgcaagaaagggttccgcgtcgagaatgaactgtcagacagcgttacccacatcgtggcagaaaataattcacgctctgaagtattggcttggctgaaagaacacaagatggagaagaccaagcaattcgaactgctggatattagctggcttatcgaaagcatgaaagttggtaaaccggtggacaccaaggggaaataccagttggcggaatcgggtgagatgagtgcgaacccagatccgacagagggtcgtgaaaacgagctgcctcctactatgaagaccatttctcagtatgcgtgtcaacgccgcaccaccctgaacaaccataatcaacgttttacggacgcactggaaattcttgcggaaaattacgagttcaaacgcaacgatgatactgcgctggaatttatgcgtgctgcatccgtgctgaaaagccttccgtttgaggtagttagcctgaaagacacggaaggattgccctggatcggtgatgaagtcaaagggattatggaagaaatcatcgaggtcggtgaatcgctggaagtgcaggccgtgctcaatgatgagcgctatcaaagcttcaaacgctttaagagtgtctttggagtgggggtgaagacagcagacaagtggtaccgtatgggtctgcgcacgctcgaggatgttcgttccagcaagaccctgaagttgaccccgatgcagaaagcgggtctgtgctattatgaagatcttgctcgcggcgttacgaaagccgaagctgacgcgatttctctgctggttcaggatgcagtcgcaactttcgacccggatgcgctggtggagattgtcggtggatttcgtcgtgggaaaccttttggtcacgacgttgatctgcttatcacatctccgggagctgagaaagagcaagacgaccagctcctgcagaaagtgaccaatctgtggaagaaacaagggttgttgctgtacggtcgtctggaatggagtcagtttgaagatgggaaactcccatccggtaaggctgatgccctggacggccatgcgaaatgctttctgatcctcaaactttatgatcataaagtggacaaaagcaaatgggaaatgccgacgggttcgaacgagggcgaggccaaaccgtggaaagcaattcgcgtagatctggttcgttgcccctacgatggttttgcgtttgcgttgttgggttggaccggaagccgcatgttccgccgtgatctgcgctggtacgccaccgacgagaagaagatgatgctggacaatcatgcgctgtatgacctgaccaagaaaatctttctcaaagctaaatcggaagaggaaattttcgcacatctggggcttgaatacctggaaccgttcgaacgtaacgca

SEQ ID NO: 1910 - protein, 529 aa, synthetic construct
  REGION 1..529: note = Variant of terminal deoxynucleotidyltransferase
MHHHHHHGGSGSHGIRTIDSDFGKKRQKKMDNHDSSAIYEIKFHEFVLFILEEKMGATRRTFLTDLARKKGFRVENELSDSVTHIVAENNSRSEVLAWLKEHKMEKTKQFELLDISWLIESMKVGKPVDTKGKYQLAESGEMSANPDPTEGRENELPPTMKTISQYACQRRTTLNNHNQRFTDALEILAENYEFKRNDDTALEFMRAASVLKSLPFEVVSLKDTEGLPWIGDEVKGIMEEIIEVGESLEVQAVLNDERYQSFKRFKSVFGVGVKTADKWYRMGLRTLEDVRSSKTLKLTPMQKAGLCYYEDLARGVTKAEADAISLLVQDAVATFDPDALVEIVGGFRRGKPFGHDVDLLITSPGAEKEQDDQLLQKVTNLWKKQGLLLYGRLEWSQFEDGKLPSGKADALDGHAKCFLILKLYDHKVDKSKWEMPTGSNEGEAKPWKAIRVDLVRCPYDGFAFALLGWTGSRMFRRDLRWYATDEKKMMLDNHALYDLTKKIFLKAKSEEEIFAHLGLEYLEPFERNA

SEQ ID NO: 1911 - DNA, 1587 bp, synthetic construct
  misc_feature 1..1587: note = Variant of terminal deoxynucleotidyltransferase
  source 1..1587: mol_type = other DNA
atgcaccatcatcatcatcatggcggtagcggcagccacggcattcgtaccatcgattcggacttcgggaagaaacgccagaaaaaaatggataaccacgatagttccgccatctatgaaatcaaatttcacgagtttgtgctgttcattctcgaagagaaaatgggtgcgacgcgtcgtacttttctgacagatttagcccgcaagaaagggttccgcgtcgagaatgaactgtcagacagcgttacccacatcgtggcagaaaataattcacgctctgaagtattggcttggctgaaagaacacaagatggagaagaccaagcaattcgaactgctggatattagctggcttatcgaaagcatgaaagttggtaaaccggtggacaccaaggggaaataccagttggcggaatcgggtgagatgagtgcgaacccagatccgacagagggtcgtgaaaacgagctgcctcctactatgaagaccatttctcagtatgcgtgtcaacgccgcaccaccctgaacaaccataatcaacgttttacggacgcactggaaattcttgcggaaaattacgagttcaaacgcaacgatgatactgcgctggaatttatgcgtgctgcatccgtgctgaaaagccttccgtttgaggtagtgagcctgaaagacacggaaggattgccctggatcggtgatgaagtcaaagggattatggaagaaatcatcgaggtcggtgaatcgctggaagtgcaggccgtgctcaatgatgagcgctatcaaagcttcaaacgctttaagagtgtctttggagtgggggtgaagacagcagacaagtggtaccgtatgggtctgcgcacgctcgaggatgttcgttccagcaagaccctgaagttgaccccgatgcagaaagcgggtctgctgtattatgaagatcttgctcgcggcgttacgaaagccgaagctgacgcgatttctctgctggttcaggatgcagtcgcaactttcgacccggatgcgctggtggagattgtcggtggatttcgtcgtgggaaacctcagggtcacgacgttgatctgcttatcacatctccgggagctgagaaagagcaagaagaccagctcctgcagaaagtgaccaatctgtggaagaaacaagggttgttgctgtacggtcgtctggaatggagtcagtttgaagatgggaaactcccatccggtaaggctgatgccctggaccattttgcgaaatgctttctgatcctcaaactttatgatcataaagtggacaaaagcaaatgggaaatgccgacgggttcgaacgaaggcgaggccaaaccgtggaaagcaattcgcgtagatctggttcgttgcccctacgatggttttgcgtttgcgttgttgggttggaccggaagccgcatgttccgccgtgatctgcgctggtacgccaccgacgagaagaagatgatgctggacaatcatggcctgtatgacctgaccaagaaaatctttctcaaagctaaatcggaagaggaaattttcgcacatctggggcttgaatacctggaaccgttcgaacgtaacgca

SEQ ID NO: 1912 - protein, 529 aa, synthetic construct
  REGION 1..529: note = Variant of terminal deoxynucleotidyltransferase
MHHHHHHGGSGSHGIRTIDSDFGKKRQKKMDNHDSSAIYEIKFHEFVLFILEEKMGATRRTFLTDLARKKGFRVENELSDSVTHIVAENNSRSEVLAWLKEHKMEKTKQFELLDISWLIESMKVGKPVDTKGKYQLAESGEMSANPDPTEGRENELPPTMKTISQYACQRRTTLNNHNQRFTDALEILAENYEFKRNDDTALEFMRAASVLKSLPFEVVSLKDTEGLPWIGDEVKGIMEEIIEVGESLEVQAVLNDERYQSFKRFKSVFGVGVKTADKWYRMGLRTLEDVRSSKTLKLTPMQKAGLLYYEDLARGVTKAEADAISLLVQDAVATFDPDALVEIVGGFRRGKPQGHDVDLLITSPGAEKEQEDQLLQKVTNLWKKQGLLLYGRLEWSQFEDGKLPSGKADALDHFAKCFLILKLYDHKVDKSKWEMPTGSNEGEAKPWKAIRVDLVRCPYDGFAFALLGWTGSRMFRRDLRWYATDEKKMMLDNHGLYDLTKKIFLKAKSEEEIFAHLGLEYLEPFERNA

SEQ ID NO: 1913 - DNA, 1587 bp, synthetic construct
  misc_feature 1..1587: note = Variant of terminal deoxynucleotidyltransferase
  source 1..1587: mol_type = other DNA
atgcaccatcatcatcatcatggcggtagcggcagccacggcattcgtaccatcgattcggacttcgggaagaaacgccagaagaagatggataaccacgatagttccgccatctatgaaatcaaatttcacgagtttgtgctgttcattctcgaagagaaaatgggtgcgacgcgtcgtacttttctgacagatttagcccgcaagaaagggttccgcgtcgagaatgaactgtcagacagcgttacccacatcgtggcagaaaataattcacgctctgaagtattggcttggctgaaagaacacaagatggagaagaccaagcaattcgaactgctggatattagctggcttatcgaaagcatgaaagttggtaaaccggtggacaccaaggggaaataccagttggcggaatcgggtgagatgagtgcgaacccagatccgacagagggtcgtgaaaacgagctgcctcctactatgaagaccatttctcagtatgcgtgtcaacgccgcaccaccctgaacaaccataatcaacgttttacggacgcactggaaattcttgcggaaaattacgagttcaaacgcaacgatgatactgcgctgacttttatgcgtgctatttccgtgctgaaaagccttccgtttgaggtagttagcctgaaagacacggaaggattgccctggatcggtgatgaagtcaaagggattatggaagaaatcatcgaggtcggtgaatcgctggaagtgcaggccgtgctcaatgatgagcgctatcaaagcttcaaacgctttaagagtgtctttggagtgggggtgaagacagcagacaagtggtaccgtatgggtctgcgcacgctcgaggatgttcgttccagcaagaccctgaagttgaccccgatgcagaaagcgggtctgtgctattatgaagatcttgctcgcggcgttacgaaagccgaagctgacgcgatttctctgctggttcaggatgcagtcgcaactttcgacccggatgcgctggtggagattgtcggtggatttcgtcgtgggaaaccttttggtcacgacgttgatctgcttatcacatctccgggagctgagaaagagcaagaagaccagctcctgcagaaagtgaccaatctgtggaagaaacaagggttgttgctgtacggtcgtctggaatggagtcagtttgaagatgggaaactcccatccggtaaggctgatgccctggaccattttgcgaaatgctttctgatcctcaaactttatgatcataaagtggacaaaagcaaatgggaaatgccgacgggttcgaacgaaggcgaggccaaaccgtggaaagcaattcgcgtagatctggttcgttgcccctacgatggttttgcgtttgcgttgttgggttggaccggaagccgcatgttccgccgtgatctgcgctggtacgccaccgacgagaagaagatgatgctggacaatcatgcgctgtatgacctgaccaagaaaatctttctcaaagctaaatcggaagaggaaattttcgcacatctggggcttgaatacctggaaccgttcgaacgtaacgca

SEQ ID NO: 1914 - protein, 529 aa, synthetic construct
  REGION 1..529: note = Variant of terminal deoxynucleotidyltransferase
MHHHHHHGGSGSHGIRTIDSDFGKKRQKKMDNHDSSAIYEIKFHEFVLFILEEKMGATRRTFLTDLARKKGFRVENELSDSVTHIVAENNSRSEVLAWLKEHKMEKTKQFELLDISWLIESMKVGKPVDTKGKYQLAESGEMSANPDPTEGRENELPPTMKTISQYACQRRTTLNNHNQRFTDALEILAENYEFKRNDDTALTFMRAISVLKSLPFEVVSLKDTEGLPWIGDEVKGIMEEIIEVGESLEVQAVLNDERYQSFKRFKSVFGVGVKTADKWYRMGLRTLEDVRSSKTLKLTPMQKAGLCYYEDLARGVTKAEADAISLLVQDAVATFDPDALVEIVGGFRRGKPFGHDVDLLITSPGAEKEQEDQLLQKVTNLWKKQGLLLYGRLEWSQFEDGKLPSGKADALDHFAKCFLILKLYDHKVDKSKWEMPTGSNEGEAKPWKAIRVDLVRCPYDGFAFALLGWTGSRMFRRDLRWYATDEKKMMLDNHALYDLTKKIFLKAKSEEEIFAHLGLEYLEPFERNA

SEQ ID NO: 1915 - DNA, 1587 bp, synthetic construct
  misc_feature 1..1587: note = Variant of terminal deoxynucleotidyltransferase
  source 1..1587: mol_type = other DNA
atgcaccatcatcatcatcatggcggtagcggcagccacggcattcgtaccatcgattcggacttcgggaagaaacgccagaagaagatggataaccacgatagttccgccatctatgaaatcaaatttcacgagtttgtgctgttcattctcgaagagaaaatgggtgcgacgcgtcgtacttttctgacagatttagcccgcaagaaagggttccgcgtcgagaatgaactgtcagacagcgttacccacatcgtggcagaaaataattcacgctctgaagtattggcttggctgaaagaacacaagatggagaagaccaagcaattcgaactgctggatattagctggcttatcgaaagcatgaaagttggtaaaccggtggacaccaaggggaaataccagttggcggaatcgggtgagatgagtgcgaacccagatccgacagagggtcgtgaaaacgagctgcctcctactacgaagaccatttctcagtatgcgtgtcaacgccgcaccaccctgaacaaccataatcaacgttttacggacgcactggaaattcttgcggaaaattacgagttcaaacgcaacgatgatactgcgctggaatttatgcgtgctgcatccgtgctgaaaagccttccgtttgaggtagttagcctgaaagacacggaaggattgccctggatcggtgatgaagtcaaagggattatggaagaaatcatcgaggtcggtgaatcgctggaagtgcaggccgtgctcaatgatgagcgctatcaaagcttcaaacgctttaagagtgtctttggagtgggggtgaagacagcagacaagtggtaccgtatgggtctgcgcacgctcgaggatgttcgttccagcaagaccctgaagttgaccccgatgcagaaagcgggtctgtgctattatgaagatcttgctcgcggcgttacgaaagccgaagctgacgcgatttctaccctggttcaggatgcagtcgcaactttcgacccggatgcgctggtggagattgtcggtggatttcgtcgtgggaaacctcagggtcacgacgttgatctgcttatcacatctccgggagctgagaaagagcaagaagaccagctcctgcagaaagtgaccaatctgtggaagaaacaagggttgttgctgtacggtcgtctggaatggagtcagtttgaagatgggaaactcccatccggtaaggctgatgccctggaccatttcgcgaaatgctttctgatcctcaaactttatgatcataaagtggacaaaagcaaatgggaaatgccgacgggttcgaacgagggcgaggccaaaccgtggaaagcaattcgcgtagatctggttcgttgcccctacgacggttttgcgtttgcgttgttgggttggaccggaagccgcatgttccgccgtgatctgcgctggtacgccaccgacgagaagaagatgatgctggacaatcatgccctgtatgacctgaccaagaaaatctttctcaaagctaaatcggaagaggaaattttcgcacatctggggcttgaatacctggaaccgttcgaacgtaacgca

SEQ ID NO: 1916 - protein, 529 aa, synthetic construct
  REGION 1..529: note = Variant of terminal deoxynucleotidyltransferase
MHHHHHHGGSGSHGIRTIDSDFGKKRQKKMDNHDSSAIYEIKFHEFVLFILEEKMGATRRTFLTDLARKKGFRVENELSDSVTHIVAENNSRSEVLAWLKEHKMEKTKQFELLDISWLIESMKVGKPVDTKGKYQLAESGEMSANPDPTEGRENELPPTTKTISQYACQRRTTLNNHNQRFTDALEILAENYEFKRNDDTALEFMRAASVLKSLPFEVVSLKDTEGLPWIGDEVKGIMEEIIEVGESLEVQAVLNDERYQSFKRFKSVFGVGVKTADKWYRMGLRTLEDVRSSKTLKLTPMQKAGLCYYEDLARGVTKAEADAISTLVQDAVATFDPDALVEIVGGFRRGKPQGHDVDLLITSPGAEKEQEDQLLQKVTNLWKKQGLLLYGRLEWSQFEDGKLPSGKADALDHFAKCFLILKLYDHKVDKSKWEMPTGSNEGEAKPWKAIRVDLVRCPYDGFAFALLGWTGSRMFRRDLRWYATDEKKMMLDNHALYDLTKKIFLKAKSEEEIFAHLGLEYLEPFERNA

SEQ ID NO: 1917 - DNA, 1587 bp, synthetic construct
  misc_feature 1..1587: note = Variant of terminal deoxynucleotidyltransferase
  source 1..1587: mol_type = other DNA
atgcaccatcatcatcatcatggcggtagcggcagccacggcattcgtaccatcgattcggacttcgggaagaaacgccagaaaaaaatggataaccacgatagttccgccatctatgaaatcaaatttcacgagtttgtgctgttcattctcgaagaaaaaatgggtgcgacgcgtcgtacttttctgacagatttagcccgcaagaaagggttccgcgtcgagaatgaactgtcagacagcgttacccacatcgtggcagaaaataattcacgctctgaagtattggcttggctgaaagaacacaagatggagaagaccaagcaattcgaactgctggatattagctggcttatcgaaagcatgaaagttggtaaaccggtggacaccaaggggaaataccagttggcggaatcgggtgagatgagtgcgaacccagatccgacagagggtcgtgaaaacgagctgcctcctactacgaagaccatttctcagtatgcgtgtcaacgccgcaccaccctgaacaaccataatcaacgttttacggacgcactggaaattcttgcggaaaattacgagttcaaacgcaacgatgatactgcgctgacctttcgtcgtgctgcatccgtgctgaaaagccttccgtttgaggtagttagcctgaaagacacggaaggattgccctggatcggtgatgaagtcaaagggattatggaagaaatcatcgaggtcggtgaatcgctggaagtgcaggccgtgctcaatgatgagcgctatcaaagcttcaaacgctttaagagtgtctttggagtgggggtgaagacagcagacaagtggtaccgtatgggtctgcgcacgctcgaggatgttcgttccagcaagaccctgaagttgaccccgatgcagaaagcgggtctgctgtattatgaagatcttgctcgcggcgttacgaaagccgaagctgacgcgatttctctgctggttcaggatgcagtcgcaactttcgacccggatgcgctggtggagattgtcggtggatttcgtcgtgggaaacctcagggtcacgacgttgatctgcttatcacatctccgggagctgagaaagagcaagaagaccagctcctgcataaagtgaccaatctgtggaagaaacaagggttgttgctgtacggtcgtctggaatggagtcagtttgaagatgggaaactcccatccggtaaggctgatgccctggacggcttcgcgaaatgctttctgatcctcaaactttatgatcataaagtggacaaaagcaaatgggaaatgccgacgggttcgaacgagggcgaggccaaaccgtggaaagcaattcgcgtagatctggttcgttgcccctacgatggttttgcgtttgcgttgttgggttggaccggaagccgcatgttccgccgtgatctgcgctggtacgccaccgacgagaagaagatgatgctggacaatcatgccctgtatgacctgaccaagaaaatctttctcaaagctaaatcggaagaggaaattttcgcacatctggggcttgaatacctggaaccgttcgaacgtaacgca

SEQ ID NO: 1918 - protein, 529 aa, synthetic construct
  REGION 1..529: note = Variant of terminal deoxynucleotidyltransferase
MHHHHHHGGSGSHGIRTIDSDFGKKRQKKMDNHDSSAIYEIKFHEFVLFILEEKMGATRRTFLTDLARKKGFRVENELSDSVTHIVAENNSRSEVLAWLKEHKMEKTKQFELLDISWLIESMKVGKPVDTKGKYQLAESGEMSANPDPTEGRENELPPTTKTISQYACQRRTTLNNHNQRFTDALEILAENYEFKRNDDTALTFRRAASVLKSLPFEVVSLKDTEGLPWIGDEVKGIMEEIIEVGESLEVQAVLNDERYQSFKRFKSVFGVGVKTADKWYRMGLRTLEDVRSSKTLKLTPMQKAGLLYYEDLARGVTKAEADAISLLVQDAVATFDPDALVEIVGGFRRGKPQGHDVDLLITSPGAEKEQEDQLLHKVTNLWKKQGLLLYGRLEWSQFEDGKLPSGKADALDGFAKCFLILKLYDHKVDKSKWEMPTGSNEGEAKPWKAIRVDLVRCPYDGFAFALLGWTGSRMFRRDLRWYATDEKKMMLDNHALYDLTKKIFLKAKSEEEIFAHLGLEYLEPFERNA

SEQ ID NO: 1919 - DNA, 1587 bp, synthetic construct
  misc_feature 1..1587: note = Variant of terminal deoxynucleotidyltransferase
  source 1..1587: mol_type = other DNA
atgcaccatcatcatcatcatggcggtagcggcagccacggcattcgtaccatcgattcggacttcgggaagaaacgccagaaaaaaatggataaccacgatagttccgccatctatgaaatcaaatttcacgagtttgtgctgttcattctcgaagaaaaaatgggtgcgacgcgtcgtacttttctgacagatttagcccgcaagaaagggttccgcgtcgagaatgaactgtcagacagcgttacccacatcgtggcagaaaataattcacgctctgaagtattggcttggctgaaagaacacaagatggagaagaccaagcaattcgaactgctggatattagctggcttatcgaaagcatgaaagttggtaaaccggtggacaccaaggggaaataccagttggcggaatcgggtgagatgagtgcgaacccagatccgacagagggtcgtgaaaacgagctgcctcctactacgaagaccatttctcagtatgcgtgtcaacgccgcaccaccctgaacaaccataatcaacgttttacggacgcactggaaattcttgcggaaaattacgagttcaaacgcaacgatgatactgcgctggaatttcgtcgtgctgcatccgtgctgaaaagccttccgtttgaggtagttagcctgaaagacacggaaggattgccctggatcggtgatgaagtcaaagggattatggaagaaatcatcgaggtcggtgaatcgctggaagtgcaggccgtgctcaatgatgagcgctatcaaagcttcaaacgctttaagagtgtctttggagtgggggtgaagacagcagacaagtggtaccgtatgggtctgcgcacgctcgaggatgttcgttccagcaagaccctgaagttgaccccgatgcagaaagcgggtctgctgtattatgaagatcttgctcgcggcgttacgaaagccgaagctgacgcgatttctctgctggttcaggatgcagtcgcaactttcgacccggatgcgctggtggagattgtcggtggatttcgtcgtgggaaacctttcggtcacgacgttgatctgcttatcacatctccgggagctgagaaagagcaagaagaccagctcctgcagaaagtgaccaatctgtggaagaaacaagggttgttgctgtacggtcgtctggaatggagtcagtttgaagatgggaaactcccatccggtaaggctgatgccctggaccattttgcgaaatgctttctgatcctcaaactttatgatcataaagtggacaaaagcaaatgggaaatgccgacgggttcgaacatgggcgaggccaaaccgtggaaagcaattcgcgtagatctggttcgttgcccctacgatggttttgcgtttgcgttgttgggttggaccggaagccgcatgttccgccgtgatctgcgctggtacgccactgacgagaagaagatgatgctggacaatcatgcgctgtatgacctgaccaagaaaatctttctcaaagctaaatcggaagaggaaattttcgcacatctggggcttgaatacctggaaccgttcgaacgtaacgca

SEQ ID NO: 1920 - protein, 529 aa, synthetic construct
  REGION 1..529: note = Variant of terminal deoxynucleotidyltransferase
MHHHHHHGGSGSHGIRTIDSDFGKKRQKKMDNHDSSAIYEIKFHEFVLFILEEKMGATRRTFLTDLARKKGFRVENELSDSVTHIVAENNSRSEVLAWLKEHKMEKTKQFELLDISWLIESMKVGKPVDTKGKYQLAESGEMSANPDPTEGRENELPPTTKTISQYACQRRTTLNNHNQRFTDALEILAENYEFKRNDDTALEFRRAASVLKSLPFEVVSLKDTEGLPWIGDEVKGIMEEIIEVGESLEVQAVLNDERYQSFKRFKSVFGVGVKTADKWYRMGLRTLEDVRSSKTLKLTPMQKAGLLYYEDLARGVTKAEADAISLLVQDAVATFDPDALVEIVGGFRRGKPFGHDVDLLITSPGAEKEQEDQLLQKVTNLWKKQGLLLYGRLEWSQFEDGKLPSGKADALDHFAKCFLILKLYDHKVDKSKWEMPTGSNMGEAKPWKAIRVDLVRCPYDGFAFALLGWTGSRMFRRDLRWYATDEKKMMLDNHALYDLTKKIFLKAKSEEEIFAHLGLEYLEPFERNA

SEQ ID NO: 1921 - DNA, 1587 bp, synthetic construct
  misc_feature 1..1587: note = Variant of terminal deoxynucleotidyltransferase
  source 1..1587: mol_type = other DNA
atgcaccatcatcatcatcatggcggtagcggcagccacggcattcgtaccatcgattcggacttcgggaagaaacgccagaaaaaaatggataaccacgatagttccgccatctatgaaatcaaatttcacgagtttgtgctgttcattctcgaagaaaaaatgggtgcgacgcgtcgtacttttctgacagatttagcccgcaagaaagggttccgcgtcgagaatgaactgtcagacagcgttacccacatcgtggcagaaaataattcacgctctgaagtattggcttggctgaaagaacacaagatggagaagaccaagcaattcgaactgctggatattagctggcttatcgaaagcatgaaagttggtaaaccggtggacaccaaggggaaataccagttggcggaatcgggtgagatgagtgcgaacccagatccgacagagggtcgtgaaaacgagctgcctcctactacgaagaccatttctcagtatgcgtgtcaacgccgcaccaccctgaacaaccataataaacgttttacggacgcactggaaattcttgcggaaaattacgagttcaaacgcaacgatgatactgcgctgacctttcgtcgtgctatctccgtgctgaaaagccttccgtttgaggtagttagcctgaaagacacggaaggattgccctggatcggtgatgaagtcaaagggattatggaagaaatcatcgaggtcggtgaatcgctggaagtgcaggccgtgctcaatgatgagcgctatcaaagcttcaaacgctttaagagtgtctttggagtgggggtgaagacagcagacaagtggtaccgtatgggtctgcgcacgctcgaggatgttcgttccagcaagaccctgaagttgaccccgatgcagaaagcgggtctgtgctattatgaagatcttgctcgcggcgttacgaaagccgaagctgacgcgatttctctgctggttcaggatgcagtcgcaactttcgacccggatgcgctggtggagattgtcggtggatttcgtcgtgggaaacctcagggtcacgacgttgatctgcttatcacatctccgggagctgagaaagagcaagaagaccagctcctgcagaaagtgaccaatctgtggaagaaacaagggttgttgctgtacggtcgtctggaatggagtcagtttgaagatgggaaactcccatccggtaaggctgatgccctggaccatttcgcgaaatgctttctgatcctcaaactttatgatcataaagtggacaaaagcaaatgggaaatgccgacgggttcgaacgaaggcgaggccaaaccgtggaaagcaattcgcgtagatctggttcgttgcccctacgatggttttgcgtttgcgttgttgggttggaccggaagccgcatgttccgccgtgatctgcgctggtacgccaccgacgagaagaagatgatgctggacaatcatgcgctgtatgacctgaccaagaaaatctttctcaaagctaaatcggaagaggaaattttcgcacatctggggcttgaatacctggaaccgttcgaacgtaacgca

SEQ ID NO: 1922 - protein, 529 aa, synthetic construct
  REGION 1..529: note = Variant of terminal deoxynucleotidyltransferase
MHHHHHHGGSGSHGIRTIDSDFGKKRQKKMDNHDSSAIYEIKFHEFVLFILEEKMGATRRTFLTDLARKKGFRVENELSDSVTHIVAENNSRSEVLAWLKEHKMEKTKQFELLDISWLIESMKVGKPVDTKGKYQLAESGEMSANPDPTEGRENELPPTTKTISQYACQRRTTLNNHNKRFTDALEILAENYEFKRNDDTALTFRRAISVLKSLPFEVVSLKDTEGLPWIGDEVKGIMEEIIEVGESLEVQAVLNDERYQSFKRFKSVFGVGVKTADKWYRMGLRTLEDVRSSKTLKLTPMQKAGLCYYEDLARGVTKAEADAISLLVQDAVATFDPDALVEIVGGFRRGKPQGHDVDLLITSPGAEKEQEDQLLQKVTNLWKKQGLLLYGRLEWSQFEDGKLPSGKADALDHFAKCFLILKLYDHKVDKSKWEMPTGSNEGEAKPWKAIRVDLVRCPYDGFAFALLGWTGSRMFRRDLRWYATDEKKMMLDNHALYDLTKKIFLKAKSEEEIFAHLGLEYLEPFERNA

SEQ ID NO: 1923 - DNA, 1587 bp, synthetic construct
  misc_feature 1..1587: note = Variant of terminal deoxynucleotidyltransferase
  source 1..1587: mol_type = other DNA
atgcaccatcatcatcatcatggcggtagcggcagccacggcattcgtaccatcgattcggacttcgggaagaaacgccagaaaaaaatggataaccacgatagttccgccatctatgaaatcaaatttcacgagtttgtgctgttcattctcgaagagaaaatgggtgcgacgcgtcgtacttttctgacagatttagcccgcaagaaagggttccgcgtcgagaatgaactgtcagacagcgttacccacatcgtggcagaaaataattcacgctctgaagtattggcttggctgaaagaacacaagatggagaagaccaagcaattcgaactgctggatattagctggcttatcgaaagcatgaaagttggtaaaccggtggacaccaaggggaaataccagttggcggaatcgggtgagatgagtgcgaacccagatccgacagagggtcgtgaaaacgagctgcctcctactacgaagaccatttctcagtatgcgtgtcaacgccgcaccaccctgaacaaccataatcaacgttttacggacgcactggaaattcttgcggaaaattacgagttcaaacgcaacgatgatactgcgctggaatttatgcgtgctatctccgtgctgaaaagccttccgtttgaggtagttagcctgaaagacacggaaggattgccctggatcggtgatgaagtcaaagggattatggaagaaatcatcgaggtcggtgaatcgctggaagtgcaggccgtgctcaatgatgagcgctatcaaagcttcaaacgctttaagagtgtctttggagtgggggtgaagacagcagacaagtggtaccgtatgggtctgcgcacgctcgaggatgttcgttccagcaagaccctgaagttgaccccgatgcagaaagcgggtctgtgctattatgaagatcttgctcgcggcgttacgaaagccgaagctgacgcgatttctctgctggttcaggatgcagtcgcaactttcgacccggatgcgctggtggagattgtcggtggatttcgtcgtgggaaaccttttggtcacgacgttgatctgcttatcacatctccgggagctgagaaagagcaagaagaccagctcctgcagaaagtgaccaatctgtggaagaaacaagggttgttgctgtacggtcgtctggaatggagtcagtttgaagatgggaaactcccatccggtaaggctgatgccctggacggcttcgcgaaatgctttctgatcctcaaactttatgatcataaagtggacaaaagcaaatgggaaatgccgacgggttcgaacgagggcgaggccaaaccgtggaaagcaattcgcgtagatctggttcgttgcccctacgatggttttgcgtttgcgttgttgggttggaccggaagccgcatgttccgccgtgatctgcgctggtacgccactgacgagaagaagatgatgctggacaatcatgcgctgtatgacctgaccaagaaagagtttctcgaagctaaatcggaagaggaaattttcgcacatctggggcttgaatacctggaaccgttcgaacgtaacgca

SEQ ID NO: 1924 - protein, 529 aa, synthetic construct
  REGION 1..529: note = Variant of terminal deoxynucleotidyltransferase
MHHHHHHGGSGSHGIRTIDSDFGKKRQKKMDNHDSSAIYEIKFHEFVLFILEEKMGATRRTFLTDLARKKGFRVENELSDSVTHIVAENNSRSEVLAWLKEHKMEKTKQFELLDISWLIESMKVGKPVDTKGKYQLAESGEMSANPDPTEGRENELPPTTKTISQYACQRRTTLNNHNQRFTDALEILAENYEFKRNDDTALEFMRAISVLKSLPFEVVSLKDTEGLPWIGDEVKGIMEEIIEVGESLEVQAVLNDERYQSFKRFKSVFGVGVKTADKWYRMGLRTLEDVRSSKTLKLTPMQKAGLCYYEDLARGVTKAEADAISLLVQDAVATFDPDALVEIVGGFRRGKPFGHDVDLLITSPGAEKEQEDQLLQKVTNLWKKQGLLLYGRLEWSQFEDGKLPSGKADALDGFAKCFLILKLYDHKVDKSKWEMPTGSNEGEAKPWKAIRVDLVRCPYDGFAFALLGWTGSRMFRRDLRWYATDEKKMMLDNHALYDLTKKEFLEAKSEEEIFAHLGLEYLEPFERNA

SEQ ID NO: 1925 - DNA, 1587 bp, synthetic construct
  misc_feature 1..1587: note = Variant of terminal deoxynucleotidyltransferase
  source 1..1587: mol_type = other DNA
atgcaccatcatcatcatcatggcggtagcggcagccacggcattcgtaccatcgattcggacttcgggaagaaacgccagaaaaaaatggataaccacgatagttccgccatctatgaaatcaaatttcacgagtttgtgctgttcattctcgaagaaaaaatgggtgcgacgcgtcgtacttttctgacagatttagcccgcaagaaagggttccgcgtcgagaatgaactgtcagacagcgttacccacatcgtggcagaaaataattcacgctctgaagtattggcttggctgaaagaacacaagatggagaagaccaagcaattcgaactgctggatattagctggcttatcgaaagcatgaaagttggtaaaccggtggacaccaaggggaaataccagttggcggaatcgggtgagatgagtgcgaacccagatccgacagagggtcgtgaaaacgagctgcctcctactatgaagaccatttctccgtatgcgtgtcaacgccgcaccaccctgaacaaccataatcaacgttttacggacgcactggaaattcttgcggaaaattacgagttcaaacgcaacgatgatactgcgctggaatttatgcgtgctgcatccgtgctgaaaagccttccgtttgaggtagtgagcctgaaagacacggaaggattgccctggatcggtgatgaagtcaaagggattatggaagaaatcatcgaggtcggtgaatcgctggaagtgcaggccgtgctcaatgatgagcgctatcaaagcttcaaacgctttaagagtgtctttggagtgggggtgaagacagcagacaagtggtaccgtatgggtctgcgcacgctcgaggatgttcgttccagcaagaccctgaagttgaccccgatgcagaaagcgggtctgtgctattatgaagatcttgctcgcggcgttacgaaagccgaagctgacgcgatttctctgctggttcaggatgcagtcgcaactttcgacccggatgcgctggtggagattgtcggtggatttcgtcgtgggaaacctttcggtcacgacgttgatctgcttatcacatctccgggagctgagaaagagcaagacgaccagctcctgcataaagtgaccaatctgtggaagaaacaagggttgttgctgtacggtcgtctggaatggagtcagtttgaagatgggaaactcccatccggtaaggctgatgccctggacggccatgcgaaatgctttctgatcctcaaactttatgatcataaagtggacaaaagcaaatgggaaatgccgacgggttcgaacgagggcgaggccaaaccgtggaaagcaattcgcgtagatctggttcgttgcccctacgatggttttgcgtttgcgttgttgggttggaccggaagccgcatgttccgccgtgatctgcgctggtacgccaccgacgagaagaagatgatgctggacaatcatgcgctgtatgacctgaccaagaaaatctttctcaaagctaaatcggaagaggaaattttcgcacatctggggcttgaatacctggaaccgttcgaacgtaacgca

SEQ ID NO: 1926 - protein, 529 aa, synthetic construct
  REGION 1..529: note = Variant of terminal deoxynucleotidyltransferase
MHHHHHHGGSGSHGIRTIDSDFGKKRQKKMDNHDSSAIYEIKFHEFVLFILEEKMGATRRTFLTDLARKKGFRVENELSDSVTHIVAENNSRSEVLAWLKEHKMEKTKQFELLDISWLIESMKVGKPVDTKGKYQLAESGEMSANPDPTEGRENELPPTMKTISPYACQRRTTLNNHNQRFTDALEILAENYEFKRNDDTALEFMRAASVLKSLPFEVVSLKDTEGLPWIGDEVKGIMEEIIEVGESLEVQAVLNDERYQSFKRFKSVFGVGVKTADKWYRMGLRTLEDVRSSKTLKLTPMQKAGLCYYEDLARGVTKAEADAISLLVQDAVATFDPDALVEIVGGFRRGKPFGHDVDLLITSPGAEKEQDDQLLHKVTNLWKKQGLLLYGRLEWSQFEDGKLPSGKADALDGHAKCFLILKLYDHKVDKSKWEMPTGSNEGEAKPWKAIRVDLVRCPYDGFAFALLGWTGSRMFRRDLRWYATDEKKMMLDNHALYDLTKKIFLKAKSEEEIFAHLGLEYLEPFERNA

SEQ ID NO: 1927 - DNA, 1587 bp, synthetic construct
  misc_feature 1..1587: note = Variant of terminal deoxynucleotidyltransferase
  source 1..1587: mol_type = other DNA
atgcaccatcatcatcatcatggcggtagcggcagccacggcattcgtaccatcgattcggacttcgggaagaaacgccagaaaaaaatggataaccacgatagttccgccatctatgaaatcaaatttcacgagtttgtgctgttcattctcgaagaaaaaatgggtgcgacgcgtcgtacttttctgacagatttagcccgcaagaaagggttccgcgtcgagaatgaactgtcagacagcgttacccacatcgtggcagaaaataattcacgctctgaagtattggcttggctgaaagaacacaagatggagaagaccaagcaattcgaactgctggatattagctggcttatcgaaagcatgaaagttggtaaaccggtggacaccaaggggaaataccagttggcggaatcgggtgagatgagtgcgaacccagatccgacagagggtcgtgaaaacgagctgcctcctactacgaagaccatttctcagtatgcgtgtcaacgccgcaccaccctgaacaaccataatcaacgttttacggacgcactggaaattcttgcggaaaattacgagttcaaacgcaacgatgatactgcgctgacctttcgtcgtgctgcatccgtgctgaaaagccttccgtttgaggtagttagcctgaaagacacggaaggattgccctggatcggtgatgaagtcaaagggattatggaagaaatcatcgaggtcggtgaatcgctggaagtgcaggccgtgctcaatgatgagcgctatcaaagcttcaaacgctttaagagtgtctttggagtgggggtgaagacagcagacaagtggtaccgtatgggtctgcgcacgctcgaggatgttcgttccagcaagaccctgaagttgaccccgatgcagaaagcgggtctgtgctattatgaagatcttgctcgcggcgttacgaaagccgaagctgacgcgatttctctgctggttcaggatgcagtcgcaactttcgacccggatgcgctggtggagattgtcggtggatttcgtcgtgggaaacctttcggtcacgacgttgatctgcttatcacatctccgggagctgagaaagagcaagaagaccagctcctgcagaaagtgaccaatctgtggaagaaacaagggttgttgctgtacggtcgtctggaatggagtcagtttgaagatgggaaactcccatccggtaaggctgatgccctggaccatcatgcgaaatgctttctgatcctcaaactttatgatcataaagtggacaaaagcaaatgggaaatgccgacgggttcgaacgagggcgaggccaaaccgtggaaagcaattcgcgtagatctggttcgttgcccctacgacggttttgcgtttgcgttgttgggttggaccggaagccgcatgttccgccgtgatctgcgctggtacgccactgacgagaagaagatgatgctggacaatcatgcgctgtatgacctgaccaagaaaatctttctcaaagctaaatcggaagaggaaattttcgcacatctggggcttgaatacctggaaccgttcgaacgtaacgca

SEQ ID NO: 1928 - protein, 529 aa, synthetic construct
  REGION 1..529: note = Variant of terminal deoxynucleotidyltransferase
MHHHHHHGGSGSHGIRTIDSDFGKKRQKKMDNHDSSAIYEIKFHEFVLFILEEKMGATRRTFLTDLARKKGFRVENELSDSVTHIVAENNSRSEVLAWLKEHKMEKTKQFELLDISWLIESMKVGKPVDTKGKYQLAESGEMSANPDPTEGRENELPPTTKTISQYACQRRTTLNNHNQRFTDALEILAENYEFKRNDDTALTFRRAASVLKSLPFEVVSLKDTEGLPWIGDEVKGIMEEIIEVGESLEVQAVLNDERYQSFKRFKSVFGVGVKTADKWYRMGLRTLEDVRSSKTLKLTPMQKAGLCYYEDLARGVTKAEADAISLLVQDAVATFDPDALVEIVGGFRRGKPFGHDVDLLITSPGAEKEQEDQLLQKVTNLWKKQGLLLYGRLEWSQFEDGKLPSGKADALDHHAKCFLILKLYDHKVDKSKWEMPTGSNEGEAKPWKAIRVDLVRCPYDGFAFALLGWTGSRMFRRDLRWYATDEKKMMLDNHALYDLTKKIFLKAKSEEEIFAHLGLEYLEPFERNA

SEQ ID NO: 1929 - DNA, 1587 bp, synthetic construct
  misc_feature 1..1587: note = Variant of terminal deoxynucleotidyltransferase
  source 1..1587: mol_type = other DNA
atgcaccatcatcatcatcatggcggtagcggcagccacggcattcgtaccatcgattcggacttcgggaagaaacgccagaaaaaaatggataaccacgatagttccgccatctatgaaatcaaatttcacgagtttgtgctgttcattctcgaagaaaaaatgggtgcgacgcgtcgtacttttctgacagatttagcccgcaagaaagggttccgcgtcgagaatgaactgtcagacagcgttacccacatcgtggcagaaaataattcacgctctgaagtattggcttggctgaaagaacacaagatggagaagaccaagcaattcgaactgctggatattagctggcttatcgaaagcatgaaagttggtaaaccggtggacaccaaggggaaataccagttggcggaatcgggtgagatgagtgcgaacccagatccgacagagggtcgtgaaaacgagctgcctcctactacgaagaccatttctccgtatgcgtgtcaacgccgcaccaccctgaacaaccataatcaacgttttacggacgcactggaaattcttgcggaaaattacgagttcaaacgcaacgatgatactgcgctggaatttcgtcgtgctatctccgtgctgaaaagccttccgtttgaggtagttagcctgaaagacacggaaggattgccctggatcggtgatgaagtcaaagggattatggaagaaatcatcgaggtcggtgaatcgctggaagtgcaggccgtgctcaatgatgagcgctatcaaagcttcaaacgctttaagagtgtctttggagtgggggtgaagacagcagacaagtggtaccgtatgggtctgcgcacgctcgaggatgttcgttccagcaagaccctgaagttgaccccgatgcagaaagcgggtctgtgctattatgaagatcttgctcgcggcgttacgaaagccgaagctgacgcgatttctctgctggttcaggatgcagtcgcaactttcgacccggatgcgctggtggagattgtcggtggatttcgtcgtgggaaaccttttggtcacgacgttgatctgcttatcacatctccgggagctgagaaagagcaagaagaccagctcctgcagaaagtgaccaatctgtggaagaaacaagggttgttgctgtacggtcgtctggaatggagtcagtttgaagatgggaaactcccatccggtaaggctgatgccctggaccattttgcgaaatgctttctgatcctcaaactttatgatcataaagtggacaaaagcaaatgggaaatgccgacgggttcgaacgagggcgaggccaaaccgtggaaagcaattcgcgtagatctggttcgttgcccctacgacggttttgcgtttgcgttgttgggttggaccggaagccgcatgttccgccgtgatctgcgctggtacgccaccgacgagaagaagatgatgctggacaatcatgcgctgtatgacctgaccaagaaaatctttctcaaagctaaatcggaagaggaaattttcgcacatctggggcttgaatacctggaaccgttcgaacgtaacgca

SEQ ID NO: 1930 - protein, 529 aa, synthetic construct
  REGION 1..529: note = Variant of terminal deoxynucleotidyltransferase
MHHHHHHGGSGSHGIRTIDSDFGKKRQKKMDNHDSSAIYEIKFHEFVLFILEEKMGATRRTFLTDLARKKGFRVENELSDSVTHIVAENNSRSEVLAWLKEHKMEKTKQFELLDISWLIESMKVGKPVDTKGKYQLAESGEMSANPDPTEGRENELPPTTKTISPYACQRRTTLNNHNQRFTDALEILAENYEFKRNDDTALEFRRAISVLKSLPFEVVSLKDTEGLPWIGDEVKGIMEEIIEVGESLEVQAVLNDERYQSFKRFKSVFGVGVKTADKWYRMGLRTLEDVRSSKTLKLTPMQKAGLCYYEDLARGVTKAEADAISLLVQDAVATFDPDALVEIVGGFRRGKPFGHDVDLLITSPGAEKEQEDQLLQKVTNLWKKQGLLLYGRLEWSQFEDGKLPSGKADALDHFAKCFLILKLYDHKVDKSKWEMPTGSNEGEAKPWKAIRVDLVRCPYDGFAFALLGWTGSRMFRRDLRWYATDEKKMMLDNHALYDLTKKIFLKAKSEEEIFAHLGLEYLEPFERNA

SEQ ID NO: 1931 - DNA, 1587 bp, synthetic construct
  misc_feature 1..1587: note = Variant of terminal deoxynucleotidyltransferase
  source 1..1587: mol_type = other DNA
atgcaccatcatcatcatcatggcggtagcggcagccacggcattcgtaccatcgattcggacttcgggaagaaacgccagaaaaaaatggataaccacgatagttccgccatctatgaaatcaaatttcacgagtttgtgctgttcattctcgaagaaaaaatgggtgcgacgcgtcgtacttttctgacagatttagcccgcaagaaagggttccgcgtcgagaatgaactgtcagacagcgttacccacatcgtggcagaaaataattcacgctctgaagtattggcttggctgaaagaacacaagatggagaagaccaagcaattcgaactgctggatattagctggcttatcgaaagcatgaaagttggtaaaccggtggacaccaaggggaaataccagttggcggaatcgggtgagatgagtgcgaacccagatccgacagagggtcgtgaaaacgagctgcctcctactacgaagaccatttctcagtatgcgtgtcaacgccgcaccaccctgaacaaccataatcaacgttttacggacgcactggaaattcttgcggaaaattacgagttcaaacgcaacgatgatactgcgctgacctttcgtcgtgctatctccgtgctgaaaagccttccgtttgaggtagttagcctgaaagacacggaaggattgccctggatcggtgatgaagtcaaagggattatggaagaaatcatcgaggtcggtgaatcgctggaagtgcaggccgtgctcaatgatgagcgctatcaaagcttcaaacgctttaagagtgtctttggagtgggggtgaagacagcagacaagtggtaccgtatgggtctgcgcacgctcgaggatgttcgttccagcaagaccctgaagttgaccccgatgcagaaagcgggtctgctgtattatgaagatcttgctcgcggcgttacgaaagccgaagctgacgcgatttctctgctggttcaggatgcagtcgcaactttcgacccggatgcgctggtggagattgtcggtggatttcgtcgtgggaaaccttttggtcacgacgttgatctgcttatcacatctccgggagctgagaaagagcaagaagaccagctcctgcataaagtgaccaatctgtggaagaaacaagggttgttgctgtacggtcgtctggaatggagtcagtttgaagatgggaaactcccatccggtaaggctgatgccctggaccatcatgcgaaatgctttctgatcctcaaactttatgatcataaagtggacaaaagcaaatgggaaatgccgacgggttcgaacatgggcgaggccaaaccgtggaaagcaattcgcgtagatctggttcgttgcccctacgatggttttgcgtttgcgttgttgggttggaccggaagccgcatgttccgccgtgatctgcgctggtacgccaccgacgagaagaagatgatgctggacaatcatggcctgtatgacctgaccaagaaaatctttctcaaagctaaatcggaagaggaaattttcgcacatctggggcttgaatacctggaaccgttcgaacgtaacgca

SEQ ID NO: 1932 - protein, 529 aa, synthetic construct
  REGION 1..529: note = Variant of terminal deoxynucleotidyltransferase
MHHHHHHGGSGSHGIRTIDSDFGKKRQKKMDNHDSSAIYEIKFHEFVLFILEEKMGATRRTFLTDLARKKGFRVENELSDSVTHIVAENNSRSEVLAWLKEHKMEKTKQFELLDISWLIESMKVGKPVDTKGKYQLAESGEMSANPDPTEGRENELPPTTKTISQYACQRRTTLNNHNQRFTDALEILAENYEFKRNDDTALTFRRAISVLKSLPFEVVSLKDTEGLPWIGDEVKGIMEEIIEVGESLEVQAVLNDERYQSFKRFKSVFGVGVKTADKWYRMGLRTLEDVRSSKTLKLTPMQKAGLLYYEDLARGVTKAEADAISLLVQDAVATFDPDALVEIVGGFRRGKPFGHDVDLLITSPGAEKEQEDQLLHKVTNLWKKQGLLLYGRLEWSQFEDGKLPSGKADALDHHAKCFLILKLYDHKVDKSKWEMPTGSNMGEAKPWKAIRVDLVRCPYDGFAFALLGWTGSRMFRRDLRWYATDEKKMMLDNHGLYDLTKKIFLKAKSEEEIFAHLGLEYLEPFERNA

SEQ ID NO: 1933 - DNA, 1587 bp, synthetic construct
  misc_feature 1..1587: note = Variant of terminal deoxynucleotidyltransferase
  source 1..1587: mol_type = other DNA
atgcaccatcatcatcatcatggcggtagcggcagccacggcattcgtaccatcgattcggacttcgggaagaaacgccagaagaagatggataaccacgatagttccgccatctatgaaatcaaatttcacgagtttgtgctgttcattctcgaagaaaaaatgggtgcgacgcgtcgtacttttctgacagatttagcccgcaagaaagggttccgcgtcgagaatgaactgtcagacagcgttacccacatcgtggcagaaaataattcacgctctgaagtattggcttggctgaaagaacacaagatggagaagaccaagcaattcgaactgctggatattagctggcttatcgaaagcatgaaagttggtaaaccggtggacaccaaggggaaataccagttggcggaatcgggtgagatgagtgcgaacccagatccgacagagggtcgtgaaaacgagctgcctcctactatgaagaccatttctcagtatgcgtgtcaacgccgcaccaccctgaacaaccataataaacgttttacggacgcactggaaattcttgcggaaaattacgagttcaaacgcaacgatgatactgcgctgacctttatgcgtgctgcatccgtgctgaaaagccttccgttcgaggtagttagcctgaaagacacggaaggattgccctggatcggtgatgaagtcaaagggattatggaagaaatcatcgaggtcggtgaatcgctggaagtgcaggccgtgctcaatgatgagcgctatcaaagcttcaaacgctttaagagtgtctttggagtgggggtgaagacagcagacaagtggtaccgtatgggtctgcgcacgctcgaggatgttcgttccagcaagaccctgaagttgaccccgatgcagaaagcgggtctgctgtattatgaagatcttgctcgcggcgttacgaaagccgaagctgacgcgatttctctgctggttcaggatgcagtcgcaactttcgacccggatgcgctggtggagattgtcggtggatttcgtcgtgggaaaccttttggtcacgacgttgatctgcttatcacatctccgggagctgagaaagagcaagacgaccagctcctgcataaagtgaccaatctgtggaagaaacaagggttgttgctgtacggtcgtctggaatggagtcagtttgaagatgggaaactcccatccggtaaggctgatgccctggaccatcatgcgaaatgctttctgatcctcaaactttatgatcataaagtggacaaaagcaaatgggaaatgccgacgggttcgaacgaaggcgaggccaaaccgtggaaagcaattcgcgtagatctggttcgttgcccctacgatggttttgcgtttgcgttgttgggttggaccggaagccgcatgttccgccgtgatctgcgctggtacgccactgacgagaagaagatgatgctggacaatcatgccctgtatgacctgaccaagaaaatctttctcaaagctaaatcggaagaggaaattttcgcacatctggggcttgaatacctggaaccgttcgaacgtaacgca

SEQ ID NO: 1934 - protein, 529 aa, synthetic construct
  REGION 1..529: note = Variant of terminal deoxynucleotidyltransferase
MHHHHHHGGSGSHGIRTIDSDFGKKRQKKMDNHDSSAIYEIKFHEFVLFILEEKMGATRRTFLTDLARKKGFRVENELSDSVTHIVAENNSRSEVLAWLKEHKMEKTKQFELLDISWLIESMKVGKPVDTKGKYQLAESGEMSANPDPTEGRENELPPTMKTISQYACQRRTTLNNHNKRFTDALEILAENYEFKRNDDTALTFMRAASVLKSLPFEVVSLKDTEGLPWIGDEVKGIMEEIIEVGESLEVQAVLNDERYQSFKRFKSVFGVGVKTADKWYRMGLRTLEDVRSSKTLKLTPMQKAGLLYYEDLARGVTKAEADAISLLVQDAVATFDPDALVEIVGGFRRGKPFGHDVDLLITSPGAEKEQDDQLLHKVTNLWKKQGLLLYGRLEWSQFEDGKLPSGKADALDHHAKCFLILKLYDHKVDKSKWEMPTGSNEGEAKPWKAIRVDLVRCPYDGFAFALLGWTGSRMFRRDLRWYATDEKKMMLDNHALYDLTKKIFLKAKSEEEIFAHLGLEYLEPFERNA

SEQ ID NO: 1935 - DNA, 1587 bp, synthetic construct
  misc_feature 1..1587: note = Variant of terminal deoxynucleotidyltransferase
  source 1..1587: mol_type = other DNA
atgcaccatcatcatcatcatggcggtagcggcagccacggcattcgtaccatcgattcggacttcgggaagaaacgccagaaaaaaatggataaccacgatagttccgccatctatgaaatcaaatttcacgagtttgtgctgttcattctcgaagagaaaatgggtgcgacgcgtcgtacttttctgacagatttagcccgcaagaaagggttccgcgtcgagaatgaactgtcagacagcgttacccacatcgtggcagaaaataattcacgctctgaagtattggcttggctgaaagaacacaagatggagaagaccaagcaattcgaactgctggatattagctggcttatcgaaagcatgaaagttggtaaaccggtggacaccaaggggaaataccagttggcggaatcgggtgagatgagtgcgaacccagatccgacagagggtcgtgaaaacgagctgcctcctactacgaagaccatttctcagtatgcgtgtcaacgccgcaccaccctgaacaaccataatcaacgttttacggacgcactggaaattcttgcggaaaattacgagttcaaacgcaacgatgatactgcgctggaatttcgtcgtgctgcatccgtgctgaaaagccttccgtttgaggtagttagcctgaaagacacggaaggattgccctggatcggtgatgaagtcaaagggattatggaagaaatcatcgaggtcggtgaatcgctggaagtgcaggccgtgctcaatgatgagcgctatcaaagcttcaaacgctttaagagtgtctttggagtgggggtgaagacagcagacaagtggtaccgtatgggtctgcgcacgctcgaggatgttcgttccagcaagaccctgaagttgaccccgatgcagaaagcgggtctgctgtattatgaagatcttgctcgcggcgttacgaaagccgaagctgacgcgatttctctgctggttcagaatgcagtcgcaactttcgacccggatgcgctggtggagattgtcggtggatttcgtcgtgggaaacctcagggtcacgacgttgatctgcttatcacatctccgggagctgagaaagagcaagaagaccagctcctgcagaaagtgaccaatctgtggaagaaacaagggttgttgctgtacggtcgtctggaatggagtcagtttgaagatgggaaactcccatccggtaaggctgatgccctggaccattttgcgaaatgctttctgatcctcaaactttatgatcataaagtggacaaaagcaaatgggaaatgccgacgggttcgaacatgggcgaggccaaaccgtggaaagcaattcgcgtagatctggttcgttgcccctacggcggttttgcgtttgcgttgttgggttggaccggaagccgcatgttccgccgtgatctgcgctggtacgccaccgacgagaagaagatgatgctggacaatcatgcgctgtatgacctgaccaagaaagagtttctcgaagctaaatcggaagaggaaattttcgcacatctggggcttgaatacctggaaccgttcgaacgtaacgca

SEQ ID NO: 1936 - protein, 529 aa, synthetic construct
  REGION 1..529: note = Variant of terminal deoxynucleotidyltransferase
MHHHHHHGGSGSHGIRTIDSDFGKKRQKKMDNHDSSAIYEIKFHEFVLFILEEKMGATRRTFLTDLARKKGFRVENELSDSVTHIVAENNSRSEVLAWLKEHKMEKTKQFELLDISWLIESMKVGKPVDTKGKYQLAESGEMSANPDPTEGRENELPPTTKTISQYACQRRTTLNNHNQRFTDALEILAENYEFKRNDDTALEFRRAASVLKSLPFEVVSLKDTEGLPWIGDEVKGIMEEIIEVGESLEVQAVLNDERYQSFKRFKSVFGVGVKTADKWYRMGLRTLEDVRSSKTLKLTPMQKAGLLYYEDLARGVTKAEADAISLLVQNAVATFDPDALVEIVGGFRRGKPQGHDVDLLITSPGAEKEQEDQLLQKVTNLWKKQGLLLYGRLEWSQFEDGKLPSGKADALDHFAKCFLILKLYDHKVDKSKWEMPTGSNMGEAKPWKAIRVDLVRCPYGGFAFALLGWTGSRMFRRDLRWYATDEKKMMLDNHALYDLTKKEFLEAKSEEEIFAHLGLEYLEPFERNA

SEQ ID NO: 1937 - DNA, 1587 bp, synthetic construct
  misc_feature 1..1587: note = Variant of terminal deoxynucleotidyltransferase
  source 1..1587: mol_type = other DNA
atgcaccatcatcatcatcatggcggtagcggcagccacggcattcgtaccatcgattcggacttcgggaagaaacgccagaaaaaaatggataaccacgatagttccgccatctatgaaatcaaatttcacgagtttgtgctgttcattctcgaagaaaaaatgggtgcgacgcgtcgtacttttctgacagatttagcccgcaagaaagggttccgcgtcgagaatgaactgtcagacagcgttacccacatcgtggcagaaaataattcacgctctgaagtattggcttggctgaaagaacacaagatggagaagaccaagcaattcgaactgctggatattagctggcttatcgaaagcatgaaagttggtaaaccggtggacaccaaggggaaataccagttggcggaatcgggtgagatgagtgcgaacccagatccgacagagggtcgtgaaaacgagctgcctcctactacgaagaccatttctccgtatgcgtgtcaacgccgcaccaccctgaacaaccataatcaacgttttacggacgcactggaaattcttgcggaaaattacgagttcaaacgcaacgatgatactgcgctggaatttatgcgtgctgcatccgtgctgaaaagccttccgtttgaggtagtgagcctgaaagacacggaaggattgccctggatcggtgatgaagtcaaagggattatggaagaaatcatcgaggtcggtgaatcgctggaagtgcaggccgtgctcaatgatgagcgctatcaaagcttcaaacgctttaagagtgtctttggagtgggggtgaagacagcagacaagtggtaccgtatgggtctgcgcacgctcgaggatgttcgttccagcaagaccctgaagttgaccccgatgcagaaagcgggtctgtgctattatgaagatcttgctcgcggcgttacgaaagccgaagctgacgcgatttctaccctggttcaggatgcagtcgcaactttcgacccggatgcgctggtggagattgtcggtggatttcgtcgtgggaaacctttcggtcacgacgttgatctgcttatcacatctccgggagctgagaaagagcaagaagaccagctcctgcataaagtgaccaatctgtggaagaaacaagggttgttgctgtacggtcgtctggaatggagtcagtttgaagatgggaaactcccatccggtaaggctgatgccctggaccatttcgcgaaatgctttctgatcctcaaactttatgatcataaagtggacaaaagcaaatgggaaatgccgacgggttcgaacgagggcgaggccaaaccgtggaaagcaattcgcgtagatctggttcgttgcccctacgatggttttgcgtttgcgttgttgggttggaccggaagccgcatgttccgccgtgatctgcgctggtacgccactgacgagaagaagatgatgctggacaatcatgcgctgtatgacctgaccaagaaagagtttctcaaagctaaatcggaagaggaaattttcgcacatctggggcttgaatacctggaaccgttcgaacgtaacgca

SEQ ID NO: 1938 - protein, 529 aa, synthetic construct
  REGION 1..529: note = Variant of terminal deoxynucleotidyltransferase
MHHHHHHGGSGSHGIRTIDSDFGKKRQKKMDNHDSSAIYEIKFHEFVLFILEEKMGATRRTFLTDLARKKGFRVENELSDSVTHIVAENNSRSEVLAWLKEHKMEKTKQFELLDISWLIESMKVGKPVDTKGKYQLAESGEMSANPDPTEGRENELPPTTKTISPYACQRRTTLNNHNQRFTDALEILAENYEFKRNDDTALEFMRAASVLKSLPFEVVSLKDTEGLPWIGDEVKGIMEEIIEVGESLEVQAVLNDERYQSFKRFKSVFGVGVKTADKWYRMGLRTLEDVRSSKTLKLTPMQKAGLCYYEDLARGVTKAEADAISTLVQDAVATFDPDALVEIVGGFRRGKPFGHDVDLLITSPGAEKEQEDQLLHKVTNLWKKQGLLLYGRLEWSQFEDGKLPSGKADALDHFAKCFLILKLYDHKVDKSKWEMPTGSNEGEAKPWKAIRVDLVRCPYDGFAFALLGWTGSRMFRRDLRWYATDEKKMMLDNHALYDLTKKEFLKAKSEEEIFAHLGLEYLEPFERNA

SEQ ID NO: 1939 - DNA, 1587 bp, synthetic construct
  misc_feature 1..1587: note = Variant of terminal deoxynucleotidyltransferase
  source 1..1587: mol_type = other DNA
atgcaccatcatcatcatcatggcggtagcggcagccacggcattcgtaccatcgattcggacttcgggaagaaacgccagaagaagatggataaccacgatagttccgccatctatgaaatcaaatttcacgagtttgtgctgttcattctcgaagaaaaaatgggtgcgacgcgtcgtacttttctgacagatttagcccgcaagaaagggttccgcgtcgagaatgaactgtcagacagcgttacccacatcgtggcagaaaataattcacgctctgaagtattggcttggctgaaagaacacaagatggagaagaccaagcaattcgaactgctggatattagctggcttatcgaaagcatgaaagttggtaaaccggtggacaccaaggggaaataccagttggcggaatcgggtgagatgagtgcgaacccagatccgacagagggtcgtgaaaacgagctgcctcctactatgaagaccatttctccgtatgcgtgtcaacgccgcaccaccctgaacaaccataatcaacgttttacggacgcactggaaattcttgcggaaaattacgagttcaaacgcaacgatgatactgcgctgacctttcgtcgtgctgcatccgtgctgaaaagccttccgtttgaggtagttagcctgaaagacacggaaggattgccctggatcggtgatgaagtcaaagggattatggaagaaatcatcgaggtcggtgaatcgctggaagtgcaggccgtgctcaatgatgagcgctatcaaagcttcaaacgctttaagagtgtctttggagtgggggtgaagacagcagacaagtggtaccgtatgggtctgcgcacgctcgaggatgttcgttccagcaagaccctgaagttgaccccgatgcagaaagcgggtctgtgctattatgaagatcttgctcgcggcgttacgaaagccgaagctgacgcgatttctctgctggttcaggatgcagtcgcaactttcgacccggatgcgctggtggagattgtcggtggatttcgtcgtgggaaacctttcggtcacgacgttgatctgcttatcacatctccgggagctgagaaagagcaagaagaccagctcctgcagaaagtgaccaatctgtggaagaaacaagggttgttgctgtacggtcgtctggaatggagtcagtttgaagatgggaaactcccatccggtaaggctgatgccctggaccattttgcgaaatgctttctgatcctcaaactttatgatcataaagtggacaaaagcaaatgggaaatgccgacgggttcgaacgaaggcgaggccaaaccgtggaaagcaattcgcgtagatctggttcgttgcccctacgatggttttgcgtttgcgttgttgggttggaccggaagccgcatgttccgccgtgatctgcgctggtacgccaccgacgagaagaagatgatgctggacaatcatgcgctgtatgacctgaccaagaaaatctttctcaaagctaaatcggaagaggaaattttcgcacatctggggcttgaatacctggaaccgttcgaacgtaacgca

SEQ ID NO: 1940 - protein, 529 aa, synthetic construct
  REGION 1..529: note = Variant of terminal deoxynucleotidyltransferase
MHHHHHHGGSGSHGIRTIDSDFGKKRQKKMDNHDSSAIYEIKFHEFVLFILEEKMGATRRTFLTDLARKKGFRVENELSDSVTHIVAENNSRSEVLAWLKEHKMEKTKQFELLDISWLIESMKVGKPVDTKGKYQLAESGEMSANPDPTEGRENELPPTMKTISPYACQRRTTLNNHNQRFTDALEILAENYEFKRNDDTALTFRRAASVLKSLPFEVVSLKDTEGLPWIGDEVKGIMEEIIEVGESLEVQAVLNDERYQSFKRFKSVFGVGVKTADKWYRMGLRTLEDVRSSKTLKLTPMQKAGLCYYEDLARGVTKAEADAISLLVQDAVATFDPDALVEIVGGFRRGKPFGHDVDLLITSPGAEKEQEDQLLQKVTNLWKKQGLLLYGRLEWSQFEDGKLPSGKADALDHFAKCFLILKLYDHKVDKSKWEMPTGSNEGEAKPWKAIRVDLVRCPYDGFAFALLGWTGSRMFRRDLRWYATDEKKMMLDNHALYDLTKKIFLKAKSEEEIFAHLGLEYLEPFERNA

SEQ ID NO: 1941 - DNA, 1587 bp, synthetic construct
  misc_feature 1..1587: note = Variant of terminal deoxynucleotidyltransferase
  source 1..1587: mol_type = other DNA
atgcaccatcatcatcatcatggcggtagcggcagccacggcattcgtaccatcgattcggacttcgggaagaaacgccagaaaaaaatggataaccacgatagttccgccatctatgaaatcaaatttcacgagtttgtgctgttcattctcgaagagaaaatgggtgcgacgcgtcgtacttttctgacagatttagcccgcaagaaagggttccgcgtcgagaatgaactgtcagacagcgttacccacatcgtggcagaaaataattcacgctctgaagtattggcttggctgaaagaacacaagatggagaagaccaagcaattcgaactgctggatattagctggcttatcgaaagcatgaaagttggtaaaccggtggacaccaaggggaaataccagttggcggaatcgggtgagatgagtgcgaacccagatccgacagagggtcgtgaaaacgagctgcctcctactacgaagaccatttctcagtatgcgtgtcaacgccgcaccaccctgaacaaccataataaacgttttacggacgcactggaaattcttgcggaaaattacgagttcaaacgcaacgatgatactgcgctggaatttcgtcgtgctatctccgtgctgaaaagccttccgtttgaggtagttagcctgaaagacacggaaggattgccctggatcggtgatgaagtcaaagggattatggaagaaatcatcgaggtcggtgaatcgctggaagtgcaggccgtgctcaatgatgagcgctatcaaagcttcaaacgctttaagagtgtctttggagtgggggtgaagacagcagacaagtggtaccgtatgggtctgcgcacgctcgaggatgttcgttccagcaagaccctgaagttgaccccgatgcagaaagcgggtctgtgctattatgaagatcttgctcgcggcgttacgaaagccgaagctgacgcgatttctctgctggttcaggatgcagtcgcaactttcgacccggatgcgctggtggagattgtcggtggatttcgtcgtgggaaaccttttggtcacgacgttgatctgcttatcacatctccgggagctgagaaagagcaagaagaccagctcctgcagaaagtgaccaatctgtggaagaaacaagggttgttgctgtacggtcgtctggaatggagtcagtttgaagatgggaaactcccatccggtaaggctgatgccctggaccattttgcgaaatgctttctgatcctcaaactttatgatcataaagtggacaaaagcaaatgggaaatgccgacgggttcgaacgaaggcgaggccaaaccgtggaaagcaattcgcgtagatctggttcgttgcccctacgacggttttgcgtttgcgttgttgggttggaccggaagccgcatgttccgccgtgatctgcgctggtacgccaccgacgagaagaagatgatgctggacaatcatgccctgtatgacctgaccaagaaaatctttctcaaagctaaatcggaagaggaaattttcgcacatctggggcttgaatacctggaaccgttcgaacgtaacgca

SEQ ID NO: 1942 - protein, 529 aa, synthetic construct
  REGION 1..529: note = Variant of terminal deoxynucleotidyltransferase
MHHHHHHGGSGSHGIRTIDSDFGKKRQKKMDNHDSSAIYEIKFHEFVLFILEEKMGATRRTFLTDLARKKGFRVENELSDSVTHIVAENNSRSEVLAWLKEHKMEKTKQFELLDISWLIESMKVGKPVDTKGKYQLAESGEMSANPDPTEGRENELPPTTKTISQYACQRRTTLNNHNKRFTDALEILAENYEFKRNDDTALEFRRAISVLKSLPFEVVSLKDTEGLPWIGDEVKGIMEEIIEVGESLEVQAVLNDERYQSFKRFKSVFGVGVKTADKWYRMGLRTLEDVRSSKTLKLTPMQKAGLCYYEDLARGVTKAEADAISLLVQDAVATFDPDALVEIVGGFRRGKPFGHDVDLLITSPGAEKEQEDQLLQKVTNLWKKQGLLLYGRLEWSQFEDGKLPSGKADALDHFAKCFLILKLYDHKVDKSKWEMPTGSNEGEAKPWKAIRVDLVRCPYDGFAFALLGWTGSRMFRRDLRWYATDEKKMMLDNHALYDLTKKIFLKAKSEEEIFAHLGLEYLEPFERNA

SEQ ID NO: 1943 - DNA, 1587 bp, synthetic construct
  misc_feature 1..1587: note = Variant of terminal deoxynucleotidyltransferase
  source 1..1587: mol_type = other DNA
atgcaccatcatcatcatcatggcggtagcggcagccacggcattcgtaccatcgattcggacttcgggaagaaacgccagaaaaaaatggataaccacgatagttccgccatctatgaaatcaaatttcacgagtttgtgctgttcattctcgaagagaaaatgggtgcgacgcgtcgtacttttctgacagatttagcccgcaagaaagggttccgcgtcgagaatgaactgtcagacagcgttacccacatcgtggcagaaaataattcacgctctgaagtattggcttggctgaaagaacacaagatggagaagaccaagcaattcgaactgctggatattagctggcttatcgaaagcatgaaagttggtaaaccggtggacaccaaggggaaataccagttggcggaatcgggtgagatgagtgcgaacccagatccgacagagggtcgtgaaaacgagctgcctcctactacgaagaccatttctcagtatgcgtgtcaacgccgcaccaccctgaacaaccataataaacgttttacggacgcactggaaattcttgcggaaaattacgagttcaaacgcaacgatgatactgcgctgacttttatgcgtgctatttccgtgctgaaaagccttccgtttgaggtagttagcctgaaagacacggaaggattgccctggatcggtgatgaagtcaaagggattatggaagaaatcatcgaggtcggtgaatcgctggaagtgcaggccgtgctcaatgatgagcgctatcaaagcttcaaacgctttaagagtgtctttggagtgggggtgaagacagcagacaagtggtaccgtatgggtctgcgcacgctcgaggatgttcgttccagcaagaccctgaagttgaccccgatgcagaaagcgggtctgtgctattatgaagatcttgctcgcggcgttacgaaagccgaagctgacgcgatttctctgctggttcaggatgcagtcgcaactttcgacccggatgcgctggtggagattgtcggtggatttcgtcgtgggaaaccttttggtcacgacgttgatctgcttatcacatctccgggagctgagaaagagcaagaagaccagctcctgcagaaagtgaccaatctgtggaagaaacaagggttgttgctgtacggtcgtctggaatggagtcagtttgaagatgggaaactcccatccggtaaggctgatgccctggaccattttgcgaaatgctttctgatcctcaaactttatgatcataaagtggacaaaagcaaatgggaaatgccgacgggttcgaacgagggcgaggccaaaccgtggaaagcaattcgcgtagatctggttcgttgcccctacgatggttttgcgtttgcgttgttgggttggaccggaagccgcatgttccgccgtgatctgcgctggtacgccaccgacgagaagaagatgatgctggacaatcatgcgctgtatgacctgaccaagaaaatctttctcaaagctaaatcggaagaggaaattttcgcacatctggggcttgaatacctggaaccgttcgaacgtaacgca

SEQ ID NO: 1944 - protein, 529 aa, synthetic construct
  REGION 1..529: note = Variant of terminal deoxynucleotidyltransferase
MHHHHHHGGSGSHGIRTIDSDFGKKRQKKMDNHDSSAIYEIKFHEFVLFILEEKMGATRRTFLTDLARKKGFRVENELSDSVTHIVAENNSRSEVLAWLKEHKMEKTKQFELLDISWLIESMKVGKPVDTKGKYQLAESGEMSANPDPTEGRENELPPTTKTISQYACQRRTTLNNHNKRFTDALEILAENYEFKRNDDTALTFMRAISVLKSLPFEVVSLKDTEGLPWIGDEVKGIMEEIIEVGESLEVQAVLNDERYQSFKRFKSVFGVGVKTADKWYRMGLRTLEDVRSSKTLKLTPMQKAGLCYYEDLARGVTKAEADAISLLVQDAVATFDPDALVEIVGGFRRGKPFGHDVDLLITSPGAEKEQEDQLLQKVTNLWKKQGLLLYGRLEWSQFEDGKLPSGKADALDHFAKCFLILKLYDHKVDKSKWEMPTGSNEGEAKPWKAIRVDLVRCPYDGFAFALLGWTGSRMFRRDLRWYATDEKKMMLDNHALYDLTKKIFLKAKSEEEIFAHLGLEYLEPFERNA

SEQ ID NO: 1945 - DNA, 1587 bp, synthetic construct
  misc_feature 1..1587: note = Variant of terminal deoxynucleotidyltransferase
  source 1..1587: mol_type = other DNA
atgcaccatcatcatcatcatggcggtagcggcagccacggcattcgtaccatcgattcggacttcgggaagaaacgccagaaaaaaatggataaccacgatagttccgccatctatgaaatcaaatttcacgagtttgtgctgttcattctcgaagaaaaaatgggtgcgacgcgtcgtacttttctgacagatttagcccgcaagaaagggttccgcgtcgagaatgaactgtcagacagcgttacccacatcgtggcagaaaataattcacgctctgaagtattggcttggctgaaagaacacaagatggagaagaccaagcaattcgaactgctggatattagctggcttatcgaaagcatgaaagttggtaaaccggtggacaccaaggggaaataccagttggcggaatcgggtgagatgagtgcgaacccagatccgacagagggtcgtgaaaacgagctgcctcctactacgaagaccatttctcagtatgcgtgtcaacgccgcaccaccctgaacaaccataatcaacgttttacggacgcactggaaattcttgcggaaaattacgagttcaaacgcaacgatgatactgcgctgacctttatgcgtgctatctccgtgctgaaaagccttccgtttgaggtagtgagcctgaaagacacggaaggattgccctggatcggtgatgaagtcaaagggattatggaagaaatcatcgaggtcggtgaatcgctggaagtgcaggccgtgctcaatgatgagcgctatcaaagcttcaaacgctttaagagtgtctttggagtgggggtgaagacagcagacaagtggtaccgtatgggtctgcgcacgctcgaggatgttcgttccagcaagaccctgaagttgaccccgatgcagaaagcgggtctgtgctattatgaagatcttgctcgcggcgttacgaaagccgaagctgacgcgatttctaccctggttcaggatgcagtcgcaactttcgacccggatgcgctggtggagattgtcggtggatttcgtcgtgggaaacctcagggtcacgacgttgatctgcttatcacatctccgggagctgagaaagagcaagacgaccagctcctgcataaagtgaccaatctgtggaagaaacaagggttgttgctgtacggtcgtctggaatggagtcagtttgaagatgggaaactcccatccggtaaggctgatgccctggaccatcatgcgaaatgctttctgatcctcaaactttatgatcataaagtggacaaaagcaaatgggaaatgccgacgggttcgaacgagggcgaggccaaaccgtggaaagcaattcgcgtagatctggttcgttgcccctacgatggttttgcgtttgcgttgttgggttggaccggaagccgcatgttccgccgtgatctgcgctggtacgccaccgacgagaagaagatgatgctggacaatcatgcgctgtatgacctgaccaagaaaatctttctcaaagctaaatcggaagaggaaattttcgcacatctggggcttgaatacctggaaccgttcgaacgtaacgca

SEQ ID NO: 1946 - protein, 529 aa, synthetic construct
  REGION 1..529: note = Variant of terminal deoxynucleotidyltransferase
MHHHHHHGGSGSHGIRTIDSDFGKKRQKKMDNHDSSAIYEIKFHEFVLFILEEKMGATRRTFLTDLARKKGFRVENELSDSVTHIVAENNSRSEVLAWLKEHKMEKTKQFELLDISWLIESMKVGKPVDTKGKYQLAESGEMSANPDPTEGRENELPPTTKTISQYACQRRTTLNNHNQRFTDALEILAENYEFKRNDDTALTFMRAISVLKSLPFEVVSLKDTEGLPWIGDEVKGIMEEIIEVGESLEVQAVLNDERYQSFKRFKSVFGVGVKTADKWYRMGLRTLEDVRSSKTLKLTPMQKAGLCYYEDLARGVTKAEADAISTLVQDAVATFDPDALVEIVGGFRRGKPQGHDVDLLITSPGAEKEQDDQLLHKVTNLWKKQGLLLYGRLEWSQFEDGKLPSGKADALDHHAKCFLILKLYDHKVDKSKWEMPTGSNEGEAKPWKAIRVDLVRCPYDGFAFALLGWTGSRMFRRDLRWYATDEKKMMLDNHALYDLTKKIFLKAKSEEEIFAHLGLEYLEPFERNA

SEQ ID NO: 1947 - DNA, 1587 bp, synthetic construct
  misc_feature 1..1587: note = Variant of terminal deoxynucleotidyltransferase
  source 1..1587: mol_type = other DNA
atgcaccatcatcatcatcatggcggtagcggcagccacggcattcgtaccatcgattcggacttcgggaagaaacgccagaaaaaaatggataaccacgatagttccgccatctatgaaatcaaatttcacgagtttgtgctgttcattctcgaagaaaaaatgggtgcgacgcgtcgtacttttctgacagatttagcccgcaagaaagggttccgcgtcgagaatgaactgtcagacagcgttacccacatcgtggcagaaaataattcacgctctgaagtattggcttggctgaaagaacacaagatggagaagaccaagcaattcgaactgctggatattagctggcttatcgaaagcatgaaagttggtaaaccggtggacaccaaggggaaataccagttggcggaatcgggtgagatgagtgcgaacccagatccgacagagggtcgtgaaaacgagctgcctcctactatgaagaccgtttctccgtatgcgtgtcaacgccgcaccaccctgaacaaccataataaacgttttacggacgcactggaaattcttgcggaaaattacgagttcaaacgcaacgatgatactgcgctggaatttcgtcgtgctatctccgtgctgaaaagccttccgtttgaggtacgtagcctgaaagacacggaaggattgccctggatcggtgatgaagtcaaagggattatggaagaaatcatcgaggtcggtgaatcgctggaagtgcaggccgtgctcaatgatgagcgctatcaaagcttcaaacgctttaagagtgtctttggagtgggggtgaagacagcagaaaagtggtaccgtatgggtctgcgcacgctcgaggatgttcgttccagcaagaccctgaagttgaccccgatgcagaaagcgggtctgtgttattatgaagatcttgctcgcggcgttacgaaagccgaagctgacgcgatttctctgctggttcaggatgcagtcgcaactttcgacccgacggcggcggtggagattgtcggtggatttcgtcgtgggaaacctcagggtcacgacgttgatctgcttatcacatctccgggagctgagaaagagcaagaagaccagctcctgcagaaagtgaccaatctgtggaagaaacaagggttgttgctgtacggtcgtctggaatggagtcagtttgaagatgggaaactcccatccggtaaggctgatgccctggaccacttcgcgaaatgctttctgatcctcaaactttatgatcataaagtggacaaaagcaaatgggaaatgccgacgggttcgaacgagggcgaggccaaaccgtggaaagcaattcgcgtagatctggttcgttgcccctacggcggttttgcgtttgcgttgttgggttggaccggaagccgcatgttccgccgtgatctgcgctggtacgccacggacgagaagaacatgatgctggacaatcatgcgctgtatgacctgaccaagaaaatctttctcaaggctaaatcggaagaggaaattttcgcacatctggggcttgaatacctggaaccgttcgaacgtaacgca

SEQ ID NO: 1948 - protein, 529 aa, synthetic construct
  REGION 1..529: note = Variant of terminal deoxynucleotidyltransferase
MHHHHHHGGSGSHGIRTIDSDFGKKRQKKMDNHDSSAIYEIKFHEFVLFILEEKMGATRRTFLTDLARKKGFRVENELSDSVTHIVAENNSRSEVLAWLKEHKMEKTKQFELLDISWLIESMKVGKPVDTKGKYQLAESGEMSANPDPTEGRENELPPTMKTVSPYACQRRTTLNNHNKRFTDALEILAENYEFKRNDDTALEFRRAISVLKSLPFEVRSLKDTEGLPWIGDEVKGIMEEIIEVGESLEVQAVLNDERYQSFKRFKSVFGVGVKTAEKWYRMGLRTLEDVRSSKTLKLTPMQKAGLCYYEDLARGVTKAEADAISLLVQDAVATFDPTAAVEIVGGFRRGKPQGHDVDLLITSPGAEKEQEDQLLQKVTNLWKKQGLLLYGRLEWSQFEDGKLPSGKADALDHFAKCFLILKLYDHKVDKSKWEMPTGSNEGEAKPWKAIRVDLVRCPYGGFAFALLGWTGSRMFRRDLRWYATDEKNMMLDNHALYDLTKKIFLKAKSEEEIFAHLGLEYLEPFERNA

SEQ ID NO: 1949 - DNA, 1587 bp, synthetic construct
  misc_feature 1..1587: note = Variant of terminal deoxynucleotidyltransferase
  source 1..1587: mol_type = other DNA
atgcaccatcatcatcatcatggcggtagcggcagccacggcattcgtaccatcgattcggacttcgggaagaaacgccagaaaaaaatggataaccacgatagttccgccatctatgaaatcaaatttcacgagtttgtgctgttcattctcgaagaaaaaatgggtgcgacgcgtcgtacttttctgacagatttagcccgcaagaaagggttccgcgtcgagaatgaactgtcagacagcgttacccacatcgtggcagaaaataattcacgctctgaagtattggcttggctgaaagaacacaagatggagaagaccaagcaattcgaactgctggatattagctggcttatcgaaagcatgaaagttggtaaaccggtggacaccaaggggaaataccagttggcggaatcgggtgagatgagtgcgaacccagatccgacagagggtcgtgaaaacgagctgcctcctactatgaagaccgtttctccgtatgcgtgtcaacgccgcaccaccctgaacaaccataatcaacgttttacggacgcactggaaattcttgcggaaaattacgagttcaaacgcaacgatgatactgcgctggaatttcgtcgtgctatctccgtgctgaaaagccttccgtttgaggtacgtagcctgaaagacacggaaggattgccctggatcggtgatgaagtcaaagggattatggaagaaatcatcgaggtcggtgaatcgctggaagtgcaggccgtgctcaatgatgagcgctatcaaagcttcaaacgctttaagagtgtctttggagtgggggtgaagacagcagacaagtggtaccgtatgggtctgcgcacgctcgaggatgttcgttccagcaagaccctgaagttgaccccgatgcagaaagcgggtctgtgctattatgaagatcttgctcgcggcgttacgaaagccgaagctgacgcgatttctctgctggttcaggatgcagtcgcaactttcgacccggatgcgctggtggagattgtcggtggatttcgtcgtgggaaacctcagggtcacgacgttgatctgcttatcacatctccgggagctgagaaagagcaagaagaccagctcctgcagaaagtgaccaatctgtggaagaaacaagggttgttgctgtacggtcgtctggaatggagtcagtttgaagatgggaaactcccatccggtaaggctgatgccctggaccaccacgcgaaatgctttctgatcctcaaactttatgatcataaagtggacaaaagcaaatgggaaatgccgacgggttcgaacatgggcgaggccaaaccgtggaaagcaattcgcgtagatctggttcgttgcccctacggcggttttgcgtttgcgttgttgggttggaccggaagccgcatgttccgccgtgatctgcgctggtacgccactgacgagaagaacatgatgctggacaatcatgcgctgtatgacctgaccaagaaaatctttctcaaagctaaatcggaagaggaaattttcgcacatctggggcttgaatacctggaaccgttcgaacgtaacgca

SEQ ID NO: 1950 - protein, 529 aa, synthetic construct
  REGION 1..529: note = Variant of terminal deoxynucleotidyltransferase
MHHHHHHGGSGSHGIRTIDSDFGKKRQKKMDNHDSSAIYEIKFHEFVLFILEEKMGATRRTFLTDLARKKGFRVENELSDSVTHIVAENNSRSEVLAWLKEHKMEKTKQFELLDISWLIESMKVGKPVDTKGKYQLAESGEMSANPDPTEGRENELPPTMKTVSPYACQRRTTLNNHNQRFTDALEILAENYEFKRNDDTALEFRRAISVLKSLPFEVRSLKDTEGLPWIGDEVKGIMEEIIEVGESLEVQAVLNDERYQSFKRFKSVFGVGVKTADKWYRMGLRTLEDVRSSKTLKLTPMQKAGLCYYEDLARGVTKAEADAISLLVQDAVATFDPDALVEIVGGFRRGKPQGHDVDLLITSPGAEKEQEDQLLQKVTNLWKKQGLLLYGRLEWSQFEDGKLPSGKADALDHHAKCFLILKLYDHKVDKSKWEMPTGSNMGEAKPWKAIRVDLVRCPYGGFAFALLGWTGSRMFRRDLRWYATDEKNMMLDNHALYDLTKKIFLKAKSEEEIFAHLGLEYLEPFERNA

SEQ ID NO: 1951 - DNA, 1587 bp, synthetic construct
  misc_feature 1..1587: note = Variant of terminal deoxynucleotidyltransferase
  source 1..1587: mol_type = other DNA
atgcaccatcatcatcatcatggcggtagcggcagccacggcattcgtaccatcgattcggacttcgggaagaaacgccagaaaaaaatggataaccacgatagttccgccatctatgaaatcaaatttcacgagtttgtgctgttcattctcgaagaaaaaatgggtgcgacgcgtcgtacttttctgacagatttagcccgcaagaaagggttccgcgtcgagaatgaactgtcagacagcgttacccacatcgtggcagaaaataattcacgctctgaagtattggcttggctgaaagaacacaagatggagaagaccaagcaattcgaactgctggatattagctggcttatcgaaagcatgaaagttggtaaaccggtggacaccaaggggaaataccagttggcggaatcgggtgagatgagtgcgaacccagatccgacagagggtcgtgaaaacgagctgcctcctactatgaagaccatttctccgtatgcgtgtcaacgccgcaccaccctgaacaacctgaatcaacgttttacggacgcactggaaattcttgcggaaaattacgagttcaaacgcaacgatgatactgcgctggaatttcgtcgtgctatctccgtgctgaaaagccttccgtttgaggtacgtagcctgaaagacacggaaggattgccctggatcggtgatgaagtcaaagggattatggaagaaatcatcgaggtcggtgaatcgctggaagtgcaggccgtgctcaatgatgagcgctatcaaagcttcaaacgctttaagagtgtctttggagtgggggtgaagacagcagacaagtggtaccgtatgggtctgcgcacgctcgaggatgttcgttccagcaagaccctgaagttgaccccgatgcagaaagcgggtctgtgctattatgaagatcttgctcgcggcgttacgaaagccgaagctgacgcgatttctctgctggttcaggatgcagtcgcaactttcgacccggatgcgctggtggagattgtcggtggatttcgtcgtgggaaacctcagggtcacgacgttgatctgcttatcacatctccgggagctgagaaagagcaagaagaccagctcctgcagaaagtgaccaatctgtggaagaaacaagggttgttgctgtacggtcgtctggaatggagtcagtttgaagatgggaaactcccatccggtaaggctgatgccctggaccatttcgcgaaatgctttctgatcctcaaactttatgatcataaagtggacaaaagcaaatgggaaatgccgacgggttcgaacgaaggcgaggccaaaccgtggaaagcaattcgcgtagatctggttcgttgcccctacggcggttttgcgtttgcgttgttgggttggaccggaagccgcatgttccgccgtgatctgcgctggtacgccactgacgagaagaacatgatgctggacaatcatgcgctgtatgacctgaccaagaaaatctttctcaaagctaaatcggaagaggaaattttcgcacatctggggcttgaatacctggaaccgttcgaacgtaacgca

SEQ ID NO: 1952 - protein, 529 aa, synthetic construct
  REGION 1..529: note = Variant of terminal deoxynucleotidyltransferase
MHHHHHHGGSGSHGIRTIDSDFGKKRQKKMDNHDSSAIYEIKFHEFVLFILEEKMGATRRTFLTDLARKKGFRVENELSDSVTHIVAENNSRSEVLAWLKEHKMEKTKQFELLDISWLIESMKVGKPVDTKGKYQLAESGEMSANPDPTEGRENELPPTMKTISPYACQRRTTLNNLNQRFTDALEILAENYEFKRNDDTALEFRRAISVLKSLPFEVRSLKDTEGLPWIGDEVKGIMEEIIEVGESLEVQAVLNDERYQSFKRFKSVFGVGVKTADKWYRMGLRTLEDVRSSKTLKLTPMQKAGLCYYEDLARGVTKAEADAISLLVQDAVATFDPDALVEIVGGFRRGKPQGHDVDLLITSPGAEKEQEDQLLQKVTNLWKKQGLLLYGRLEWSQFEDGKLPSGKADALDHFAKCFLILKLYDHKVDKSKWEMPTGSNEGEAKPWKAIRVDLVRCPYGGFAFALLGWTGSRMFRRDLRWYATDEKNMMLDNHALYDLTKKIFLKAKSEEEIFAHLGLEYLEPFERNA

SEQ ID NO: 1953 - DNA, 1587 bp, synthetic construct
  misc_feature 1..1587: note = Variant of terminal deoxynucleotidyltransferase
  source 1..1587: mol_type = other DNA
atgcaccatcatcatcatcatggcggtagcggcagccacggcattcgtaccatcgattcggacttcgggaagaaacgccagaaaaaaatggataaccacgatagttccgccatctatgaaatcaaatttcacgagtttgtgctgttcattctcgaagaaaaaatgggtgcgacgcgtcgtacttttctgacagatttagcccgcaagaaagggttccgcgtcgagaatgaactgtcagacagcgttacccacatcgtggcagaaaataattcacgctctgaagtattggcttggctgaaagaacacaagatggagaagaccaagcaattcgaactgctggatattagctggcttatcgaaagcatgaaagttggtaaaccggtggacaccaaggggaaataccagttggcggaatcgggtgagatgagtgcgaacccagatccgacagagggtcgtgaaaacgagctgcctcctactatgaagaccatttctccgtatgcgtgtcaacgcaaaaccaccctgaacaaccataatcaacgttttacggacgcactggaaattcttgcggaaaattacgagttcaaacgcaacgatgatgttgcgctggaatttcgtcgtgctatctccgtgctgaaaagccttccgtttgaggtacgtagcctgaaagacacggaaggattgccctggatcggtgatgaagtcaaagggattatggaagaaatcatcgaggtcggtgaatcgctggaagtgcaggccgtgctcaatgatgagcgctatcaaagcttcaaacgctttaagagtgtctttggagtgggggtgaagacagcagacaagtggtaccgtatgggtctgcgcacgctcgaggatgttcgttccagcaagaccctgaagttgaccccgatgcagaaagcgggtctgtgctattatgaagatcttgctcgcggcgttacgaaagccgaagctgacgcgatttctctgctggttcaggatgcagtcgctcgtttcgacccggatgcgctggtggagattgtcggtggatttcgtcgtgggaaacctcagggtcacgacgttgatctgcttatcacatctccgggagctgagaaagagcaagaagaccagctcctgcagaaagtgaccaatctgtggaagaaacaagggttgttgctgtacggtcgtctggaatggagtcagtttgaagatgggaaactcccatcccctaaggctgatgccctggaccatttcgcgaaatgctttctgatcctcaaactttatgatcataaagtggacaaaagcaaatgggaaatgccgacgggttcgaacgaaggcgaggccaaaccgtggaaagcaattcgcgtagatctggttcgttgcccctacggcggttttgcgtttgcgttgttgggttggaccggaagccgcatgttccgccgtgatctgcgctggtacgccactgacgagaagaacatgctgctggacaatcatgcgctgtatgacctgaccaagaaaatctttctcaaagctaaatcggaagaggaaattttcgcacatctggggcttgaatacctggaaccgttcgaacgtaacgca

SEQ ID NO: 1954 - protein, 529 aa, synthetic construct
  REGION 1..529: note = Variant of terminal deoxynucleotidyltransferase
MHHHHHHGGSGSHGIRTIDSDFGKKRQKKMDNHDSSAIYEIKFHEFVLFILEEKMGATRRTFLTDLARKKGFRVENELSDSVTHIVAENNSRSEVLAWLKEHKMEKTKQFELLDISWLIESMKVGKPVDTKGKYQLAESGEMSANPDPTEGRENELPPTMKTISPYACQRKTTLNNHNQRFTDALEILAENYEFKRNDDVALEFRRAISVLKSLPFEVRSLKDTEGLPWIGDEVKGIMEEIIEVGESLEVQAVLNDERYQSFKRFKSVFGVGVKTADKWYRMGLRTLEDVRSSKTLKLTPMQKAGLCYYEDLARGVTKAEADAISLLVQDAVARFDPDALVEIVGGFRRGKPQGHDVDLLITSPGAEKEQEDQLLQKVTNLWKKQGLLLYGRLEWSQFEDGKLPSPKADALDHFAKCFLILKLYDHKVDKSKWEMPTGSNEGEAKPWKAIRVDLVRCPYGGFAFALLGWTGSRMFRRDLRWYATDEKNMLLDNHALYDLTKKIFLKAKSEEEIFAHLGLEYLEPFERNA

SEQ ID NO: 1955 - DNA, 1587 bp, synthetic construct
  misc_feature 1..1587: note = Variant of terminal deoxynucleotidyltransferase
  source 1..1587: mol_type = other DNA
atgcaccatcatcatcatcatggcggtagcggcagccacggcattcgtaccatcgattcggacttcgggaagaaacgccagaaaaaaatggataaccacgatagttccgccatctatgaaatcaaatttcacgagtttgtgctgttcattctcgaagaaaaaatgggtgcgacgcgtcgtacttttctgacagatttagcccgcaagaaagggttccgcgtcgagaatgaactgtcagacagcgttacccacatcgtggcagaaaataattcacgctctgaagtattggcttggctgaaagaacacaagatggagaagaccaagcaattcgaactgctggatattagctggcttatcgaaagcatgaaagttggtaaaccggtggacaccaaggggaaataccagttggcggaatcgggtgagatgagtgcgaacccagatccgacagagggtcgtgaaaacgagctgcctcctactatgaagaccatttctccgtatgcgtgtcaacgccgcaccaccctgaacaaccataatcaacgttttacggacgcactggaaattcttgcggaaaattacgagttcaaacgcaacgatgatactgcgctggaatttcgtcgtgctatctccgtgctgaaaagccttccgtttgaggtacgtagcctgaaagacacggaaggattgccctggatcggtgatgaagtcaaagggattatggaagaaatcatcgaggtcggtgaatcgctggaagtgcaggccgtgctcaatgatgagcgctatcaaagcttcaaacgctttaagagtgtctttggagtgggggtgaagacagcagacaagtggtaccgtatgggtctgcgcacgctcgaggatgttcgtactagcaagaccctgaagttgaccccgatgcagaaagcgggtctgtgctattatgaagatcttgctcgcggcgttacgaaagccgaagctgacgcgatttctctgctggtccaggatgcagtcgcaactttcgacccggatgcgctggtggagattgtcggtggatttcgtcgtgggaaacctcagggtcacgacgttgatctgcttatcacatctccgggagctgagaaagagcaagaagaccagctcctgcagaaagtgaccaatctgtggaagaaacaagggttgttgctgtacggtcgtctggaatggagtcagtttgaagatgggaaactcccatcccctaaggctgatgccctggaccatttcgcgaaatgctttctgatcctcaaactttatgatcataaagtggacaaaagcaaatgggaaatgccgacgggttcgaacgaaggcgaggccaaaccgtggaaagcaattcgcgtagatctggttcgttgcccctacggcggttttgcttttgcgttgttgggttggaccggaagccgcatgttccgccgtgatctgcgctggtacgccacggacgagaagaacatgatgctggacaatcatgcgctgtatgacctgaccaagaaaatctttctcaaagctaaatcggaagaggaaattttcgcacatctggggcttgaatacctggaaccgttcgaacgtaacgca

SEQ ID NO: 1956 - protein, 529 aa, synthetic construct
  REGION 1..529: note = Variant of terminal deoxynucleotidyltransferase
MHHHHHHGGSGSHGIRTIDSDFGKKRQKKMDNHDSSAIYEIKFHEFVLFILEEKMGATRRTFLTDLARKKGFRVENELSDSVTHIVAENNSRSEVLAWLKEHKMEKTKQFELLDISWLIESMKVGKPVDTKGKYQLAESGEMSANPDPTEGRENELPPTMKTISPYACQRRTTLNNHNQRFTDALEILAENYEFKRNDDTALEFRRAISVLKSLPFEVRSLKDTEGLPWIGDEVKGIMEEIIEVGESLEVQAVLNDERYQSFKRFKSVFGVGVKTADKWYRMGLRTLEDVRTSKTLKLTPMQKAGLCYYEDLARGVTKAEADAISLLVQDAVATFDPDALVEIVGGFRRGKPQGHDVDLLITSPGAEKEQEDQLLQKVTNLWKKQGLLLYGRLEWSQFEDGKLPSPKADALDHFAKCFLILKLYDHKVDKSKWEMPTGSNEGEAKPWKAIRVDLVRCPYGGFAFALLGWTGSRMFRRDLRWYATDEKNMMLDNHALYDLTKKIFLKAKSEEEIFAHLGLEYLEPFERNA

SEQ ID NO: 1957 - DNA, 1587 bp, synthetic construct
  misc_feature 1..1587: note = Variant of terminal deoxynucleotidyltransferase
  source 1..1587: mol_type = other DNA
atgcaccatcatcatcatcatggcggtagcggcagccacggcattcgtaccatcgattcggacttcgggaagaaacgccagaagaagatggataaccacgatagttccgccatctatgaaatcaaatttcacgagtttgtgctgttcattctcgaagagaaaatgggtgcgacgcgtcgtacttttctgacagatttagcccgcaagaaagggttccgcgtcgagaatgaactgtcagacagcgttacccacatcgtggcagaaaataattcacgctctgaagtattggcttggctgaagactcacaagatggagaagaccaagcaattcgaactgctggatattagctggcttatcgaaagcatgaaagttggtaaaccggtggacaccaaggggaaataccagttgatggaatcgggtgagatgagtgcgaacccagatccgacagagggtcgtgaaaacgagctgcctcctactacgaagaccatttctcagtatgcgtgtcaacgccgcaccaccctgaacaaccataatcaacgttttacggacgcactggaaattcttgcggaaaattacgagttcaaacgcaacgatgatacttgtctgacctttatgcgtgctatttccgtgctgaaatgccttccgtttgaggtagttagcctgaaagacacggaaggattgccctggatcggtgatgaagtcaaagggattatggaagaaatcatcgaggtcggtgaatcgctggaagtgcaggccgtgctcaatgatgagcgctatcaaagcttcaaacgctttaagagtgtctttggagtgggggtgaagacagcagacaaatggtaccgtatgggtctgcgcacgctcgaggatgttcgttccagcaagaccctgaagttgaccccgatgcagaaagcgggtctgtgctattatgaagatcttgctgatggcgttacgaaagccgaagctgacgcgatttctctgctggttcaggatgcagtctggactttcgacccggatgcgctggtggagattacgggtggatttcgtcgtgggaaaccttttggtcacgacgttgatctgcttatcacatctccgggagctgagaaagaacaagaagaccagctcctgcagaaagtgaccaatctgtggaagaaacaagggttgttgctgtacggtcgtctgcgtgaaagtcgctttgaagatgggaaactcccatcccgcaagatcgatgccctggaccattttgcgaaatgctttctgatcctcaaactttatcaccataaagtggacaaaagcaaatgggaaatgccgacgggttcgaacgaaagcgaggccaaaagttggaaagcaattcgcgtagatctggttcgttgtccctacgatggttttgcgtttgcgttgttgggttggaccggaagccgcatgttcgaacgtgatctgcgccgctacgccacccacgagaagaagatgatgctggacaatcatgcgctgtatgacctgaccaagaaaatctttctcaaagctaaatcggaagaggaaattttcgcacatctggggcttgaatacctggaaccgtccgaacgtaacgca

SEQ ID NO: 1958 - protein, 529 aa, synthetic construct
  REGION 1..529: note = Variant of terminal deoxynucleotidyltransferase
MHHHHHHGGSGSHGIRTIDSDFGKKRQKKMDNHDSSAIYEIKFHEFVLFILEEKMGATRRTFLTDLARKKGFRVENELSDSVTHIVAENNSRSEVLAWLKTHKMEKTKQFELLDISWLIESMKVGKPVDTKGKYQLMESGEMSANPDPTEGRENELPPTTKTISQYACQRRTTLNNHNQRFTDALEILAENYEFKRNDDTCLTFMRAISVLKCLPFEVVSLKDTEGLPWIGDEVKGIMEEIIEVGESLEVQAVLNDERYQSFKRFKSVFGVGVKTADKWYRMGLRTLEDVRSSKTLKLTPMQKAGLCYYEDLADGVTKAEADAISLLVQDAVWTFDPDALVEITGGFRRGKPFGHDVDLLITSPGAEKEQEDQLLQKVTNLWKKQGLLLYGRLRESRFEDGKLPSRKIDALDHFAKCFLILKLYHHKVDKSKWEMPTGSNESEAKSWKAIRVDLVRCPYDGFAFALLGWTGSRMFERDLRRYATHEKKMMLDNHALYDLTKKIFLKAKSEEEIFAHLGLEYLEPSERNA

SEQ ID NO: 1959 - DNA, 1587 bp, synthetic construct; identical to SEQ ID NO: 1335
  misc_feature 1..1587: note = Variant of terminal deoxynucleotidyltransferase
  source 1..1587: mol_type = other DNA

SEQ ID NO: 1960 - protein, 529 aa, synthetic construct; identical to SEQ ID NO: 1336
  REGION 1..529: note = Variant of terminal deoxynucleotidyltransferase

SEQ ID NO: 1961 - DNA, 21 bp, synthetic construct
  misc_feature 1..21: note = Modified oligo substrate or product
  modified_base 1: mod_base = OTHER; note = 5'-6-carboxyfluorescein-thymidine
  modified_base 21: mod_base = OTHER; note = 2'-O-methylcytidine
  source 1..21: mol_type = other DNA
nttttttttttttttttatcn

SEQ ID NO: 1962 - DNA, 20 bp, synthetic construct
  misc_feature 1..20: note = Modified oligo substrate or product
  modified_base 19^20: mod_base = OTHER; note = there is a phosphorothioate bond between these bases
  modified_base 1: mod_base = OTHER; note = 5'-6-carboxyfluorescein-thymidine
  modified_base 20: mod_base = OTHER; note = 2'-O-methylcytidine
  source 1..20: mol_type = other DNA
nttttttttttttttttatn

SEQ ID NO: 1963 - DNA, 21 bp, synthetic construct
  misc_feature 1..21: note = Modified oligo substrate or product
  modified_base 1: mod_base = OTHER; note = 5'-6-carboxyfluorescein-thymidine
  modified_base 21: mod_base = OTHER; note = 2'-deoxyfluorocytidine
  source 1..21: mol_type = other DNA
nttttttttttttttttatcn

SEQ ID NO: 1964 - DNA, 18 bp, synthetic construct
  misc_feature 1..18: note = Modified oligo substrate or product
  modified_base 17^18: mod_base = OTHER; note = there is a phosphorothioate bond between these bases
  modified_base 1: mod_base = OTHER; note = 5'-6-carboxyfluorescein-thymidine
  modified_base 18: mod_base = OTHER; note = 2'-deoxyfluoroadenosine
  source 1..18: mol_type = other DNA
ntttttttttttatcacn

SEQ ID NO: 1965 - DNA, 18 bp, synthetic construct
  misc_feature 1..18: note = Modified oligo substrate or product
  modified_base 17^18: mod_base = OTHER; note = there is a phosphorothioate bond between these bases
  modified_base 1: mod_base = OTHER; note = 5'-6-carboxyfluorescein-thymidine
  modified_base 18: mod_base = OTHER; note = 2'-O-methylcytidine
  source 1..18: mol_type = other DNA
ntttttttttttatcacn

SEQ ID NO: 1966 - DNA, 18 bp, synthetic construct
  misc_feature 1..18: note = Modified oligo substrate or product
  modified_base 17^18: mod_base = OTHER; note = there is a phosphorothioate bond between these bases
  modified_base 1: mod_base = OTHER; note = 5'-6-carboxyfluorescein-thymidine
  modified_base 18: mod_base = OTHER; note = 2'-O-methyladenosine
  source 1..18: mol_type = other DNA
ntttttttttttatcacn

SEQ ID NO: 1967 - DNA, 18 bp, synthetic construct
  misc_feature 1..18: note = Modified oligo substrate or product
  modified_base 17^18: mod_base = OTHER; note = there is a phosphorothioate bond between these bases
  modified_base 1: mod_base = OTHER; note = 5'-6-carboxyfluorescein-thymidine
  modified_base 17: mod_base = OTHER; note = 2'-O-methylguanosine
  modified_base 18: mod_base = OTHER; note = 2'-O-methylcytidine
  source 1..18: mol_type = other DNA
nttttttttttttttann

SEQ ID NO: 1968 - DNA, 19 bp, synthetic construct
  misc_feature 1..19: note = Modified oligo substrate or product
  modified_base 18^19: mod_base = OTHER; note = there is a phosphorothioate bond between these bases
  modified_base 1: mod_base = OTHER; note = 5'-6-carboxyfluorescein-thymidine
  modified_base 19: mod_base = OTHER; note = 2'-O-methylcytidine
  source 1..19: mol_type = other DNA
nttttttttttttatcacn

SEQ ID NO: 1969 - DNA, 18 bp, synthetic construct
  misc_feature 1..18: note = Modified oligo substrate or product
  modified_base 17^18: mod_base = OTHER; note = there is a phosphorothioate bond between these bases
  modified_base 1: mod_base = OTHER; note = 5'-6-carboxyfluorescein-thymidine
  modified_base 17: mod_base = OTHER; note = 2'-O-methyluridine
  modified_base 18: mod_base = OTHER; note = 2'-O-methylguanosine
  source 1..18: mol_type = other DNA
nttttttttttttttann

SEQ ID NO: 1970 - DNA, 18 bp, synthetic construct
  misc_feature 1..18: note = Modified oligo substrate or product
  modified_base 17^18: mod_base = OTHER; note = there is a phosphorothioate bond between these bases
  modified_base 1: mod_base = OTHER; note = 5'-6-carboxyfluorescein-thymidine
  modified_base 17: mod_base = OTHER; note = 2'-O-methyluridine
  modified_base 18: mod_base = OTHER; note = 2'-O-methylguanosine
  source 1..18: mol_type = other DNA
nttttttttttttttann

SEQ ID NO: 1971 - DNA, 18 bp, synthetic construct
  misc_feature 1..18: note = Modified oligo substrate or product
  modified_base 1: mod_base = OTHER; note = 5'-6-carboxyfluorescein-thymidine
  modified_base 18: mod_base = OTHER; note = 2'-O-methylcytidine
  source 1..18: mol_type = other DNA
ntttttttttttttatcn

SEQ ID NO: 1972 - DNA, 18 bp, synthetic construct
  misc_feature 1..18: note = Modified oligo substrate or product
  modified_base 17^18: mod_base = OTHER; note = there is a phosphorothioate bond between these bases
  modified_base 1: mod_base = OTHER; note = 5'-6-carboxyfluorescein-thymidine
  modified_base 18: mod_base = OTHER; note = 2'-O-methylguanosine
  source 1..18: mol_type = other DNA
nttttttttttttttatn

SEQ ID NO: 1973 - DNA, 20 bp, synthetic construct
  misc_feature 1..20: note = Modified oligo substrate or product
  modified_base 1: mod_base = OTHER; note = 5'-6-carboxyfluorescein-thymidine
  modified_base 18: mod_base = OTHER; note = 2'-O-methyladenosine
  modified_base 19: mod_base = OTHER; note = 2'-O-methyluridine
  modified_base 20: mod_base = OTHER; note = 2'-O-methylcytidine
  source 1..20: mol_type = other DNA
nttttttttttttttttnnn

SEQ ID NO: 1974 - DNA, 20 bp, synthetic construct
  misc_feature 1..20: note = Modified oligo substrate or product
  modified_base 1: mod_base = OTHER; note = 5'-6-carboxyfluorescein-thymidine
  modified_base 18: mod_base = OTHER; note = 2'-O-methyluridine
  modified_base 19: mod_base = OTHER; note = 2'-O-methyluridine
  modified_base 20: mod_base = OTHER; note = 2'-O-methylcytidine
  source 1..20: mol_type = other DNA
nttttttttttttttttnnn

SEQ ID NO: 1975 - DNA, 20 bp, synthetic construct
  misc_feature 1..20: note = Modified oligo substrate or product
  modified_base 1: mod_base = OTHER; note = 5'-6-carboxyfluorescein-thymidine
  modified_base 18: mod_base = OTHER; note = 2'-O-methylcytidine
  modified_base 19: mod_base = OTHER; note = 2'-O-methyluridine
  modified_base 20: mod_base = OTHER; note = 2'-O-methylguanosine
  source 1..20: mol_type = other DNA
nttttttttttttttttnnn

SEQ ID NO: 1976 - DNA, 18 bp, synthetic construct
  misc_feature 1..18: note = Modified oligo substrate or product
  modified_base 17^18: mod_base = OTHER; note = there is a phosphorothioate bond between these bases
  modified_base 1: mod_base = OTHER; note = 5'-6-carboxyfluorescein-thymidine
  modified_base 18: mod_base = OTHER; note = 2'-O-methyladenosine
  source 1..18: mol_type = other DNA
nttttttttttttttatn

SEQ ID NO: 1977 - DNA, 18 bp, synthetic construct
  misc_feature 1..18: note = Modified oligo substrate or product
  modified_base 17^18: mod_base = OTHER; note = there is a phosphorothioate bond between these bases
  modified_base 1: mod_base = OTHER; note = 5'-6-carboxyfluorescein-thymidine
  modified_base 18: mod_base = OTHER; note = 2'-O-methylcytidine
  source 1..18: mol_type = other DNA
nttttttttttttttatn

SEQ ID NO: 1978 - DNA, 18 bp, synthetic construct
  misc_feature 1..18: note = Modified oligo substrate or product
  modified_base 17^18: mod_base = OTHER; note = there is a phosphorothioate bond between these bases
  modified_base 1: mod_base = OTHER; note = 5'-6-carboxyfluorescein-thymidine
  modified_base 18: mod_base = OTHER; note = 2'-O-methyluridine
  source 1..18: mol_type = other DNA
nttttttttttttttatn

SEQ ID NO: 1979 - DNA, 18 bp, synthetic construct
  misc_feature 1..18: note = Modified oligo substrate or product
  modified_base 18: mod_base = OTHER; note = 2'-O-methylcytidine
  source 1..18: mol_type = other DNA
ttttttttttttttatcn

SEQ ID NO: 1980 - DNA, 22 bp, synthetic construct
  misc_feature 1..22: note = Modified oligo substrate or product
  modified_base 1: mod_base = OTHER; note = 5'-6-carboxyfluorescein-thymidine
  modified_base 21: mod_base = OTHER; note = 2'-O-methylcytidine
  modified_base 22: mod_base = OTHER; note = 2',3'-dideoxyguanosine
  source 1..22: mol_type = other DNA
nttttttttttttttttatcnn

SEQ ID NO: 1981 - DNA, 21 bp, synthetic construct
  misc_feature 1..21: note = Modified oligo substrate or product
  modified_base 19^20: mod_base = OTHER; note = there is a phosphorothioate bond between these bases
  modified_base 1: mod_base = OTHER; note = 5'-6-carboxyfluorescein-thymidine
  modified_base 20: mod_base = OTHER; note = 2'-O-methylcytidine
  modified_base 21: mod_base = OTHER; note = 2',3'-dideoxyguanosine
  source 1..21: mol_type = other DNA
nttttttttttttttttatnn

SEQ ID NO: 1982 - DNA, 22 bp, synthetic construct
  misc_feature 1..22: note = Modified oligo substrate or product
  modified_base 1: mod_base = OTHER; note = 5'-6-carboxyfluorescein-thymidine
  modified_base 21: mod_base = OTHER; note = 2'-deoxyfluorocytidine
  modified_base 22: mod_base = OTHER; note = 2'-O-methyladenosine
  source 1..22: mol_type = other DNA
nttttttttttttttttatcnn

SEQ ID NO: 1983 - DNA, 22 bp, synthetic construct
  misc_feature 1..22: note = Modified oligo substrate or product
  modified_base 1: mod_base = OTHER; note = 5'-6-carboxyfluorescein-thymidine
  modified_base 21: mod_base = OTHER; note = 2'-deoxyfluorocytidine
  modified_base 22: mod_base = OTHER; note = 2',3'-dideoxyguanosine
  source 1..22: mol_type = other DNA
nttttttttttttttttatcnn

SEQ ID NO: 1984 - DNA, 19 bp, synthetic construct
  misc_feature 1..19: note = Modified oligo substrate or product
  modified_base 17^18: mod_base = OTHER; note = there is a phosphorothioate bond between these bases
  modified_base 18^19: mod_base = OTHER; note = there is a phosphorothioate bond between these bases
  modified_base 1: mod_base = OTHER; note = 5'-6-carboxyfluorescein-thymidine
  modified_base 18: mod_base = OTHER; note = 2'-deoxyfluoroadenosine
  modified_base 19: mod_base = OTHER; note = adenosine ribonucleotide
  source 1..19: mol_type = other DNA
ntttttttttttatcacnn

SEQ ID NO: 1985 - DNA, 19 bp, synthetic construct
  misc_feature 1..19: note = Modified oligo substrate or product
  modified_base 17^18: mod_base = OTHER; note = there is a phosphorothioate bond between these bases
  modified_base 18^19: mod_base = OTHER; note = there is a phosphorothioate bond between these bases
  modified_base 1: mod_base = OTHER; note = 5'-6-carboxyfluorescein-thymidine
  modified_base 18: mod_base = OTHER; note = 2'-O-methylcytidine
  modified_base 19: mod_base = OTHER; note = guanosine ribonucleotide
  source 1..19: mol_type = other DNA
ntttttttttttatcacnn

SEQ ID NO: 1986 - DNA, 19 bp, synthetic construct
  misc_feature 1..19: note = Modified oligo substrate or product
  modified_base 17^18: mod_base = OTHER; note = there is a phosphorothioate bond between these bases
  modified_base 18^19: mod_base = OTHER; note = there is a phosphorothioate bond between these bases
  modified_base 1: mod_base = OTHER; note = 5'-6-carboxyfluorescein-thymidine
  modified_base 18: mod_base = OTHER; note = 2'-O-methyladenosine
  modified_base 19: mod_base = OTHER; note = guanosine ribonucleotide
  source 1..19: mol_type = other DNA
ntttttttttttatcacnn

SEQ ID NO: 1987 - DNA, 19 bp, synthetic construct
  misc_feature 1..19: note = Modified oligo substrate or product
  modified_base 17^18: mod_base = OTHER; note = there is a phosphorothioate bond between these bases
  modified_base 18^19: mod_base = OTHER; note = there is a phosphorothioate bond between these bases
  modified_base 1: mod_base = OTHER; note = 5'-6-carboxyfluorescein-thymidine
  modified_base 18: mod_base = OTHER; note = 2'-O-methylcytidine
  modified_base 19: mod_base = OTHER; note = uridine ribonucleotide
  source 1..19: mol_type = other DNA
ntttttttttttatcacnn

SEQ ID NO: 1988 - DNA, 19 bp, synthetic construct
  misc_feature 1..19: note = Modified oligo substrate or product
  modified_base 17^18: mod_base = OTHER; note = there is a phosphorothioate bond between these bases
  modified_base 18^19: mod_base = OTHER; note = there is a phosphorothioate bond between these bases
  modified_base 1: mod_base = OTHER; note = 5'-6-carboxyfluorescein-thymidine
  modified_base 17: mod_base = OTHER; note = 2'-O-methylguanosine
  modified_base 18: mod_base = OTHER; note = 2'-O-methylcytidine
  modified_base 19: mod_base = OTHER; note = guanosine ribonucleotide
  source 1..19: mol_type = other DNA
nttttttttttttttannn

SEQ ID NO: 1989 - DNA, 19 bp, synthetic construct
  misc_feature 1..19: note = Modified oligo substrate or product
  modified_base 17^18: mod_base = OTHER; note = there is a phosphorothioate bond between these bases
  modified_base 1: mod_base = OTHER; note = 5'-6-carboxyfluorescein-thymidine
  modified_base 17: mod_base = OTHER; note = 2'-O-methylguanosine
  modified_base 18: mod_base = OTHER; note = 2'-O-methylcytidine
  modified_base 19: mod_base = OTHER; note = 2'-O-methylguanosine
  source 1..19: mol_type = other DNA
nttttttttttttttannn

SEQ ID NO: 1990 - DNA, 20 bp, synthetic construct
  misc_feature 1..20: note = Modified oligo substrate or product
  modified_base 18^19: mod_base = OTHER; note = there is a phosphorothioate bond between these bases
  modified_base 1: mod_base = OTHER; note = 5'-6-carboxyfluorescein-thymidine
  modified_base 19: mod_base = OTHER; note = 2'-O-methylcytidine
  modified_base 20: mod_base = OTHER; note = 2'-O-methylguanosine
  source 1..20: mol_type = other DNA
nttttttttttttatcacnn

SEQ ID NO: 1991 - DNA, 19 bp, synthetic construct
  misc_feature 1..19: note = Modified oligo substrate or product
  modified_base 17^18: mod_base = OTHER; note = there is a phosphorothioate bond between these bases
  modified_base 1: mod_base = OTHER; note = 5'-6-carboxyfluorescein-thymidine
  modified_base 17: mod_base = OTHER; note = 2'-O-methyluridine
  modified_base 18: mod_base = OTHER; note = 2'-O-methylguanosine
  modified_base 19: mod_base = OTHER; note = 2'-O-methyladenosine
  source 1..19: mol_type = other DNA
nttttttttttttttannn

SEQ ID NO: 1992 - DNA, 19 bp, synthetic construct
  misc_feature 1..19: note = Modified oligo substrate or product
  modified_base 18^19: mod_base = OTHER; note = there is a phosphorothioate bond between these bases
  modified_base 1: mod_base = OTHER; note = 5'-6-carboxyfluorescein-thymidine
  modified_base 18: mod_base = OTHER; note = 2'-O-methylcytidine
  modified_base 19: mod_base = OTHER; note = 2',3'-dideoxyguanosine
  source 1..19: mol_type = other DNA
ntttttttttttttatcnn

SEQ ID NO: 1993 - DNA, 19 bp, synthetic construct
  misc_feature 1..19: note = Modified oligo substrate or product
  modified_base 17^18: mod_base = OTHER; note = there is a phosphorothioate bond between these bases
  modified_base 1: mod_base = OTHER; note = 5'-6-carboxyfluorescein-thymidine
  modified_base 18: mod_base = OTHER; note = 2'-O-methylguanosine
  modified_base 19: mod_base = OTHER; note = 2'-O-methyladenosine with a 3'-PO4 blocking group
  source 1..19: mol_type = other DNA
nttttttttttttttatnn

SEQ ID NO: 1994 - DNA, 21 bp, synthetic construct
  misc_feature 1..21: note = Modified oligo substrate or product
  modified_base 1: mod_base = OTHER; note = 5'-6-carboxyfluorescein-thymidine
  modified_base 18: mod_base = OTHER; note = 2'-O-methyladenosine
  modified_base 19: mod_base = OTHER; note = 2'-O-methyluridine
  modified_base 20: mod_base = OTHER; note = 2'-O-methylcytidine
  modified_base 21: mod_base = OTHER; note = 2'-O-methyladenosine
  source 1..21: mol_type = other DNA
nttttttttttttttttnnnn

SEQ ID NO: 1995 - DNA, 21 bp, synthetic construct
  misc_feature 1..21: note = Modified oligo substrate or product
  modified_base 1: mod_base = OTHER; note = 5'-6-carboxyfluorescein-thymidine
  modified_base 18: mod_base = OTHER; note = 2'-O-methyluridine
  modified_base 19: mod_base = OTHER; note = 2'-O-methyluridine
  modified_base 20: mod_base = OTHER; note = 2'-O-methylcytidine
  modified_base 21: mod_base = OTHER; note = 2'-O-methyladenosine
  source 1..21: mol_type = other DNA
nttttttttttttttttnnnn

SEQ ID NO: 1996 - DNA, 21 bp, synthetic construct
  misc_feature 1..21: note = Modified oligo substrate or product
  modified_base 1: mod_base = OTHER; note = 5'-6-carboxyfluorescein-thymidine
  modified_base 18: mod_base = OTHER; note = 2'-O-methylcytidine
  modified_base 19: mod_base = OTHER; note = 2'-O-methyluridine
  modified_base 20: mod_base = OTHER; note = 2'-O-methylguanosine
  modified_base 21: mod_base = OTHER; note = 2'-O-methyladenosine
  source 1..21: mol_type = other DNA
nttttttttttttttttnnnn

SEQ ID NO: 1997 - DNA, 19 bp, synthetic construct
  misc_feature 1..19: note = Modified oligo substrate or product
  modified_base 17^18: mod_base = OTHER; note = there is a phosphorothioate bond between these bases
  modified_base 1: mod_base = OTHER; note = 5'-6-carboxyfluorescein-thymidine
  modified_base 18: mod_base = OTHER; note = 2'-O-methyladenosine
  modified_base 19: mod_base = OTHER; note = 2'-O-methyladenosine with a 3'-PO4 blocking group
  source 1..19: mol_type = other DNA
nttttttttttttttatnn

SEQ ID NO: 1998 - DNA, 19 bp, synthetic construct
  misc_feature 1..19: note = Modified oligo substrate or product
  modified_base 17^18: mod_base = OTHER; note = there is a phosphorothioate bond between these bases
  modified_base 1: mod_base = OTHER; note = 5'-6-carboxyfluorescein-thymidine
  modified_base 18: mod_base = OTHER; note = 2'-O-methylguanosine
  modified_base 19: mod_base = OTHER; note = 2'-O-methylcytidine with a 3'-PO4 blocking group
  source 1..19: mol_type = other DNA
nttttttttttttttatnn

SEQ ID NO: 1999 - DNA, 19 bp, synthetic construct
  misc_feature 1..19: note = Modified oligo substrate or product
  modified_base 17^18: mod_base = OTHER; note = there is a phosphorothioate bond between these bases
  modified_base 1: mod_base = OTHER; note = 5'-6-carboxyfluorescein-thymidine
  modified_base 18: mod_base = OTHER; note = 2'-O-methylguanosine
  modified_base 19: mod_base = OTHER; note = 2'-O-methyluridine with a 3'-PO4 blocking group
  source 1..19: mol_type = other DNA
nttttttttttttttatnn

SEQ ID NO: 2000 - DNA, 19 bp, synthetic construct
  misc_feature 1..19: note = Modified oligo substrate or product
  modified_base 1: mod_base = OTHER; note = 5'-6-carboxyfluorescein-thymidine
  modified_base 18: mod_base = OTHER; note = 2'-O-methylcytidine
  modified_base 19: mod_base = OTHER; note = 2',3'-dideoxyguanosine
  source 1..19: mol_type = other DNA
ntttttttttttttatcnn

SEQ ID NO: 2001 - DNA, 19 bp, synthetic construct
  misc_feature 1..19: note = Modified oligo substrate or product
  modified_base 18: mod_base = OTHER; note = 2'-O-methylcytidine
  modified_base 19: mod_base = OTHER; note = 2',3'-dideoxyguanosine
  source 1..19: mol_type = other DNA
ttttttttttttttatcnn

SEQ ID NO: 2002 - DNA, 18 bp, synthetic construct
  misc_feature 1..18: note = Modified oligo substrate or product
  modified_base 1: mod_base = OTHER; note = 5'-6-carboxyfluorescein-thymidine
  modified_base 16: mod_base = OTHER; note = 2'-O-methyluridine
  modified_base 17: mod_base = OTHER; note = 2'-O-methylguanosine
  modified_base 18: mod_base = OTHER; note = 2'-O-methyladenosine
  source 1..18: mol_type = other DNA
nttttttttttttttnnn

SEQ ID NO: 2003 - DNA, 1587 bp, synthetic construct
  misc_feature 1..1587: note = Variant of terminal deoxynucleotidyltransferase
  source 1..1587: mol_type = other DNA
atgcaccatcatcatcatcatggcggtagcggcagccacggcattcgtaccatcgattcggacttcgggaagaaacgccagaaaaaaatggataaccacgatagttccgccatctatgaaatcaaatttcacgagtttgtgctgttcattctcgaagaaaaaatgggtgcgacgcgtcgtacttttctgacagatttagcccgcaagaaagggttccgcgtcgagaatgaactgtcagacagcgttacccacatcgtggcagaaaataattcacgctctgaagtattggcttggctgaaagaacacaagatggagaagaccaagcaattcgaactgctggatattagctggcttatcgaaagcatgaaagttggtaaaccggtggacaccaaggggaaataccagttggcggaatcgggtgagatgagtgcgaacccagatccgacagagggtcgtgaaaacgagctgcctcctactatgaagaccgtttctccgtatgcgtgtcaacgccgcaccaccctgaacaaccataatcaacgttttacggacgcactggaaattcttgcggaaaattacgagttcaaacgcaacgatgatactgcgctggaatttcgtcgtgctatctccgtgctgaaaagccttccgtttgaggtacgtagcctgaaagacacggaaggattgccctggatcggtgatgaagtcaaagggattatggaagaaatcatcgaggtcggtgaatcgctggaagtgcaggccgtgctcaatgatgagcgctatcaaagcttcaaacgctttaagagtgtctttggagtgggggtgaagacagcagacaagtggtaccgtatgggtctgcgcacgctcgaggatgttcgttccagcaagaccctgaagttgaccccgatgcagaaagcgggtctgtgctattatgaagatcttgctcgcggcgttacgaaagccgaagctgacgcgatttctctgctggttcaggatgcagtcgcaactttcgacccggatgcgctggtggagattgtcggtggatttcgtcgtgggaaacctcagggtcacgacgttgatctgcttatcacatctccgggagctgagaaagagcaagaagaccagctcctgcagaaagtgaccaatctgtggaagaaacaagggttgttgctgtacggtcgtctggaatggagtcagtttgaagatgggaaactcccatccggtaaggctgatgccctggaccaccacgcgaaatgctttctgatcctcaaactttatgatcataaagtggacaaaagcaaatgggaaatgccgacgggttcgaacatgggcgaggccaaaccgtggaaagcaattcgcgtagatctgcttcgttgcccctacggcggttttgcgtttgcgttgttgggttggaccggaagccgcatgttccgccgtgatctgcgctggtacgccactgacgagaagaacatgatgctggacaatcatgcgctgtatgacctgaccaagaaaatctttctcaaagctaaatcggaagaggaaattttcgcacatctggggcttgaatacctggaaccgttcgaacgtaacgca

SEQ ID NO: 2004 - protein, 529 aa, synthetic construct
  REGION 1..529: note = Variant of terminal deoxynucleotidyltransferase
MHHHHHHGGSGSHGIRTIDSDFGKKRQKKMDNHDSSAIYEIKFHEFVLFILEEKMGATRRTFLTDLARKKGFRVENELSDSVTHIVAENNSRSEVLAWLKEHKMEKTKQFELLDISWLIESMKVGKPVDTKGKYQLAESGEMSANPDPTEGRENELPPTMKTVSPYACQRRTTLNNHNQRFTDALEILAENYEFKRNDDTALEFRRAISVLKSLPFEVRSLKDTEGLPWIGDEVKGIMEEIIEVGESLEVQAVLNDERYQSFKRFKSVFGVGVKTADKWYRMGLRTLEDVRSSKTLKLTPMQKAGLCYYEDLARGVTKAEADAISLLVQDAVATFDPDALVEIVGGFRRGKPQGHDVDLLITSPGAEKEQEDQLLQKVTNLWKKQGLLLYGRLEWSQFEDGKLPSGKADALDHHAKCFLILKLYDHKVDKSKWEMPTGSNMGEAKPWKAIRVDLLRCPYGGFAFALLGWTGSRMFRRDLRWYATDEKNMMLDNHALYDLTKKIFLKAKSEEEIFAHLGLEYLEPFERNA

SEQ ID NO: 2005 - DNA, 1587 bp, synthetic construct
  misc_feature 1..1587: note = Variant of terminal deoxynucleotidyltransferase
  source 1..1587: mol_type = other DNA
atgcaccatcatcatcatcatggcggtagcggcagccacggcattcgtaccatcgattcggacttcgggaagaaacgccagaaaaaaatggataaccacgatagttccgccatctatgaaatcaaatttcacgagtttgtgctgttcattctcgaagaaaaaatgggtgcgacgcgtcgtacttttctgacagatttagcccgcaagaaagggttccgcgtcgagaatgaactgtcagacagcgttacccacatcgtggcagaaaataattcacgctctgaagtattggcttggctgaaagaacacaagatggagaagaccaagcaattcgaactgctggatattagctggcttatcgaaagcatgaaagttggtaaaccggtggacaccaaggggaaataccagttggcggaatcgggtgagatgagtgcgaacccagatccgacagagggtcgtgaaaacgagctgcctcctactatgaagaccgtttctccgtatgcgtgtcaacgccgcaccaccctgaacaaccataatcaacgttttacggacgcactggaaattcttgcggaaaattacgagttcaaacgcaacgatgatactgcgctggaatttcgtcgtgctatctccgtgctgaaaagccttccgtttgaggtacgtagcctgaaagacacggaaggattgccctggatcggtgatgaagtcaaagggattatggaagaaatcatcgaggtcggtgaatcgctggaagtgcaggccgtgctcaatgatgagcgctatcaaagcttcaaacgctttaagagtgtctttggagtgggggtgaagacagcagacaagtggtaccgtatgggtctgcgcacgctcgaggatgttcgttccagcaagaccctgaagttgaccccgatgcagaaagcgggtctgtgctattatgaagatcttgctcgcggcgttacgaaagccgaagctgacgcgatttctctgctggttcaggatgcagtcgcaactttcgacccggatgcgctggtggagattgtcggtggatttcgtcgtgggaaacctcagggtcacgacgttgatctgcttatctcttctccgggagctgagaaagagcaagaagaccagctcctgcagaaagtgaccaatctgtggaagaaacaagggttgttgctgtacggtcgtctggaatggagtcagtttgaagatgggaaactcccatccggtaaggctgatgccctggaccaccacgcgaaatgctttctgatcctcaaactttatgatcataaagtggacaaaagcaaatgggaaatgccgacgggttcgaacatgggcgaggccaaaccgtggaaagcaattcgcgtagatctggttcgttgcccctacggcggttttgcgtttgcgttgttgggttggaccggaagccgcatgttccgccgtgatctgcgctggtacgccactgacgagaagaacatgatgctggacaatcatgcgctgtatgacctgaccaagaaaatctttctcaaagctaaatcggaagaggaaattttcgcacatctggggcttgaatacctggaaccgttcgaacgtaacgca

SEQ ID NO: 2006 - protein, 529 aa, synthetic construct
  REGION 1..529: note = Variant of terminal deoxynucleotidyltransferase
MHHHHHHGGSGSHGIRTIDSDFGKKRQKKMDNHDSSAIYEIKFHEFVLFILEEKMGATRRTFLTDLARKKGFRVENELSDSVTHIVAENNSRSEVLAWLKEHKMEKTKQFELLDISWLIESMKVGKPVDTKGKYQLAESGEMSANPDPTEGRENELPPTMKTVSPYACQRRTTLNNHNQRFTDALEILAENYEFKRNDDTALEFRRAISVLKSLPFEVRSLKDTEGLPWIGDEVKGIMEEIIEVGESLEVQAVLNDERYQSFKRFKSVFGVGVKTADKWYRMGLRTLEDVRSSKTLKLTPMQKAGLCYYEDLARGVTKAEADAISLLVQDAVATFDPDALVEIVGGFRRGKPQGHDVDLLISSPGAEKEQEDQLLQKVTNLWKKQGLLLYGRLEWSQFEDGKLPSGKADALDHHAKCFLILKLYDHKVDKSKWEMPTGSNMGEAKPWKAIRVDLVRCPYGGFAFALLGWTGSRMFRRDLRWYATDEKNMMLDNHALYDLTKKIFLKAKSEEEIFAHLGLEYLEPFERNA

SEQ ID NO: 2007 - DNA, 1587 bp, synthetic construct
  misc_feature 1..1587: note = Variant of terminal deoxynucleotidyltransferase
  source 1..1587: mol_type = other DNA
atgcaccatcatcatcatcatggcggtagcggcagccacggcattcgtaccatcgattcggacttcgggaagaaacgccagaaaaaaatggataaccacgatagttccgccatctatgaaatcaaatttcacgagtttgtgctgttcattctcgaagaaaaaatgggtgcgacgcgtcgtacttttctgacagatttagcccgcaagaaagggttccgcgtcgagaatgaactgtcagacagcgttacccacatcgtggcagaaaataattcacgctctgaagtattggcttggctgaaagaacacaagatggagaagaccaagcaattcgaactgctggatattagctggcttatcgaaagcatgaaagttggtaaaccggtggacaccaaggggaaataccagttggcggaatcgggtgagatgagtgcgaacccagatccgacagagggtcgtgaaaacgagctgcctcctactatgaagaccgtttctccgtatgcgtgtcaacgccgcaccaccctgaacaaccataatcaacgttttacggacgcactggaaattcttgcggaaaattacgagttcaaacgcaacgatgatactgcgctggaatttcgtcgtgctatctccgtgctgaaaagccttccgtttgaggtacgtagcctgaaagacacggaaggattgccctggatcggtgatgaagtcaaagggattatggaagaaatcatcgaggtcggtgaatcgctggaagtgcaggccgtgctcaatgatgagtggtatcaaagcttcaaacgctttaagagtgtctttggagtgggggtgaagacagcagacaagtggtaccgtatgggtctgcgcacgctcgaggatgttcgttccagcaagaccctgaagttgaccccgatgcagaaagcgggtctgtgctattatgaagatcttgctcgcggcgttacgaaagccgaagctgacgcgatttctctgctggttcaggatgcagtcgcaactttcgacccggatgcgctggtggagattgtcggtggatttcgtcgtgggaaacctcagggtcacgacgttgatctgcttatcacatctccgggagctgagaaagagcaagaagaccagctcctgcagaaagtgaccaatctgtggaagaaacaagggttgttgctgtacggtcgtctggaatggagtcagtttgaagatgggaaactcccatccggtaaggctgatgccctggaccaccacgcgaaatgctttctgatcctcaaactttatgatcataaagtggacaaaagcaaatgggaaatgccgacgggttcgaacatgggcgaggccaaaccgtggaaagcaattcgcgtagatctggttcgttgcccctacggcggttttgcgtttgcgttgttgggttggaccggaagccgcatgttccgccgtgatctgcgctggtacgccactgacgagaagaacatgatgctggacaatcatgcgctgtatgacctgaccaagaaaatctttctcaaagctaaatcggaagaggaaattttcgcacatctggggcttgaatacctggaaccgttcgaacgtaacgca

SEQ ID NO: 2008 - protein, 529 aa, synthetic construct
  REGION 1..529: note = Variant of terminal deoxynucleotidyltransferase
MHHHHHHGGSGSHGIRTIDSDFGKKRQKKMDNHDSSAIYEIKFHEFVLFILEEKMGATRRTFLTDLARKKGFRVENELSDSVTHIVAENNSRSEVLAWLKEHKMEKTKQFELLDISWLIESMKVGKPVDTKGKYQLAESGEMSANPDPTEGRENELPPTMKTVSPYACQRRTTLNNHNQRFTDALEILAENYEFKRNDDTALEFRRAISVLKSLPFEVRSLKDTEGLPWIGDEVKGIMEEIIEVGESLEVQAVLNDEWYQSFKRFKSVFGVGVKTADKWYRMGLRTLEDVRSSKTLKLTPMQKAGLCYYEDLARGVTKAEADAISLLVQDAVATFDPDALVEIVGGFRRGKPQGHDVDLLITSPGAEKEQEDQLLQKVTNLWKKQGLLLYGRLEWSQFEDGKLPSGKADALDHHAKCFLILKLYDHKVDKSKWEMPTGSNMGEAKPWKAIRVDLVRCPYGGFAFALLGWTGSRMFRRDLRWYATDEKNMMLDNHALYDLTKKIFLKAKSEEEIFAHLGLEYLEPFERNA

SEQ ID NO: 2009 - DNA, 1587 bp, synthetic construct
  misc_feature 1..1587: note = Variant of terminal deoxynucleotidyltransferase
  source 1..1587: mol_type = other DNA
atgcaccatcatcatcatcatggcggtagcggcagccacggcattcgtaccatcgattcggacttcgggaagaaacgccagaaaaaaatggataaccacgatagttccgccatctatgaaatcaaatttcacgagtttgtgctgttcattctcgaagaaaaaatgggtgcgacgcgtcgtacttttctgacagatttagcccgcaagaaagggttccgcgtcgagaatgaactgtcagacagcgttacccacatcgtggcagaaaataattcacgctctgaagtattggcttggctgaaagaacacaagatggagaagaccaagcaattcgaactgctggatattagctggcttatcgaaagcatgaaagttggtaaaccggtggacaccaaggggaaataccagttggcggaatcgggtgagatgagtgcgaacccagatccgacagagggtcgtgaaaacgagctgcctcctactatgaagaccgtttctccgtatgcgtgtcaacgccgcaccaccctgaacaaccataatcaacgttttacggacgcactggaaattcttgcggaaaattacgagttcaaacgcaacgatgatactgcgctggaatttcgtcgtgctatctccgtgctgaaaagccttccgtttgaggtacgtagcctgaaagacacggaaggattgccctggatcggtgatgaagtcaaagggattatggaagaaatcatcgaggtcggtgaatcgctggaagtgcaggccgtgctcaatgatgagcgctatcaaagcttcaaacgctttaagagtgtctttggagtgggggtgaagacagcagacaagtggtaccgtatgggtctgcgcacgctcgaggatgttcgttccagcaagaccctgaagttgaccccgatgcagaaagcgggtctgtgctattatgaagatcttgctcgcggcgttacgaaagccgaagctgacgcgatttctctgctggttcaggatgcagtcgcaactttcgacccggatgcgctggtggagattgtcggtggatttcgtcgtgggaaacctcagggtcacgacgttgatctgcttatcacatctccgggagctgagaaagagcaagaagaccagctcctgcagaaagtgaccaatctgtggaagaaacaagggttgttgctgtacggtcgtctggaatggagtcagtttgaagatgggaaactcccatccggtaaggctgatgccctggaccaccacgcgaaatgctttctgatcctcaaactttatgatcataaagtggacaaaagcaaatgggaaatgccgacgggttcgaacatgggcgaggccaaaccgtggaaagcaattcgcgtagatctggttcgttgcccctacggcggttttgcgtttgcgttgttgcagtggaccggaagccgcatgttccgccgtgatctgcgctggtacgccactgacgagaagaacatgatgctggacaatcatgcgctgtatgacctgaccaagaaaatctttctcaaagctaaatcggaagaggaaattttcgcacatctggggcttgaatacctggaaccgttcgaacgtaacgca

SEQ ID NO: 2010 - protein, 529 aa, synthetic construct
  REGION 1..529: note = Variant of terminal deoxynucleotidyltransferase
MHHHHHHGGSGSHGIRTIDSDFGKKRQKKMDNHDSSAIYEIKFHEFVLFILEEKMGATRRTFLTDLARKKGFRVENELSDSVTHIVAENNSRSEVLAWLKEHKMEKTKQFELLDISWLIESMKVGKPVDTKGKYQLAESGEMSANPDPTEGRENELPPTMKTVSPYACQRRTTLNNHNQRFTDALEILAENYEFKRNDDTALEFRRAISVLKSLPFEVRSLKDTEGLPWIGDEVKGIMEEIIEVGESLEVQAVLNDERYQSFKRFKSVFGVGVKTADKWYRMGLRTLEDVRSSKTLKLTPMQKAGLCYYEDLARGVTKAEADAISLLVQDAVATFDPDALVEIVGGFRRGKPQGHDVDLLITSPGAEKEQEDQLLQKVTNLWKKQGLLLYGRLEWSQFEDGKLPSGKADALDHHAKCFLILKLYDHKVDKSKWEMPTGSNMGEAKPWKAIRVDLVRCPYGGFAFALLQWTGSRMFRRDLRWYATDEKNMMLDNHALYDLTKKIFLKAKSEEEIFAHLGLEYLEPFERNA

SEQ ID NO: 2011 - DNA, 1587 bp, synthetic construct
  misc_feature 1..1587: note = Variant of terminal deoxynucleotidyltransferase
  source 1..1587: mol_type = other DNA
atgcaccatcatcatcatcatggcggtagcggcagccacggcattcgtaccatcgattcggacttcgggaagaaacgccagaaaaaaatggataaccacgatagttccgccatctatgaaatcaaatttcacgagtttgtgctgttcattctcgaagaaaaaatgggtgcgacgcgtcgtacttttctgacagatttagcccgcaagaaagggttccgcgtcgagaatgaactgtcagacagcgttacccacatcgtggcagaaaataattcacgctctgaagtattggcttggctgaaagaacacaagatggagaagaccaagcaattcgaactgctggatattagctggcttatcgaaagcatgaaagttggtaaaccggtggacaccaaggggaaataccagttggcggaatcgggtgagatgagtgcgaacccagatccgacagagggtcgtgaaaacgagctgcctcctactatgaagaccgtttctccgtatgcgtgtcaacgccgcaccaccctgaacaaccataatcaacgttttacggacgcactggaaattcttgcggaaaattacgagttcaaacgcaacgatgatactgcgctggaatttcgtcgtgctatctccgtgctgaaaagccttccgtttgaggtacgtagcctgaaagacacggaaggattgccctggatcggtgatgaagtcaaagggattatggaagaaatcatcgaggtcggtgaatcgctggaagtgcaggccgtgctcaatgatgagcgctatcaaagcttcaaacgctttaagagtgtctttggagtgggggtgaagacagcagacaagtggtaccgtatgggtctgcgcacgctcgaggatgttcgttccagcaagaccctgaagttgaccccgatgcagaaagcgggtctgtgctattatgaagatcttgctcgcggcgttacgaaagccgaagctgacgcgatttctctgctggttcaggatgcagtcgcaactttcgacccggatgcgctggtggagattgtcggtggatttcgtcgtgggaaacctcagggtcacgacgttgatctgcttatcacatctccgggagctgagaaagagcaagaagaccagctcctgcagaaagtgaccaatctgtggaagaaacaagggttgttgctgtacggtcgtctggaatggagtcagtttgaagatgggaaactcccatccggtaaggctgatgccctggaccaccacgcgaaatgctttctgatcctcaaactttatgatcataaagtggacaaaagcaaatgggaaatgccgacgggttcgaacatgggcgaggccaaaccgtggaaagcaattcgcgtagatctggttcgttgcccctacggcggttttgcgtttgcgttgttgtggtggaccggaagccgcatgttccgccgtgatctgcgctggtacgccactgacgagaagaacatgatgctggacaatcatgcgctgtatgacctgaccaagaaaatctttctcaaagctaaatcggaagaggaaattttcgcacatctggggcttgaatacctggaaccgttcgaacgtaacgca

SEQ ID NO: 2012 - protein, 529 aa, synthetic construct
  REGION 1..529: note = Variant of terminal deoxynucleotidyltransferase
MHHHHHHGGSGSHGIRTIDSDFGKKRQKKMDNHDSSAIYEIKFHEFVLFILEEKMGATRRTFLTDLARKKGFRVENELSDSVTHIVAENNSRSEVLAWLKEHKMEKTKQFELLDISWLIESMKVGKPVDTKGKYQLAESGEMSANPDPTEGRENELPPTMKTVSPYACQRRTTLNNHNQRFTDALEILAENYEFKRNDDTALEFRRAISVLKSLPFEVRSLKDTEGLPWIGDEVKGIMEEIIEVGESLEVQAVLNDERYQSFKRFKSVFGVGVKTADKWYRMGLRTLEDVRSSKTLKLTPMQKAGLCYYEDLARGVTKAEADAISLLVQDAVATFDPDALVEIVGGFRRGKPQGHDVDLLITSPGAEKEQEDQLLQKVTNLWKKQGLLLYGRLEWSQFEDGKLPSGKADALDHHAKCFLILKLYDHKVDKSKWEMPTGSNMGEAKPWKAIRVDLVRCPYGGFAFALLWWTGSRMFRRDLRWYATDEKNMMLDNHALYDLTKKIFLKAKSEEEIFAHLGLEYLEPFERNA

SEQ ID NO: 2013 - DNA, 1587 bp, synthetic construct
  misc_feature 1..1587: note = Variant of terminal deoxynucleotidyltransferase
  source 1..1587: mol_type = other DNA
atgcaccatcatcatcatcatggcggtagcggcagccacggcattcgtaccatcgattcggacttcgggaagaaacgccagaaaaaaatggataaccacgatagttccgccatctatgaaatcaaatttcacgagtttgtgctgttcattctcgaagaaaaaatgggtgcgacgcgtcgtacttttctgacagatttagcccgcaagaaagggttccgcgtcgagaatgaactgtcagacagcgttacccacatcgtggcagaaaataattcacgctctgaagtattggcttggctgaaagaacacaagatggagaagaccaagcaattcgaactgctggatattagctggcttatcgaaagcatgaaagttggtaaaccggtggacaccaaggggaaataccagttggcggaatcgggtgagatgagtgcgaacccagatccgacagagggtcgtgaaaacgagctgcctcctactatgaagaccgtttctccgtatgcgtgtcaacgccgcaccaccctgaacaaccataatcaacgttttacggacgcactggaaattcttgcggaaaattacgagttcaaacgcaacgatgatactgcgctggaatttcgtcgtgctatctccgtgctgaaaagccttccgtttgaggtacgtagcctgaaagacacggaaggattgccctggatcggtgatgaagtcaaagggattatggaagaaatcatcgaggtcggtgaatcgctggaagtgcaggccgtgctcaatgatgagcgctatcaaagcttcaaacgctttaagagtgtctttggagtgggggtggtgacagcagacaagtggtaccgtatgggtctgcgcacgctcgaggatgttcgttccagcaagaccctgaagttgaccccgatgcagaaagcgggtctgtgctattatgaagatcttgctcgcggcgttacgaaagccgaagctgacgcgatttctctgctggttcaggatgcagtcgcaactttcgacccggatgcgctggtggagattgtcggtggatttcgtcgtgggaaacctcagggtcacgacgttgatctgcttatcacatctccgggagctgagaaagagcaagaagaccagctcctgcagaaagtgaccaatctgtggaagaaacaagggttgttgctgtacggtcgtctggaatggagtcagtttgaagatgggaaactcccatccggtaaggctgatgccctggaccaccacgcgaaatgctttctgatcctcaaactttatgatcataaagtggacaaaagcaaatgggaaatgccgacgggttcgaacatgggcgaggccaaaccgtggaaagcaattcgcgtagatctggttcgttgcccctacggcggttttgcgtttgcgttgttgggttggaccggaagccgcatgttccgccgtgatctgcgctggtacgccactgacgagaagaacatgatgctggacaatcatgcgctgtatgacctgaccaagaaaatctttctcaaagctaaatcggaagaggaaattttcgcacatctggggcttgaatacctggaaccgttcgaacgtaacgca

SEQ ID NO: 2014 - protein, 529 aa, synthetic construct
  REGION 1..529: note = Variant of terminal deoxynucleotidyltransferase
MHHHHHHGGSGSHGIRTIDSDFGKKRQKKMDNHDSSAIYEIKFHEFVLFILEEKMGATRRTFLTDLARKKGFRVENELSDSVTHIVAENNSRSEVLAWLKEHKMEKTKQFELLDISWLIESMKVGKPVDTKGKYQLAESGEMSANPDPTEGRENELPPTMKTVSPYACQRRTTLNNHNQRFTDALEILAENYEFKRNDDTALEFRRAISVLKSLPFEVRSLKDTEGLPWIGDEVKGIMEEIIEVGESLEVQAVLNDERYQSFKRFKSVFGVGVVTADKWYRMGLRTLEDVRSSKTLKLTPMQKAGLCYYEDLARGVTKAEADAISLLVQDAVATFDPDALVEIVGGFRRGKPQGHDVDLLITSPGAEKEQEDQLLQKVTNLWKKQGLLLYGRLEWSQFEDGKLPSGKADALDHHAKCFLILKLYDHKVDKSKWEMPTGSNMGEAKPWKAIRVDLVRCPYGGFAFALLGWTGSRMFRRDLRWYATDEKNMMLDNHALYDLTKKIFLKAKSEEEIFAHLGLEYLEPFERNA

SEQ ID NO: 2015 - DNA, 1587 bp, synthetic construct
  misc_feature 1..1587: note = Variant of terminal deoxynucleotidyltransferase
  source 1..1587: mol_type = other DNA
atgcaccatcatcatcatcatggcggtagcggcagccacggcattcgtaccatcgattcggacttcgggaagaaacgccagaaaaaaatggataaccacgatagttccgccatctatgaaatcaaatttcacgagtttgtgctgttcattctcgaagaaaaaatgggtgcgacgcgtcgtacttttctgacagatttagcccgcaagaaagggttccgcgtcgagaatgaactgtcagacagcgttacccacatcgtggcagaaaataattcacgctctgaagtattggcttggctgaaagaacacaagatggagaagaccaagcaattcgaactgctggatattagctggcttatcgaaagcatgaaagttggtaaaccggtggacaccaaggggaaataccagttggcggaatcgggtgagatgagtgcgaacccagatccgacagagggtcgtgaaaacgagctgcctcctactatgaagaccgtttctccgtatgcgtgtcaacgccgcaccaccctgaacaaccataatcaacgttttacggacgcactggaaattcttgcggaaaattacgagttcaaacgcaacgatgatactgcgctggaatttcgtcgtgctatctccgtgctgaaaagccttccgtttgaggtacgtagcctgaaagacacggaaggattgccctggatcggtgatgaagtcaaagggattatggaagaaatcatcgaggtcggtgaatcgctggaagtgcaggccgtgctcaatgatgagcgctatcaaagcttcaaacgctttaagagtgtctttggagtgggggtgaagacagcagacaagtggtaccgtatgggtctgcgcacgctcgaggatgttcgttccagcaagaccctgaagttgaccccgatgcagaaagcgggtctgtgctattatgaagatcttgctcgcggcgttacgaaagccgaagctgacgcgatttctctgctggttcaggatgcagtcgcaactttcgacccggatgcgctggtggagattgtcggtggatttcgtcgtgggaaacctcagggtcacgacgttgatctgcttatcacatctccgggagctgagaaagagcaagaagaccagctcctgcagaaagtgaccaatctgtggaagaaacaagggttgttgctgtacggtcgtctggaatggagtcagtttgaagatgggaaactcccatccggtaaggctgatgccctggaccatggggcgaaatgctttctgatcctcaaactttatgatcataaagtggacaaaagcaaatgggaaatgccgacgggttcgaacatgggcgaggccaaaccgtggaaagcaattcgcgtagatctggttcgttgcccctacggcggttttgcgtttgcgttgttgggttggaccggaagccgcatgttccgccgtgatctgcgctggtacgccactgacgagaagaacatgatgctggacaatcatgcgctgtatgacctgaccaagaaaatctttctcaaagctaaatcggaagaggaaattttcgcacatctggggcttgaatacctggaaccgttcgaacgtaacgca

SEQ ID NO: 2016 - protein, 529 aa, synthetic construct
  REGION 1..529: note = Variant of terminal deoxynucleotidyltransferase
MHHHHHHGGSGSHGIRTIDSDFGKKRQKKMDNHDSSAIYEIKFHEFVLFILEEKMGATRRTFLTDLARKKGFRVENELSDSVTHIVAENNSRSEVLAWLKEHKMEKTKQFELLDISWLIESMKVGKPVDTKGKYQLAESGEMSANPDPTEGRENELPPTMKTVSPYACQRRTTLNNHNQRFTDALEILAENYEFKRNDDTALEFRRAISVLKSLPFEVRSLKDTEGLPWIGDEVKGIMEEIIEVGESLEVQAVLNDERYQSFKRFKSVFGVGVKTADKWYRMGLRTLEDVRSSKTLKLTPMQKAGLCYYEDLARGVTKAEADAISLLVQDAVATFDPDALVEIVGGFRRGKPQGHDVDLLITSPGAEKEQEDQLLQKVTNLWKKQGLLLYGRLEWSQFEDGKLPSGKADALDHGAKCFLILKLYDHKVDKSKWEMPTGSNMGEAKPWKAIRVDLVRCPYGGFAFALLGWTGSRMFRRDLRWYATDEKNMMLDNHALYDLTKKIFLKAKSEEEIFAHLGLEYLEPFERNA

SEQ ID NO: 2017 - DNA, 1587 bp, synthetic construct
  misc_feature 1..1587: note = Variant of terminal deoxynucleotidyltransferase
  source 1..1587: mol_type = other DNA
atgcaccatcatcatcatcatggcggtagcggcagccacggcattcgtaccatcgattcggacttcgggaagaaacgccagaaaaaaatggataaccacgatagttccgccatctatgaaatcaaatttcacgagtttgtgctgttcattctcgaagaaaaaatgggtgcgacgcgtcgtacttttctgacagatttagcccgcaagaaagggttccgcgtcgagaatgaactgtcagacagcgttacccacatcgtggcagaaaataattcacgctctgaagtattggcttggctgaaagaacacaagatggagaagaccaagcaattcgaactgctggatattagctggcttatcgaaagcatgaaagttggtaaaccggtggacaccaaggggaaataccagttggcggaatcgggtgagatgagtgcgaacccagatccgacagagggtcgtgaaaacgagctgcctcctactatgaagaccgtttctccgtatgcgtgtcaacgccgcaccaccctgaacaaccataatcaacgttttacggacgcactggaaattcttgcggaaaattacgagttcaaacgcaacgatgatactgcgctggaatttcgtcgtgctatctccgtgctgaaaagccttccgtttgaggtacgtagcctgaaagacacggaaggattgccctggatcggtgatgaagtcaaagggattatggaagaaatcatcgaggtcggtgaatcgctggaagtgcaggccgtgctcaatgatgagcagtatcaaagcttcaaacgctttaagagtgtctttggagtgggggtgaagacagcagacaagtggtaccgtatgggtctgcgcacgctcgaggatgttcgttccagcaagaccctgaagttgaccccgatgcagaaagcgggtctgtgctattatgaagatcttgctcgcggcgttacgaaagccgaagctgacgcgatttctctgctggttcaggatgcagtcgcaactttcgacccggatgcgctggtggagattgtcggtggatttcgtcgtgggaaacctcagggtcacgacgttgatctgcttatcacatctccgggagctgagaaagagcaagaagaccagctcctgcagaaagtgaccaatctgtggaagaaacaagggttgttgctgtacggtcgtctggaatggagtcagtttgaagatgggaaactcccatccggtaaggctgatgccctggaccaccacgcgaaatgctttctgatcctcaaactttatgatcataaagtggacaaaagcaaatgggaaatgccgacgggttcgaacatgggcgaggccaaaccgtggaaagcaattcgcgtagatctggttcgttgcccctacggcggttttgcgtttgcgttgttgggttggaccggaagccgcatgttccgccgtgatctgcgctggtacgccactgacgagaagaacatgatgctggacaatcatgcgctgtatgacctgaccaagaaaatctttctcaaagctaaatcggaagaggaaattttcgcacatctggggcttgaatacctggaaccgttcgaacgtaacgca

SEQ ID NO: 2018 - protein, 529 aa, synthetic construct
  REGION 1..529: note = Variant of terminal deoxynucleotidyltransferase
MHHHHHHGGSGSHGIRTIDSDFGKKRQKKMDNHDSSAIYEIKFHEFVLFILEEKMGATRRTFLTDLARKKGFRVENELSDSVTHIVAENNSRSEVLAWLKEHKMEKTKQFELLDISWLIESMKVGKPVDTKGKYQLAESGEMSANPDPTEGRENELPPTMKTVSPYACQRRTTLNNHNQRFTDALEILAENYEFKRNDDTALEFRRAISVLKSLPFEVRSLKDTEGLPWIGDEVKGIMEEIIEVGESLEVQAVLNDEQYQSFKRFKSVFGVGVKTADKWYRMGLRTLEDVRSSKTLKLTPMQKAGLCYYEDLARGVTKAEADAISLLVQDAVATFDPDALVEIVGGFRRGKPQGHDVDLLITSPGAEKEQEDQLLQKVTNLWKKQGLLLYGRLEWSQFEDGKLPSGKADALDHHAKCFLILKLYDHKVDKSKWEMPTGSNMGEAKPWKAIRVDLVRCPYGGFAFALLGWTGSRMFRRDLRWYATDEKNMMLDNHALYDLTKKIFLKAKSEEEIFAHLGLEYLEPFERNA

SEQ ID NO: 2019 - DNA, 1587 bp, synthetic construct
  misc_feature 1..1587: note = Variant of terminal deoxynucleotidyltransferase
  source 1..1587: mol_type = other DNA
atgcaccatcatcatcatcatggcggtagcggcagccacggcattcgtaccatcgattcggacttcgggaagaaacgccagaaaaaaatggataaccacgatagttccgccatctatgaaatcaaatttcacgagtttgtgctgttcattctcgaagaaaaaatgggtgcgacgcgtcgtacttttctgacagatttagcccgcaagaaagggttccgcgtcgagaatgaactgtcagacagcgttacccacatcgtggcagaaaataattcacgctctgaagtattggcttggctgaaagaacacaagatggagaagaccaagcaattcgaactgctggatattagctggcttatcgaaagcatgaaagttggtaaaccggtggacaccaaggggaaataccagttggcggaatcgggtgagatgagtgcgaacccagatccgacagagggtcgtgaaaacgagctgcctcctactatgaagaccgtttctccgtatgcgtgtcaacgccgcaccaccctgaacaaccataatcaacgttttacggacgcactggaaattcttgcggaaaattacgagttcaaacgcaacgatgatactgcgctggaatttcgtcgtgctatctccgtgctgaaaagccttccgtttgaggtacgtagcctgaaagacacggaaggattgccctggatcggtgatgaagtcaaagggattatggaagaaatcatcgaggtcggtgaatcgctggaagtgcaggccgtgctcaatgatgagcgctatcaaagcttcaaacgctttaagagtgtctttggagtgggggtgaagacagcagacaagtggtaccgtatgggtctgcgcacgctcgaggatgttcgttccagcaagaccctgaagttgaccccgatgcagaaagcgggtctgtgctattatgaagatcttgctcgcggcgttacgaaagccgaagctgacgcgatttctctgctggttcaggatgcagtcgcaactttcgacccggatgcgctggtggagattgtcggtggatttcgtcgtgggaaacctcagggtcacgacgttgatctgcttatcacatctccgggagctgagaaagagcaagaagaccagctcctgcagaaagtgaccaatctgtggaagaaacaagggttgttgctgtacggtcgtctggaatggagtcagtttgaagatgggaaactcccatccggtagtgctgatgccctggaccatcacgcgaaatgctttctgatcctcaaactttatgatcataaagtggacaaaagcaaatgggaaatgccgacgggttcgaacatgggcgaggccaaaccgtggaaagcaattcgcgtagatctggttcgttgcccctacggcggttttgcgtttgcgttgttgggttggaccggaagccgcatgttccgccgtgatctgcgctggtacgccactgacgagaagaacatgatgctggacaatcatgcgctgtatgacctgaccaagaaaatctttctcaaagctaaatcggaagaggaaattttcgcacatctggggcttgaatacctggaaccgttcgaacgtaacgca

SEQ ID NO: 2020 - protein, 529 aa, synthetic construct
  REGION 1..529: note = Variant of terminal deoxynucleotidyltransferase
MHHHHHHGGSGSHGIRTIDSDFGKKRQKKMDNHDSSAIYEIKFHEFVLFILEEKMGATRRTFLTDLARKKGFRVENELSDSVTHIVAENNSRSEVLAWLKEHKMEKTKQFELLDISWLIESMKVGKPVDTKGKYQLAESGEMSANPDPTEGRENELPPTMKTVSPYACQRRTTLNNHNQRFTDALEILAENYEFKRNDDTALEFRRAISVLKSLPFEVRSLKDTEGLPWIGDEVKGIMEEIIEVGESLEVQAVLNDERYQSFKRFKSVFGVGVKTADKWYRMGLRTLEDVRSSKTLKLTPMQKAGLCYYEDLARGVTKAEADAISLLVQDAVATFDPDALVEIVGGFRRGKPQGHDVDLLITSPGAEKEQEDQLLQKVTNLWKKQGLLLYGRLEWSQFEDGKLPSGSADALDHHAKCFLILKLYDHKVDKSKWEMPTGSNMGEAKPWKAIRVDLVRCPYGGFAFALLGWTGSRMFRRDLRWYATDEKNMMLDNHALYDLTKKIFLKAKSEEEIFAHLGLEYLEPFERNA

SEQ ID NO: 2021 - DNA, 1587 bp, synthetic construct
  misc_feature 1..1587: note = Variant of terminal deoxynucleotidyltransferase
  source 1..1587: mol_type = other DNA
atgcaccatcatcatcatcatggcggtagcggcagccacggcattcgtaccatcgattcggacttcgggaagaaacgccagaaaaaaatggataaccacgatagttccgccatctatgaaatcaaatttcacgagtttgtgctgttcattctcgaagaaaaaatgggtgcgacgcgtcgtacttttctgacagatttagcccgcaagaaagggttccgcgtcgagaatgaactgtcagacagcgttacccacatcgtggcagaaaataattcacgctctgaagtattggcttggctgaaagaacacaagatggagaagaccaagcaattcgaactgctggatattagctggcttatcgaaagcatgaaagttggtaaaccggtggacaccaaggggaaataccagttggcggaatcgggtgagatgagtgcgaacccagatccgacagagggtcgtgaaaacgagctgcctcctactatgaagaccgtttctccgtatgcgtgtcaacgccgcaccaccctgaacaaccataatcaacgttttacggacgcactggaaattcttgcggaaaattacgagttcaaacgcaacgatgatactgcgctggaatttcgtcgtgctatctccgtgctgaaaagccttccgtttgaggtacgtagcctgaaagacacggaaggattgccctggatcggtgatgaagtcaaagggattatggaagaaatcatcgaggtcggtgaatcgctggaagtgcaggccgtgctcaatgatgagcgctatcaaagcttcaaacgctttaagagtgtctttggagtgggggtgaagacagcagacaagtggtaccgtatgggtctgcgcacgctcgaggatgttcgttccagcaagaccctgaagttgaccccgatgcagaaagcgggtctgtgctattatgaagatcttgctcgcggcgttacgaaagccgaagctgacgcgatttctctgctggttcaggatgcagtcgcaactttcgacccggatgcgctggtggagattgtcggtggatttcgtcgtgggaaacctcagggtcacgacgttgatctgcttatcacatctccgggagctgagaaagagcaagaagaccagctcctgcagaaagtgaccaatctgtggaagaaacaagggttgttgctgtacggtcgtctggaatggagtcagtttgaagatgggaaactcccatatggtaaggctgatgccctggaccaccacgcgaaatgctttctgatcctcaaactttatgatcataaagtggacaaaagcaaatgggaaatgccgacgggttcgaacatgggcgaggccaaaccgtggaaagcaattcgcgtagatctggttcgttgcccctacggcggttttgcgtttgcgttgttgggttggaccggaagccgcatgttccgccgtgatctgcgctggtacgccactgacgagaagaacatgatgctggacaatcatgcgctgtatgacctgaccaagaaaatctttctcaaagctaaatcggaagaggaaattttcgcacatctggggcttgaatacctggaaccgttcgaacgtaacgca

SEQ ID NO: 2022 - protein, 529 aa, synthetic construct
  REGION 1..529: note = Variant of terminal deoxynucleotidyltransferase
MHHHHHHGGSGSHGIRTIDSDFGKKRQKKMDNHDSSAIYEIKFHEFVLFILEEKMGATRRTFLTDLARKKGFRVENELSDSVTHIVAENNSRSEVLAWLKEHKMEKTKQFELLDISWLIESMKVGKPVDTKGKYQLAESGEMSANPDPTEGRENELPPTMKTVSPYACQRRTTLNNHNQRFTDALEILAENYEFKRNDDTALEFRRAISVLKSLPFEVRSLKDTEGLPWIGDEVKGIMEEIIEVGESLEVQAVLNDERYQSFKRFKSVFGVGVKTADKWYRMGLRTLEDVRSSKTLKLTPMQKAGLCYYEDLARGVTKAEADAISLLVQDAVATFDPDALVEIVGGFRRGKPQGHDVDLLITSPGAEKEQEDQLLQKVTNLWKKQGLLLYGRLEWSQFEDGKLPYGKADALDHHAKCFLILKLYDHKVDKSKWEMPTGSNMGEAKPWKAIRVDLVRCPYGGFAFALLGWTGSRMFRRDLRWYATDEKNMMLDNHALYDLTKKIFLKAKSEEEIFAHLGLEYLEPFERNA

SEQ ID NO: 2023 - DNA, 1587 bp, synthetic construct
  misc_feature 1..1587: note = Variant of terminal deoxynucleotidyltransferase
  source 1..1587: mol_type = other DNA
atgcaccatcatcatcatcatggcggtagcggcagccacggcattcgtaccatcgattcggacttcgggaagaaacgccagaaaaaaatggataaccacgatagttccgccatctatgaaatcaaatttcacgagtttgtgctgttcattctcgaagaaaaaatgggtgcgacgcgtcgtacttttctgacagatttagcccgcaagaaagggttccgcgtcgagaatgaactgtcagacagcgttacccacatcgtggcagaaaataattcacgctctgaagtattggcttggctgaaagaacacaagatggagaagaccaagcaattcgaactgctggatattagctggcttatcgaaagcatgaaagttggtaaaccggtggacaccaaggggaaataccagttggcggaatcgggtgagatgagtgcgaacccagatccgacagagggtcgtgaaaacgagctgcctcctactatgaagaccgtttctccgtatgcgtgtcaacgccgcaccaccctgaacaaccataatcaacgttttacggacgcactggaaattcttgcggaaaattacgagttcaaacgcaacgatgatactgcgctggaatttcgtcgtgctatctccgtgctgaaaagccttccgtttgaggtacgtagcctgaaagacacggaaggattgccctggatcggtgatgaagtcaaagggattatggaagaaatcatcgaggtcggtgaatcgctggaagtgcaggccgtgctcaatgatgagcgctatcaaagcttcaaacgctttaagagtgtctttggagtgggggtgaagacagcagacaagtggtaccgtatgggtctgcgcacgctcgaggatgttcgttccagcaagaccctgaagttgaccccgatgcagaaagcgggtctgtgctattatgaagatcttgctcgcggcgttacgaaagccgaagctgacgcgatttctctgctggttcaggatgcagtcgcaactttcgacccggatgcgctggtggagattgtcggtggatttcgtcgtgggaaacctcagggtcacgacgttgatctgcttatcacatctccgggagctgagaaagagcaagaagaccagctcctgcagaaagtgaccaatctgtggaagaaacaagggttgttgctgtacggtcgtctggaatggagtcagtttgaagatgggaaactcccatccggtaaggctgatgcccaggaccatttcgcgaaatgctttctgatcctcaaactttatgatcataaagtggacaaaagcaaatgggaaatgccgacgggttcgaacatgggcgaggccaaaccgtggaaagcaattcgcgtagatctggttcgttgcccctacggcggttttgcgtttgcgttgttgggttggaccggaagccgcatgttccgccgtgatctgcgctggtacgccactgacgagaagaacatgatgctggacaatcatgcgctgtatgacctgaccaagaaaatctttctcaaagctaaatcggaagaggaaattttcgcacatctggggcttgaatacctggaaccgttcgaacgtaacgca

SEQ ID NO: 2024 - protein, 529 aa, synthetic construct
  REGION 1..529: note = Variant of terminal deoxynucleotidyltransferase
MHHHHHHGGSGSHGIRTIDSDFGKKRQKKMDNHDSSAIYEIKFHEFVLFILEEKMGATRRTFLTDLARKKGFRVENELSDSVTHIVAENNSRSEVLAWLKEHKMEKTKQFELLDISWLIESMKVGKPVDTKGKYQLAESGEMSANPDPTEGRENELPPTMKTVSPYACQRRTTLNNHNQRFTDALEILAENYEFKRNDDTALEFRRAISVLKSLPFEVRSLKDTEGLPWIGDEVKGIMEEIIEVGESLEVQAVLNDERYQSFKRFKSVFGVGVKTADKWYRMGLRTLEDVRSSKTLKLTPMQKAGLCYYEDLARGVTKAEADAISLLVQDAVATFDPDALVEIVGGFRRGKPQGHDVDLLITSPGAEKEQEDQLLQKVTNLWKKQGLLLYGRLEWSQFEDGKLPSGKADAQDHFAKCFLILKLYDHKVDKSKWEMPTGSNMGEAKPWKAIRVDLVRCPYGGFAFALLGWTGSRMFRRDLRWYATDEKNMMLDNHALYDLTKKIFLKAKSEEEIFAHLGLEYLEPFERNA

SEQ ID NO: 2025 - DNA, 1587 bp, synthetic construct
  misc_feature 1..1587: note = Variant of terminal deoxynucleotidyltransferase
  source 1..1587: mol_type = other DNA
atgcaccatcatcatcatcatggcggtagcggcagccacggcattcgtaccatcgattcggacttcgggaagaaacgccagaaaaaaatggataaccacgatagttccgccatctatgaaatcaaatttcacgagtttgtgctgttcattctcgaagaaaaaatgggtgcgacgcgtcgtacttttctgacagatttagcccgcaagaaagggttccgcgtcgagaatgaactgtcagacagcgttacccacatcgtggcagaaaataattcacgctctgaagtattggcttggctgaaagaacacaagatggagaagaccaagcaattcgaactgctggatattagctggcttatcgaaagcatgaaagttggtaaaccggtggacaccaaggggaaataccagttggcggaatcgggtgagatgagtgcgaacccagatccgacagagggtcgtgaaaacgagctgcctcctactatgaagaccgtttctccgtatgcgtgtcaacgccgcaccaccctgaacaaccataatcaacgttttacggacgcactggaaattcttgcggaaaattacgagttcaaacgcaacgatgatactgcgctggaatttcgtcgtgctatctccgtgctgaaaagccttccgtttgaggtacgtagcctgaaagacacggaaggattgccctggatcggtgatgaagtcaaagggattatggaagaaatcatcgaggtcggtgaatcgctggaagtgcaggccgtgctcaatgatgagcgctatcaaagcttcaaacgctttaagagtgtctttggagtgggggtgaagacagcagacaagtggtaccgtatgggtctgcgcacgctcgaggatgttcgttccagcaagaccctgaagttgaccccgatgcagaaagcgggtctgtgctattatgaagatcttgctcgcggcgttacgaaagccgaagctgacgcgatttctctgctggttcaggatgcagtcgcaactttcgacccggatgcgctggtggagattgtcggtggatttcgtcgtgggaaacctcagggtcacgacgttgatctgcttatcacatctccgggagctgagaaagagcaagaagaccagctcctgcagaaagtgaccaatctgtggaagaaacaagggttgttgctgtacggtcgtctggaatggagtcagtttggggatgggaaactcccatccggtaaggctgatgccctggaccaccacgcgaaatgctttctgatcctcaaactttatgatcataaagtggacaaaagcaaatgggaaatgccgacgggttcgaacatgggcgaggccaaaccgtggaaagcaattcgcgtagatctggttcgttgcccctacggcggttttgcgtttgcgttgttgggttggaccggaagccgcatgttccgccgtgatctgcgctggtacgccactgacgagaagaacatgatgctggacaatcatgcgctgtatgacctgaccaagaaaatctttctcaaagctaaatcggaagaggaaattttcgcacatctggggcttgaatacctggaaccgttcgaacgtaacgca

SEQ ID NO: 2026 - protein, 529 aa, synthetic construct
  REGION 1..529: note = Variant of terminal deoxynucleotidyltransferase
MHHHHHHGGSGSHGIRTIDSDFGKKRQKKMDNHDSSAIYEIKFHEFVLFILEEKMGATRRTFLTDLARKKGFRVENELSDSVTHIVAENNSRSEVLAWLKEHKMEKTKQFELLDISWLIESMKVGKPVDTKGKYQLAESGEMSANPDPTEGRENELPPTMKTVSPYACQRRTTLNNHNQRFTDALEILAENYEFKRNDDTALEFRRAISVLKSLPFEVRSLKDTEGLPWIGDEVKGIMEEIIEVGESLEVQAVLNDERYQSFKRFKSVFGVGVKTADKWYRMGLRTLEDVRSSKTLKLTPMQKAGLCYYEDLARGVTKAEADAISLLVQDAVATFDPDALVEIVGGFRRGKPQGHDVDLLITSPGAEKEQEDQLLQKVTNLWKKQGLLLYGRLEWSQFGDGKLPSGKADALDHHAKCFLILKLYDHKVDKSKWEMPTGSNMGEAKPWKAIRVDLVRCPYGGFAFALLGWTGSRMFRRDLRWYATDEKNMMLDNHALYDLTKKIFLKAKSEEEIFAHLGLEYLEPFERNA

SEQ ID NO: 2027 - DNA, 1587 bp, synthetic construct
  misc_feature 1..1587: note = Variant of terminal deoxynucleotidyltransferase
  source 1..1587: mol_type = other DNA
atgcaccatcatcatcatcatggcggtagcggcagccacggcattcgtaccatcgattcggacttcgggaagaaacgccagaaaaaaatggataaccacgatagttccgccatctatgaaatcaaatttcacgagtttgtgctgttcattctcgaagaaaaaatgggtgcgacgcgtcgtacttttctgacagatttagcccgcaagaaagggttccgcgtcgagaatgaactgtcagacagcgttacccacatcgtggcagaaaataattcacgctctgaagtattggcttggctgaaagaacacaagatggagaagaccaagcaattcgaactgctggatattagctggcttatcgaaagcatgaaagttggtaaaccggtggacaccaaggggaaataccagttggcggaatcgggtgagatgagtgcgaacccagatccgacagagggtcgtgaaaacgagctgcctcctactatgaagaccgtttctccgtatgcgtgtcaacgccgcaccaccctgaacaaccataatcaacgttttacggacgcactggaaattcttgcggaaaattgtgagttcaaacgcaacgatgatactgcgctggaatttcgtcgtgctatctccgtgctgaaaagccttccgtttgaggtacgtagcctgaaagacacggaaggattgccctggatcggtgatgaagtcaaagggattatggaagaaatcatcgaggtcggtgaatcgctggaagtgcaggccgtgctcaatgatgagcgctatcaaagcttcaaacgctttaagagtgtctttggagtgggggtgaagacagcagacaagtggtaccgtatgggtctgcgcacgctcgaggatgttcgttccagcaagaccctgaagttgaccccgatgcagaaagcgggtctgtgctattatgaagatcttgctcgcggcgttacgaaagccgaagctgacgcgatttctctgctggttcaggatgcagtcgcaactttcgacccggatgcgctggtggagattgtcggtggatttcgtcgtgggaaacctcagggtcacgacgttgatctgcttatcacatctccgggagctgagaaagagcaagaagaccagctcctgcagaaagtgaccaatctgtggaagaaacaagggttgttgctgtacggtcgtctggaatggagtcagtttgaagatgggaaactcccatccggtaaggctgatgccctggaccaccacgcgaaatgctttctgatcctcaaactttatgatcataaagtggacaaaagcaaatgggaaatgccgacgggttcgaacatgggcgaggccaaaccgtggaaagcaattcgcgtagatctggttcgttgcccctacggcggttttgcgtttgcgttgttgggttggaccggaagccgcatgttccgccgtgatctgcgctggtacgccactgacgagaagaacatgatgctggacaatcatgcgctgtatgacctgaccaagaaaatctttctcaaagctaaatcggaagaggaaattttcgcacatctggggcttgaatacctggaaccgttcgaacgtaacgca

SEQ ID NO: 2028 - protein, 529 aa, synthetic construct
  REGION 1..529: note = Variant of terminal deoxynucleotidyltransferase
MHHHHHHGGSGSHGIRTIDSDFGKKRQKKMDNHDSSAIYEIKFHEFVLFILEEKMGATRRTFLTDLARKKGFRVENELSDSVTHIVAENNSRSEVLAWLKEHKMEKTKQFELLDISWLIESMKVGKPVDTKGKYQLAESGEMSANPDPTEGRENELPPTMKTVSPYACQRRTTLNNHNQRFTDALEILAENCEFKRNDDTALEFRRAISVLKSLPFEVRSLKDTEGLPWIGDEVKGIMEEIIEVGESLEVQAVLNDERYQSFKRFKSVFGVGVKTADKWYRMGLRTLEDVRSSKTLKLTPMQKAGLCYYEDLARGVTKAEADAISLLVQDAVATFDPDALVEIVGGFRRGKPQGHDVDLLITSPGAEKEQEDQLLQKVTNLWKKQGLLLYGRLEWSQFEDGKLPSGKADALDHHAKCFLILKLYDHKVDKSKWEMPTGSNMGEAKPWKAIRVDLVRCPYGGFAFALLGWTGSRMFRRDLRWYATDEKNMMLDNHALYDLTKKIFLKAKSEEEIFAHLGLEYLEPFERNA

SEQ ID NO: 2029 - DNA, 1587 bp, synthetic construct
  misc_feature 1..1587: note = Variant of terminal deoxynucleotidyltransferase
  source 1..1587: mol_type = other DNA
atgcaccatcatcatcatcatggcggtagcggcagccacggcattcgtaccatcgattcggacttcgggaagaaacgccagaaaaaaatggataaccacgatagttccgccatctatgaaatcaaatttcacgagtttgtgctgttcattctcgaagaaaaaatgggtgcgacgcgtcgtacttttctgacagatttagcccgcaagaaagggttccgcgtcgagaatgaactgtcagacagcgttacccacatcgtggcagaaaataattcacgctctgaagtattggcttggctgaaagaacacaagatggagaagaccaagcaattcgaactgctggatattagctggcttatcgaaagcatgaaagttggtaaaccggtggacaccaaggggaaataccagttggcggaatcgggtgagatgagtgcgaacccagatccgacagagggtcgtgaaaacgagctgcctcctactatgaagaccgtttctccgtatgcgtgtcaacgccgcaccaccctgaacaaccataatcaacgttttacggacgcactggaaattcttgcggaaaatagggagttcaaacgcaacgatgatactgcgctggaatttcgtcgtgctatctccgtgctgaaaagccttccgtttgaggtacgtagcctgaaagacacggaaggattgccctggatcggtgatgaagtcaaagggattatggaagaaatcatcgaggtcggtgaatcgctggaagtgcaggccgtgctcaatgatgagcgctatcaaagcttcaaacgctttaagagtgtctttggagtgggggtgaagacagcagacaagtggtaccgtatgggtctgcgcacgctcgaggatgttcgttccagcaagaccctgaagttgaccccgatgcagaaagcgggtctgtgctattatgaagatcttgctcgcggcgttacgaaagccgaagctgacgcgatttctctgctggttcaggatgcagtcgcaactttcgacccggatgcgctggtggagattgtcggtggatttcgtcgtgggaaacctcagggtcacgacgttgatctgcttatcacatctccgggagctgagaaagagcaagaagaccagctcctgcagaaagtgaccaatctgtggaagaaacaagggttgttgctgtacggtcgtctggaatggagtcagtttgaagatgggaaactcccatccggtaaggctgatgccctggaccaccacgcgaaatgctttctgatcctcaaactttatgatcataaagtggacaaaagcaaatgggaaatgccgacgggttcgaacatgggcgaggccaaaccgtggaaagcaattcgcgtagatctggttcgttgcccctacggcggttttgcgtttgcgttgttgggttggaccggaagccgcatgttccgccgtgatctgcgctggtacgccactgacgagaagaacatgatgctggacaatcatgcgctgtatgacctgaccaagaaaatctttctcaaagctaaatcggaagaggaaattttcgcacatctggggcttgaatacctggaaccgttcgaacgtaacgca

SEQ ID NO: 2030 - protein, 529 aa, synthetic construct
  REGION 1..529: note = Variant of terminal deoxynucleotidyltransferase
MHHHHHHGGSGSHGIRTIDSDFGKKRQKKMDNHDSSAIYEIKFHEFVLFILEEKMGATRRTFLTDLARKKGFRVENELSDSVTHIVAENNSRSEVLAWLKEHKMEKTKQFELLDISWLIESMKVGKPVDTKGKYQLAESGEMSANPDPTEGRENELPPTMKTVSPYACQRRTTLNNHNQRFTDALEILAENREFKRNDDTALEFRRAISVLKSLPFEVRSLKDTEGLPWIGDEVKGIMEEIIEVGESLEVQAVLNDERYQSFKRFKSVFGVGVKTADKWYRMGLRTLEDVRSSKTLKLTPMQKAGLCYYEDLARGVTKAEADAISLLVQDAVATFDPDALVEIVGGFRRGKPQGHDVDLLITSPGAEKEQEDQLLQKVTNLWKKQGLLLYGRLEWSQFEDGKLPSGKADALDHHAKCFLILKLYDHKVDKSKWEMPTGSNMGEAKPWKAIRVDLVRCPYGGFAFALLGWTGSRMFRRDLRWYATDEKNMMLDNHALYDLTKKIFLKAKSEEEIFAHLGLEYLEPFERNA

SEQ ID NO: 2031 - DNA, 1587 bp, synthetic construct
  misc_feature 1..1587: note = Variant of terminal deoxynucleotidyltransferase
  source 1..1587: mol_type = other DNA
atgcaccatcatcatcatcatggcggtagcggcagccacggcattcgtaccatcgattcggacttcgggaagaaacgccagaaaaaaatggataaccacgatagttccgccatctatgaaatcaaatttcacgagtttgtgctgttcattctcgaagaaaaaatgggtgcgacgcgtcgtacttttctgacagatttagcccgcaagaaagggttccgcgtcgagaatgaactgtcagacagcgttacccacatcgtggcagaaaataattcacgctctgaagtattggcttggctgaaagaacacaagatggagaagaccaagcaattcgaactgctggatattagctggcttatcgaaagcatgaaagttggtaaaccggtggacaccaaggggaaataccagttggcggaatcgggtgagatgagtgcgaacccagatccgacagagggtcgtgaaaacgagctgcctcctactatgaagaccgtttctccgtatgcgtgtcaacgccgcaccaccctgaacaaccataatcaacgttttacggacgcactggaaattcttgcggaaaattacgagttcaaacgcaacgatgatactgcgctggaatttcgtcgtgctatctccgtgctgaaaagccttccgtttgaggtacgtagcctgaaagacacggaaggattgccctggatcggtgatgaagtcaaagggattatggaagaaatcatcgaggtcggtgaatcgctggaagtgcaggccgtgctcaatgatgagcgctatcaaagcttcaaacgctttaagagtgtctttggagtgggggtgaagacagcagacaagtggtaccgtatgggtctgcgcacgctcgaggatgttcgttccagcaagaccctgaagttgaccccgatgcagaaagcgggtctgtgctattatgaagatcttgctcgcggcgttacgaaagccgaagctgacgcgatttctctgctggttcaggatgcagtcgcaactttcgacccggatgcgctggtggagattgtcggtggatttcgtcgtgggaaacctcagggtcacgacgttgatctgcttatcacatctccgggagctgagaaagagcaagaagaccagctcctgcagaaagtgaccaatctgtggaagaaacaagggttgttgctgtacggtcgtctggaatggagtcagtttgaagatgggaaactcccatccggtaaggctgatgccctggaccaccacgcgaaatgctttctgatcctcaaactttatgatcataaagtggacaaaagcaaatgggaaatgccgacgggttcgaacatgggcgaggccaaaccgtggaaagcaattcgcgtagatctggttcgttgcccctacggcggttttgcgtttgcgttgttgggttggaccggaagccgcatgttccgccgtgatctgcgctggtacgccactgacgagaagaacatgatgctggacaatgctgcgctgtatgacctgaccaagaaaatctttctcaaagctaaatcggaagaggaaattttcgcacatctggggcttgaatacctggaaccgttcgaacgtaacgca

SEQ ID NO: 2032 - protein, 529 aa, synthetic construct
  REGION 1..529: note = Variant of terminal deoxynucleotidyltransferase
MHHHHHHGGSGSHGIRTIDSDFGKKRQKKMDNHDSSAIYEIKFHEFVLFILEEKMGATRRTFLTDLARKKGFRVENELSDSVTHIVAENNSRSEVLAWLKEHKMEKTKQFELLDISWLIESMKVGKPVDTKGKYQLAESGEMSANPDPTEGRENELPPTMKTVSPYACQRRTTLNNHNQRFTDALEILAENYEFKRNDDTALEFRRAISVLKSLPFEVRSLKDTEGLPWIGDEVKGIMEEIIEVGESLEVQAVLNDERYQSFKRFKSVFGVGVKTADKWYRMGLRTLEDVRSSKTLKLTPMQKAGLCYYEDLARGVTKAEADAISLLVQDAVATFDPDALVEIVGGFRRGKPQGHDVDLLITSPGAEKEQEDQLLQKVTNLWKKQGLLLYGRLEWSQFEDGKLPSGKADALDHHAKCFLILKLYDHKVDKSKWEMPTGSNMGEAKPWKAIRVDLVRCPYGGFAFALLGWTGSRMFRRDLRWYATDEKNMMLDNAALYDLTKKIFLKAKSEEEIFAHLGLEYLEPFERNA

SEQ ID NO: 2033 - DNA, 1587 bp, synthetic construct
  misc_feature 1..1587: note = Variant of terminal deoxynucleotidyltransferase
  source 1..1587: mol_type = other DNA
atgcaccatcatcatcatcatggcggtagcggcagccacggcattcgtaccatcgattcggacttcgggaagaaacgccagaaaaaaatggataaccacgatagttccgccatctatgaaatcaaatttcacgagtttgtgctgttcattctcgaagaaaaaatgggtgcgacgcgtcgtacttttctgacagatttagcccgcaagaaagggttccgcgtcgagaatgaactgtcagacagcgttacccacatcgtggcagaaaataattcacgctctgaagtattggcttggctgaaagaacacaagatggagaagaccaagcaattcgaactgctggatattagctggcttatcgaaagcatgaaagttggtaaaccggtggacaccaaggggaaataccagttggcggaatcgggtgagatgagtgcgaacccagatccgacagagggtcgtgaaaacgagctgcctcctactatgaagaccgtttctccgtatgcgtgtcaacgccgcaccaccctgaacaaccataatcaacgttttacggacgcactggaaattcttgcggaaaattacgagttcaaacgcaacgatgatactgcgctggaatttcgtcgtgctatctccgtgctgaaaagccttccgtttgaggtacgtagcctgaaagacacggaaggattgccctggatcggtgatgaagtcaaagggattatggaagaaatcatcgaggtcggtgaatcgctggaagtgcaggccgtgctcaatgatgagcgctatcaaagcttcaaacgctttaagagtgtctttggagtgggggtgatgacagcagacaagtggtaccgtatgggtctgcgcacgctcgaggatgttcgttccagcaagaccctgaagttgaccccgatgcagaaagcgggtctgtgctattatgaagatcttgctcgcggcgttacgaaagccgaagctgacgcgatttctctgctggttcaggatgcagtcgcaactttcgacccggatgcgctggtggagattgtcggtggatttcgtcgtgggaaacctcagggtcacgacgttgatctgcttatcacatctccgggagctgagaaagagcaagaagaccagctcctgcagaaagtgaccaatctgtggaagaaacaagggttgttgctgtacggtcgtctggaatggagtcagtttgaagatgggaaactcccatccggtaaggctgatgccctggaccaccacgcgaaatgctttctgatcctcaaactttatgatcataaagtggacaaaagcaaatgggaaatgccgacgggttcgaacatgggcgaggccaaaccgtggaaagcaattcgcgtagatctggttcgttgcccctacggcggttttgcgtttgcgttgttgggttggaccggaagccgcatgttccgccgtgatctgcgctggtacgccactgacgagaagaacatgatgctggacaatcatgcgctgtatgacctgaccaagaaaatctttctcaaagctaaatcggaagaggaaattttcgcacatctggggcttgaatacctggaaccgttcgaacgtaacgca

SEQ ID NO: 2034 - protein, 529 aa, synthetic construct
  REGION 1..529: note = Variant of terminal deoxynucleotidyltransferase
MHHHHHHGGSGSHGIRTIDSDFGKKRQKKMDNHDSSAIYEIKFHEFVLFILEEKMGATRRTFLTDLARKKGFRVENELSDSVTHIVAENNSRSEVLAWLKEHKMEKTKQFELLDISWLIESMKVGKPVDTKGKYQLAESGEMSANPDPTEGRENELPPTMKTVSPYACQRRTTLNNHNQRFTDALEILAENYEFKRNDDTALEFRRAISVLKSLPFEVRSLKDTEGLPWIGDEVKGIMEEIIEVGESLEVQAVLNDERYQSFKRFKSVFGVGVMTADKWYRMGLRTLEDVRSSKTLKLTPMQKAGLCYYEDLARGVTKAEADAISLLVQDAVATFDPDALVEIVGGFRRGKPQGHDVDLLITSPGAEKEQEDQLLQKVTNLWKKQGLLLYGRLEWSQFEDGKLPSGKADALDHHAKCFLILKLYDHKVDKSKWEMPTGSNMGEAKPWKAIRVDLVRCPYGGFAFALLGWTGSRMFRRDLRWYATDEKNMMLDNHALYDLTKKIFLKAKSEEEIFAHLGLEYLEPFERNA

SEQ ID NO: 2035 - DNA, 1587 bp, synthetic construct
  misc_feature 1..1587: note = Variant of terminal deoxynucleotidyltransferase
  source 1..1587: mol_type = other DNA
atgcaccatcatcatcatcatggcggtagcggcagccacggcattcgtaccatcgattcggacttcgggaagaaacgccagaaaaaaatggataaccacgatagttccgccatctatgaaatcaaatttcacgagtttgtgctgttcattctcgaagaaaaaatgggtgcgacgcgtcgtacttttctgacagatttagcccgcaagaaagggttccgcgtcgagaatgaactgtcagacagcgttacccacatcgtggcagaaaataattcacgctctgaagtattggcttggctgaaagaacacaagatggagaagaccaagcaattcgaactgctggatattagctggcttatcgaaagcatgaaagttggtaaaccggtggacaccaaggggaaataccagttggcggaatcgggtgagatgagtgcgaacccagatccgacagagggtcgtgaaaacgagctgcctcctactatgaagaccgtttctccgtatgcgtgtcaacgccgcaccaccctgaacaaccataatcaacgttttacggacgcactggaaattcttgcggaaaattacgagttcaaacgcaacgatgatactgcgctggaatttcgtcgtgctatctccgtgctgaaaagccttccgtttgaggtacgtagcctgaaagacacggaaggattgccctggatcggtgatgaagtcaaagggattatggaagaaatcatcgaggtcggtgaatcgctggaagtgcaggccgtgctcaatgatgagcgctatcaaagcttcaaacgctttaagagtgtctttggagtgggggtgaagacagcagacaagtggtaccgtatgggtctgcgcaatctcgaggatgttcgttccagcaagaccctgaagttgaccccgatgcagaaagcgggtctgtgctattatgaagatcttgctcgcggcgttacgaaagccgaagctgacgcgatttctctgctggttcaggatgcagtcgcaactttcgacccggatgcgctggtggagattgtcggtggatttcgtcgtgggaaacctcagggtcacgacgttgatctgcttatcacatctccgggagctgagaaagagcaagaagaccagctcctgcagaaagtgaccaatctgtggaagaaacaagggttgttgctgtacggtcgtctggaatggagtcagtttgaagatgggaaactcccatccggtaaggctgatgccctggaccaccacgcgaaatgctttctgatcctcaaactttatgatcataaagtggacaaaagcaaatgggaaatgccgacgggttcgaacatgggcgaggccaaaccgtggaaagcaattcgcgtagatctggttcgttgcccctacggcggttttgcgtttgcgttgttgggttggaccggaagccgcatgttccgccgtgatctgcgctggtacgccactgacgagaagaacatgatgctggacaatcatgcgctgtatgacctgaccaagaaaatctttctcaaagctaaatcggaagaggaaattttcgcacatctggggcttgaatacctggaaccgttcgaacgtaacgca

SEQ ID NO: 2036 - protein, 529 aa, synthetic construct
  REGION 1..529: note = Variant of terminal deoxynucleotidyltransferase
MHHHHHHGGSGSHGIRTIDSDFGKKRQKKMDNHDSSAIYEIKFHEFVLFILEEKMGATRRTFLTDLARKKGFRVENELSDSVTHIVAENNSRSEVLAWLKEHKMEKTKQFELLDISWLIESMKVGKPVDTKGKYQLAESGEMSANPDPTEGRENELPPTMKTVSPYACQRRTTLNNHNQRFTDALEILAENYEFKRNDDTALEFRRAISVLKSLPFEVRSLKDTEGLPWIGDEVKGIMEEIIEVGESLEVQAVLNDERYQSFKRFKSVFGVGVKTADKWYRMGLRNLEDVRSSKTLKLTPMQKAGLCYYEDLARGVTKAEADAISLLVQDAVATFDPDALVEIVGGFRRGKPQGHDVDLLITSPGAEKEQEDQLLQKVTNLWKKQGLLLYGRLEWSQFEDGKLPSGKADALDHHAKCFLILKLYDHKVDKSKWEMPTGSNMGEAKPWKAIRVDLVRCPYGGFAFALLGWTGSRMFRRDLRWYATDEKNMMLDNHALYDLTKKIFLKAKSEEEIFAHLGLEYLEPFERNA

SEQ ID NO: 2037 - DNA, 1587 bp, synthetic construct
  misc_feature 1..1587: note = Variant of terminal deoxynucleotidyltransferase
  source 1..1587: mol_type = other DNA
atgcaccatcatcatcatcatggcggtagcggcagccacggcattcgtaccatcgattcggacttcgggaagaaacgccagaaaaaaatggataaccacgatagttccgccatctatgaaatcaaatttcacgagtttgtgctgttcattctcgaagaaaaaatgggtgcgacgcgtcgtacttttctgacagatttagcccgcaagaaagggttccgcgtcgagaatgaactgtcagacagcgttacccacatcgtggcagaaaataattcacgctctgaagtattggcttggctgaaagaacacaagatggagaagaccaagcaattcgaactgctggatattagctggcttatcgaaagcatgaaagttggtaaaccggtggacaccaaggggaaataccagttggcggaatcgggtgagatgagtgcgaacccagatccgacagagggtcgtgaaaacgagctgcctcctactatgaagaccgtttctccgtatgcgtgtcaacgccgcaccaccctgaacaaccataatcaacgttttacggacgcactggaaattcttgcggaaaattacgagttcaaacgcaacgatgatactgcgctggaatttcgtcgtgctatctccgtgctgaaaagccttccgtttgaggtacgtagcctgaaagacacggaaggattgccctggatcggtgatgaagtcaaagggattatggaagaaatcatcgaggtcggtgaatcgctggaagtgcaggccgtgctcaatgatgagcgctatcaaagcttcaaacgctttaagagtgtctttggagtgggggtgaagacagcagacaagtggtaccgtatgggtctgcgcacgctcgaggatgttcgttccagcaagaccctgaagttgaccccgatgcagaaagcgggtctgtgctattatgaagatcttgctcgcggcgttacgaaagccgaagctgacgcgatttctctgctggttcaggatgcagtcgcaactttcgacccggatgcgctggtggagattgtcggtggatttcgtcgtgggaaacctcagggtcacgacgttgatctgcttatcacatctccgggagctgagaaagagcaagaagaccagctcctgcagaaagtgaccaatctgtggaagaaacaagggttgttgctgtacggtcgtctggaatggagtcagtttgatgatgggaaactcccatccggtaaggctgatgccctggaccaccacgcgaaatgctttctgatcctcaaactttatgatcataaagtggacaaaagcaaatgggaaatgccgacgggttcgaacatgggcgaggccaaaccgtggaaagcaattcgcgtagatctggttcgttgcccctacggcggttttgcgtttgcgttgttgggttggaccggaagccgcatgttccgccgtgatctgcgctggtacgccactgacgagaagaacatgatgctggacaatcatgcgctgtatgacctgaccaagaaaatctttctcaaagctaaatcggaagaggaaattttcgcacatctggggcttgaatacctggaaccgttcgaacgtaacgca

SEQ ID NO: 2038 - protein, 529 aa, synthetic construct
  REGION 1..529: note = Variant of terminal deoxynucleotidyltransferase
MHHHHHHGGSGSHGIRTIDSDFGKKRQKKMDNHDSSAIYEIKFHEFVLFILEEKMGATRRTFLTDLARKKGFRVENELSDSVTHIVAENNSRSEVLAWLKEHKMEKTKQFELLDISWLIESMKVGKPVDTKGKYQLAESGEMSANPDPTEGRENELPPTMKTVSPYACQRRTTLNNHNQRFTDALEILAENYEFKRNDDTALEFRRAISVLKSLPFEVRSLKDTEGLPWIGDEVKGIMEEIIEVGESLEVQAVLNDERYQSFKRFKSVFGVGVKTADKWYRMGLRTLEDVRSSKTLKLTPMQKAGLCYYEDLARGVTKAEADAISLLVQDAVATFDPDALVEIVGGFRRGKPQGHDVDLLITSPGAEKEQEDQLLQKVTNLWKKQGLLLYGRLEWSQFDDGKLPSGKADALDHHAKCFLILKLYDHKVDKSKWEMPTGSNMGEAKPWKAIRVDLVRCPYGGFAFALLGWTGSRMFRRDLRWYATDEKNMMLDNHALYDLTKKIFLKAKSEEEIFAHLGLEYLEPFERNA

SEQ ID NO: 2039 - DNA, 1587 bp, synthetic construct
  misc_feature 1..1587: note = Variant of terminal deoxynucleotidyltransferase
  source 1..1587: mol_type = other DNA
atgcaccatcatcatcatcatggcggtagcggcagccacggcattcgtaccatcgattcggacttcgggaagaaacgccagaaaaaaatggataaccacgatagttccgccatctatgaaatcaaatttcacgagtttgtgctgttcattctcgaagaaaaaatgggtgcgacgcgtcgtacttttctgacagatttagcccgcaagaaagggttccgcgtcgagaatgaactgtcagacagcgttacccacatcgtggcagaaaataattcacgctctgaagtattggcttggctgaaagaacacaagatggagaagaccaagcaattcgaactgctggatattagctggcttatcgaaagcatgaaagttggtaaaccggtggacaccaaggggaaataccagttggcggaatcgggtgagatgagtgcgaacccagatccgacagagggtcgtgaaaacgagctgcctcctactatgaagaccgtttctccgtatgcgtgtcaacgccgcaccaccctgaacaaccataatcaacgttttacggacgcactggaaattcttgcggaaaattacgagttcaaacgcaacgatgatactgcgctggaatttcgtcgtgctatctccgtgctgaaaagccttccgtttgaggtacgtagcctgaaagacacggaaggattgccctggatcggtgatgaagtcaaagggattatggaagaaatcatcgaggtcggtgaatcgctggaagtgcaggccgtgctcaatgatgagcgctatcaaagcttcaaacgctttaagagtgtctttggagtgggggtgaagacagcagacaagtggtaccgtatgggtctgcgcacgctcgaggatgttcgttccagcaagaccctgaagttgaccccgatgcagaaagcgggtctgtgctattatgaagatcttgctcgcggcgttacgaaagccgaagctgacgcgatttctctgctggttcaggatgcagtcgcaactttcgacccggatgcgctggtggagattgtcggtggatttcgtcgtgggaaacctcagggtcacgacgttgatctgcttatcacatctccgggagctgagaaagagcaagaagaccagctcctgcagaaagtgaccaatctgtggaagaaacaagggttgttgctgtacggtcgtctggaatggagtcagtttgaagatgggaaactcccatccggtaaggctgatgccctggacgcgttcgcgaaatgctttctgatcctcaaactttatgatcataaagtggacaaaagcaaatgggaaatgccgacgggttcgaacatgggcgaggccaaaccgtggaaagcaattcgcgtagatctggttcgttgcccctacggcggttttgcgtttgcgttgttgggttggaccggaagccgcatgttccgccgtgatctgcgctggtacgccactgacgagaagaacatgatgctggacaatcatgcgctgtatgacctgaccaagaaaatctttctcaaagctaaatcggaagaggaaattttcgcacatctggggcttgaatacctggaaccgttcgaacgtaacgca

SEQ ID NO: 2040 - protein, 529 aa, synthetic construct
  REGION 1..529: note = Variant of terminal deoxynucleotidyltransferase
MHHHHHHGGSGSHGIRTIDSDFGKKRQKKMDNHDSSAIYEIKFHEFVLFILEEKMGATRRTFLTDLARKKGFRVENELSDSVTHIVAENNSRSEVLAWLKEHKMEKTKQFELLDISWLIESMKVGKPVDTKGKYQLAESGEMSANPDPTEGRENELPPTMKTVSPYACQRRTTLNNHNQRFTDALEILAENYEFKRNDDTALEFRRAISVLKSLPFEVRSLKDTEGLPWIGDEVKGIMEEIIEVGESLEVQAVLNDERYQSFKRFKSVFGVGVKTADKWYRMGLRTLEDVRSSKTLKLTPMQKAGLCYYEDLARGVTKAEADAISLLVQDAVATFDPDALVEIVGGFRRGKPQGHDVDLLITSPGAEKEQEDQLLQKVTNLWKKQGLLLYGRLEWSQFEDGKLPSGKADALDAFAKCFLILKLYDHKVDKSKWEMPTGSNMGEAKPWKAIRVDLVRCPYGGFAFALLGWTGSRMFRRDLRWYATDEKNMMLDNHALYDLTKKIFLKAKSEEEIFAHLGLEYLEPFERNA

SEQ ID NO: 2041 - DNA, 1587 bp, synthetic construct
  misc_feature 1..1587: note = Variant of terminal deoxynucleotidyltransferase
  source 1..1587: mol_type = other DNA
atgcaccatcatcatcatcatggcggtagcggcagccacggcattcgtaccatcgattcggacttcgggaagaaacgccagaaaaaaatggataaccacgatagttccgccatctatgaaatcaaatttcacgagtttgtgctgttcattctcgaagaaaaaatgggtgcgacgcgtcgtacttttctgacagatttagcccgcaagaaagggttccgcgtcgagaatgaactgtcagacagcgttacccacatcgtggcagaaaataattcacgctctgaagtattggcttggctgaaagaacacaagatggagaagaccaagcaattcgaactgctggatattagctggcttatcgaaagcatgaaagttggtaaaccggtggacaccaaggggaaataccagttggcggaatcgggtgagatgagtgcgaacccagatccgacagagggtcgtgaaaacgagctgcctcctactatgaagaccgtttctccgtatgcgtgtcaacgccgcaccaccctgaacaaccataatcaacgttttacggacgcactggaaattcttgcggaaaattactctttcaaacgcaacgatgatactgcgctggaatttcgtcgtgctatctccgtgctgaaaagccttccgtttgaggtacgtagcctgaaagacacggaaggattgccctggatcggtgatgaagtcaaagggattatggaagaaatcatcgaggtcggtgaatcgctggaagtgcaggccgtgctcaatgatgagcgctatcaaagcttcaaacgctttaagagtgtctttggagtgggggtgaagacagcagacaagtggtaccgtatgggtctgcgcacgctcgaggatgttcgttccagcaagaccctgaagttgaccccgatgcagaaagcgggtctgtgctattatgaagatcttgctcgcggcgttacgaaagccgaagctgacgcgatttctctgctggttcaggatgcagtcgcaactttcgacccggatgcgctggtggagattgtcggtggatttcgtcgtgggaaacctcagggtcacgacgttgatctgcttatcacatctccgggagctgagaaagagcaagaagaccagctcctgcagaaagtgaccaatctgtggaagaaacaagggttgttgctgtacggtcgtctggaatggagtcagtttgaagatgggaaactcccatccggtaaggctgatgccctggaccaccacgcgaaatgctttctgatcctcaaactttatgatcataaagtggacaaaagcaaatgggaaatgccgacgggttcgaacatgggcgaggccaaaccgtggaaagcaattcgcgtagatctggttcgttgcccctacggcggttttgcgtttgcgttgttgggttggaccggaagccgcatgttccgccgtgatctgcgctggtacgccactgacgagaagaacatgatgctggacaatcatgcgctgtatgacctgaccaagaaaatctttctcaaagctaaatcggaagaggaaattttcgcacatctggggcttgaatacctggaaccgttcgaacgtaacgca

SEQ ID NO: 2042 - protein, 529 aa, synthetic construct
  REGION 1..529: note = Variant of terminal deoxynucleotidyltransferase
MHHHHHHGGSGSHGIRTIDSDFGKKRQKKMDNHDSSAIYEIKFHEFVLFILEEKMGATRRTFLTDLARKKGFRVENELSDSVTHIVAENNSRSEVLAWLKEHKMEKTKQFELLDISWLIESMKVGKPVDTKGKYQLAESGEMSANPDPTEGRENELPPTMKTVSPYACQRRTTLNNHNQRFTDALEILAENYSFKRNDDTALEFRRAISVLKSLPFEVRSLKDTEGLPWIGDEVKGIMEEIIEVGESLEVQAVLNDERYQSFKRFKSVFGVGVKTADKWYRMGLRTLEDVRSSKTLKLTPMQKAGLCYYEDLARGVTKAEADAISLLVQDAVATFDPDALVEIVGGFRRGKPQGHDVDLLITSPGAEKEQEDQLLQKVTNLWKKQGLLLYGRLEWSQFEDGKLPSGKADALDHHAKCFLILKLYDHKVDKSKWEMPTGSNMGEAKPWKAIRVDLVRCPYGGFAFALLGWTGSRMFRRDLRWYATDEKNMMLDNHALYDLTKKIFLKAKSEEEIFAHLGLEYLEPFERNA

SEQ ID NO: 2043 - DNA, 1587 bp, synthetic construct
  misc_feature 1..1587: note = Variant of terminal deoxynucleotidyltransferase
  source 1..1587: mol_type = other DNA
atgcaccatcatcatcatcatggcggtagcggcagccacggcattcgtaccatcgattcggacttcgggaagaaacgccagaaaaaaatggataaccacgatagttccgccatctatgaaatcaaatttcacgagtttgtgctgttcattctcgaagaaaaaatgggtgcgacgcgtcgtacttttctgacagatttagcccgcaagaaagggttccgcgtcgagaatgaactgtcagacagcgttacccacatcgtggcagaaaataattcacgctctgaagtattggcttggctgaaagaacacaagatggagaagaccaagcaattcgaactgctggatattagctggcttatcgaaagcatgaaagttggtaaaccggtggacaccaaggggaaataccagttggcggaatcgggtgagatgagtgcgaacccagatccgacagagggtcgtgaaaacgagctgcctcctactatgaagaccgtttctccgtatgcgtgtcaacgccgcaccaccctgaacaaccataatcaacgttttacggacgcactggaaattcttgcggaaaattacgagttcaaacgcaacgatgatactgcgctggaatttcgtcgtgctatctccgtgctgaaaagccttccgtttgaggtacgtagcctgaaagacacggaaggattgccctggatcggtgatgaagtcaaagggattatggaagaaatcatcgaggtcggtgaatcgctggaagtgcaggccgtgctcaatgatgagcgctatcaaagcttcaaacgctttaagagtgtctttggagtgggggtgaagacagcagacaagtggtaccgtatgggtctgcgcacgctcgaggatgttcgttccagcaagaccctgaagttgaccccgatgcagaaagcgggtctgtgctattatgaagatcttgctcgcggcgttacgaaagccgaagctgacgcgatttctctgctggttcaggatgcagtcgcaactttcgacccggatgcgctggtggagattgtcggtggatttcgtcgtgggaaacctcagggtcacgacgttgatctgcttatcacatctccgggagctgagaaagagcaagaagaccagctcctgcagaaagtgaccaatctgtggaagaaacaagggttgttgctgtacggtcgtctggaatggagtcagtttgaagatgggaaactcccatccggtaaggctcaggccctggaccatttcgcgaaatgctttctgatcctcaaactttatgatcataaagtggacaaaagcaaatgggaaatgccgacgggttcgaacatgggcgaggccaaaccgtggaaagcaattcgcgtagatctggttcgttgcccctacggcggttttgcgtttgcgttgttgggttggaccggaagccgcatgttccgccgtgatctgcgctggtacgccactgacgagaagaacatgatgctggacaatcatgcgctgtatgacctgaccaagaaaatctttctcaaagctaaatcggaagaggaaattttcgcacatctggggcttgaatacctggaaccgttcgaacgtaacgca

SEQ ID NO: 2044 - protein, 529 aa, synthetic construct
  REGION 1..529: note = Variant of terminal deoxynucleotidyltransferase
MHHHHHHGGSGSHGIRTIDSDFGKKRQKKMDNHDSSAIYEIKFHEFVLFILEEKMGATRRTFLTDLARKKGFRVENELSDSVTHIVAENNSRSEVLAWLKEHKMEKTKQFELLDISWLIESMKVGKPVDTKGKYQLAESGEMSANPDPTEGRENELPPTMKTVSPYACQRRTTLNNHNQRFTDALEILAENYEFKRNDDTALEFRRAISVLKSLPFEVRSLKDTEGLPWIGDEVKGIMEEIIEVGESLEVQAVLNDERYQSFKRFKSVFGVGVKTADKWYRMGLRTLEDVRSSKTLKLTPMQKAGLCYYEDLARGVTKAEADAISLLVQDAVATFDPDALVEIVGGFRRGKPQGHDVDLLITSPGAEKEQEDQLLQKVTNLWKKQGLLLYGRLEWSQFEDGKLPSGKAQALDHFAKCFLILKLYDHKVDKSKWEMPTGSNMGEAKPWKAIRVDLVRCPYGGFAFALLGWTGSRMFRRDLRWYATDEKNMMLDNHALYDLTKKIFLKAKSEEEIFAHLGLEYLEPFERNA

SEQ ID NO: 2045 - DNA, 1587 bp, synthetic construct
  misc_feature 1..1587: note = Variant of terminal deoxynucleotidyltransferase
  source 1..1587: mol_type = other DNA
atgcaccatcatcatcatcatggcggtagcggcagccacggcattcgtaccatcgattcggacttcgggaagaaacgccagaaaaaaatggataaccacgatagttccgccatctatgaaatcaaatttcacgagtttgtgctgttcattctcgaagaaaaaatgggtgcgacgcgtcgtacttttctgacagatttagcccgcaagaaagggttccgcgtcgagaatgaactgtcagacagcgttacccacatcgtggcagaaaataattcacgctctgaagtattggcttggctgaaagaacacaagatggagaagaccaagcaattcgaactgctggatattagctggcttatcgaaagcatgaaagttggtaaaccggtggacaccaaggggaaataccagttggcggaatcgggtgagatgagtgcgaacccagatccgacagagggtcgtgaaaacgagctgcctcctactatgaagaccgtttctccgtatgcgtgtcaacgccgcaccaccctgaacaaccataatcaacgttttacggacgcactggaaattcttgcggaaaattacgagttcaaacgcaacgatgatactgcgctggaatttcgtcgtgctatctccgtgctgaaaagccttccgtttgaggtacgtagcctgaaagacacggaaggattgccctggatcggtgatgaagtcaaagggattatggaagaaatcatcgaggtcggtgaatcgctggaagtgcaggccgtgctcaatgatgagcgctatcaaagcttcaaacgctttaagagtgtctttggagtgggggtgaagacagcagacaagtggtaccgtatgggtctgcgcacgctcgaggatgttcgttccagcaagaccctgaagttgaccccgatgcagaaagcgggtctgtgctattatgaagatcttgctcgcggcgttacgaaagccgaagctgacgcgatttctctgctggttcaggatgcagtcgcaactttcgacccggatgcgctggtggagattgtcggtggatttcgtcgtgggaaacctcagggtcacgacgttgatctgcttatcacatctccgggagctgagaaagagcaagaagaccagctcctgcagaaagtgaccaatctgtggaagaaacaagggttgttgctgtacggtcgtctggaatggagtcagtttgaagatgggaaactcccatccggtaaggctgatgcccgtgaccatttcgcgaaatgctttctgatcctcaaactttatgatcataaagtggacaaaagcaaatgggaaatgccgacgggttcgaacatgggcgaggccaaaccgtggaaagcaattcgcgtagatctggttcgttgcccctacggcggttttgcgtttgcgttgttgggttggaccggaagccgcatgttccgccgtgatctgcgctggtacgccactgacgagaagaacatgatgctggacaatcatgcgctgtatgacctgaccaagaaaatctttctcaaagctaaatcggaagaggaaattttcgcacatctggggcttgaatacctggaaccgttcgaacgtaacgca

SEQ ID NO: 2046 - protein, 529 aa, synthetic construct
  REGION 1..529: note = Variant of terminal deoxynucleotidyltransferase
MHHHHHHGGSGSHGIRTIDSDFGKKRQKKMDNHDSSAIYEIKFHEFVLFILEEKMGATRRTFLTDLARKKGFRVENELSDSVTHIVAENNSRSEVLAWLKEHKMEKTKQFELLDISWLIESMKVGKPVDTKGKYQLAESGEMSANPDPTEGRENELPPTMKTVSPYACQRRTTLNNHNQRFTDALEILAENYEFKRNDDTALEFRRAISVLKSLPFEVRSLKDTEGLPWIGDEVKGIMEEIIEVGESLEVQAVLNDERYQSFKRFKSVFGVGVKTADKWYRMGLRTLEDVRSSKTLKLTPMQKAGLCYYEDLARGVTKAEADAISLLVQDAVATFDPDALVEIVGGFRRGKPQGHDVDLLITSPGAEKEQEDQLLQKVTNLWKKQGLLLYGRLEWSQFEDGKLPSGKADARDHFAKCFLILKLYDHKVDKSKWEMPTGSNMGEAKPWKAIRVDLVRCPYGGFAFALLGWTGSRMFRRDLRWYATDEKNMMLDNHALYDLTKKIFLKAKSEEEIFAHLGLEYLEPFERNA

SEQ ID NO: 2047 - DNA, 1587 bp, synthetic construct
  misc_feature 1..1587: note = Variant of terminal deoxynucleotidyltransferase
  source 1..1587: mol_type = other DNA
atgcaccatcatcatcatcatggcggtagcggcagccacggcattcgtaccatcgattcggacttcgggaagaaacgccagaaaaaaatggataaccacgatagttccgccatctatgaaatcaaatttcacgagtttgtgctgttcattctcgaagaaaaaatgggtgcgacgcgtcgtacttttctgacagatttagcccgcaagaaagggttccgcgtcgagaatgaactgtcagacagcgttacccacatcgtggcagaaaataattcacgctctgaagtattggcttggctgaaagaacacaagatggagaagaccaagcaattcgaactgctggatattagctggcttatcgaaagcatgaaagttggtaaaccggtggacaccaaggggaaataccagttggcggaatcgggtgagatgagtgcgaacccagatccgacagagggtcgtgaaaacgagctgcctcctactatgaagaccgtttctccgtatgcgtgtcaacgccgcaccaccctgaacaaccataatcaacgttttacggacgcactggaaattcttgcggaaaattacgagttcaaacgcaacgatgatactgcgctggaatttcgtcgtgctatctccgtgctgaaaagccttccgtttgaggtacgtagcctgaaagacacggaaggattgccctggatcggtgatgaagtcaaagggattatggaagaaatcatcgaggtcgctgaatcgctggaagtgcaggccgtgctcaatgatgagcgctatcaaagcttcaaacgctttaagagtgtctttggagtgggggtgaagacagcagacaagtggtaccgtatgggtctgcgcacgctcgaggatgttcgttccagcaagaccctgaagttgaccccgatgcagaaagcgggtctgtgctattatgaagatcttgctcgcggcgttacgaaagccgaagctgacgcgatttctctgctggttcaggatgcagtcgcaactttcgacccggatgcgctggtggagattgtcggtggatttcgtcgtgggaaacctcagggtcacgacgttgatctgcttatcacatctccgggagctgagaaagagcaagaagaccagctcctgcagaaagtgaccaatctgtggaagaaacaagggttgttgctgtacggtcgtctggaatggagtcagtttgaagatgggaaactcccatccggtaaggctgatgccctggaccaccacgcgaaatgctttctgatcctcaaactttatgatcataaagtggacaaaagcaaatgggaaatgccgacgggttcgaacatgggcgaggccaaaccgtggaaagcaattcgcgtagatctggttcgttgcccctacggcggttttgcgtttgcgttgttgggttggaccggaagccgcatgttccgccgtgatctgcgctggtacgccactgacgagaagaacatgatgctggacaatcatgcgctgtatgacctgaccaagaaaatctttctcaaagctaaatcggaagaggaaattttcgcacatctggggcttgaatacctggaaccgttcgaacgtaacgca

SEQ ID NO: 2048 - protein, 529 aa, synthetic construct
  REGION 1..529: note = Variant of terminal deoxynucleotidyltransferase
MHHHHHHGGSGSHGIRTIDSDFGKKRQKKMDNHDSSAIYEIKFHEFVLFILEEKMGATRRTFLTDLARKKGFRVENELSDSVTHIVAENNSRSEVLAWLKEHKMEKTKQFELLDISWLIESMKVGKPVDTKGKYQLAESGEMSANPDPTEGRENELPPTMKTVSPYACQRRTTLNNHNQRFTDALEILAENYEFKRNDDTALEFRRAISVLKSLPFEVRSLKDTEGLPWIGDEVKGIMEEIIEVAESLEVQAVLNDERYQSFKRFKSVFGVGVKTADKWYRMGLRTLEDVRSSKTLKLTPMQKAGLCYYEDLARGVTKAEADAISLLVQDAVATFDPDALVEIVGGFRRGKPQGHDVDLLITSPGAEKEQEDQLLQKVTNLWKKQGLLLYGRLEWSQFEDGKLPSGKADALDHHAKCFLILKLYDHKVDKSKWEMPTGSNMGEAKPWKAIRVDLVRCPYGGFAFALLGWTGSRMFRRDLRWYATDEKNMMLDNHALYDLTKKIFLKAKSEEEIFAHLGLEYLEPFERNA

SEQ ID NO: 2049 - DNA, 1587 bp, synthetic construct
  misc_feature 1..1587: note = Variant of terminal deoxynucleotidyltransferase
  source 1..1587: mol_type = other DNA
atgcaccatcatcatcatcatggcggtagcggcagccacggcattcgtaccatcgattcggacttcgggaagaaacgccagaaaaaaatggataaccacgatagttccgccatctatgaaatcaaatttcacgagtttgtgctgttcattctcgaagaaaaaatgggtgcgacgcgtcgtacttttctgacagatttagcccgcaagaaagggttccgcgtcgagaatgaactgtcagacagcgttacccacatcgtggcagaaaataattcacgctctgaagtattggcttggctgaaagaacacaagatggagaagaccaagcaattcgaactgctggatattagctggcttatcgaaagcatgaaagttggtaaaccggtggacaccaaggggaaataccagttggcggaatcgggtgagatgagtgcgaacccagatccgacagagggtcgtgaaaacgagctgcctcctactatgaagaccgtttctccgtatgcgtgtcaacgccgcaccaccctgaacaaccataatcaacgttttacggacgcactggaaattcttgcggaaaattacgagttcaaacgcaacgatgatactgcgctggaatttcgtcgtgctatctccgtgctgaaaagccttccgtttgaggtacgtagcctgaaagacacggaaggattgccctggatcggtgatgaagtcaaagggattatggaagaaatcatcgaggtcggtgaatcgctggaagtgcaggccgtgctcaatgatgagcgctatcaaagcttcaaacgctttaagagtgtctttggagtgggggtgaagacagcagacaagtggtaccgtatgggtctgcgcacgctcgaggatgttcgttccagcaagaccctgaagttgaccccgatgcagaaagcgggtctgtgctattatgaagatcttgctcgcggcgttacgaaagccgaagctgacgcgatttctctgctggttcaggatgcagtcgcaactttcgacccggatgcgctggtggagattgtcggtggatttcgtcgtgggaaacctcagggtcacgacgttgatctgcttatcacatctccgggagctgagaaagagcaagaagaccagctcctgcagaaagtgaccaatctgtggaagaaacaagggttgttgctgtacggtcgtctggaatggagtcagtttgaagatgggaaactcccatccggtaaggctgatgttctggaccatttcgcgaaatgctttctgatcctcaaactttatgatcataaagtggacaaaagcaaatgggaaatgccgacgggttcgaacatgggcgaggccaaaccgtggaaagcaattcgcgtagatctggttcgttgcccctacggcggttttgcgtttgcgttgttgggttggaccggaagccgcatgttccgccgtgatctgcgctggtacgccactgacgagaagaacatgatgctggacaatcatgcgctgtatgacctgaccaagaaaatctttctcaaagctaaatcggaagaggaaattttcgcacatctggggcttgaatacctggaaccgttcgaacgtaacgca

SEQ ID NO: 2050 - protein, 529 aa, synthetic construct
  REGION 1..529: note = Variant of terminal deoxynucleotidyltransferase
MHHHHHHGGSGSHGIRTIDSDFGKKRQKKMDNHDSSAIYEIKFHEFVLFILEEKMGATRRTFLTDLARKKGFRVENELSDSVTHIVAENNSRSEVLAWLKEHKMEKTKQFELLDISWLIESMKVGKPVDTKGKYQLAESGEMSANPDPTEGRENELPPTMKTVSPYACQRRTTLNNHNQRFTDALEILAENYEFKRNDDTALEFRRAISVLKSLPFEVRSLKDTEGLPWIGDEVKGIMEEIIEVGESLEVQAVLNDERYQSFKRFKSVFGVGVKTADKWYRMGLRTLEDVRSSKTLKLTPMQKAGLCYYEDLARGVTKAEADAISLLVQDAVATFDPDALVEIVGGFRRGKPQGHDVDLLITSPGAEKEQEDQLLQKVTNLWKKQGLLLYGRLEWSQFEDGKLPSGKADVLDHFAKCFLILKLYDHKVDKSKWEMPTGSNMGEAKPWKAIRVDLVRCPYGGFAFALLGWTGSRMFRRDLRWYATDEKNMMLDNHALYDLTKKIFLKAKSEEEIFAHLGLEYLEPFERNA

SEQ ID NO: 2051 - DNA, 1587 bp, synthetic construct
  misc_feature 1..1587: note = Variant of terminal deoxynucleotidyltransferase
  source 1..1587: mol_type = other DNA
atgcaccatcatcatcatcatggcggtagcggcagccacggcattcgtaccatcgattcggacttcgggaagaaacgccagaaaaaaatggataaccacgatagttccgccatctatgaaatcaaatttcacgagtttgtgctgttcattctcgaagaaaaaatgggtgcgacgcgtcgtacttttctgacagatttagcccgcaagaaagggttccgcgtcgagaatgaactgtcagacagcgttacccacatcgtggcagaaaataattcacgctctgaagtattggcttggctgaaagaacacaagatggagaagaccaagcaattcgaactgctggatattagctggcttatcgaaagcatgaaagttggtaaaccggtggacaccaaggggaaataccagttggcggaatcgggtgagatgagtgcgaacccagatccgacagagggtcgtgaaaacgagctgcctcctactatgaagaccgtttctccgtatgcgtgtcaacgccgcaccaccctgaacaaccataatcaacgttttacggacgcactggaaattcttgcggaaaattacgagttcaaacgcaacgatgatactgcgctggaatttcgtcgtgctatctccgtgctgaaaagccttccgtttgaggtacgtagcctgaaagacacggaaggattgccctggatcggtgatgaagtcaaagggattatggaagaaatcatcgaggtcggtgaatcgctggaagtgcaggccgtgctcaatgatgagcgctatcaaagcttcaaacgctttaagagtgtctttggagtgggggtgaagacagcagacaagtggtaccgtatgggtctgcgcacgctcgaggatgttcgttccagcaagaccctgaagttgaccccgatgcagaaagcgggtctgtgctattatgaagatcttgctcgcggcgttacgaaagccgaagctgacgcgatttctctgctggttcaggatgcagtcgcaactttcgacccggatgcgctggtggagattgtcggtggatttcgtcgtgggaaacctcagggtcacgacgttgatctgcttatcacatctccgggagctgagaaagagcaagaagaccagctcctgcagaaagtgaccaatctgtggaagaaacaagggttgttgctgtacggtcgtctggaatggagtcagtttgaagatgggaaactcccatccggtaaggctgatgccctggaccaccacgcgaaatgctttctgatcctcaaactttatgatcataaagtggacaaaagcaaatgggaaatgccgacgggttcgaacatgggcgaggccaaaccgtggaaagcaattcgcgtagatctggttcgttgcccctacggcggttttgcgtttgcgatgttgggttggaccggaagccgcatgttccgccgtgatctgcgctggtacgccactgacgagaagaacatgatgctggacaatcatgcgctgtatgacctgaccaagaaaatctttctcaaagctaaatcggaagaggaaattttcgcacatctggggcttgaatacctggaaccgttcgaacgtaacgca

SEQ ID NO: 2052 - protein, 529 aa, synthetic construct
  REGION 1..529: note = Variant of terminal deoxynucleotidyltransferase
MHHHHHHGGSGSHGIRTIDSDFGKKRQKKMDNHDSSAIYEIKFHEFVLFILEEKMGATRRTFLTDLARKKGFRVENELSDSVTHIVAENNSRSEVLAWLKEHKMEKTKQFELLDISWLIESMKVGKPVDTKGKYQLAESGEMSANPDPTEGRENELPPTMKTVSPYACQRRTTLNNHNQRFTDALEILAENYEFKRNDDTALEFRRAISVLKSLPFEVRSLKDTEGLPWIGDEVKGIMEEIIEVGESLEVQAVLNDERYQSFKRFKSVFGVGVKTADKWYRMGLRTLEDVRSSKTLKLTPMQKAGLCYYEDLARGVTKAEADAISLLVQDAVATFDPDALVEIVGGFRRGKPQGHDVDLLITSPGAEKEQEDQLLQKVTNLWKKQGLLLYGRLEWSQFEDGKLPSGKADALDHHAKCFLILKLYDHKVDKSKWEMPTGSNMGEAKPWKAIRVDLVRCPYGGFAFAMLGWTGSRMFRRDLRWYATDEKNMMLDNHALYDLTKKIFLKAKSEEEIFAHLGLEYLEPFERNA

SEQ ID NO: 2053 - DNA, 1587 bp, synthetic construct
  misc_feature 1..1587: note = Variant of terminal deoxynucleotidyltransferase
  source 1..1587: mol_type = other DNA
atgcaccatcatcatcatcatggcggtagcggcagccacggcattcgtaccatcgattcggacttcgggaagaaacgccagaaaaaaatggataaccacgatagttccgccatctatgaaatcaaatttcacgagtttgtgctgttcattctcgaagaaaaaatgggtgcgacgcgtcgtacttttctgacagatttagcccgcaagaaagggttccgcgtcgagaatgaactgtcagacagcgttacccacatcgtggcagaaaataattcacgctctgaagtattggcttggctgaaagaacacaagatggagaagaccaagcaattcgaactgctggatattagctggcttatcgaaagcatgaaagttggtaaaccggtggacaccaaggggaaataccagttggcggaatcgggtgagatgagtgcgaacccagatccgacagagggtcgtgaaaacgagctgcctcctactatgaagaccgtttctccgtatgcgtgtcaacgccgcaccaccctgaacaaccataatcaacgttttacggacgcactggaaattcttgcggaaaattacgagttcaaacgcaacgatgatactgcgctggaatttcgtcgtgctatctccgtgctgaaaagccttccgtttgaggtacgtagcctgaaagacacggaaggattgccctggatcggtgatgaagtcaaagggattatggaagaaatcatcgaggtcggtgaatcgctggaagtgcaggccgtgctcaatgatgagcgctatcaaagcttcaaacgctttaagagtgtctttggagtgggggtgaagacagcagacaagtggtaccgtatgggtctgcgcacgctcgaggatgttcgttccagcaagaccctgaagttgaccccgatgcagaaagcgggtctgtgctattatgaagatcttgctcgcggcgttacgaaagccgaagctgacgcgatttctctgctggttcaggatgcagtcgcaactttcgacccggatgcgctggtggagattgtcggtggatttcgtcgtgggaaacctcagggtcacgacgttgatctgcttatcacatctccgggagctgagaaagagcaagaagaccagctcctgcagaaagtgaccaatctgtggaagaaacaagggttgttgctgtacggtcgtctggaatggagtcagttttttgatgggaaactcccatccggtaaggctgatgccctggaccaccacgcgaaatgctttctgatcctcaaactttatgatcataaagtggacaaaagcaaatgggaaatgccgacgggttcgaacatgggcgaggccaaaccgtggaaagcaattcgcgtagatctggttcgttgcccctacggcggttttgcgtttgcgttgttgggttggaccggaagccgcatgttccgccgtgatctgcgctggtacgccactgacgagaagaacatgatgctggacaatcatgcgctgtatgacctgaccaagaaaatctttctcaaagctaaatcggaagaggaaattttcgcacatctggggcttgaatacctggaaccgttcgaacgtaacgca

SEQ ID NO: 2054 - protein, 529 aa, synthetic construct
  REGION 1..529: note = Variant of terminal deoxynucleotidyltransferase
MHHHHHHGGSGSHGIRTIDSDFGKKRQKKMDNHDSSAIYEIKFHEFVLFILEEKMGATRRTFLTDLARKKGFRVENELSDSVTHIVAENNSRSEVLAWLKEHKMEKTKQFELLDISWLIESMKVGKPVDTKGKYQLAESGEMSANPDPTEGRENELPPTMKTVSPYACQRRTTLNNHNQRFTDALEILAENYEFKRNDDTALEFRRAISVLKSLPFEVRSLKDTEGLPWIGDEVKGIMEEIIEVGESLEVQAVLNDERYQSFKRFKSVFGVGVKTADKWYRMGLRTLEDVRSSKTLKLTPMQKAGLCYYEDLARGVTKAEADAISLLVQDAVATFDPDALVEIVGGFRRGKPQGHDVDLLITSPGAEKEQEDQLLQKVTNLWKKQGLLLYGRLEWSQFFDGKLPSGKADALDHHAKCFLILKLYDHKVDKSKWEMPTGSNMGEAKPWKAIRVDLVRCPYGGFAFALLGWTGSRMFRRDLRWYATDEKNMMLDNHALYDLTKKIFLKAKSEEEIFAHLGLEYLEPFERNA

SEQ ID NO: 2055 - DNA, 1587 bp, synthetic construct
  misc_feature 1..1587: note = Variant of terminal deoxynucleotidyltransferase
  source 1..1587: mol_type = other DNA
atgcaccatcatcatcatcatggcggtagcggcagccacggcattcgtaccatcgattcggacttcgggaagaaacgccagaaaaaaatggataaccacgatagttccgccatctatgaaatcaaatttcacgagtttgtgctgttcattctcgaagaaaaaatgggtgcgacgcgtcgtacttttctgacagatttagcccgcaagaaagggttccgcgtcgagaatgaactgtcagacagcgttacccacatcgtggcagaaaataattcacgctctgaagtattggcttggctgaaagaacacaagatggagaagaccaagcaattcgaactgctggatattagctggcttatcgaaagcatgaaagttggtaaaccggtggacaccaaggggaaataccagttggcggaatcgggtgagatgagtgcgaacccagatccgacagagggtcgtgaaaacgagctgcctcctactatgaagaccgtttctccgtatgcgtgtcaacgccgcaccaccctgaacaaccataatcaacgttttacggacgcactggaaattcttgcggaaaattacgagttcaaacgcaacgatgatactgcgctggaatttcgtcgtgctatctccgtgctgaaaagccttccgtttgaggtacgtagcctgaaagacacggaaggattgccctggatcggtgatgaagtcaaagggattatggaagaaatcatcgaggtcggtgaatcgctggaagtgcaggccgtgctcaatgatgagcgctatcaaagcttcaaacgctttaagagtgtctttggagtgggggtgaagacagcagacaagtggtaccgtatgggtctgcgcacgctcgaggatgttcgttccagcaagaccctgaagttgaccccgatgcagaaagcgggtctgtgctattatgaagatcttgctcgcggcgttacgaaagccgaagctgacgcgatttctctgctggttcaggatgcagtcgcaactttcgacccggatgcgctggtggagattgtcggtggatttcgtcgtgggaaacctcagggtcacgacgttgatctgcttatcacatctccgggagctgagaaagagcaagaagaccagctcctgcagaaagtgaccaatctgtggaagaaacaagggttgttgctgtacggtcgtctggaatggagtcagtttgaagatgggaaactcccacttggtaaggctgatgccctggaccaccacgcgaaatgctttctgatcctcaaactttatgatcataaagtggacaaaagcaaatgggaaatgccgacgggttcgaacatgggcgaggccaaaccgtggaaagcaattcgcgtagatctggttcgttgcccctacggcggttttgcgtttgcgttgttgggttggaccggaagccgcatgttccgccgtgatctgcgctggtacgccactgacgagaagaacatgatgctggacaatcatgcgctgtatgacctgaccaagaaaatctttctcaaagctaaatcggaagaggaaattttcgcacatctggggcttgaatacctggaaccgttcgaacgtaacgca

SEQ ID NO: 2056 - protein, 529 aa, synthetic construct
  REGION 1..529: note = Variant of terminal deoxynucleotidyltransferase
MHHHHHHGGSGSHGIRTIDSDFGKKRQKKMDNHDSSAIYEIKFHEFVLFILEEKMGATRRTFLTDLARKKGFRVENELSDSVTHIVAENNSRSEVLAWLKEHKMEKTKQFELLDISWLIESMKVGKPVDTKGKYQLAESGEMSANPDPTEGRENELPPTMKTVSPYACQRRTTLNNHNQRFTDALEILAENYEFKRNDDTALEFRRAISVLKSLPFEVRSLKDTEGLPWIGDEVKGIMEEIIEVGESLEVQAVLNDERYQSFKRFKSVFGVGVKTADKWYRMGLRTLEDVRSSKTLKLTPMQKAGLCYYEDLARGVTKAEADAISLLVQDAVATFDPDALVEIVGGFRRGKPQGHDVDLLITSPGAEKEQEDQLLQKVTNLWKKQGLLLYGRLEWSQFEDGKLPLGKADALDHHAKCFLILKLYDHKVDKSKWEMPTGSNMGEAKPWKAIRVDLVRCPYGGFAFALLGWTGSRMFRRDLRWYATDEKNMMLDNHALYDLTKKIFLKAKSEEEIFAHLGLEYLEPFERNA

SEQ ID NO: 2057 - DNA, 1587 bp, synthetic construct
  misc_feature 1..1587: note = Variant of terminal deoxynucleotidyltransferase
  source 1..1587: mol_type = other DNA
atgcaccatcatcatcatcatggcggtagcggcagccacggcattcgtaccatcgattcggacttcgggaagaaacgccagaaaaaaatggataaccacgatagttccgccatctatgaaatcaaatttcacgagtttgtgctgttcattctcgaagaaaaaatgggtgcgacgcgtcgtacttttctgacagatttagcccgcaagaaagggttccgcgtcgagaatgaactgtcagacagcgttacccacatcgtggcagaaaataattcacgctctgaagtattggcttggctgaaagaacacaagatggagaagaccaagcaattcgaactgctggatattagctggcttatcgaaagcatgaaagttggtaaaccggtggacaccaaggggaaataccagttggcggaatcgggtgagatgagtgcgaacccagatccgacagagggtcgtgaaaacgagctgcctcctactatgaagaccgtttctccgtatgcgtgtcaacgccgcaccaccctgaacaaccataatcaacgttttacggacgcactggaaattcttgcggaaaattacgagttcaaacgcaacgatgatactgcgctggaatttcgtcgtgctatctccgtgctgaaaagccttccgtttgaggtacgtagcctgaaagacacggaaggattgccctggatcggtgatgaagtcaaagggattatggaagaaatcatcgaggtcggtgaatcgctggaagtgcaggccgtgctcaatgatgagcgctatcaaagcttcaaacgctttaagagtgtctttggagtgggggtgaagacagcagacaagtggtaccgtatgggtctgcgcacgctcgaggatgttcgttccagcaagaccctgaagttgaccccgatgcagaaagcgggtctgtgctattatgaagatcttgctcgcggcgttacgaaagccgaagctgacgcaatttctctgctggttcaggatgcagtcgcaactttcgacccggatgcgctggtggagattgtcggtggatttcgtcgtgggaaacctcagggtcacgacgttgatctgcttatcacatctccgggagctgagaaagagcaagaagaccagctcctgcagaaagtgaccaatctgtggaagaaacaagggttgttgctgtacggtcgtctggaatggagtcagtttgaagatgggaaactcccatccggtaatgctgatgccctggaccaccacgcgaaatgctttctgatcctcaaactttatgatcataaagtggacaaaagcaaatgggaaatgccgacgggttcgaacatgggcgaggccaaaccgtggaaagcaattcgcgtagatctggttcgttgcccctacggcggttttgcgtttgcgttgttgggttggaccggaagccgcatgttccgccgtgatctgcgctggtacgccactgacgagaagaacatgatgctggacaatcatgcgctgtatgacctgaccaagaaaatctttctcaaagctaaatcggaagaggaaattttcgcacatctggggcttgaatacctggaaccgttcgaacgtaacgca

SEQ ID NO: 2058 - protein, 529 aa, synthetic construct
  REGION 1..529: note = Variant of terminal deoxynucleotidyltransferase
MHHHHHHGGSGSHGIRTIDSDFGKKRQKKMDNHDSSAIYEIKFHEFVLFILEEKMGATRRTFLTDLARKKGFRVENELSDSVTHIVAENNSRSEVLAWLKEHKMEKTKQFELLDISWLIESMKVGKPVDTKGKYQLAESGEMSANPDPTEGRENELPPTMKTVSPYACQRRTTLNNHNQRFTDALEILAENYEFKRNDDTALEFRRAISVLKSLPFEVRSLKDTEGLPWIGDEVKGIMEEIIEVGESLEVQAVLNDERYQSFKRFKSVFGVGVKTADKWYRMGLRTLEDVRSSKTLKLTPMQKAGLCYYEDLARGVTKAEADAISLLVQDAVATFDPDALVEIVGGFRRGKPQGHDVDLLITSPGAEKEQEDQLLQKVTNLWKKQGLLLYGRLEWSQFEDGKLPSGNADALDHHAKCFLILKLYDHKVDKSKWEMPTGSNMGEAKPWKAIRVDLVRCPYGGFAFALLGWTGSRMFRRDLRWYATDEKNMMLDNHALYDLTKKIFLKAKSEEEIFAHLGLEYLEPFERNA

SEQ ID NO: 2059 - DNA, 1587 bp, synthetic construct
  misc_feature 1..1587: note = Variant of terminal deoxynucleotidyltransferase
  source 1..1587: mol_type = other DNA
atgcaccatcatcatcatcatggcggtagcggcagccacggcattcgtaccatcgattcggacttcgggaagaaacgccagaaaaaaatggataaccacgatagttccgccatctatgaaatcaaatttcacgagtttgtgctgttcattctcgaagaaaaaatgggtgcgacgcgtcgtacttttctgacagatttagcccgcaagaaagggttccgcgtcgagaatgaactgtcagacagcgttacccacatcgtggcagaaaataattcacgctctgaagtattggcttggctgaaagaacacaagatggagaagaccaagcaattcgaactgctggatattagctggcttatcgaaagcatgaaagttggtaaaccggtggacaccaaggggaaataccagttggcggaatcgggtgagatgagtgcgaacccagatccgacagagggtcgtgaaaacgagctgcctcctactatgaagaccgtttctccgtatgcgtgtcaacgccgcaccaccctgaacaaccataatcaacgttttacggacgcactggaaattcttgcggaaaattacgagttcaaacgcaacgatgatactgcgctggaatttcgtcgtgctatctccgtgctgaaaagccttccgtttgaggtacgtagcctgaaagacacggaaggattgccctggatcggtgatgaagtcaaagggattatggaagaaatcatcgaggtcggtgaatcgctggaagtgcaggccgtgctcaatgatgagcgctatcaaagcttcaaacgctttaagagtgtctttggagtgggggtgaagacagcagacaagtggtaccgtatgggtctgcgcacgctcgaggatgttcgttccagcaagaccctgaagttgaccccgatgcagaaagcgggtctgtgctattatgaagatcttgctcgcggcgttacgaaagccgaagctgacgcgatttctctgctggttcaggatgcagtcgcaactttcgacccggatgcgctggtggagattgtcggtggatttcgtcgtgggaaacctcagggtcacgacgttgatctgcttatcacatctccgggagctgagaaagagcaagaagaccagctcctgcagaaagtgaccaatctgtggaagaaacaagggttgttgctgtacggtcgtctggaatggagtcagtttgaagatgggaaactcccatccggtaaggctgatgccctggaccaccacgcgaaatgctttctgatcctcaaactttatgatcataaagtggacaaaagcaaatgggaaatgccgacgggttcgaacatgggcgaggccaaaccgtggaaagcaattcgcgtagatctggttcgttgcccctacggcggttttgcgtttgcgttgttgggttggaccggaagccgcatgttccgccgtgatctgcgctggtacgccactgacgagaagaacatgatgctggacaatcatgcgctgtatgacctgaccaagaaaatctttctcaaagctaaaaaggaagaggaaattttcgcacatctggggcttgaatacctggaaccgttcgaacgtaacgca

SEQ ID NO: 2060 - protein, 529 aa, synthetic construct
  REGION 1..529: note = Variant of terminal deoxynucleotidyltransferase
MHHHHHHGGSGSHGIRTIDSDFGKKRQKKMDNHDSSAIYEIKFHEFVLFILEEKMGATRRTFLTDLARKKGFRVENELSDSVTHIVAENNSRSEVLAWLKEHKMEKTKQFELLDISWLIESMKVGKPVDTKGKYQLAESGEMSANPDPTEGRENELPPTMKTVSPYACQRRTTLNNHNQRFTDALEILAENYEFKRNDDTALEFRRAISVLKSLPFEVRSLKDTEGLPWIGDEVKGIMEEIIEVGESLEVQAVLNDERYQSFKRFKSVFGVGVKTADKWYRMGLRTLEDVRSSKTLKLTPMQKAGLCYYEDLARGVTKAEADAISLLVQDAVATFDPDALVEIVGGFRRGKPQGHDVDLLITSPGAEKEQEDQLLQKVTNLWKKQGLLLYGRLEWSQFEDGKLPSGKADALDHHAKCFLILKLYDHKVDKSKWEMPTGSNMGEAKPWKAIRVDLVRCPYGGFAFALLGWTGSRMFRRDLRWYATDEKNMMLDNHALYDLTKKIFLKAKKEEEIFAHLGLEYLEPFERNA

SEQ ID NO: 2061 - DNA, 1587 bp, synthetic construct
  misc_feature 1..1587: note = Variant of terminal deoxynucleotidyltransferase
  source 1..1587: mol_type = other DNA
atgcaccatcatcatcatcatggcggtagcggcagccacggcattcgtaccatcgattcggacttcgggaagaaacgccagaaaaaaatggataaccacgatagttccgccatctatgaaatcaaatttcacgagtttgtgctgttcattctcgaagaaaaaatgggtgcgacgcgtcgtacttttctgacagatttagcccgcaagaaagggttccgcgtcgagaatgaactgtcagacagcgttacccacatcgtggcagaaaataattcacgctctgaagtattggcttggctgaaagaacacaagatggagaagaccaagcaattcgaactgctggatattagctggcttatcgaaagcatgaaagttggtaaaccggtggacaccaaggggaaataccagttggcggaatcgggtgagatgagtgcgaacccagatccgacagagggtcgtgaaaacgagctgcctcctactatgaagaccgtttctccgtatgcgtgtcaacgccgcaccaccctgaacaaccataatcaacgttttacggacgcactggaaattcttgcggaaaattacgagttcaaacgcaacgatgatactgcgctggaatttcgtcgtgctatctccgtgctgaaaagccttccgtttgaggtacgtagcctgaaagacacggaaggattgccctggatcggtgatgaagtcaaagggattatggaagaaatcatcgaggtcggtgaatcgctggaagtgcaggccgtgctcaatgatgagcgctatcaaagcttcaaacgctttaagagtgtctttggagtgggggtgaagacagcagacaattggtaccgtatgggtctgcgcacgctcgaggatgttcgttccagcaagaccctgaagttgaccccgatgcagaaagcgggtctgtgctattatgaagatcttgctcgcggcgttacgaaagccgaagctgacgcgatttctctgctggttcaggatgcagtcgcaactttcgacccggatgcgctggtggagattgtcggtggatttcgtcgtgggaaacctcagggtcacgacgttgatctgcttatcacatctccgggagctgagaaagagcaagaagaccagctcctgcagaaagtgaccaatctgtggaagaaacaagggttgttgctgtacggtcgtctggaatggagtcagtttgaagatgggaaactcccatccggtaaggctgatgccctggaccaccacgcgaaatgctttctgatcctcaaactttatgatcataaagtggacaaaagcaaatgggaaatgccgacgggttcgaacatgggcgaggccaaaccgtggaaagcaattcgcgtagatctggttcgttgcccctacggcggttttgcgtttgcgttgttgggttggaccggaagccgcatgttccgccgtgatctgcgctggtacgccactgacgagaagaacatgatgctggacaatcatgcgctgtatgacctgaccaagaaaatctttctcaaagctaaatcggaagaggaaattttcgcacatctggggcttgaatacctggaaccgttcgaacgtaacgca

SEQ ID NO: 2062 - protein, 529 aa, synthetic construct
  REGION 1..529: note = Variant of terminal deoxynucleotidyltransferase
MHHHHHHGGSGSHGIRTIDSDFGKKRQKKMDNHDSSAIYEIKFHEFVLFILEEKMGATRRTFLTDLARKKGFRVENELSDSVTHIVAENNSRSEVLAWLKEHKMEKTKQFELLDISWLIESMKVGKPVDTKGKYQLAESGEMSANPDPTEGRENELPPTMKTVSPYACQRRTTLNNHNQRFTDALEILAENYEFKRNDDTALEFRRAISVLKSLPFEVRSLKDTEGLPWIGDEVKGIMEEIIEVGESLEVQAVLNDERYQSFKRFKSVFGVGVKTADNWYRMGLRTLEDVRSSKTLKLTPMQKAGLCYYEDLARGVTKAEADAISLLVQDAVATFDPDALVEIVGGFRRGKPQGHDVDLLITSPGAEKEQEDQLLQKVTNLWKKQGLLLYGRLEWSQFEDGKLPSGKADALDHHAKCFLILKLYDHKVDKSKWEMPTGSNMGEAKPWKAIRVDLVRCPYGGFAFALLGWTGSRMFRRDLRWYATDEKNMMLDNHALYDLTKKIFLKAKSEEEIFAHLGLEYLEPFERNA

SEQ ID NO: 2063 - DNA, 1587 bp, synthetic construct
  misc_feature 1..1587: note = Variant of terminal deoxynucleotidyltransferase
  source 1..1587: mol_type = other DNA
atgcaccatcatcatcatcatggcggtagcggcagccacggcattcgtaccatcgattcggacttcgggaagaaacgccagaaaaaaatggataaccacgatagttccgccatctatgaaatcaaatttcacgagtttgtgctgttcattctcgaagaaaaaatgggtgcgacgcgtcgtacttttctgacagatttagcccgcaagaaagggttccgcgtcgagaatgaactgtcagacagcgttacccacatcgtggcagaaaataattcacgctctgaagtattggcttggctgaaagaacacaagatggagaagaccaagcaattcgaactgctggatattagctggcttatcgaaagcatgaaagttggtaaaccggtggacaccaaggggaaataccagttggcggaatcgggtgagatgagtgcgaacccagatccgacagagggtcgtgaaaacgagctgcctcctactatgaagaccgtttctccgtatgcgtgtcaacgccgcaccaccctgaacaaccataatcaacgttttacggacgcactggaaattcttgcggaaaattacgagttcaaacgcaacgatgatactgcgctggaatttcgtcgtgctatctccgtgctgaaaagccttccgtttgaggtacgtagcctgaaagacacggaaggattgccctggatcggtgatgaagtcaaagggattatggaagaaatcatcgaggtcggtgaatcgctggaagtgcaggccgtgctcaatgatgagcgctatcaaagcttcaaacgctttaagagtgtctttggagtgggggtgaagacagcagacaagtggtaccgtatgggtctgcgcacgctcgaggatgttcgttccagcaagaccctgaagttgaccccgatgcagaaagcgggtctgtgctattatgaagatcttgctcgcggcgttacgaaagccgaagctgacgcgatttctctgctggttcaggatgcagtcgcaactttcgacccggatgcgctggtggagattgtcggtggatttcgtcgtgggaaacctcagggtcacgacgttgatctgcttatcacatctccgggagctgagaaagagcaagaagaccagctcctgcagaaagtgaccaatctgtggaagaaacaagggttgttgctgtacggtcgtctggaatggagtcagtttgaagatgggaaactcccatccggtaaggctgattatctggaccatttcgcgaaatgctttctgatcctcaaactttatgatcataaagtggacaaaagcaaatgggaaatgccgacgggttcgaacatgggcgaggccaaaccgtggaaagcaattcgcgtagatctggttcgttgcccctacggcggttttgcgtttgcgttgttgggttggaccggaagccgcatgttccgccgtgatctgcgctggtacgccactgacgagaagaacatgatgctggacaatcatgcgctgtatgacctgaccaagaaaatctttctcaaagctaaatcggaagaggaaattttcgcacatctggggcttgaatacctggaaccgttcgaacgtaacgca

SEQ ID NO: 2064 - protein, 529 aa, synthetic construct
  REGION 1..529: note = Variant of terminal deoxynucleotidyltransferase
MHHHHHHGGSGSHGIRTIDSDFGKKRQKKMDNHDSSAIYEIKFHEFVLFILEEKMGATRRTFLTDLARKKGFRVENELSDSVTHIVAENNSRSEVLAWLKEHKMEKTKQFELLDISWLIESMKVGKPVDTKGKYQLAESGEMSANPDPTEGRENELPPTMKTVSPYACQRRTTLNNHNQRFTDALEILAENYEFKRNDDTALEFRRAISVLKSLPFEVRSLKDTEGLPWIGDEVKGIMEEIIEVGESLEVQAVLNDERYQSFKRFKSVFGVGVKTADKWYRMGLRTLEDVRSSKTLKLTPMQKAGLCYYEDLARGVTKAEADAISLLVQDAVATFDPDALVEIVGGFRRGKPQGHDVDLLITSPGAEKEQEDQLLQKVTNLWKKQGLLLYGRLEWSQFEDGKLPSGKADYLDHFAKCFLILKLYDHKVDKSKWEMPTGSNMGEAKPWKAIRVDLVRCPYGGFAFALLGWTGSRMFRRDLRWYATDEKNMMLDNHALYDLTKKIFLKAKSEEEIFAHLGLEYLEPFERNA

SEQ ID NO: 2065 - DNA, 1587 bp, synthetic construct
  misc_feature 1..1587: note = Variant of terminal deoxynucleotidyltransferase
  source 1..1587: mol_type = other DNA
atgcaccatcatcatcatcatggcggtagcggcagccacggcattcgtaccatcgattcggacttcgggaagaaacgccagaaaaaaatggataaccacgatagttccgccatctatgaaatcaaatttcacgagtttgtgctgttcattctcgaagaaaaaatgggtgcgacgcgtcgtacttttctgacagatttagcccgcaagaaagggttccgcgtcgagaatgaactgtcagacagcgttacccacatcgtggcagaaaataattcacgctctgaagtattggcttggctgaaagaacacaagatggagaagaccaagcaattcgaactgctggatattagctggcttatcgaaagcatgaaagttggtaaaccggtggacaccaaggggaaataccagttggcggaatcgggtgagatgagtgcgaacccagatccgacagagggtcgtgaaaacgagctgcctcctactatgaagaccgtttctccgtatgcgtgtcaacgccgcaccaccctgaacaaccataatcaacgttttacggacgcactggaaattcttgcggaaaattacgagttcaaacgcaacgatgatactgcgctggaatttcgtcgtgctatctccgtgctgaaaagccttccgtttgaggtacgtagcctgaaagacacggaaggattgccctggatcggtgatgaagtcaaagggattatggaagaaatcatcgaggtcggtgaatcgctggaagtgcaggccgtgctcaatgatgagcgctatcaaagcttcaaacgctttaagagtgtctttggagtgggggtgaagacagcagacaagtggtaccgtatgggtctgcgcacgctcgaggatgttcgttccagcaagaccctgaagttgaccccgatgcagaaagcgggtctgtgctattatgaagatcttgctcgcggcgttacgaaagccgaagctgacgcgatttctctgctggttcaggatgcagtcgcaactttcgacccggatgcgctggtggagattgtcggtggatttcgtcgtgggaaacctcagggtcacgacgttgatctgcttatcacatctccgggagctgagaaagagcaagaagaccagctcctgcagaaagtgaccaatctgtggaagaaacaagggttgttgctgtacggtcgtctggaatggagtcagtgggaagatgggaaactcccatccggtaaggctgatgccctggaccaccacgcgaaatgctttctgatcctcaaactttatgatcataaagtggacaaaagcaaatgggaaatgccgacgggttcgaacatgggcgaggccaaaccgtggaaagcaattcgcgtagatctggttcgttgcccctacggcggttttgcgtttgcgttgttgggttggaccggaagccgcatgttccgccgtgatctgcgctggtacgccactgacgagaagaacatgatgctggacaatcatgcgctgtatgacctgaccaagaaaatctttctcaaagctaaatcggaagaggaaattttcgcacatctggggcttgaatacctggaaccgttcgaacgtaacgca

SEQ ID NO: 2066 - protein, 529 aa, synthetic construct
  REGION 1..529: note = Variant of terminal deoxynucleotidyltransferase
MHHHHHHGGSGSHGIRTIDSDFGKKRQKKMDNHDSSAIYEIKFHEFVLFILEEKMGATRRTFLTDLARKKGFRVENELSDSVTHIVAENNSRSEVLAWLKEHKMEKTKQFELLDISWLIESMKVGKPVDTKGKYQLAESGEMSANPDPTEGRENELPPTMKTVSPYACQRRTTLNNHNQRFTDALEILAENYEFKRNDDTALEFRRAISVLKSLPFEVRSLKDTEGLPWIGDEVKGIMEEIIEVGESLEVQAVLNDERYQSFKRFKSVFGVGVKTADKWYRMGLRTLEDVRSSKTLKLTPMQKAGLCYYEDLARGVTKAEADAISLLVQDAVATFDPDALVEIVGGFRRGKPQGHDVDLLITSPGAEKEQEDQLLQKVTNLWKKQGLLLYGRLEWSQWEDGKLPSGKADALDHHAKCFLILKLYDHKVDKSKWEMPTGSNMGEAKPWKAIRVDLVRCPYGGFAFALLGWTGSRMFRRDLRWYATDEKNMMLDNHALYDLTKKIFLKAKSEEEIFAHLGLEYLEPFERNA

SEQ ID NO: 2067 - DNA, 1587 bp, synthetic construct
  misc_feature 1..1587: note = Variant of terminal deoxynucleotidyltransferase
  source 1..1587: mol_type = other DNA
atgcaccatcatcatcatcatggcggtagcggcagccacggcattcgtaccatcgattcggacttcgggaagaaacgccagaaaaaaatggataaccacgatagttccgccatctatgaaatcaaatttcacgagtttgtgctgttcattctcgaagaaaaaatgggtgcgacgcgtcgtacttttctgacagatttagcccgcaagaaagggttccgcgtcgagaatgaactgtcagacagcgttacccacatcgtggcagaaaataattcacgctctgaagtattggcttggctgaaagaacacaagatggagaagaccaagcaattcgaactgctggatattagctggcttatcgaaagcatgaaagttggtaaaccggtggacaccaaggggaaataccagttggcggaatcgggtgagatgagtgcgaacccagatccgacagagggtcgtgaaaacgagctgcctcctactatgaagaccgtttctccgtatgcgtgtcaacgccgcaccaccctgaacaaccataatcaacgttttacggacgcactggaaattcttgcggaaaattacgagatgaaacgcaacgatgatactgcgctggaatttcgtcgtgctatctccgtgctgaaaagccttccgtttgaggtacgtagcctgaaagacacggaaggattgccctggatcggtgatgaagtcaaagggattatggaagaaatcatcgaggtcggtgaatcgctggaagtgcaggccgtgctcaatgatgagcgctatcaaagcttcaaacgctttaagagtgtctttggagtgggggtgaagacagcagacaagtggtaccgtatgggtctgcgcacgctcgaggatgttcgttccagcaagaccctgaagttgaccccgatgcagaaagcgggtctgtgctattatgaagatcttgctcgcggcgttacgaaagccgaagctgacgcgatttctctgctggttcaggatgcagtcgcaactttcgacccggatgcgctggtggagattgtcggtggatttcgtcgtgggaaacctcagggtcacgacgttgatctgcttatcacatctccgggagctgagaaagagcaagaagaccagctcctgcagaaagtgaccaatctgtggaagaaacaagggttgttgctgtacggtcgtctggaatggagtcagtttgaagatgggaaactcccatccggtaaggctgatgccctggaccaccacgcgaaatgctttctgatcctcaaactttatgatcataaagtggacaaaagcaaatgggaaatgccgacgggttcgaacatgggcgaggccaaaccgtggaaagcaattcgcgtagatctggttcgttgcccctacggcggttttgcgtttgcgttgttgggttggaccggaagccgcatgttccgccgtgatctgcgctggtacgccactgacgagaagaacatgatgctggacaatcatgcgctgtatgacctgaccaagaaaatctttctcaaagctaaatcggaagaggaaattttcgcacatctggggcttgaatacctggaaccgttcgaacgtaacgca

SEQ ID NO: 2068 - protein, 529 aa, synthetic construct
  REGION 1..529: note = Variant of terminal deoxynucleotidyltransferase
MHHHHHHGGSGSHGIRTIDSDFGKKRQKKMDNHDSSAIYEIKFHEFVLFILEEKMGATRRTFLTDLARKKGFRVENELSDSVTHIVAENNSRSEVLAWLKEHKMEKTKQFELLDISWLIESMKVGKPVDTKGKYQLAESGEMSANPDPTEGRENELPPTMKTVSPYACQRRTTLNNHNQRFTDALEILAENYEMKRNDDTALEFRRAISVLKSLPFEVRSLKDTEGLPWIGDEVKGIMEEIIEVGESLEVQAVLNDERYQSFKRFKSVFGVGVKTADKWYRMGLRTLEDVRSSKTLKLTPMQKAGLCYYEDLARGVTKAEADAISLLVQDAVATFDPDALVEIVGGFRRGKPQGHDVDLLITSPGAEKEQEDQLLQKVTNLWKKQGLLLYGRLEWSQFEDGKLPSGKADALDHHAKCFLILKLYDHKVDKSKWEMPTGSNMGEAKPWKAIRVDLVRCPYGGFAFALLGWTGSRMFRRDLRWYATDEKNMMLDNHALYDLTKKIFLKAKSEEEIFAHLGLEYLEPFERNA

SEQ ID NO: 2069 - DNA, 1587 bp, synthetic construct
  misc_feature 1..1587: note = Variant of terminal deoxynucleotidyltransferase
  source 1..1587: mol_type = other DNA
atgcaccatcatcatcatcatggcggtagcggcagccacggcattcgtaccatcgattcggacttcgggaagaaacgccagaaaaaaatggataaccacgatagttccgccatctatgaaatcaaatttcacgagtttgtgctgttcattctcgaagaaaaaatgggtgcgacgcgtcgtacttttctgacagatttagcccgcaagaaagggttccgcgtcgagaatgaactgtcagacagcgttacccacatcgtggcagaaaataattcacgctctgaagtattggcttggctgaaagaacacaagatggagaagaccaagcaattcgaactgctggatattagctggcttatcgaaagcatgaaagttggtaaaccggtggacaccaaggggaaataccagttggcggaatcgggtgagatgagtgcgaacccagatccgacagagggtcgtgaaaacgagctgcctcctactatgaagaccgtttctccgtatgcgtgtcaacgccgcaccaccctgaacaaccataatcaacgttttacggacgcactggaaattcttgcggaaaattacgagttcaaacgcaacgatgatactgcgctggaatttcgtcgtgctatctccgtgctgaaaagccttccgtttgaggtacgtagcctgaaagacacggaaggattgccctggatcggtgatgaagtcaaagggattatggaagaaatcatcgaggtcggtgaatcgctggaagtgcaggccgtgctcaatgatgagcgctatcaaagcttcaaacgctttaagagtgtctttggagtgggggtgaagacagcagacaagtggtaccgtatgggtctgcgcacgctcgaggatgttcgttccagcaagaccctgaagttgaccccgatgcagaaagcgggtctgtgctattatgaagatcttgctcgcggcgttacgaaagccgaagctgacgcgatttctctgctggttcaggatgcagtcgcaactttcgacccggatgcgctggtggagattgtcggtggatttcgtcgtgggaaacctcagggtcacgacgttgatgtgcttatcacatctccgggagctgagaaagagcaagaagaccagctcctgcagaaagtgaccaatctgtggaagaaacaagggttgttgctgtacggtcgtctggaatggagtcagtttgaagatgggaaactcccatccggtaaggctgatgccctggaccaccacgcgaaatgctttctgatcctcaaactttatgatcataaagtggacaaaagcaaatgggaaatgccgacgggttcgaacatgggcgaggccaaaccgtggaaagcaattcgcgtagatctggttcgttgcccctacggcggttttgcgtttgcgttgttgggttggaccggaagccgcatgttccgccgtgatctgcgctggtacgccactgacgagaagaacatgatgctggacaatcatgcgctgtatgacctgaccaagaaaatctttctcaaagctaaatcggaagaggaaattttcgcacatctggggcttgaatacctggaaccgttcgaacgtaacgca

SEQ ID NO: 2070 - protein, 529 aa, synthetic construct
  REGION 1..529: note = Variant of terminal deoxynucleotidyltransferase
MHHHHHHGGSGSHGIRTIDSDFGKKRQKKMDNHDSSAIYEIKFHEFVLFILEEKMGATRRTFLTDLARKKGFRVENELSDSVTHIVAENNSRSEVLAWLKEHKMEKTKQFELLDISWLIESMKVGKPVDTKGKYQLAESGEMSANPDPTEGRENELPPTMKTVSPYACQRRTTLNNHNQRFTDALEILAENYEFKRNDDTALEFRRAISVLKSLPFEVRSLKDTEGLPWIGDEVKGIMEEIIEVGESLEVQAVLNDERYQSFKRFKSVFGVGVKTADKWYRMGLRTLEDVRSSKTLKLTPMQKAGLCYYEDLARGVTKAEADAISLLVQDAVATFDPDALVEIVGGFRRGKPQGHDVDVLITSPGAEKEQEDQLLQKVTNLWKKQGLLLYGRLEWSQFEDGKLPSGKADALDHHAKCFLILKLYDHKVDKSKWEMPTGSNMGEAKPWKAIRVDLVRCPYGGFAFALLGWTGSRMFRRDLRWYATDEKNMMLDNHALYDLTKKIFLKAKSEEEIFAHLGLEYLEPFERNA

SEQ ID NO: 2071 - DNA, 1587 bp, synthetic construct
  misc_feature 1..1587: note = Variant of terminal deoxynucleotidyltransferase
  source 1..1587: mol_type = other DNA
atgcaccatcatcatcatcatggcggtagcggcagccacggcattcgtaccatcgattcggacttcgggaagaaacgccagaaaaaaatggataaccacgatagttccgccatctatgaaatcaaatttcacgagtttgtgctgttcattctcgaagaaaaaatgggtgcgacgcgtcgtacttttctgacagatttagcccgcaagaaagggttccgcgtcgagaatgaactgtcagacagcgttacccacatcgtggcagaaaataattcacgctctgaagtattggcttggctgaaagaacacaagatggagaagaccaagcaattcgaactgctggatattagctggcttatcgaaagcatgaaagttggtaaaccggtggacaccaaggggaaataccagttggcggaatcgggtgagatgagtgcgaacccagatccgacagagggtcgtgaaaacgagctgcctcctactatgaagaccgtttctccgtatgcgtgtcaacgccgcaccaccctgaacaaccataatcaacgttttacggacgcactggaaattcttgcggaaaattacgagttcaaacgcaacgatgatactgcgctggaatttcgtcgtgctatctccgtgctgaaaagccttccgtttgaggtacgtagcctgaaagacacggaaggattgccctggatcggtgatgaagtcaaagggattatggaagaaatcatcgaggtcggtgaatcgctggaagtgcaggccgtgctcaatgatgagcgctatcaaagcttcaaacgctttaagagtgtctttggagtgggggtgaagacagcagactgttggtaccgtatgggtctgcgcacgctcgaggatgttcgttccagcaagaccctgaagttgaccccgatgcagaaagcgggtctgtgctattatgaagatcttgctcgcggcgttacgaaagccgaagctgacgcgatttctctgctggttcaggatgcagtcgcaactttcgacccggatgcgctggtggagattgtcggtggatttcgtcgtgggaaacctcagggtcacgacgttgatctgcttatcacatctccgggagctgagaaagagcaagaagaccagctcctgcagaaagtgaccaatctgtggaagaaacaagggttgttgctgtacggtcgtctggaatggagtcagtttgaagatgggaaactcccatccggtaaggctgatgccctggaccaccacgcgaaatgctttctgatcctcaaactttatgatcataaagtggacaaaagcaaatgggaaatgccgacgggttcgaacatgggcgaggccaaaccgtggaaagcaattcgcgtagatctggttcgttgcccctacggcggttttgcgtttgcgttgttgggttggaccggaagccgcatgttccgccgtgatctgcgctggtacgccactgacgagaagaacatgatgctggacaatcatgcgctgtatgacctgaccaagaaaatctttctcaaagctaaatcggaagaggaaattttcgcacatctggggcttgaatacctggaaccgttcgaacgtaacgca

SEQ ID NO: 2072 - protein, 529 aa, synthetic construct
  REGION 1..529: note = Variant of terminal deoxynucleotidyltransferase
MHHHHHHGGSGSHGIRTIDSDFGKKRQKKMDNHDSSAIYEIKFHEFVLFILEEKMGATRRTFLTDLARKKGFRVENELSDSVTHIVAENNSRSEVLAWLKEHKMEKTKQFELLDISWLIESMKVGKPVDTKGKYQLAESGEMSANPDPTEGRENELPPTMKTVSPYACQRRTTLNNHNQRFTDALEILAENYEFKRNDDTALEFRRAISVLKSLPFEVRSLKDTEGLPWIGDEVKGIMEEIIEVGESLEVQAVLNDERYQSFKRFKSVFGVGVKTADCWYRMGLRTLEDVRSSKTLKLTPMQKAGLCYYEDLARGVTKAEADAISLLVQDAVATFDPDALVEIVGGFRRGKPQGHDVDLLITSPGAEKEQEDQLLQKVTNLWKKQGLLLYGRLEWSQFEDGKLPSGKADALDHHAKCFLILKLYDHKVDKSKWEMPTGSNMGEAKPWKAIRVDLVRCPYGGFAFALLGWTGSRMFRRDLRWYATDEKNMMLDNHALYDLTKKIFLKAKSEEEIFAHLGLEYLEPFERNA

SEQ ID NO: 2073 - DNA, 1587 bp, synthetic construct
  misc_feature 1..1587: note = Variant of terminal deoxynucleotidyltransferase
  source 1..1587: mol_type = other DNA
atgcaccatcatcatcatcatggcggtagcggcagccacggcattcgtaccatcgattcggacttcgggaagaaacgccagaaaaaaatggataaccacgatagttccgccatctatgaaatcaaatttcacgagtttgtgctgttcattctcgaagaaaaaatgggtgcgacgcgtcgtacttttctgacagatttagcccgcaagaaagggttccgcgtcgagaatgaactgtcagacagcgttacccacatcgtggcagaaaataattcacgctctgaagtattggcttggctgaaagaacacaagatggagaagaccaagcaattcgaactgctggatattagctggcttatcgaaagcatgaaagttggtaaaccggtggacaccaaggggaaataccagttggcggaatcgggtgagatgagtgcgaacccagatccgacagagggtcgtgaaaacgagctgcctcctactatgaagaccgtttctccgtatgcgtgtcaacgccgcaccaccctgaacaaccataatcaacgttttacggacgcactggaaattcttgcggaaaattacgagttcaaacgcaacgatgatactgcgctggaatttcgtcgtgctatctccgtgctgaaaagccttccgtttgaggtacgtagcctgaaagacacggaaggattgccctggatcggtgatgaagtcaaagggattatggaagaaatcatcgaggtcggtgaatcgctggaagtgcaggccgtgctcaatgatgagcgctatcaaagcttcaaacgctttaagagtgtctttggagtgggggtgaagacagcagacaagtggtaccgtatgggtctgcgcacgctcgaggatgttcgttccagcaagaccctgaagttgaccccgatgcagaaagcgggtctgtgctattatgaagatcttgctcgcggcgttacgaaagccgaagctgacgcgatttctctgctggttcaggatgcagtcgcaactttcgacccggatgcgctggtggagattgtcggtggatttcgtcgtgggaaacctcagggtcacgacgttgatctgcttatcacatctccgggagctgagaaagagcaagaagaccagctcctgcagaaagtgaccaatctgtggaagaaacaagggttgttgctgtacggtcgtctggaatggagtcagtttgaagatgggaaactcccatccggtaaggctgatgccctggaccatttcgcgaaatggtttctgatcctcaaactttatgatcataaagtggacaaaagcaaatgggaaatgccgacgggttcgaacatgggcgaggccaaaccgtggaaagcaattcgcgtagatctggttcgttgcccctacggcggttttgcgtttgcgttgttgggttggaccggaagccgcatgttccgccgtgatctgcgctggtacgccactgacgagaagaacatgatgctggacaatcatgcgctgtatgacctgaccaagaaaatctttctcaaagctaaatcggaagaggaaattttcgcacatctggggcttgaatacctggaaccgttcgaacgtaacgca

SEQ ID NO: 2074 - protein, 529 aa, synthetic construct
  REGION 1..529: note = Variant of terminal deoxynucleotidyltransferase
MHHHHHHGGSGSHGIRTIDSDFGKKRQKKMDNHDSSAIYEIKFHEFVLFILEEKMGATRRTFLTDLARKKGFRVENELSDSVTHIVAENNSRSEVLAWLKEHKMEKTKQFELLDISWLIESMKVGKPVDTKGKYQLAESGEMSANPDPTEGRENELPPTMKTVSPYACQRRTTLNNHNQRFTDALEILAENYEFKRNDDTALEFRRAISVLKSLPFEVRSLKDTEGLPWIGDEVKGIMEEIIEVGESLEVQAVLNDERYQSFKRFKSVFGVGVKTADKWYRMGLRTLEDVRSSKTLKLTPMQKAGLCYYEDLARGVTKAEADAISLLVQDAVATFDPDALVEIVGGFRRGKPQGHDVDLLITSPGAEKEQEDQLLQKVTNLWKKQGLLLYGRLEWSQFEDGKLPSGKADALDHFAKWFLILKLYDHKVDKSKWEMPTGSNMGEAKPWKAIRVDLVRCPYGGFAFALLGWTGSRMFRRDLRWYATDEKNMMLDNHALYDLTKKIFLKAKSEEEIFAHLGLEYLEPFERNA

SEQ ID NO: 2075 - DNA, 1587 bp, synthetic construct
  misc_feature 1..1587: note = Variant of terminal deoxynucleotidyltransferase
  source 1..1587: mol_type = other DNA
atgcaccatcatcatcatcatggcggtagcggcagccacggcattcgtaccatcgattcggacttcgggaagaaacgccagaaaaaaatggataaccacgatagttccgccatctatgaaatcaaatttcacgagtttgtgctgttcattctcgaagaaaaaatgggtgcgacgcgtcgtacttttctgacagatttagcccgcaagaaagggttccgcgtcgagaatgaactgtcagacagcgttacccacatcgtggcagaaaataattcacgctctgaagtattggcttggctgaaagaacacaagatggagaagaccaagcaattcgaactgctggatattagctggcttatcgaaagcatgaaagttggtaaaccggtggacaccaaggggaaataccagttggcggaatcgggtgagatgagtgcgaacccagatccgacagagggtcgtgaaaacgagctgcctcctactatgaagaccgtttctccgtatgcgtgtcaacgccgcaccaccctgaacaaccataatcaacgttttacggacgcactggaaattcttgcggaaaattacgagttcaaacgcaacgatgatactgcgctggaatttcgtcgtgctatctccgtgctgaaaagccttccgtttgaggtacgtagcctgaaagacacggaaggattgccctggatcggtgatgaagtcaaagggattatggaagaaatcatcgaggtcggtgaatcgctggaagtgcaggccgtgctcaatgatgagcgctatcaaagcttcaaacgctttaagagtgtctttggagtgggggtgaagacagcagacaagtggtaccgtatgggtctgcgcacgctcgaggatgttcgttccagcaagaccctgaagttgaccccgatgcagaaagcgggtctgtgctattatgaagatcttgctcgcggcgttacgaaagccgaagctgacgcgatttctctgctggttcaggatgcagtcgcaactttcgacccggatgcgctggtggagattgtcggtggatttcgtcgtgggaaacctcagggtcacgacgttgatctgcttatcacatctccgggagctgagaaagagcaagaagaccagctcctgcagaaagtgaccaatctgtggaagaaacaagggttgttgctgtacggtcgtctggaatggagtcagtttgaagatgggaaactcccatccggtaaggctgatgccctggacattttcgcgaaatgctttctgatcctcaaactttatgatcataaagtggacaaaagcaaatgggaaatgccgacgggttcgaacatgggcgaggccaaaccgtggaaagcaattcgcgtagatctggttcgttgcccctacggcggttttgcgtttgcgttgttgggttggaccggaagccgcatgttccgccgtgatctgcgctggtacgccactgacgagaagaacatgatgctggacaatcatgcgctgtatgacctgaccaagaaaatctttctcaaagctaaatcggaagaggaaattttcgcacatctggggcttgaatacctggaaccgttcgaacgtaacgca

SEQ ID NO: 2076 - protein, 529 aa, synthetic construct
  REGION 1..529: note = Variant of terminal deoxynucleotidyltransferase
MHHHHHHGGSGSHGIRTIDSDFGKKRQKKMDNHDSSAIYEIKFHEFVLFILEEKMGATRRTFLTDLARKKGFRVENELSDSVTHIVAENNSRSEVLAWLKEHKMEKTKQFELLDISWLIESMKVGKPVDTKGKYQLAESGEMSANPDPTEGRENELPPTMKTVSPYACQRRTTLNNHNQRFTDALEILAENYEFKRNDDTALEFRRAISVLKSLPFEVRSLKDTEGLPWIGDEVKGIMEEIIEVGESLEVQAVLNDERYQSFKRFKSVFGVGVKTADKWYRMGLRTLEDVRSSKTLKLTPMQKAGLCYYEDLARGVTKAEADAISLLVQDAVATFDPDALVEIVGGFRRGKPQGHDVDLLITSPGAEKEQEDQLLQKVTNLWKKQGLLLYGRLEWSQFEDGKLPSGKADALDIFAKCFLILKLYDHKVDKSKWEMPTGSNMGEAKPWKAIRVDLVRCPYGGFAFALLGWTGSRMFRRDLRWYATDEKNMMLDNHALYDLTKKIFLKAKSEEEIFAHLGLEYLEPFERNA

SEQ ID NO: 2077 - DNA, 1587 bp, synthetic construct
  misc_feature 1..1587: note = Variant of terminal deoxynucleotidyltransferase
  source 1..1587: mol_type = other DNA
atgcaccatcatcatcatcatggcggtagcggcagccacggcattcgtaccatcgattcggacttcgggaagaaacgccagaaaaaaatggataaccacgatagttccgccatctatgaaatcaaatttcacgagtttgtgctgttcattctcgaagaaaaaatgggtgcgacgcgtcgtacttttctgacagatttagcccgcaagaaagggttccgcgtcgagaatgaactgtcagacagcgttacccacatcgtggcagaaaataattcacgctctgaagtattggcttggctgaaagaacacaagatggagaagaccaagcaattcgaactgctggatattagctggcttatcgaaagcatgaaagttggtaaaccggtggacaccaaggggaaataccagttggcggaatcgggtgagatgagtgcgaacccagatccgacagagggtcgtgaaaacgagctgcctcctactatgaagaccgtttctccgtatgcgtgtcaacgccgcaccaccctgaacaaccataatcaacgttttacggacgcactggaaattcttgcggaaaattacgagttcaaacgcaacgatgatactgcgctggaatttcgtcgtgctatctccgtgctgaaaagccttccgtttgaggtacgtagcctgaaagacacggaaggattgccctggatcggtgatgaagtcaaagggattatggaagaaatcatcgaggtcggtgaatcgctggaagtgcaggccgtgctcaatgatgagcgctatcaaagcttcaaacgctttaagagtgtctttggagtgggggtgaagacagcagacaagtggtaccgtatgggtctgcgcacgctcgaggatgttcgttccagcaagaccctgaagttgaccccgatgcagaaagcgggtctgtgctattatgaagatcttgctcgcggcgttacgaaagccgaagctgacgcgatttctctgctggttcaggatgcagtcgcaactttcgacccggatgcgctggtggagattgtcggtggatttcgtcgtgggaaacctcagggtcacgacgttgatctgcttatcacatctccgggagctgagaaagagcaagaagaccagctcctgcagaaagtgaccaatctgtggaagaaacaagggttgttgctgtacggtcgtctggaatggagtcagtttgaagatgggaaactcccatccggtaaggctaaggccctggaccatttcgcgaaatgctttctgatcctcaaactttatgatcataaagtggacaaaagcaaatgggaaatgccgacgggttcgaacatgggcgaggccaaaccgtggaaagcaattcgcgtagatctggttcgttgcccctacggcggttttgcgtttgcgttgttgggttggaccggaagccgcatgttccgccgtgatctgcgctggtacgccactgacgagaagaacatgatgctggacaatcatgcgctgtatgacctgaccaagaaaatctttctcaaagctaaatcggaagaggaaattttcgcacatctggggcttgaatacctggaaccgttcgaacgtaacgca

SEQ ID NO: 2078 - protein, 529 aa, synthetic construct
  REGION 1..529: note = Variant of terminal deoxynucleotidyltransferase
MHHHHHHGGSGSHGIRTIDSDFGKKRQKKMDNHDSSAIYEIKFHEFVLFILEEKMGATRRTFLTDLARKKGFRVENELSDSVTHIVAENNSRSEVLAWLKEHKMEKTKQFELLDISWLIESMKVGKPVDTKGKYQLAESGEMSANPDPTEGRENELPPTMKTVSPYACQRRTTLNNHNQRFTDALEILAENYEFKRNDDTALEFRRAISVLKSLPFEVRSLKDTEGLPWIGDEVKGIMEEIIEVGESLEVQAVLNDERYQSFKRFKSVFGVGVKTADKWYRMGLRTLEDVRSSKTLKLTPMQKAGLCYYEDLARGVTKAEADAISLLVQDAVATFDPDALVEIVGGFRRGKPQGHDVDLLITSPGAEKEQEDQLLQKVTNLWKKQGLLLYGRLEWSQFEDGKLPSGKAKALDHFAKCFLILKLYDHKVDKSKWEMPTGSNMGEAKPWKAIRVDLVRCPYGGFAFALLGWTGSRMFRRDLRWYATDEKNMMLDNHALYDLTKKIFLKAKSEEEIFAHLGLEYLEPFERNA

SEQ ID NO: 2079 - DNA, 1587 bp, synthetic construct
  misc_feature 1..1587: note = Variant of terminal deoxynucleotidyltransferase
  source 1..1587: mol_type = other DNA
atgcaccatcatcatcatcatggcggtagcggcagccacggcattcgtaccatcgattcggacttcgggaagaaacgccagaaaaaaatggataaccacgatagttccgccatctatgaaatcaaatttcacgagtttgtgctgttcattctcgaagaaaaaatgggtgcgacgcgtcgtacttttctgacagatttagcccgcaagaaagggttccgcgtcgagaatgaactgtcagacagcgttacccacatcgtggcagaaaataattcacgctctgaagtattggcttggctgaaagaacacaagatggagaagaccaagcaattcgaactgctggatattagctggcttatcgaaagcatgaaagttggtaaaccggtggacaccaaggggaaataccagttggcggaatcgggtgagatgagtgcgaacccagatccgacagagggtcgtgaaaacgagctgcctcctactatgaagaccgtttctccgtatgcgtgtcaacgccgcaccaccctgaacaaccataatcaacgttttacggacgcactggaaattcttgcggaaaattacgagttcaaacgcaacgatgatactgcgctggaatttcgtcgtgctatctccgtgctgaaaagccttccgtttgaggtacgtagcctgaaagacacggaaggattgccctggatcggtgatgaagtcaaagggattatggaagaaatcatcgaggtcggtgaatcgctggaagtgcaggccgtgctcaatgatgagcgctatcaaagcttcaaacgctttaagagtgtctttggagtgggggtgcagacagcagacaagtggtaccgtatgggtctgcgcacgctcgaggatgttcgttccagcaagaccctgaagttgaccccgatgcagaaagcgggtctgtgctattatgaagatcttgctcgcggcgttacgaaagccgaagctgacgcgatttctctgctggttcaggatgcagtcgcaactttcgacccggatgcgctggtggagattgtcggtggatttcgtcgtgggaaacctcagggtcacgacgttgatctgcttatcacatctccgggagctgagaaagagcaagaagaccagctcctgcagaaagtgaccaatctgtggaagaaacaagggttgttgctgtacggtcgtctggaatggagtcagtttgaagatgggaaactcccatccggtaaggctgatgccctggaccaccacgcgaaatgctttctgatcctcaaactttatgatcataaagtggacaaaagcaaatgggaaatgccgacgggttcgaacatgggcgaggccaaaccgtggaaagcaattcgcgtagatctggttcgttgcccctacggcggttttgcgtttgcgttgttgggttggaccggaagccgcatgttccgccgtgatctgcgctggtacgccactgacgagaagaacatgatgctggacaatcatgcgctgtatgacctgaccaagaaaatctttctcaaagctaaatcggaagaggaaattttcgcacatctggggcttgaatacctggaaccgttcgaacgtaacgca

SEQ ID NO: 2080 - protein, 529 aa, synthetic construct
  REGION 1..529: note = Variant of terminal deoxynucleotidyltransferase
MHHHHHHGGSGSHGIRTIDSDFGKKRQKKMDNHDSSAIYEIKFHEFVLFILEEKMGATRRTFLTDLARKKGFRVENELSDSVTHIVAENNSRSEVLAWLKEHKMEKTKQFELLDISWLIESMKVGKPVDTKGKYQLAESGEMSANPDPTEGRENELPPTMKTVSPYACQRRTTLNNHNQRFTDALEILAENYEFKRNDDTALEFRRAISVLKSLPFEVRSLKDTEGLPWIGDEVKGIMEEIIEVGESLEVQAVLNDERYQSFKRFKSVFGVGVQTADKWYRMGLRTLEDVRSSKTLKLTPMQKAGLCYYEDLARGVTKAEADAISLLVQDAVATFDPDALVEIVGGFRRGKPQGHDVDLLITSPGAEKEQEDQLLQKVTNLWKKQGLLLYGRLEWSQFEDGKLPSGKADALDHHAKCFLILKLYDHKVDKSKWEMPTGSNMGEAKPWKAIRVDLVRCPYGGFAFALLGWTGSRMFRRDLRWYATDEKNMMLDNHALYDLTKKIFLKAKSEEEIFAHLGLEYLEPFERNA

SEQ ID NO: 2081 - DNA, 1587 bp, synthetic construct
  misc_feature 1..1587: note = Variant of terminal deoxynucleotidyltransferase
  source 1..1587: mol_type = other DNA
atgcaccatcatcatcatcatggcggtagcggcagccacggcattcgtaccatcgattcggacttcgggaagaaacgccagaaaaaaatggataaccacgatagttccgccatctatgaaatcaaatttcacgagtttgtgctgttcattctcgaagaaaaaatgggtgcgacgcgtcgtacttttctgacagatttagcccgcaagaaagggttccgcgtcgagaatgaactgtcagacagcgttacccacatcgtggcagaaaataattcacgctctgaagtattggcttggctgaaagaacacaagatggagaagaccaagcaattcgaactgctggatattagctggcttatcgaaagcatgaaagttggtaaaccggtggacaccaaggggaaataccagttggcggaatcgggtgagatgagtgcgaacccagatccgacagagggtcgtgaaaacgagctgcctcctactatgaagaccgtttctccgtatgcgtgtcaacgccgcaccaccctgaacaaccataatcaacgttttacggacgcactggaaattcttgcggaaaattacgagttcaaacgcaacgatgatactgcgctggaatttcgtcgtgctatctccgtgctgaaaagccttccgtttgaggtacgtagcctgaaagacacggaaggattgccctggatcggtgatgaagtcaaagggattatggaagaaatcatcgaggtcggtgaatcgctggaagtgcaggccgtgctcaatgatgagcgctatcaaagcttcaaacgctttaagagtgtctttggagtgggggtgaagacagcagacaagtggtaccgtatgggtctgcgcacgctcgaggatgttcgttccagcaagaccctgaagttgaccccgatgcagaaagcgggtctgtgctattatgaagatcttgctcgcggcgttacgaaagccgaagctgacgcgatttctctgctggttcaggatgcagtcgcaactttcgacccggatgcgctggtggagattgtcggtggatttcgtcgtgggaaacctcagggtcacgacgttgatctgcttatcacatctccgggagctgagaaagagcaagaagaccagctcctgcagaaagtgaccaatctgtggaagaaacaagggttgttgctgtacggtcgtctggaatggagtcagtttgaagatgggaaactcccatccggtaaggctgattctctggaccatttcgcgaaatgctttctgatcctcaaactttatgatcataaagtggacaaaagcaaatgggaaatgccgacgggttcgaacatgggcgaggccaaaccgtggaaagcaattcgcgtagatctggttcgttgcccctacggcggttttgcgtttgcgttgttgggttggaccggaagccgcatgttccgccgtgatctgcgctggtacgccactgacgagaagaacatgatgctggacaatcatgcgctgtatgacctgaccaagaaaatctttctcaaagctaaatcggaagaggaaattttcgcacatctggggcttgaatacctggaaccgttcgaacgtaacgca

SEQ ID NO: 2082 - protein, 529 aa, synthetic construct
  REGION 1..529: note = Variant of terminal deoxynucleotidyltransferase
MHHHHHHGGSGSHGIRTIDSDFGKKRQKKMDNHDSSAIYEIKFHEFVLFILEEKMGATRRTFLTDLARKKGFRVENELSDSVTHIVAENNSRSEVLAWLKEHKMEKTKQFELLDISWLIESMKVGKPVDTKGKYQLAESGEMSANPDPTEGRENELPPTMKTVSPYACQRRTTLNNHNQRFTDALEILAENYEFKRNDDTALEFRRAISVLKSLPFEVRSLKDTEGLPWIGDEVKGIMEEIIEVGESLEVQAVLNDERYQSFKRFKSVFGVGVKTADKWYRMGLRTLEDVRSSKTLKLTPMQKAGLCYYEDLARGVTKAEADAISLLVQDAVATFDPDALVEIVGGFRRGKPQGHDVDLLITSPGAEKEQEDQLLQKVTNLWKKQGLLLYGRLEWSQFEDGKLPSGKADSLDHFAKCFLILKLYDHKVDKSKWEMPTGSNMGEAKPWKAIRVDLVRCPYGGFAFALLGWTGSRMFRRDLRWYATDEKNMMLDNHALYDLTKKIFLKAKSEEEIFAHLGLEYLEPFERNA

SEQ ID NO: 2083 - DNA, 1587 bp, synthetic construct
  misc_feature 1..1587: note = Variant of terminal deoxynucleotidyltransferase
  source 1..1587: mol_type = other DNA
atgcaccatcatcatcatcatggcggtagcggcagccacggcattcgtaccatcgattcggacttcgggaagaaacgccagaaaaaaatggataaccacgatagttccgccatctatgaaatcaaatttcacgagtttgtgctgttcattctcgaagaaaaaatgggtgcgacgcgtcgtacttttctgacagatttagcccgcaagaaagggttccgcgtcgagaatgaactgtcagacagcgttacccacatcgtggcagaaaataattcacgctctgaagtattggcttggctgaaagaacacaagatggagaagaccaagcaattcgaactgctggatattagctggcttatcgaaagcatgaaagttggtaaaccggtggacaccaaggggaaataccagttggcggaatcgggtgagatgagtgcgaacccagatccgacagagggtcgtgaaaacgagctgcctcctactatgaagaccgtttctccgtatgcgtgtcaacgccgcaccaccctgaacaaccataatcaacgttttacggacgcactggaaattcttgcggaaaattacgagttcaaacgcaacgatgatactgcgctggaatttcgtcgtgctatctccgtgctgaaaagccttccgtttgaggtacgtagcctgaaagacacggaaggattgccctggatcggtgatgaagtcaaagggattatggaagaaatcatcgaggtcggtgaatcgctggaagtgcaggccgtgctcaatgatgagcgctatcaaagcttcaaacgctttaagagtgtctttggagtgggggtgaagacagcagacaagtggtaccgtatgggtctgcgcacgctcgaggatgttcgttccagcaagaccctgaagttgaccccgatgcagaaagcgggtctgtgctattatgaagatcttgctcgcggcgttacgaaagccgaagctgacgcgatttctctgctggttcaggatgcagtcgcaactttcgacccggatgcgctggtggagattgtcggtggatttcgtcgtgggaaacctcagggtcacgacgttgatctgcttatcacatctccgggagctgagaaagagcaagaagaccagctcctgcagaaagtgaccaatctgtggaagaaacaagggttgttgctgtacggtcgtctggaatggagtcagtttgaagatgggaaactcccatccggtaaggctgatattctggaccatttcgcgaaatgctttctgatcctcaaactttatgatcataaagtggacaaaagcaaatgggaaatgccgacgggttcgaacatgggcgaggccaaaccgtggaaagcaattcgcgtagatctggttcgttgcccctacggcggttttgcgtttgcgttgttgggttggaccggaagccgcatgttccgccgtgatctgcgctggtacgccactgacgagaagaacatgatgctggacaatcatgcgctgtatgacctgaccaagaaaatctttctcaaagctaaatcggaagaggaaattttcgcacatctggggcttgaatacctggaaccgttcgaacgtaacgca

SEQ ID NO: 2084 - protein, 529 aa, synthetic construct
  REGION 1..529: note = Variant of terminal deoxynucleotidyltransferase
MHHHHHHGGSGSHGIRTIDSDFGKKRQKKMDNHDSSAIYEIKFHEFVLFILEEKMGATRRTFLTDLARKKGFRVENELSDSVTHIVAENNSRSEVLAWLKEHKMEKTKQFELLDISWLIESMKVGKPVDTKGKYQLAESGEMSANPDPTEGRENELPPTMKTVSPYACQRRTTLNNHNQRFTDALEILAENYEFKRNDDTALEFRRAISVLKSLPFEVRSLKDTEGLPWIGDEVKGIMEEIIEVGESLEVQAVLNDERYQSFKRFKSVFGVGVKTADKWYRMGLRTLEDVRSSKTLKLTPMQKAGLCYYEDLARGVTKAEADAISLLVQDAVATFDPDALVEIVGGFRRGKPQGHDVDLLITSPGAEKEQEDQLLQKVTNLWKKQGLLLYGRLEWSQFEDGKLPSGKADILDHFAKCFLILKLYDHKVDKSKWEMPTGSNMGEAKPWKAIRVDLVRCPYGGFAFALLGWTGSRMFRRDLRWYATDEKNMMLDNHALYDLTKKIFLKAKSEEEIFAHLGLEYLEPFERNA

SEQ ID NO: 2085 - DNA, 1587 bp, synthetic construct
  misc_feature 1..1587: note = Variant of terminal deoxynucleotidyltransferase
  source 1..1587: mol_type = other DNA
atgcaccatcatcatcatcatggcggtagcggcagccacggcattcgtaccatcgattcggacttcgggaagaaacgccagaaaaaaatggataaccacgatagttccgccatctatgaaatcaaatttcacgagtttgtgctgttcattctcgaagaaaaaatgggtgcgacgcgtcgtacttttctgacagatttagcccgcaagaaagggttccgcgtcgagaatgaactgtcagacagcgttacccacatcgtggcagaaaataattcacgctctgaagtattggcttggctgaaagaacacaagatggagaagaccaagcaattcgaactgctggatattagctggcttatcgaaagcatgaaagttggtaaaccggtggacaccaaggggaaataccagttggcggaatcgggtgagatgagtgcgaacccagatccgacagagggtcgtgaaaacgagctgcctcctactatgaagaccgtttctccgtatgcgtgtcaacgccgcaccaccctgaacaaccataatcaacgttttacggacgcactggaaattcttgcggaaaattacgagttcaaacgcaacgatgatactgcgctggaatttcgtcgtgctatctccgtgctgaaaagccttccgtttgaggtacgtagcctgaaagacacggaaggattgccctggatcggtgatgaagtcaaagggattatggaagaaatcatcgaggtcggtgaatcgctggaagtgcaggccgtgctcaatgatgagcgctatcaaagcttcaaacgctttaagagtgtctttggagtgggggtgaagacagcagacaagtggtaccgtatgggtctgcgcacgctcgaggatgttcgttccagcaagaccctgaagttgaccccgatgcagaaagcgggtctgtgctattatgaagatcttgctcgcggctgtacgaaagccgaagctgacgcgatttctctgctggttcaggatgcagtcgcaactttcgacccggatgcgctggtggagattgtcggtggatttcgtcgtgggaaacctcagggtcacgacgttgatctgcttatcacatctccgggagctgagaaagagcaagaagaccagctcctgcagaaagtgaccaatctgtggaagaaacaagggttgttgctgtacggtcgtctggaatggagtcagtttgaagatgggaaactcccatccggtaaggctgatgccctggaccaccacgcgaaatgctttctgatcctcaaactttatgatcataaagtggacaaaagcaaatgggaaatgccgacgggttcgaacatgggcgaggccaaaccgtggaaagcaattcgcgtagatctggttcgttgcccctacggcggttttgcgtttgcgttgttgggttggaccggaagccgcatgttccgccgtgatctgcgctggtacgccactgacgagaagaacatgatgctggacaatcatgcgctgtatgacctgaccaagaaaatctttctcaaagctaaatcggaagaggaaattttcgcacatctggggcttgaatacctggaaccgttcgaacgtaacgca

SEQ ID NO: 2086 - protein, 529 aa, synthetic construct
  REGION 1..529: note = Variant of terminal deoxynucleotidyltransferase
MHHHHHHGGSGSHGIRTIDSDFGKKRQKKMDNHDSSAIYEIKFHEFVLFILEEKMGATRRTFLTDLARKKGFRVENELSDSVTHIVAENNSRSEVLAWLKEHKMEKTKQFELLDISWLIESMKVGKPVDTKGKYQLAESGEMSANPDPTEGRENELPPTMKTVSPYACQRRTTLNNHNQRFTDALEILAENYEFKRNDDTALEFRRAISVLKSLPFEVRSLKDTEGLPWIGDEVKGIMEEIIEVGESLEVQAVLNDERYQSFKRFKSVFGVGVKTADKWYRMGLRTLEDVRSSKTLKLTPMQKAGLCYYEDLARGCTKAEADAISLLVQDAVATFDPDALVEIVGGFRRGKPQGHDVDLLITSPGAEKEQEDQLLQKVTNLWKKQGLLLYGRLEWSQFEDGKLPSGKADALDHHAKCFLILKLYDHKVDKSKWEMPTGSNMGEAKPWKAIRVDLVRCPYGGFAFALLGWTGSRMFRRDLRWYATDEKNMMLDNHALYDLTKKIFLKAKSEEEIFAHLGLEYLEPFERNA

SEQ ID NO: 2087 - DNA, 1587 bp, synthetic construct
  misc_feature 1..1587: note = Variant of terminal deoxynucleotidyltransferase
  source 1..1587: mol_type = other DNA
atgcaccatcatcatcatcatggcggtagcggcagccacggcattcgtaccatcgattcggacttcgggaagaaacgccagaaaaaaatggataaccacgatagttccgccatctatgaaatcaaatttcacgagtttgtgctgttcattctcgaagaaaaaatgggtgcgacgcgtcgtacttttctgacagatttagcccgcaagaaagggttccgcgtcgagaatgaactgtcagacagcgttacccacatcgtggcagaaaataattcacgctctgaagtattggcttggctgaaagaacacaagatggagaagaccaagcaattcgaactgctggatattagctggcttatcgaaagcatgaaagttggtaaaccggtggacaccaaggggaaataccagttggcggaatcgggtgagatgagtgcgaacccagatccgacagagggtcgtgaaaacgagctgcctcctactatgaagaccgtttctccgtatgcgtgtcaacgccgcaccaccctgaacaaccataatcaacgttttacggacgcactggaaattcttgcggaaaattacgagttcaaacgcaacgatgatactgcgctggaatttcgtcgtgctatctccgtgctgaaaagccttccgtttgaggtacgtagcctgaaagacacggaaggattgccctggatcggtgatgaagtcaaagggattatggaagaaatcatcgaggtcggtgaatcgctggaagtgcaggccgtgctcaatgatgagcgctatcaaagcttcaaacgctttaagagtgtctttggagtgggggtgaagacagcagacctttggtaccgtatgggtctgcgcacgctcgaggatgttcgttccagcaagaccctgaagttgaccccgatgcagaaagcgggtctgtgctattatgaagatcttgctcgcggcgttacgaaagccgaagctgacgcgatttctctgctggttcaggatgcagtcgcaactttcgacccggatgcgctggtggagattgtcggtggatttcgtcgtgggaaacctcagggtcacgacgttgatctgcttatcacatctccgggagctgagaaagagcaagaagaccagctcctgcagaaagtgaccaatctgtggaagaaacaagggttgttgctgtacggtcgtctggaatggagtcagtttgaagatgggaaactcccatccggtaaggctgatgccctggaccaccacgcgaaatgctttctgatcctcaaactttatgatcataaagtggacaaaagcaaatgggaaatgccgacgggttcgaacatgggcgaggccaaaccgtggaaagcaattcgcgtagatctggttcgttgcccctacggcggttttgcgtttgcgttgttgggttggaccggaagccgcatgttccgccgtgatctgcgctggtacgccactgacgagaagaacatgatgctggacaatcatgcgctgtatgacctgaccaagaaaatctttctcaaagctaaatcggaagaggaaattttcgcacatctggggcttgaatacctggaaccgttcgaacgtaacgca

SEQ ID NO: 2088 - protein, 529 aa, synthetic construct
  REGION 1..529: note = Variant of terminal deoxynucleotidyltransferase
MHHHHHHGGSGSHGIRTIDSDFGKKRQKKMDNHDSSAIYEIKFHEFVLFILEEKMGATRRTFLTDLARKKGFRVENELSDSVTHIVAENNSRSEVLAWLKEHKMEKTKQFELLDISWLIESMKVGKPVDTKGKYQLAESGEMSANPDPTEGRENELPPTMKTVSPYACQRRTTLNNHNQRFTDALEILAENYEFKRNDDTALEFRRAISVLKSLPFEVRSLKDTEGLPWIGDEVKGIMEEIIEVGESLEVQAVLNDERYQSFKRFKSVFGVGVKTADLWYRMGLRTLEDVRSSKTLKLTPMQKAGLCYYEDLARGVTKAEADAISLLVQDAVATFDPDALVEIVGGFRRGKPQGHDVDLLITSPGAEKEQEDQLLQKVTNLWKKQGLLLYGRLEWSQFEDGKLPSGKADALDHHAKCFLILKLYDHKVDKSKWEMPTGSNMGEAKPWKAIRVDLVRCPYGGFAFALLGWTGSRMFRRDLRWYATDEKNMMLDNHALYDLTKKIFLKAKSEEEIFAHLGLEYLEPFERNA

SEQ ID NO: 2089 - DNA, 1587 bp, synthetic construct
  misc_feature 1..1587: note = Variant of terminal deoxynucleotidyltransferase
  source 1..1587: mol_type = other DNA
atgcaccatcatcatcatcatggcggtagcggcagccacggcattcgtaccatcgattcggacttcgggaagaaacgccagaaaaaaatggataaccacgatagttccgccatctatgaaatcaaatttcacgagtttgtgctgttcattctcgaagaaaaaatgggtgcgacgcgtcgtacttttctgacagatttagcccgcaagaaagggttccgcgtcgagaatgaactgtcagacagcgttacccacatcgtggcagaaaataattcacgctctgaagtattggcttggctgaaagaacacaagatggagaagaccaagcaattcgaactgctggatattagctggcttatcgaaagcatgaaagttggtaaaccggtggacaccaaggggaaataccagttggcggaatcgggtgagatgagtgcgaacccagatccgacagagggtcgtgaaaacgagctgcctcctactatgaagaccgtttctccgtatgcgtgtcaacgccgcaccaccctgaacaaccataatcaacgttttacggacgcatttgaaattcttgcggaaaattacgagttcaaacgcaacgatgatactgcgctggaatttcgtcgtgctatctccgtgctgaaaagccttccgtttgaggtacgtagcctgaaagacacggaaggattgccctggatcggtgatgaagtcaaagggattatggaagaaatcatcgaggtcggtgaatcgctggaagtgcaggccgtgctcaatgatgagcgctatcaaagcttcaaacgctttaagagtgtctttggagtgggggtgaagacagcagacaagtggtaccgtatgggtctgcgcacgctcgaggatgttcgttccagcaagaccctgaagttgaccccgatgcagaaagcgggtctgtgctattatgaagatcttgctcgcggcgttacgaaagccgaagctgacgcgatttctctgctggttcaggatgcagtcgcaactttcgacccggatgcgctggtggagattgtcggtggatttcgtcgtgggaaacctcagggtcacgacgttgatctgcttatcacatctccgggagctgagaaagagcaagaagaccagctcctgcagaaagtgaccaatctgtggaagaaacaagggttgttgctgtacggtcgtctggaatggagtcagtttgaagatgggaaactcccatccggtaaggctgatgccctggaccaccacgcgaaatgctttctgatcctcaaactttatgatcataaagtggacaaaagcaaatgggaaatgccgacgggttcgaacatgggcgaggccaaaccgtggaaagcaattcgcgtagatctggttcgttgcccctacggcggttttgcgtttgcgttgttgggttggaccggaagccgcatgttccgccgtgatctgcgctggtacgccactgacgagaagaacatgatgctggacaatcatgcgctgtatgacctgaccaagaaaatctttctcaaagctaaatcggaagaggaaattttcgcacatctggggcttgaatacctggaaccgttcgaacgtaacgca

SEQ ID NO: 2090 - protein, 529 aa, synthetic construct
  REGION 1..529: note = Variant of terminal deoxynucleotidyltransferase
MHHHHHHGGSGSHGIRTIDSDFGKKRQKKMDNHDSSAIYEIKFHEFVLFILEEKMGATRRTFLTDLARKKGFRVENELSDSVTHIVAENNSRSEVLAWLKEHKMEKTKQFELLDISWLIESMKVGKPVDTKGKYQLAESGEMSANPDPTEGRENELPPTMKTVSPYACQRRTTLNNHNQRFTDAFEILAENYEFKRNDDTALEFRRAISVLKSLPFEVRSLKDTEGLPWIGDEVKGIMEEIIEVGESLEVQAVLNDERYQSFKRFKSVFGVGVKTADKWYRMGLRTLEDVRSSKTLKLTPMQKAGLCYYEDLARGVTKAEADAISLLVQDAVATFDPDALVEIVGGFRRGKPQGHDVDLLITSPGAEKEQEDQLLQKVTNLWKKQGLLLYGRLEWSQFEDGKLPSGKADALDHHAKCFLILKLYDHKVDKSKWEMPTGSNMGEAKPWKAIRVDLVRCPYGGFAFALLGWTGSRMFRRDLRWYATDEKNMMLDNHALYDLTKKIFLKAKSEEEIFAHLGLEYLEPFERNA

SEQ ID NO: 2091 - DNA, 1587 bp, synthetic construct
  misc_feature 1..1587: note = Variant of terminal deoxynucleotidyltransferase
  source 1..1587: mol_type = other DNA
atgcaccatcatcatcatcatggcggtagcggcagccacggcattcgtaccatcgattcggacttcgggaagaaacgccagaaaaaaatggataaccacgatagttccgccatctatgaaatcaaatttcacgagtttgtgctgttcattctcgaagaaaaaatgggtgcgacgcgtcgtacttttctgacagatttagcccgcaagaaagggttccgcgtcgagaatgaactgtcagacagcgttacccacatcgtggcagaaaataattcacgctctgaagtattggcttggctgaaagaacacaagatggagaagaccaagcaattcgaactgctggatattagctggcttatcgaaagcatgaaagttggtaaaccggtggacaccaaggggaaataccagttggcggaatcgggtgagatgagtgcgaacccagatccgacagagggtcgtgaaaacgagctgcctcctactatgaagaccgtttctccgtatgcgtgtcaacgccgcaccaccctgaacaaccataatcaacgttttacggacgcactggaaattcttgcggaaaattacgagtgtaaacgcaacgatgatactgcgctggaatttcgtcgtgctatctccgtgctgaaaagccttccgtttgaggtacgtagcctgaaagacacggaaggattgccctggatcggtgatgaagtcaaagggattatggaagaaatcatcgaggtcggtgaatcgctggaagtgcaggccgtgctcaatgatgagcgctatcaaagcttcaaacgctttaagagtgtctttggagtgggggtgaagacagcagacaagtggtaccgtatgggtctgcgcacgctcgaggatgttcgttccagcaagaccctgaagttgaccccgatgcagaaagcgggtctgtgctattatgaagatcttgctcgcggcgttacgaaagccgaagctgacgcgatttctctgctggttcaggatgcagtcgcaactttcgacccggatgcgctggtggagattgtcggtggatttcgtcgtgggaaacctcagggtcacgacgttgatctgcttatcacatctccgggagctgagaaagagcaagaagaccagctcctgcagaaagtgaccaatctgtggaagaaacaagggttgttgctgtacggtcgtctggaatggagtcagtttgaagatgggaaactcccatccggtaaggctgatgccctggaccaccacgcgaaatgctttctgatcctcaaactttatgatcataaagtggacaaaagcaaatgggaaatgccgacgggttcgaacatgggcgaggccaaaccgtggaaagcaattcgcgtagatctggttcgttgcccctacggcggttttgcgtttgcgttgttgggttggaccggaagccgcatgttccgccgtgatctgcgctggtacgccactgacgagaagaacatgatgctggacaatcatgcgctgtatgacctgaccaagaaaatctttctcaaagctaaatcggaagaggaaattttcgcacatctggggcttgaatacctggaaccgttcgaacgtaacgca

SEQ ID NO: 2092 - protein, 529 aa, synthetic construct
  REGION 1..529: note = Variant of terminal deoxynucleotidyltransferase
MHHHHHHGGSGSHGIRTIDSDFGKKRQKKMDNHDSSAIYEIKFHEFVLFILEEKMGATRRTFLTDLARKKGFRVENELSDSVTHIVAENNSRSEVLAWLKEHKMEKTKQFELLDISWLIESMKVGKPVDTKGKYQLAESGEMSANPDPTEGRENELPPTMKTVSPYACQRRTTLNNHNQRFTDALEILAENYECKRNDDTALEFRRAISVLKSLPFEVRSLKDTEGLPWIGDEVKGIMEEIIEVGESLEVQAVLNDERYQSFKRFKSVFGVGVKTADKWYRMGLRTLEDVRSSKTLKLTPMQKAGLCYYEDLARGVTKAEADAISLLVQDAVATFDPDALVEIVGGFRRGKPQGHDVDLLITSPGAEKEQEDQLLQKVTNLWKKQGLLLYGRLEWSQFEDGKLPSGKADALDHHAKCFLILKLYDHKVDKSKWEMPTGSNMGEAKPWKAIRVDLVRCPYGGFAFALLGWTGSRMFRRDLRWYATDEKNMMLDNHALYDLTKKIFLKAKSEEEIFAHLGLEYLEPFERNA

SEQ ID NO: 2093 - DNA, 1587 bp, synthetic construct
  misc_feature 1..1587: note = Variant of terminal deoxynucleotidyltransferase
  source 1..1587: mol_type = other DNA
atgcaccatcatcatcatcatggcggtagcggcagccacggcattcgtaccatcgattcggacttcgggaagaaacgccagaaaaaaatggataaccacgatagttccgccatctatgaaatcaaatttcacgagtttgtgctgttcattctcgaagaaaaaatgggtgcgacgcgtcgtacttttctgacagatttagcccgcaagaaagggttccgcgtcgagaatgaactgtcagacagcgttacccacatcgtggcagaaaataattcacgctctgaagtattggcttggctgaaagaacacaagatggagaagaccaagcaattcgaactgctggatattagctggcttatcgaaagcatgaaagttggtaaaccggtggacaccaaggggaaataccagttggcggaatcgggtgagatgagtgcgaacccagatccgacagagggtcgtgaaaacgagctgcctcctactatgaagaccgtttctccgtatgcgtgtcaacgccgcaccaccctgaacaaccataatcaacgttttacggacgcactggaaattcttgcggaaaattacgagttcaaacgcaacgatgatactgcgctggaatttcgtcgtgctatctccgtgctgaaaagccttccgtttgaggtacgtagcctgaaagacacggaaggattgccctggatcggtgatgaagtcaaagggattatggaagaaatcatcgaggtcggtgaatcgctggaagtgcaggccgtgctcaatgatgagcgctatcaaagcttcaaacgctttaagagtgtctttggagtgggggtgaagacagcagacaagtggtaccgtatgggtctgcgcacgctcgaggatgttcgttccagcaagaccctgaagttgaccccgatgcagaaagcgggtctgtgctattatgaagatcttgctcgcggcgttacgaaagccgaagctgacgcgatttctctgctggttcaggatgcagtcgcaactttcgacccggatgcgctggtggagattgtcggtggatttcgtcgtgggaaaaggcagggtcacgacgttgatctgcttatcacatctccgggagctgagaaagagcaagaagaccagctcctgcagaaagtgaccaatctgtggaagaaacaagggttgttgctgtacggtcgtctggaatggagtcagtttgaagatgggaaactcccatccggtaaggctgatgccctggaccaccacgcgaaatgctttctgatcctcaaactttatgatcataaagtggacaaaagcaaatgggaaatgccgacgggttcgaacatgggcgaggccaaaccgtggaaagcaattcgcgtagatctggttcgttgcccctacggcggttttgcgtttgcgttgttgggttggaccggaagccgcatgttccgccgtgatctgcgctggtacgccactgacgagaagaacatgatgctggacaatcatgcgctgtatgacctgaccaagaaaatctttctcaaagctaaatcggaagaggaaattttcgcacatctggggcttgaatacctggaaccgttcgaacgtaacgca

SEQ ID NO: 2094 - protein, 529 aa, synthetic construct
  REGION 1..529: note = Variant of terminal deoxynucleotidyltransferase
MHHHHHHGGSGSHGIRTIDSDFGKKRQKKMDNHDSSAIYEIKFHEFVLFILEEKMGATRRTFLTDLARKKGFRVENELSDSVTHIVAENNSRSEVLAWLKEHKMEKTKQFELLDISWLIESMKVGKPVDTKGKYQLAESGEMSANPDPTEGRENELPPTMKTVSPYACQRRTTLNNHNQRFTDALEILAENYEFKRNDDTALEFRRAISVLKSLPFEVRSLKDTEGLPWIGDEVKGIMEEIIEVGESLEVQAVLNDERYQSFKRFKSVFGVGVKTADKWYRMGLRTLEDVRSSKTLKLTPMQKAGLCYYEDLARGVTKAEADAISLLVQDAVATFDPDALVEIVGGFRRGKRQGHDVDLLITSPGAEKEQEDQLLQKVTNLWKKQGLLLYGRLEWSQFEDGKLPSGKADALDHHAKCFLILKLYDHKVDKSKWEMPTGSNMGEAKPWKAIRVDLVRCPYGGFAFALLGWTGSRMFRRDLRWYATDEKNMMLDNHALYDLTKKIFLKAKSEEEIFAHLGLEYLEPFERNA

SEQ ID NO: 2095 - DNA, 1587 bp, synthetic construct
  misc_feature 1..1587: note = Variant of terminal deoxynucleotidyltransferase
  source 1..1587: mol_type = other DNA
atgcaccatcatcatcatcatggcggtagcggcagccacggcattcgtaccatcgattcggacttcgggaagaaacgccagaaaaaaatggataaccacgatagttccgccatctatgaaatcaaatttcacgagtttgtgctgttcattctcgaagaaaaaatgggtgcgacgcgtcgtacttttctgacagatttagcccgcaagaaagggttccgcgtcgagaatgaactgtcagacagcgttacccacatcgtggcagaaaataattcacgctctgaagtattggcttggctgaaagaacacaagatggagaagaccaagcaattcgaactgctggatattagctggcttatcgaaagcatgaaagttggtaaaccggtggacaccaaggggaaataccagttggcggaatcgggtgagatgagtgcgaacccagatccgacagagggtcgtgaaaacgagctgcctcctactatgaagaccgtttctccgtatgcgtgtcaacgccgcaccaccctgaacaaccataatcaacgttttacggacgcactggaaattcttgcggaaaattacgagttcaaacgcaacgatgatactgcgctggaatttcgtcgtgctatctccgtgctgaaaagccttccgtttgaggtacgtagcctgaaagacacggaaggattgccctggatcggtgatgaagtcaaagggattatggaagaaatcatcgaggtcggtgaatcgctggaagtgcaggccgtgctcaatgatgagcgcaatcaaagcttcaaacgctttaagagtgtctttggagtgggggtgaagacagcagacaagtggtaccgtatgggtctgcgcacgctcgaggatgttcgttccagcaagaccctgaagttgaccccgatgcagaaagcgggtctgtgctattatgaagatcttgctcgcggcgttacgaaagccgaagctgacgcgatttctctgctggttcaggatgcagtcgcaactttcgacccggatgcgctggtggagattgtcggtggatttcgtcgtgggaaacctcagggtcacgacgttgatctgcttatcacatctccgggagctgagaaagagcaagaagaccagctcctgcagaaagtgaccaatctgtggaagaaacaagggttgttgctgtacggtcgtctggaatggagtcagtttgaagatgggaaactcccatccggtaaggctgatgccctggaccaccacgcgaaatgctttctgatcctcaaactttatgatcataaagtggacaaaagcaaatgggaaatgccgacgggttcgaacatgggcgaggccaaaccgtggaaagcaattcgcgtagatctggttcgttgcccctacggcggttttgcgtttgcgttgttgggttggaccggaagccgcatgttccgccgtgatctgcgctggtacgccactgacgagaagaacatgatgctggacaatcatgcgctgtatgacctgaccaagaaaatctttctcaaagctaaatcggaagaggaaattttcgcacatctggggcttgaatacctggaaccgttcgaacgtaacgca

SEQ ID NO: 2096 - protein, 529 aa, synthetic construct
  REGION 1..529: note = Variant of terminal deoxynucleotidyltransferase
MHHHHHHGGSGSHGIRTIDSDFGKKRQKKMDNHDSSAIYEIKFHEFVLFILEEKMGATRRTFLTDLARKKGFRVENELSDSVTHIVAENNSRSEVLAWLKEHKMEKTKQFELLDISWLIESMKVGKPVDTKGKYQLAESGEMSANPDPTEGRENELPPTMKTVSPYACQRRTTLNNHNQRFTDALEILAENYEFKRNDDTALEFRRAISVLKSLPFEVRSLKDTEGLPWIGDEVKGIMEEIIEVGESLEVQAVLNDERNQSFKRFKSVFGVGVKTADKWYRMGLRTLEDVRSSKTLKLTPMQKAGLCYYEDLARGVTKAEADAISLLVQDAVATFDPDALVEIVGGFRRGKPQGHDVDLLITSPGAEKEQEDQLLQKVTNLWKKQGLLLYGRLEWSQFEDGKLPSGKADALDHHAKCFLILKLYDHKVDKSKWEMPTGSNMGEAKPWKAIRVDLVRCPYGGFAFALLGWTGSRMFRRDLRWYATDEKNMMLDNHALYDLTKKIFLKAKSEEEIFAHLGLEYLEPFERNA

SEQ ID NO: 2097 - DNA, 1587 bp, synthetic construct
  misc_feature 1..1587: note = Variant of terminal deoxynucleotidyltransferase
  source 1..1587: mol_type = other DNA
atgcaccatcatcatcatcatggcggtagcggcagccacggcattcgtaccatcgattcggacttcgggaagaaacgccagaaaaaaatggataaccacgatagttccgccatctatgaaatcaaatttcacgagtttgtgctgttcattctcgaagaaaaaatgggtgcgacgcgtcgtacttttctgacagatttagcccgcaagaaagggttccgcgtcgagaatgaactgtcagacagcgttacccacatcgtggcagaaaataattcacgctctgaagtattggcttggctgaaagaacacaagatggagaagaccaagcaattcgaactgctggatattagctggcttatcgaaagcatgaaagttggtaaaccggtggacaccaaggggaaataccagttggcggaatcgggtgagatgagtgcgaacccagatccgacagagggtcgtgaaaacgagctgcctcctactatgaagaccgtttctccgtatgcgtgtcaacgccgcaccaccctgaacaaccataatcaacgttttacggacgcactggaaattcttgcggaaaattacgagttcaaacgcaacgatgatactgcgctggaatttcgtcgtgctatctccgtgctgaaaagccttccgtttgaggtacgtagcctgaaagacacggaaggattgccctggatcggtgatgaagtcaaagggattatggaagaaatcatcgaggtcggtgaatcgctggaagtgcaggccgtgctcaatgatgagcgctatcaaagcttcaaacgctttaagagtgtctttggagtgggggtgaagacagcagacaagtggtaccgtatgggtctgcgcacgctcgaggatgttcgttccagcaagaccctgaagttgaccccgatgcagaaactgggtctgtgctattatgaagatcttgctcgcggcgttacgaaagccgaagctgacgcgatttctctgctggttcaggatgcagtcgcaactttcgacccggatgcgctggtggagattgtcggtggatttcgtcgtgggaaacctcagggtcacgacgttgatctgcttatcacatctccgggagctgagaaagagcaagaagaccagctcctgcagaaagtgaccaatctgtggaagaaacaagggttgttgctgtacggtcgtctggaatggagtcagtttgaagatgggaaactcccatccggtaaggctgatgccctggaccaccacgcgaaatgctttctgatcctcaaactttatgatcataaagtggacaaaagcaaatgggaaatgccgacgggttcgaacatgggcgaggccaaaccgtggaaagcaattcgcgtagatctggttcgttgcccctacggcggttttgcgtttgcgttgttgggttggaccggaagccgcatgttccgccgtgatctgcgctggtacgccactgacgagaagaacatgatgctggacaatcatgcgctgtatgacctgaccaagaaaatctttctcaaagctaaatcggaagaggaaattttcgcacatctggggcttgaatacctggaaccgttcgaacgtaacgca

SEQ ID NO: 2098 - protein, 529 aa, synthetic construct
  REGION 1..529: note = Variant of terminal deoxynucleotidyltransferase
MHHHHHHGGSGSHGIRTIDSDFGKKRQKKMDNHDSSAIYEIKFHEFVLFILEEKMGATRRTFLTDLARKKGFRVENELSDSVTHIVAENNSRSEVLAWLKEHKMEKTKQFELLDISWLIESMKVGKPVDTKGKYQLAESGEMSANPDPTEGRENELPPTMKTVSPYACQRRTTLNNHNQRFTDALEILAENYEFKRNDDTALEFRRAISVLKSLPFEVRSLKDTEGLPWIGDEVKGIMEEIIEVGESLEVQAVLNDERYQSFKRFKSVFGVGVKTADKWYRMGLRTLEDVRSSKTLKLTPMQKLGLCYYEDLARGVTKAEADAISLLVQDAVATFDPDALVEIVGGFRRGKPQGHDVDLLITSPGAEKEQEDQLLQKVTNLWKKQGLLLYGRLEWSQFEDGKLPSGKADALDHHAKCFLILKLYDHKVDKSKWEMPTGSNMGEAKPWKAIRVDLVRCPYGGFAFALLGWTGSRMFRRDLRWYATDEKNMMLDNHALYDLTKKIFLKAKSEEEIFAHLGLEYLEPFERNA

SEQ ID NO: 2099 - DNA, 1587 bp, synthetic construct
  misc_feature 1..1587: note = Variant of terminal deoxynucleotidyltransferase
  source 1..1587: mol_type = other DNA
atgcaccatcatcatcatcatggcggtagcggcagccacggcattcgtaccatcgattcggacttcgggaagaaacgccagaaaaaaatggataaccacgatagttccgccatctatgaaatcaaatttcacgagtttgtgctgttcattctcgaagaaaaaatgggtgcgacgcgtcgtacttttctgacagatttagcccgcaagaaagggttccgcgtcgagaatgaactgtcagacagcgttacccacatcgtggcagaaaataattcacgctctgaagtattggcttggctgaaagaacacaagatggagaagaccaagcaattcgaactgctggatattagctggcttatcgaaagcatgaaagttggtaaaccggtggacaccaaggggaaataccagttggcggaatcgggtgagatgagtgcgaacccagatccgacagagggtcgtgaaaacgagctgcctcctactatgaagaccgtttctccgtatgcgtgtcaacgccgcaccaccctgaacaaccataatcaacgttttacggacgcactggaaattcttgcggaaaattacgagtggaaacgcaacgatgatactgcgctggaatttcgtcgtgctatctccgtgctgaaaagccttccgtttgaggtacgtagcctgaaagacacggaaggattgccctggatcggtgatgaagtcaaagggattatggaagaaatcatcgaggtcggtgaatcgctggaagtgcaggccgtgctcaatgatgagcgctatcaaagcttcaaacgctttaagagtgtctttggagtgggggtgaagacagcagacaagtggtaccgtatgggtctgcgcacgctcgaggatgttcgttccagcaagaccctgaagttgaccccgatgcagaaagcgggtctgtgctattatgaagatcttgctcgcggcgttacgaaagccgaagctgacgcgatttctctgctggttcaggatgcagtcgcaactttcgacccggatgcgctggtggagattgtcggtggatttcgtcgtgggaaacctcagggtcacgacgttgatctgcttatcacatctccgggagctgagaaagagcaagaagaccagctcctgcagaaagtgaccaatctgtggaagaaacaagggttgttgctgtacggtcgtctggaatggagtcagtttgaagatgggaaactcccatccggtaaggctgatgccctggaccaccacgcgaaatgctttctgatcctcaaactttatgatcataaagtggacaaaagcaaatgggaaatgccgacgggttcgaacatgggcgaggccaaaccgtggaaagcaattcgcgtagatctggttcgttgcccctacggcggttttgcgtttgcgttgttgggttggaccggaagccgcatgttccgccgtgatctgcgctggtacgccactgacgagaagaacatgatgctggacaatcatgcgctgtatgacctgaccaagaaaatctttctcaaagctaaatcggaagaggaaattttcgcacatctggggcttgaatacctggaaccgttcgaacgtaacgca

SEQ ID NO: 2100 - protein, 529 aa, synthetic construct
  REGION 1..529: note = Variant of terminal deoxynucleotidyltransferase
MHHHHHHGGSGSHGIRTIDSDFGKKRQKKMDNHDSSAIYEIKFHEFVLFILEEKMGATRRTFLTDLARKKGFRVENELSDSVTHIVAENNSRSEVLAWLKEHKMEKTKQFELLDISWLIESMKVGKPVDTKGKYQLAESGEMSANPDPTEGRENELPPTMKTVSPYACQRRTTLNNHNQRFTDALEILAENYEWKRNDDTALEFRRAISVLKSLPFEVRSLKDTEGLPWIGDEVKGIMEEIIEVGESLEVQAVLNDERYQSFKRFKSVFGVGVKTADKWYRMGLRTLEDVRSSKTLKLTPMQKAGLCYYEDLARGVTKAEADAISLLVQDAVATFDPDALVEIVGGFRRGKPQGHDVDLLITSPGAEKEQEDQLLQKVTNLWKKQGLLLYGRLEWSQFEDGKLPSGKADALDHHAKCFLILKLYDHKVDKSKWEMPTGSNMGEAKPWKAIRVDLVRCPYGGFAFALLGWTGSRMFRRDLRWYATDEKNMMLDNHALYDLTKKIFLKAKSEEEIFAHLGLEYLEPFERNA

SEQ ID NO: 2101 - DNA, 1587 bp, synthetic construct
  misc_feature 1..1587: note = Variant of terminal deoxynucleotidyltransferase
  source 1..1587: mol_type = other DNA
atgcaccatcatcatcatcatggcggtagcggcagccacggcattcgtaccatcgattcggacttcgggaagaaacgccagaaaaaaatggataaccacgatagttccgccatctatgaaatcaaatttcacgagtttgtgctgttcattctcgaagaaaaaatgggtgcgacgcgtcgtacttttctgacagatttagcccgcaagaaagggttccgcgtcgagaatgaactgtcagacagcgttacccacatcgtggcagaaaataattcacgctctgaagtattggcttggctgaaagaacacaagatggagaagaccaagcaattcgaactgctggatattagctggcttatcgaaagcatgaaagttggtaaaccggtggacaccaaggggaaataccagttggcggaatcgggtgagatgagtgcgaacccagatccgacagagggtcgtgaaaacgagctgcctcctactatgaagaccgtttctccgtatgcgtgtcaacgccgcaccaccctgaacaaccataatcaacgttttacggacgcactggaaattcttgcggaaaattacgagttcaaacgcaacgatgatactgcgctggaatttcgtcgtgctatctccgtgctgaaaagccttccgtttgaggtacgtagcctgaaagacacggaaggattgccctggatcggtgatgaagtcaaagggattatggaagaaatcatcgaggtcggtgaatcgctggaagtgcaggccgtgctcaatgatgagcgctatcaaagcttcaaacgctttaagagtgtctttggagtgggggtgaagacagcagacaagtggtaccgtatgggtctgcgcacgctcgaggatgttatgtccagcaagaccctgaagttgaccccgatgcagaaagcgggtctgtgctattatgaagatcttgctcgcggcgttacgaaagccgaagctgacgcgatttctctgctggttcaggatgcagtcgcaactttcgacccggatgcgctggtggagattgtcggtggatttcgtcgtgggaaacctcagggtcacgacgttgatctgcttatcacatctccgggagctgagaaagagcaagaagaccagctcctgcagaaagtgaccaatctgtggaagaaacaagggttgttgctgtacggtcgtctggaatggagtcagtttgaagatgggaaactcccatccggtaaggctgatgccctggaccaccacgcgaaatgctttctgatcctcaaactttatgatcataaagtggacaaaagcaaatgggaaatgccgacgggttcgaacatgggcgaggccaaaccgtggaaagcaattcgcgtagatctggttcgttgcccctacggcggttttgcgtttgcgttgttgggttggaccggaagccgcatgttccgccgtgatctgcgctggtacgccactgacgagaagaacatgatgctggacaatcatgcgctgtatgacctgaccaagaaaatctttctcaaagctaaatcggaagaggaaattttcgcacatctggggcttgaatacctggaaccgttcgaacgtaacgca

SEQ ID NO: 2102 - protein, 529 aa, synthetic construct
  REGION 1..529: note = Variant of terminal deoxynucleotidyltransferase
MHHHHHHGGSGSHGIRTIDSDFGKKRQKKMDNHDSSAIYEIKFHEFVLFILEEKMGATRRTFLTDLARKKGFRVENELSDSVTHIVAENNSRSEVLAWLKEHKMEKTKQFELLDISWLIESMKVGKPVDTKGKYQLAESGEMSANPDPTEGRENELPPTMKTVSPYACQRRTTLNNHNQRFTDALEILAENYEFKRNDDTALEFRRAISVLKSLPFEVRSLKDTEGLPWIGDEVKGIMEEIIEVGESLEVQAVLNDERYQSFKRFKSVFGVGVKTADKWYRMGLRTLEDVMSSKTLKLTPMQKAGLCYYEDLARGVTKAEADAISLLVQDAVATFDPDALVEIVGGFRRGKPQGHDVDLLITSPGAEKEQEDQLLQKVTNLWKKQGLLLYGRLEWSQFEDGKLPSGKADALDHHAKCFLILKLYDHKVDKSKWEMPTGSNMGEAKPWKAIRVDLVRCPYGGFAFALLGWTGSRMFRRDLRWYATDEKNMMLDNHALYDLTKKIFLKAKSEEEIFAHLGLEYLEPFERNA

SEQ ID NO: 2103 - DNA, 1587 bp, synthetic construct
  misc_feature 1..1587: note = Variant of terminal deoxynucleotidyltransferase
  source 1..1587: mol_type = other DNA
atgcaccatcatcatcatcatggcggtagcggcagccacggcattcgtaccatcgattcggacttcgggaagaaacgccagaaaaaaatggataaccacgatagttccgccatctatgaaatcaaatttcacgagtttgtgctgttcattctcgaagaaaaaatgggtgcgacgcgtcgtacttttctgacagatttagcccgcaagaaagggttccgcgtcgagaatgaactgtcagacagcgttacccacatcgtggcagaaaataattcacgctctgaagtattggcttggctgaaagaacacaagatggagaagaccaagcaattcgaactgctggatattagctggcttatcgaaagcatgaaagttggtaaaccggtggacaccaaggggaaataccagttggcggaatcgggtgagatgagtgcgaacccagatccgacagagggtcgtgaaaacgagctgcctcctactatgaagaccgtttctccgtatgcgtgtcaacgccgcaccaccctgaacaaccataatcaacgttttacggacgcactggaaattcttgcggaaaattacgagttcaaacgcaacgatgatactgcgctggaatttcgtcgtgctatctccgtgctgaaaagccttccgtttgaggtacgtagcctgaaagacacggaaggattgccctggatcggtgatgaagtcaaagggattatggaagaaatcatcgaggtcggtgaatcgctggaagtgcaggccgtgctcaatgatgagaagtatcaaagcttcaaacgctttaagagtgtctttggagtgggggtgaagacagcagacaagtggtaccgtatgggtctgcgcacgctcgaggatgttcgttccagcaagaccctgaagttgaccccgatgcagaaagcgggtctgtgctattatgaagatcttgctcgcggcgttacgaaagccgaagctgacgcgatttctctgctggttcaggatgcagtcgcaactttcgacccggatgcgctggtggagattgtcggtggatttcgtcgtgggaaacctcagggtcacgacgttgatctgcttatcacatctccgggagctgagaaagagcaagaagaccagctcctgcagaaagtgaccaatctgtggaagaaacaagggttgttgctgtacggtcgtctggaatggagtcagtttgaagatgggaaactcccatccggtaaggctgatgccctggaccaccacgcgaaatgctttctgatcctcaaactttatgatcataaagtggacaaaagcaaatgggaaatgccgacgggttcgaacatgggcgaggccaaaccgtggaaagcaattcgcgtagatctggttcgttgcccctacggcggttttgcgtttgcgttgttgggttggaccggaagccgcatgttccgccgtgatctgcgctggtacgccactgacgagaagaacatgatgctggacaatcatgcgctgtatgacctgaccaagaaaatctttctcaaagctaaatcggaagaggaaattttcgcacatctggggcttgaatacctggaaccgttcgaacgtaacgca

SEQ ID NO: 2104 - protein, 529 aa, synthetic construct
  REGION 1..529: note = Variant of terminal deoxynucleotidyltransferase
MHHHHHHGGSGSHGIRTIDSDFGKKRQKKMDNHDSSAIYEIKFHEFVLFILEEKMGATRRTFLTDLARKKGFRVENELSDSVTHIVAENNSRSEVLAWLKEHKMEKTKQFELLDISWLIESMKVGKPVDTKGKYQLAESGEMSANPDPTEGRENELPPTMKTVSPYACQRRTTLNNHNQRFTDALEILAENYEFKRNDDTALEFRRAISVLKSLPFEVRSLKDTEGLPWIGDEVKGIMEEIIEVGESLEVQAVLNDEKYQSFKRFKSVFGVGVKTADKWYRMGLRTLEDVRSSKTLKLTPMQKAGLCYYEDLARGVTKAEADAISLLVQDAVATFDPDALVEIVGGFRRGKPQGHDVDLLITSPGAEKEQEDQLLQKVTNLWKKQGLLLYGRLEWSQFEDGKLPSGKADALDHHAKCFLILKLYDHKVDKSKWEMPTGSNMGEAKPWKAIRVDLVRCPYGGFAFALLGWTGSRMFRRDLRWYATDEKNMMLDNHALYDLTKKIFLKAKSEEEIFAHLGLEYLEPFERNA

SEQ ID NO: 2105 - DNA, 1587 bp, synthetic construct
  misc_feature 1..1587: note = Variant of terminal deoxynucleotidyltransferase
  source 1..1587: mol_type = other DNA
atgcaccatcatcatcatcatggcggtagcggcagccacggcattcgtaccatcgattcggacttcgggaagaaacgccagaaaaaaatggataaccacgatagttccgccatctatgaaatcaaatttcacgagtttgtgctgttcattctcgaagaaaaaatgggtgcgacgcgtcgtacttttctgacagatttagcccgcaagaaagggttccgcgtcgagaatgaactgtcagacagcgttacccacatcgtggcagaaaataattcacgctctgaagtattggcttggctgaaagaacacaagatggagaagaccaagcaattcgaactgctggatattagctggcttatcgaaagcatgaaagttggtaaaccggtggacaccaaggggaaataccagttggcggaatcgggtgagatgagtgcgaacccagatccgacagagggtcgtgaaaacgagctgcctcctactatgaagaccgtttctccgtatgcgtgtcaacgccgcaccaccctgaacaaccataatcaacgttttacggacgcactggaaattcttgcggaaaattacgagttcaaacgcaacgatgatactgcgctggaatttcgtcgtgctatctccgtgctgaaaagccttccgtttgaggtacgtagcctgaaagacacggaaggattgccctggatcggtgatgaagtcaaagggattatggaagaaatcatcgaggtcggtgaatcgctggaagtgcaggccgtgctcaatgatgagcgctatcaaagcttcaaacgctttaagagtgtctttggagtgggggtgaatacagcagacaagtggtaccgtatgggtctgcgcacgctcgaggatgttcgttccagcaagaccctgaagttgaccccgatgcagaaagcgggtctgtgctattatgaagatcttgctcgcggcgttacgaaagccgaagctgacgcgatttctctgctggttcaggatgcagtcgcaactttcgacccggatgcgctggtggagattgtcggtggatttcgtcgtgggaaacctcagggtcacgacgttgatctgcttatcacatctccgggagctgagaaagagcaagaagaccagctcctgcagaaagtgaccaatctgtggaagaaacaagggttgttgctgtacggtcgtctggaatggagtcagtttgaagatgggaaactcccatccggtaaggctgatgccctggaccaccacgcgaaatgctttctgatcctcaaactttatgatcataaagtggacaaaagcaaatgggaaatgccgacgggttcgaacatgggcgaggccaaaccgtggaaagcaattcgcgtagatctggttcgttgcccctacggcggttttgcgtttgcgttgttgggttggaccggaagccgcatgttccgccgtgatctgcgctggtacgccactgacgagaagaacatgatgctggacaatcatgcgctgtatgacctgaccaagaaaatctttctcaaagctaaatcggaagaggaaattttcgcacatctggggcttgaatacctggaaccgttcgaacgtaacgca

SEQ ID NO: 2106 - protein, 529 aa, synthetic construct
  REGION 1..529: note = Variant of terminal deoxynucleotidyltransferase
MHHHHHHGGSGSHGIRTIDSDFGKKRQKKMDNHDSSAIYEIKFHEFVLFILEEKMGATRRTFLTDLARKKGFRVENELSDSVTHIVAENNSRSEVLAWLKEHKMEKTKQFELLDISWLIESMKVGKPVDTKGKYQLAESGEMSANPDPTEGRENELPPTMKTVSPYACQRRTTLNNHNQRFTDALEILAENYEFKRNDDTALEFRRAISVLKSLPFEVRSLKDTEGLPWIGDEVKGIMEEIIEVGESLEVQAVLNDERYQSFKRFKSVFGVGVNTADKWYRMGLRTLEDVRSSKTLKLTPMQKAGLCYYEDLARGVTKAEADAISLLVQDAVATFDPDALVEIVGGFRRGKPQGHDVDLLITSPGAEKEQEDQLLQKVTNLWKKQGLLLYGRLEWSQFEDGKLPSGKADALDHHAKCFLILKLYDHKVDKSKWEMPTGSNMGEAKPWKAIRVDLVRCPYGGFAFALLGWTGSRMFRRDLRWYATDEKNMMLDNHALYDLTKKIFLKAKSEEEIFAHLGLEYLEPFERNA

SEQ ID NO: 2107 - DNA, 1587 bp, synthetic construct
  misc_feature 1..1587: note = Variant of terminal deoxynucleotidyltransferase
  source 1..1587: mol_type = other DNA
atgcaccatcatcatcatcatggcggtagcggcagccacggcattcgtaccatcgattcggacttcgggaagaaacgccagaaaaaaatggataaccacgatagttccgccatctatgaaatcaaatttcacgagtttgtgctgttcattctcgaagaaaaaatgggtgcgacgcgtcgtacttttctgacagatttagcccgcaagaaagggttccgcgtcgagaatgaactgtcagacagcgttacccacatcgtggcagaaaataattcacgctctgaagtattggcttggctgaaagaacacaagatggagaagaccaagcaattcgaactgctggatattagctggcttatcgaaagcatgaaagttggtaaaccggtggacaccaaggggaaataccagttggcggaatcgggtgagatgagtgcgaacccagatccgacagagggtcgtgaaaacgagctgcctcctactatgaagaccgtttctccgtatgcgtgtcaacgccgcaccaccctgaacaaccataatcaacgttttacggacgcactggaaattcttgcggaaaattacgagttcaaacgcaacgatgatactgcgctggaatttcgtcgtgctatctccgtgctgaaaagccttccgtttgaggtacgtagcctgaaagacacggaaggattgccctggatcggtgatgaagtcaaagggattatggaagaaatcatcgaggtcggtgaatcgctggaagtgcaggccgtgctcaatgatgagcgctatcaaggtttcaaacgctttaagagtgtctttggagtgggggtgaagacagcagacaagtggtaccgtatgggtctgcgcacgctcgaggatgttcgttccagcaagaccctgaagttgaccccgatgcagaaagcgggtctgtgctattatgaagatcttgctcgcggcgttacgaaagccgaagctgacgcgatttctctgctggttcaggatgcagtcgcaactttcgacccggatgcgctggtggagattgtcggtggatttcgtcgtgggaaacctcagggtcacgacgttgatctgcttatcacatctccgggagctgagaaagagcaagaagaccagctcctgcagaaagtgaccaatctgtggaagaaacaagggttgttgctgtacggtcgtctggaatggagtcagtttgaagatgggaaactcccatccggtaaggctgatgccctggaccaccacgcgaaatgctttctgatcctcaaactttatgatcataaagtggacaaaagcaaatgggaaatgccgacgggttcgaacatgggcgaggccaaaccgtggaaagcaattcgcgtagatctggttcgttgcccctacggcggttttgcgtttgcgttgttgggttggaccggaagccgcatgttccgccgtgatctgcgctggtacgccactgacgagaagaacatgatgctggacaatcatgcgctgtatgacctgaccaagaaaatctttctcaaagctaaatcggaagaggaaattttcgcacatctggggcttgaatacctggaaccgttcgaacgtaacgca

SEQ ID NO: 2108 - protein, 529 aa, synthetic construct
  REGION 1..529: note = Variant of terminal deoxynucleotidyltransferase
MHHHHHHGGSGSHGIRTIDSDFGKKRQKKMDNHDSSAIYEIKFHEFVLFILEEKMGATRRTFLTDLARKKGFRVENELSDSVTHIVAENNSRSEVLAWLKEHKMEKTKQFELLDISWLIESMKVGKPVDTKGKYQLAESGEMSANPDPTEGRENELPPTMKTVSPYACQRRTTLNNHNQRFTDALEILAENYEFKRNDDTALEFRRAISVLKSLPFEVRSLKDTEGLPWIGDEVKGIMEEIIEVGESLEVQAVLNDERYQGFKRFKSVFGVGVKTADKWYRMGLRTLEDVRSSKTLKLTPMQKAGLCYYEDLARGVTKAEADAISLLVQDAVATFDPDALVEIVGGFRRGKPQGHDVDLLITSPGAEKEQEDQLLQKVTNLWKKQGLLLYGRLEWSQFEDGKLPSGKADALDHHAKCFLILKLYDHKVDKSKWEMPTGSNMGEAKPWKAIRVDLVRCPYGGFAFALLGWTGSRMFRRDLRWYATDEKNMMLDNHALYDLTKKIFLKAKSEEEIFAHLGLEYLEPFERNA

SEQ ID NO: 2109 - DNA, 1587 bp, synthetic construct
  misc_feature 1..1587: note = Variant of terminal deoxynucleotidyltransferase
  source 1..1587: mol_type = other DNA
atgcaccatcatcatcatcatggcggtagcggcagccacggcattcgtaccatcgattcggacttcgggaagaaacgccagaaaaaaatggataaccacgatagttccgccatctatgaaatcaaatttcacgagtttgtgctgttcattctcgaagaaaaaatgggtgcgacgcgtcgtacttttctgacagatttagcccgcaagaaagggttccgcgtcgagaatgaactgtcagacagcgttacccacatcgtggcagaaaataattcacgctctgaagtattggcttggctgaaagaacacaagatggagaagaccaagcaattcgaactgctggatattagctggcttatcgaaagcatgaaagttggtaaaccggtggacaccaaggggaaataccagttggcggaatcgggtgagatgagtgcgaacccagatccgacagagggtcgtgaaaacgagctgcctcctactatgaagaccgtttctccgtatgcgtgtcaacgccgcaccaccctgaacaaccataatcaacgttttacggacgcactggaaattcttgcggaaaattacgagttcaaacgcaacgatgatactgcgctggaatttcgtcgtgctatctccgtgctgaaaagccttccgtttgaggtacgtagcctgaaagacacggaaggattgccctggatcggtgatgaagtcaaagggattatggaagaaatcatcgaggtcggtgaatcgctggaagtgcaggccgtgctcaatgatgagcgctatcaaagcttcaaacgctttaagagtgtctttggagtgggggtgaagacagcagacaagtggtaccgtatgggtctgcgcacgctcgaggatgttcgttccagcaagaccctgaagttgaccccgatgcagaaagcgggtctgtgctattatgaagatcttgctcgcggcgttacgaaagccgaagctgacgcgatttctctgctggttcaggatgcagtcgcaactttcgacccggatgcgctggtggagattgtcggtggatttcgtcgtgggaaacctcagggtcacgacgttgatctgcttatcacatctccgggagctgagaaagagcaagaagaccagctcctgcagaaagtgaccaatctgtggaagaaacaagggttgttgctgtacggtcgtctggaatggagtcagtttgaagatgggaaactcccatccggtaaggctgatgccctggaccaccacgcgaaatgctttctgatcctcaaactttatgatcataaagtggacaaaagcaaatgggaaatgccgacgggttcgaacatgggcgaggccaaaccgtggaaagcaattcgcgtagatctggttcgttgcccctacggcggttttgcgtttgcgttgttgtcgtggaccggaagccgcatgttccgccgtgatctgcgctggtacgccactgacgagaagaacatgatgctggacaatcatgcgctgtatgacctgaccaagaaaatctttctcaaagctaaatcggaagaggaaattttcgcacatctggggcttgaatacctggaaccgttcgaacgtaacgca

SEQ ID NO: 2110 - protein, 529 aa, synthetic construct
  REGION 1..529: note = Variant of terminal deoxynucleotidyltransferase
MHHHHHHGGSGSHGIRTIDSDFGKKRQKKMDNHDSSAIYEIKFHEFVLFILEEKMGATRRTFLTDLARKKGFRVENELSDSVTHIVAENNSRSEVLAWLKEHKMEKTKQFELLDISWLIESMKVGKPVDTKGKYQLAESGEMSANPDPTEGRENELPPTMKTVSPYACQRRTTLNNHNQRFTDALEILAENYEFKRNDDTALEFRRAISVLKSLPFEVRSLKDTEGLPWIGDEVKGIMEEIIEVGESLEVQAVLNDERYQSFKRFKSVFGVGVKTADKWYRMGLRTLEDVRSSKTLKLTPMQKAGLCYYEDLARGVTKAEADAISLLVQDAVATFDPDALVEIVGGFRRGKPQGHDVDLLITSPGAEKEQEDQLLQKVTNLWKKQGLLLYGRLEWSQFEDGKLPSGKADALDHHAKCFLILKLYDHKVDKSKWEMPTGSNMGEAKPWKAIRVDLVRCPYGGFAFALLSWTGSRMFRRDLRWYATDEKNMMLDNHALYDLTKKIFLKAKSEEEIFAHLGLEYLEPFERNA

SEQ ID NO: 2111 - DNA, 1587 bp, synthetic construct
  misc_feature 1..1587: note = Variant of terminal deoxynucleotidyltransferase
  source 1..1587: mol_type = other DNA
atgcaccatcatcatcatcatggcggtagcggcagccacggcattcgtaccatcgattcggacttcgggaagaaacgccagaaaaaaatggataaccacgatagttccgccatctatgaaatcaaatttcacgagtttgtgctgttcattctcgaagaaaaaatgggtgcgacgcgtcgtacttttctgacagatttagcccgcaagaaagggttccgcgtcgagaatgaactgtcagacagcgttacccacatcgtggcagaaaataattcacgctctgaagtattggcttggctgaaagaacacaagatggagaagaccaagcaattcgaactgctggatattagctggcttatcgaaagcatgaaagttggtaaaccggtggacaccaaggggaaataccagttggcggaatcgggtgagatgagtgcgaacccagatccgacagagggtcgtgaaaacgagctgcctcctactatgaagaccgtttctccgtatgcgtgtcaacgccgcaccaccctgaacaaccataatcaacgttttacggacgcactggaaattcttgcggaaaattacgagttcaaacgcaacgatgatactgcgctggaatttcgtcgtgctatctccgtgctgaaaagccttccgtttgaggtacgtagcctgaaagacacggaaggattgccctggatcggtgatgaagtcaaagggattatggaagaaatcatcgaggtcggtgaatcgctggaagtgcaggccgtgctcaatgatgagcgctatcaaagcttcaaacgctttaagagtgtctttggagtgggggtgaagacagcagacaagtggtaccgtatgggtctgcgcacgctcgaggatgttcgttccagcaagaccctgaagttgaccccgatgcagaaagcgggtctgtgctattatgaagatcttgctcgcggcgttacgaaagccgaagctgacgcgatttctctgctggttcaggatgcagtcgcaactttcgacccggatgcgctggtggagattgtcggtggatttcgtcgtgggaaagggcagggtcacgacgttgatctgcttatcacatctccgggagctgagaaagagcaagaagaccagctcctgcagaaagtgaccaatctgtggaagaaacaagggttgttgctgtacggtcgtctggaatggagtcagtttgaagatgggaaactcccatccggtaaggctgatgccctggaccaccacgcgaaatgctttctgatcctcaaactttatgatcataaagtggacaaaagcaaatgggaaatgccgacgggttcgaacatgggcgaggccaaaccgtggaaagcaattcgcgtagatctggttcgttgcccctacggcggttttgcgtttgcgttgttgggttggaccggaagccgcatgttccgccgtgatctgcgctggtacgccactgacgagaagaacatgatgctggacaatcatgcgctgtatgacctgaccaagaaaatctttctcaaagctaaatcggaagaggaaattttcgcacatctggggcttgaatacctggaaccgttcgaacgtaacgca

SEQ ID NO: 2112 - protein, 529 aa, synthetic construct
  REGION 1..529: note = Variant of terminal deoxynucleotidyltransferase
MHHHHHHGGSGSHGIRTIDSDFGKKRQKKMDNHDSSAIYEIKFHEFVLFILEEKMGATRRTFLTDLARKKGFRVENELSDSVTHIVAENNSRSEVLAWLKEHKMEKTKQFELLDISWLIESMKVGKPVDTKGKYQLAESGEMSANPDPTEGRENELPPTMKTVSPYACQRRTTLNNHNQRFTDALEILAENYEFKRNDDTALEFRRAISVLKSLPFEVRSLKDTEGLPWIGDEVKGIMEEIIEVGESLEVQAVLNDERYQSFKRFKSVFGVGVKTADKWYRMGLRTLEDVRSSKTLKLTPMQKAGLCYYEDLARGVTKAEADAISLLVQDAVATFDPDALVEIVGGFRRGKGQGHDVDLLITSPGAEKEQEDQLLQKVTNLWKKQGLLLYGRLEWSQFEDGKLPSGKADALDHHAKCFLILKLYDHKVDKSKWEMPTGSNMGEAKPWKAIRVDLVRCPYGGFAFALLGWTGSRMFRRDLRWYATDEKNMMLDNHALYDLTKKIFLKAKSEEEIFAHLGLEYLEPFERNA

SEQ ID NO: 2113 - DNA, 1587 bp, synthetic construct
  misc_feature 1..1587: note = Variant of terminal deoxynucleotidyltransferase
  source 1..1587: mol_type = other DNA
atgcaccatcatcatcatcatggcggtagcggcagccacggcattcgtaccatcgattcggacttcgggaagaaacgccagaaaaaaatggataaccacgatagttccgccatctatgaaatcaaatttcacgagtttgtgctgttcattctcgaagaaaaaatgggtgcgacgcgtcgtacttttctgacagatttagcccgcaagaaagggttccgcgtcgagaatgaactgtcagacagcgttacccacatcgtggcagaaaataattcacgctctgaagtattggcttggctgaaagaacacaagatggagaagaccaagcaattcgaactgctggatattagctggcttatcgaaagcatgaaagttggtaaaccggtggacaccaaggggaaataccagttggcggaatcgggtgagatgagtgcgaacccagatccgacagagggtcgtgaaaacgagctgcctcctactatgaagaccgtttctccgtatgcgtgtcaacgccgcaccaccctgaacaaccataatcaacgttttacggacgcactggaaattcttgcggaaaattacgagttcaaacgcaacgatgatactgcgctggaatttcgtcgtgctatctccgtgctgaaaagccttccgtttgaggtacgtagcctgaaagacacggaaggattgccctggatcggtgatgaagtcaaagggattatggaagaaatcatcgaggtcggtgaatcgctggaagtgcaggccgtgctcaatgatgagcgctatcaaagcttcaaacgctttaagagtgtctttggagtgggggtgaagacagcagacaagtggtaccgtatgggtctgcgcacgctcgaggatgttcgttccagcaagaccctgaagttgaccccgatgcagaaagcgggtctgtgctattatgaagatcttgctcgcggcgttacgaaagccgaagctgacgcgatttctctgctggttcaggatgcagtcgcaactttcgacccggatgcgctggtggagattgtcggtggatttcgtcgtgggaaacctcagggtcacgacgttgatctgcttatcacatctccgggagctgagaaagagcaagaagaccagctcctgcagaaagtgaccaatctgtggaagaaacaagggttgttgctgtacggtcgtctggaatggagtcagtttgaagatgggaaactcccatccggtaaggctgatgccctggaccaccacgcgaaatgctttctgatcctcaaactttatgatcataaagtggacaaaagcaaatgggaaatgccgacgggttcgaacatgggcgaggccaaaccgtggaaagcaattcgcgtagatctggttcgttgcccctacggcggttttgcgtttgcgttgttgggttggaccggaagccgcatgttccgccgtgatctgcgctggtacgccactgacgagaagaacatgatgctggacaatcatgcgctgtatgacctgaccaagaaaatctttctcaaagctaaaggggaagaggaaattttcgcacatctggggcttgaatacctggaaccgttcgaacgtaacgca

SEQ ID NO: 2114 - protein, 529 aa, synthetic construct
  REGION 1..529: note = Variant of terminal deoxynucleotidyltransferase
MHHHHHHGGSGSHGIRTIDSDFGKKRQKKMDNHDSSAIYEIKFHEFVLFILEEKMGATRRTFLTDLARKKGFRVENELSDSVTHIVAENNSRSEVLAWLKEHKMEKTKQFELLDISWLIESMKVGKPVDTKGKYQLAESGEMSANPDPTEGRENELPPTMKTVSPYACQRRTTLNNHNQRFTDALEILAENYEFKRNDDTALEFRRAISVLKSLPFEVRSLKDTEGLPWIGDEVKGIMEEIIEVGESLEVQAVLNDERYQSFKRFKSVFGVGVKTADKWYRMGLRTLEDVRSSKTLKLTPMQKAGLCYYEDLARGVTKAEADAISLLVQDAVATFDPDALVEIVGGFRRGKPQGHDVDLLITSPGAEKEQEDQLLQKVTNLWKKQGLLLYGRLEWSQFEDGKLPSGKADALDHHAKCFLILKLYDHKVDKSKWEMPTGSNMGEAKPWKAIRVDLVRCPYGGFAFALLGWTGSRMFRRDLRWYATDEKNMMLDNHALYDLTKKIFLKAKGEEEIFAHLGLEYLEPFERNA

SEQ ID NO: 2115 - DNA, 1587 bp, synthetic construct
  misc_feature 1..1587: note = Variant of terminal deoxynucleotidyltransferase
  source 1..1587: mol_type = other DNA
atgcaccatcatcatcatcatggcggtagcggcagccacggcattcgtaccatcgattcggacttcgggaagaaacgccagaaaaaaatggataaccacgatagttccgccatctatgaaatcaaatttcacgagtttgtgctgttcattctcgaagaaaaaatgggtgcgacgcgtcgtacttttctgacagatttagcccgcaagaaagggttccgcgtcgagaatgaactgtcagacagcgttacccacatcgtggcagaaaataattcacgctctgaagtattggcttggctgaaagaacacaagatggagaagaccaagcaattcgaactgctggatattagctggcttatcgaaagcatgaaagttggtaaaccggtggacaccaaggggaaataccagttggcggaatcgggtgagatgagtgcgaacccagatccgacagagggtcgtgaaaacgagctgcctcctactatgaagaccgtttctccgtatgcgtgtcaacgccgcaccaccctgaacaaccataatcaacgttttacggacgcactggaaattcttgcggaaaattacgagttcaaacgcaacgatgatactgcgctggaatttcgtcgtgctatctccgtgctgaaaagccttccgtttgaggtacgtagcctgaaagacacggaaggattgccctggatcggtgatgaagtcaaagggattatggaagaaatcatcgaggtcggtgaatcgctggaagtgcaggccgtgctcaatgatgagcgctatcaaagcttcaaacgctttaagagtgtctttggagtgggggtgaagacagcagacaagtggtaccgtatgggtctgcgcacgctcgaggatgttcgttccagcaagaccctgaagttgaccccgatgcagaaagcgggtctgtgctattatgaagatcttgctcgcggcgttacgaaagccgaagctgacgcgatttctctgctggttcaggatgcagtcgcaactttcgacccggatgcgctggtggagattgtcggtggatttcgtcgtgggaaacctcagggtcacgacgttgatctgcttatcacatctccgggagctgagaaagagcaagaagaccagctcctgcagaaagtgaccaatctgtggaagaaacaagggttgttgctgtacggtcgtctggaatggagtcagtttgaagatgggaaactcccatccggtaaggctgatgccggtgaccatttcgcgaaatgctttctgatcctcaaactttatgatcataaagtggacaaaagcaaatgggaaatgccgacgggttcgaacatgggcgaggccaaaccgtggaaagcaattcgcgtagatctggttcgttgcccctacggcggttttgcgtttgcgttgttgggttggaccggaagccgcatgttccgccgtgatctgcgctggtacgccactgacgagaagaacatgatgctggacaatcatgcgctgtatgacctgaccaagaaaatctttctcaaagctaaatcggaagaggaaattttcgcacatctggggcttgaatacctggaaccgttcgaacgtaacgca

SEQ ID NO: 2116 - protein, 529 aa, synthetic construct
  REGION 1..529: note = Variant of terminal deoxynucleotidyltransferase
MHHHHHHGGSGSHGIRTIDSDFGKKRQKKMDNHDSSAIYEIKFHEFVLFILEEKMGATRRTFLTDLARKKGFRVENELSDSVTHIVAENNSRSEVLAWLKEHKMEKTKQFELLDISWLIESMKVGKPVDTKGKYQLAESGEMSANPDPTEGRENELPPTMKTVSPYACQRRTTLNNHNQRFTDALEILAENYEFKRNDDTALEFRRAISVLKSLPFEVRSLKDTEGLPWIGDEVKGIMEEIIEVGESLEVQAVLNDERYQSFKRFKSVFGVGVKTADKWYRMGLRTLEDVRSSKTLKLTPMQKAGLCYYEDLARGVTKAEADAISLLVQDAVATFDPDALVEIVGGFRRGKPQGHDVDLLITSPGAEKEQEDQLLQKVTNLWKKQGLLLYGRLEWSQFEDGKLPSGKADAGDHFAKCFLILKLYDHKVDKSKWEMPTGSNMGEAKPWKAIRVDLVRCPYGGFAFALLGWTGSRMFRRDLRWYATDEKNMMLDNHALYDLTKKIFLKAKSEEEIFAHLGLEYLEPFERNA

SEQ ID NO: 2117 - DNA, 1587 bp, synthetic construct
  misc_feature 1..1587: note = Variant of terminal deoxynucleotidyltransferase
  source 1..1587: mol_type = other DNA
atgcaccatcatcatcatcatggcggtagcggcagccacggcattcgtaccatcgattcggacttcgggaagaaacgccagaaaaaaatggataaccacgatagttccgccatctatgaaatcaaatttcacgagtttgtgctgttcattctcgaagaaaaaatgggtgcgacgcgtcgtacttttctgacagatttagcccgcaagaaagggttccgcgtcgagaatgaactgtcagacagcgttacccacatcgtggcagaaaataattcacgctctgaagtattggcttggctgaaagaacacaagatggagaagaccaagcaattcgaactgctggatattagctggcttatcgaaagcatgaaagttggtaaaccggtggacaccaaggggaaataccagttggcggaatcgggtgagatgagtgcgaacccagatccgacagagggtcgtgaaaacgagctgcctcctactatgaagaccgtttctccgtatgcgtgtcaacgccgcaccaccctgaacaaccataatcaacgttttacggacgcatgtgaaattcttgcggaaaattacgagttcaaacgcaacgatgatactgcgctggaatttcgtcgtgctatctccgtgctgaaaagccttccgtttgaggtacgtagcctgaaagacacggaaggattgccctggatcggtgatgaagtcaaagggattatggaagaaatcatcgaggtcggtgaatcgctggaagtgcaggccgtgctcaatgatgagcgctatcaaagcttcaaacgctttaagagtgtctttggagtgggggtgaagacagcagacaagtggtaccgtatgggtctgcgcacgctcgaggatgttcgttccagcaagaccctgaagttgaccccgatgcagaaagcgggtctgtgctattatgaagatcttgctcgcggcgttacgaaagccgaagctgacgcgatttctctgctggttcaggatgcagtcgcaactttcgacccggatgcgctggtggagattgtcggtggatttcgtcgtgggaaacctcagggtcacgacgttgatctgcttatcacatctccgggagctgagaaagagcaagaagaccagctcctgcagaaagtgaccaatctgtggaagaaacaagggttgttgctgtacggtcgtctggaatggagtcagtttgaagatgggaaactcccatccggtaaggctgatgccctggaccaccacgcgaaatgctttctgatcctcaaactttatgatcataaagtggacaaaagcaaatgggaaatgccgacgggttcgaacatgggcgaggccaaaccgtggaaagcaattcgcgtagatctggttcgttgcccctacggcggttttgcgtttgcgttgttgggttggaccggaagccgcatgttccgccgtgatctgcgctggtacgccactgacgagaagaacatgatgctggacaatcatgcgctgtatgacctgaccaagaaaatctttctcaaagctaaatcggaagaggaaattttcgcacatctggggcttgaatacctggaaccgttcgaacgtaacgca

SEQ ID NO: 2118 - protein, 529 aa, synthetic construct
  REGION 1..529: note = Variant of terminal deoxynucleotidyltransferase
MHHHHHHGGSGSHGIRTIDSDFGKKRQKKMDNHDSSAIYEIKFHEFVLFILEEKMGATRRTFLTDLARKKGFRVENELSDSVTHIVAENNSRSEVLAWLKEHKMEKTKQFELLDISWLIESMKVGKPVDTKGKYQLAESGEMSANPDPTEGRENELPPTMKTVSPYACQRRTTLNNHNQRFTDACEILAENYEFKRNDDTALEFRRAISVLKSLPFEVRSLKDTEGLPWIGDEVKGIMEEIIEVGESLEVQAVLNDERYQSFKRFKSVFGVGVKTADKWYRMGLRTLEDVRSSKTLKLTPMQKAGLCYYEDLARGVTKAEADAISLLVQDAVATFDPDALVEIVGGFRRGKPQGHDVDLLITSPGAEKEQEDQLLQKVTNLWKKQGLLLYGRLEWSQFEDGKLPSGKADALDHHAKCFLILKLYDHKVDKSKWEMPTGSNMGEAKPWKAIRVDLVRCPYGGFAFALLGWTGSRMFRRDLRWYATDEKNMMLDNHALYDLTKKIFLKAKSEEEIFAHLGLEYLEPFERNA

SEQ ID NO: 2119 - DNA, 1587 bp, synthetic construct
  misc_feature 1..1587: note = Variant of terminal deoxynucleotidyltransferase
  source 1..1587: mol_type = other DNA
atgcaccatcatcatcatcatggcggtagcggcagccacggcattcgtaccatcgattcggacttcgggaagaaacgccagaaaaaaatggataaccacgatagttccgccatctatgaaatcaaatttcacgagtttgtgctgttcattctcgaagaaaaaatgggtgcgacgcgtcgtacttttctgacagatttagcccgcaagaaagggttccgcgtcgagaatgaactgtcagacagcgttacccacatcgtggcagaaaataattcacgctctgaagtattggcttggctgaaagaacacaagatggagaagaccaagcaattcgaactgctggatattagctggcttatcgaaagcatgaaagttggtaaaccggtggacaccaaggggaaataccagttggcggaatcgggtgagatgagtgcgaacccagatccgacagagggtcgtgaaaacgagctgcctcctactatgaagaccgtttctccgtatgcgtgtcaacgccgcaccaccctgaacaaccataatcaacgttttacggacgcactggaaattcttgcggaaaattacgagttcaaacgcaacgatgatactgcgctggaatttcgtcgtgctatctccgtgctgaaaagccttccgtttgaggtacgtagcctgaaagacacggaaggattgccctggatcggtgatgaagtcaaagggattatggaagaaatcatcgaggtcggtgaatcgctggaagtgcaggccgtgctcaatgatgagcgctatcaaagcttcaaacgctttaagagtgtctttggagtgggggtgccgacagcagacaagtggtaccgtatgggtctgcgcacgctcgaggatgttcgttccagcaagaccctgaagttgaccccgatgcagaaagcgggtctgtgctattatgaagatcttgctcgcggcgttacgaaagccgaagctgacgcgatttctctgctggttcaggatgcagtcgcaactttcgacccggatgcgctggtggagattgtcggtggatttcgtcgtgggaaacctcagggtcacgacgttgatctgcttatcacatctccgggagctgagaaagagcaagaagaccagctcctgcagaaagtgaccaatctgtggaagaaacaagggttgttgctgtacggtcgtctggaatggagtcagtttgaagatgggaaactcccatccggtaaggctgatgccctggaccaccacgcgaaatgctttctgatcctcaaactttatgatcataaagtggacaaaagcaaatgggaaatgccgacgggttcgaacatgggcgaggccaaaccgtggaaagcaattcgcgtagatctggttcgttgcccctacggcggttttgcgtttgcgttgttgggttggaccggaagccgcatgttccgccgtgatctgcgctggtacgccactgacgagaagaacatgatgctggacaatcatgcgctgtatgacctgaccaagaaaatctttctcaaagctaaatcggaagaggaaattttcgcacatctggggcttgaatacctggaaccgttcgaacgtaacgca

SEQ ID NO: 2120 - protein, 529 aa, synthetic construct
  REGION 1..529: note = Variant of terminal deoxynucleotidyltransferase
MHHHHHHGGSGSHGIRTIDSDFGKKRQKKMDNHDSSAIYEIKFHEFVLFILEEKMGATRRTFLTDLARKKGFRVENELSDSVTHIVAENNSRSEVLAWLKEHKMEKTKQFELLDISWLIESMKVGKPVDTKGKYQLAESGEMSANPDPTEGRENELPPTMKTVSPYACQRRTTLNNHNQRFTDALEILAENYEFKRNDDTALEFRRAISVLKSLPFEVRSLKDTEGLPWIGDEVKGIMEEIIEVGESLEVQAVLNDERYQSFKRFKSVFGVGVPTADKWYRMGLRTLEDVRSSKTLKLTPMQKAGLCYYEDLARGVTKAEADAISLLVQDAVATFDPDALVEIVGGFRRGKPQGHDVDLLITSPGAEKEQEDQLLQKVTNLWKKQGLLLYGRLEWSQFEDGKLPSGKADALDHHAKCFLILKLYDHKVDKSKWEMPTGSNMGEAKPWKAIRVDLVRCPYGGFAFALLGWTGSRMFRRDLRWYATDEKNMMLDNHALYDLTKKIFLKAKSEEEIFAHLGLEYLEPFERNA

SEQ ID NO: 2121 - DNA, 1587 bp, synthetic construct
  misc_feature 1..1587: note = Variant of terminal deoxynucleotidyltransferase
  source 1..1587: mol_type = other DNA
atgcaccatcatcatcatcatggcggtagcggcagccacggcattcgtaccatcgattcggacttcgggaagaaacgccagaaaaaaatggataaccacgatagttccgccatctatgaaatcaaatttcacgagtttgtgctgttcattctcgaagaaaaaatgggtgcgacgcgtcgtacttttctgacagatttagcccgcaagaaagggttccgcgtcgagaatgaactgtcagacagcgttacccacatcgtggcagaaaataattcacgctctgaagtattggcttggctgaaagaacacaagatggagaagaccaagcaattcgaactgctggatattagctggcttatcgaaagcatgaaagttggtaaaccggtggacaccaaggggaaataccagttggcggaatcgggtgagatgagtgcgaacccagatccgacagagggtcgtgaaaacgagctgcctcctactatgaagaccgtttctccgtatgcgtgtcaacgccgcaccaccctgaacaaccataatcaacgttttacggacgcactggaaattcttgcggaaaattacgagttcaaacgcaacgatgatactgcgctggaatttcgtcgtgctatctccgtgctgaaaagccttccgtttgaggtacgtagcctgaaagacacggaaggattgccctggatcggtgatgaagtcaaagggattatggaagaaatcatcgaggtcggtgaatcgctggaagtgcaggccgtgctcaatgatgagcgctatcaaagcttcaaacgctttaagagtgtctttggagtgggggtgaagacagcagacaagtggtaccgtatgggtctgcgcacgctcgaggatgttcgttccagcaagaccctgaagttgaccccgatgcagaaagcgggtctgtgctattatgaagatcttgctcgcggcgttacgaaagccgaagctgacgcgatttctctgctggttcaggatgcagtcgcaactttcgacccggatgcgctggtggagattgtcggtggatttcgtcgtgggaaacctcagggtcacgacgttgatctgcttatcacatctccgggagctgagaaagagcaagaagaccagctcctgcagaaacttaccaatctgtggaagaaacaagggttgttgctgtacggtcgtctggaatggagtcagtttgaagatgggaaactcccatccggtaaggctgatgccctggaccaccacgcgaaatgctttctgatcctcaaactttatgatcataaagtggacaaaagcaaatgggaaatgccgacgggttcgaacatgggcgaggccaaaccgtggaaagcaattcgcgtagatctggttcgttgcccctacggcggttttgcgtttgcgttgttgggttggaccggaagccgcatgttccgccgtgatctgcgctggtacgccactgacgagaagaacatgatgctggacaatcatgcgctgtatgacctgaccaagaaaatctttctcaaagctaaatcggaagaggaaattttcgcacatctggggcttgaatacctggaaccgttcgaacgtaacgca

SEQ ID NO: 2122 - protein, 529 aa, synthetic construct
  REGION 1..529: note = Variant of terminal deoxynucleotidyltransferase
MHHHHHHGGSGSHGIRTIDSDFGKKRQKKMDNHDSSAIYEIKFHEFVLFILEEKMGATRRTFLTDLARKKGFRVENELSDSVTHIVAENNSRSEVLAWLKEHKMEKTKQFELLDISWLIESMKVGKPVDTKGKYQLAESGEMSANPDPTEGRENELPPTMKTVSPYACQRRTTLNNHNQRFTDALEILAENYEFKRNDDTALEFRRAISVLKSLPFEVRSLKDTEGLPWIGDEVKGIMEEIIEVGESLEVQAVLNDERYQSFKRFKSVFGVGVKTADKWYRMGLRTLEDVRSSKTLKLTPMQKAGLCYYEDLARGVTKAEADAISLLVQDAVATFDPDALVEIVGGFRRGKPQGHDVDLLITSPGAEKEQEDQLLQKLTNLWKKQGLLLYGRLEWSQFEDGKLPSGKADALDHHAKCFLILKLYDHKVDKSKWEMPTGSNMGEAKPWKAIRVDLVRCPYGGFAFALLGWTGSRMFRRDLRWYATDEKNMMLDNHALYDLTKKIFLKAKSEEEIFAHLGLEYLEPFERNA

SEQ ID NO: 2123 - DNA, 1587 bp, synthetic construct
  misc_feature 1..1587: note = Variant of terminal deoxynucleotidyltransferase
  source 1..1587: mol_type = other DNA
atgcaccatcatcatcatcatggcggtagcggcagccacggcattcgtaccatcgattcggacttcgggaagaaacgccagaaaaaaatggataaccacgatagttccgccatctatgaaatcaaatttcacgagtttgtgctgttcattctcgaagaaaaaatgggtgcgacgcgtcgtacttttctgacagatttagcccgcaagaaagggttccgcgtcgagaatgaactgtcagacagcgttacccacatcgtggcagaaaataattcacgctctgaagtattggcttggctgaaagaacacaagatggagaagaccaagcaattcgaactgctggatattagctggcttatcgaaagcatgaaagttggtaaaccggtggacaccaaggggaaataccagttggcggaatcgggtgagatgagtgcgaacccagatccgacagagggtcgtgaaaacgagctgcctcctactatgaagaccgtttctccgtatgcgtgtcaacgccgcaccaccctgaacaaccataatcaacgttttacggacgcactggaaattcttgcggaaaattacgagttcaaacgcaacgatgatactgcgctggaatttcgtcgtgctatctccgtgctgaaaagccttccgtttgaggtacgtagcctgaaagacacggaaggattgccctggatcggtgatgaagtcaaagggattatggaagaaatcatcgaggtcggtgaatcgctggaagtgcaggccgtgctcaatgatgagcgctatcaaagcttcaaacgctttaagagtgtctttggagtgggggtgactacagcagacaagtggtaccgtatgggtctgcgcacgctcgaggatgttcgttccagcaagaccctgaagttgaccccgatgcagaaagcgggtctgtgctattatgaagatcttgctcgcggcgttacgaaagccgaagctgacgcgatttctctgctggttcaggatgcagtcgcaactttcgacccggatgcgctggtggagattgtcggtggatttcgtcgtgggaaacctcagggtcacgacgttgatctgcttatcacatctccgggagctgagaaagagcaagaagaccagctcctgcagaaagtgaccaatctgtggaagaaacaagggttgttgctgtacggtcgtctggaatggagtcagtttgaagatgggaaactcccatccggtaaggctgatgccctggaccaccacgcgaaatgctttctgatcctcaaactttatgatcataaagtggacaaaagcaaatgggaaatgccgacgggttcgaacatgggcgaggccaaaccgtggaaagcaattcgcgtagatctggttcgttgcccctacggcggttttgcgtttgcgttgttgggttggaccggaagccgcatgttccgccgtgatctgcgctggtacgccactgacgagaagaacatgatgctggacaatcatgcgctgtatgacctgaccaagaaaatctttctcaaagctaaatcggaagaggaaattttcgcacatctggggcttgaatacctggaaccgttcgaacgtaacgca

SEQ ID NO: 2124 - protein, 529 aa, synthetic construct
  REGION 1..529: note = Variant of terminal deoxynucleotidyltransferase
MHHHHHHGGSGSHGIRTIDSDFGKKRQKKMDNHDSSAIYEIKFHEFVLFILEEKMGATRRTFLTDLARKKGFRVENELSDSVTHIVAENNSRSEVLAWLKEHKMEKTKQFELLDISWLIESMKVGKPVDTKGKYQLAESGEMSANPDPTEGRENELPPTMKTVSPYACQRRTTLNNHNQRFTDALEILAENYEFKRNDDTALEFRRAISVLKSLPFEVRSLKDTEGLPWIGDEVKGIMEEIIEVGESLEVQAVLNDERYQSFKRFKSVFGVGVTTADKWYRMGLRTLEDVRSSKTLKLTPMQKAGLCYYEDLARGVTKAEADAISLLVQDAVATFDPDALVEIVGGFRRGKPQGHDVDLLITSPGAEKEQEDQLLQKVTNLWKKQGLLLYGRLEWSQFEDGKLPSGKADALDHHAKCFLILKLYDHKVDKSKWEMPTGSNMGEAKPWKAIRVDLVRCPYGGFAFALLGWTGSRMFRRDLRWYATDEKNMMLDNHALYDLTKKIFLKAKSEEEIFAHLGLEYLEPFERNA

SEQ ID NO: 2125 - DNA, 1587 bp, synthetic construct
  misc_feature 1..1587: note = Variant of terminal deoxynucleotidyltransferase
  source 1..1587: mol_type = other DNA
atgcaccatcatcatcatcatggcggtagcggcagccacggcattcgtaccatcgattcggacttcgggaagaaacgccagaaaaaaatggataaccacgatagttccgccatctatgaaatcaaatttcacgagtttgtgctgttcattctcgaagaaaaaatgggtgcgacgcgtcgtacttttctgacagatttagcccgcaagaaagggttccgcgtcgagaatgaactgtcagacagcgttacccacatcgtggcagaaaataattcacgctctgaagtattggcttggctgaaagaacacaagatggagaagaccaagcaattcgaactgctggatattagctggcttatcgaaagcatgaaagttggtaaaccggtggacaccaaggggaaataccagttggcggaatcgggtgagatgagtgcgaacccagatccgacagagggtcgtgaaaacgagctgcctcctactatgaagaccgtttctccgtatgcgtgtcaacgccgcaccaccctgaacaaccataatcaacgttttacggacgcactggaaattcttgcggaaaattacgagttcaaacgcaacgatgatactgcgctggaatttcgtcgtgctatctccgtgctgaaaagccttccgtttgaggtacgtagcctgaaagacacggaaggattgccctggatcggtgatgaagtcaaagggattatggaagaaatcatcgaggtcggtgaatcgctggaagtgcaggccgtgctcaatgatgagggttatcaaagcttcaaacgctttaagagtgtctttggagtgggggtgaagacagcagacaagtggtaccgtatgggtctgcgcacgctcgaggatgttcgttccagcaagaccctgaagttgaccccgatgcagaaagcgggtctgtgctattatgaagatcttgctcgcggcgttacgaaagccgaagctgacgcgatttctctgctggttcaggatgcagtcgcaactttcgacccggatgcgctggtggagattgtcggtggatttcgtcgtgggaaacctcagggtcacgacgttgatctgcttatcacatctccgggagctgagaaagagcaagaagaccagctcctgcagaaagtgaccaatctgtggaagaaacaagggttgttgctgtacggtcgtctggaatggagtcagtttgaagatgggaaactcccatccggtaaggctgatgccctggaccaccacgcgaaatgctttctgatcctcaaactttatgatcataaagtggacaaaagcaaatgggaaatgccgacgggttcgaacatgggcgaggccaaaccgtggaaagcaattcgcgtagatctggttcgttgcccctacggcggttttgcgtttgcgttgttgggttggaccggaagccgcatgttccgccgtgatctgcgctggtacgccactgacgagaagaacatgatgctggacaatcatgcgctgtatgacctgaccaagaaaatctttctcaaagctaaatcggaagaggaaattttcgcacatctggggcttgaatacctggaaccgttcgaacgtaacgca

SEQ ID NO: 2126 - protein, 529 aa, synthetic construct
  REGION 1..529: note = Variant of terminal deoxynucleotidyltransferase
MHHHHHHGGSGSHGIRTIDSDFGKKRQKKMDNHDSSAIYEIKFHEFVLFILEEKMGATRRTFLTDLARKKGFRVENELSDSVTHIVAENNSRSEVLAWLKEHKMEKTKQFELLDISWLIESMKVGKPVDTKGKYQLAESGEMSANPDPTEGRENELPPTMKTVSPYACQRRTTLNNHNQRFTDALEILAENYEFKRNDDTALEFRRAISVLKSLPFEVRSLKDTEGLPWIGDEVKGIMEEIIEVGESLEVQAVLNDEGYQSFKRFKSVFGVGVKTADKWYRMGLRTLEDVRSSKTLKLTPMQKAGLCYYEDLARGVTKAEADAISLLVQDAVATFDPDALVEIVGGFRRGKPQGHDVDLLITSPGAEKEQEDQLLQKVTNLWKKQGLLLYGRLEWSQFEDGKLPSGKADALDHHAKCFLILKLYDHKVDKSKWEMPTGSNMGEAKPWKAIRVDLVRCPYGGFAFALLGWTGSRMFRRDLRWYATDEKNMMLDNHALYDLTKKIFLKAKSEEEIFAHLGLEYLEPFERNA

SEQ ID NO: 2127 - DNA, 1587 bp, synthetic construct
  misc_feature 1..1587: note = Variant of terminal deoxynucleotidyltransferase
  source 1..1587: mol_type = other DNA
atgcaccatcatcatcatcatggcggtagcggcagccacggcattcgtaccatcgattcggacttcgggaagaaacgccagaaaaaaatggataaccacgatagttccgccatctatgaaatcaaatttcacgagtttgtgctgttcattctcgaagaaaaaatgggtgcgacgcgtcgtacttttctgacagatttagcccgcaagaaagggttccgcgtcgagaatgaactgtcagacagcgttacccacatcgtggcagaaaataattcacgctctgaagtattggcttggctgaaagaacacaagatggagaagaccaagcaattcgaactgctggatattagctggcttatcgaaagcatgaaagttggtaaaccggtggacaccaaggggaaataccagttggcggaatcgggtgagatgagtgcgaacccagatccgacagagggtcgtgaaaacgagctgcctcctactatgaagaccgtttctccgtatgcgtgtcaacgccgcaccaccctgaacaaccataatcaacgttttacggacgcactggaaattcttgcggaaaattacgagttcaaacgcaacgatgatactgcgctggaatttcgtcgtgctatctccgtgctgaaaagccttccgtttgaggtacgtagcctgaaagacacggaaggattgccctggatcggtgatgaagtcaaagggattatggaagaaatcatcgaggtcggtgaatcgctggaagtgcaggccgtgctcaatgatgagctgtatcaaagcttcaaacgctttaagagtgtctttggagtgggggtgaagacagcagacaagtggtaccgtatgggtctgcgcacgctcgaggatgttcgttccagcaagaccctgaagttgaccccgatgcagaaagcgggtctgtgctattatgaagatcttgctcgcggcgttacgaaagccgaagctgacgcgatttctctgctggttcaggatgcagtcgcaactttcgacccggatgcgctggtggagattgtcggtggatttcgtcgtgggaaacctcagggtcacgacgttgatctgcttatcacatctccgggagctgagaaagagcaagaagaccagctcctgcagaaagtgaccaatctgtggaagaaacaagggttgttgctgtacggtcgtctggaatggagtcagtttgaagatgggaaactcccatccggtaaggctgatgccctggaccaccacgcgaaatgctttctgatcctcaaactttatgatcataaagtggacaaaagcaaatgggaaatgccgacgggttcgaacatgggcgaggccaaaccgtggaaagcaattcgcgtagatctggttcgttgcccctacggcggttttgcgtttgcgttgttgggttggaccggaagccgcatgttccgccgtgatctgcgctggtacgccactgacgagaagaacatgatgctggacaatcatgcgctgtatgacctgaccaagaaaatctttctcaaagctaaatcggaagaggaaattttcgcacatctggggcttgaatacctggaaccgttcgaacgtaacgca

SEQ ID NO: 2128 - protein, 529 aa, synthetic construct
  REGION 1..529: note = Variant of terminal deoxynucleotidyltransferase
MHHHHHHGGSGSHGIRTIDSDFGKKRQKKMDNHDSSAIYEIKFHEFVLFILEEKMGATRRTFLTDLARKKGFRVENELSDSVTHIVAENNSRSEVLAWLKEHKMEKTKQFELLDISWLIESMKVGKPVDTKGKYQLAESGEMSANPDPTEGRENELPPTMKTVSPYACQRRTTLNNHNQRFTDALEILAENYEFKRNDDTALEFRRAISVLKSLPFEVRSLKDTEGLPWIGDEVKGIMEEIIEVGESLEVQAVLNDELYQSFKRFKSVFGVGVKTADKWYRMGLRTLEDVRSSKTLKLTPMQKAGLCYYEDLARGVTKAEADAISLLVQDAVATFDPDALVEIVGGFRRGKPQGHDVDLLITSPGAEKEQEDQLLQKVTNLWKKQGLLLYGRLEWSQFEDGKLPSGKADALDHHAKCFLILKLYDHKVDKSKWEMPTGSNMGEAKPWKAIRVDLVRCPYGGFAFALLGWTGSRMFRRDLRWYATDEKNMMLDNHALYDLTKKIFLKAKSEEEIFAHLGLEYLEPFERNA

SEQ ID NO: 2129 - DNA, 1587 bp, synthetic construct
  misc_feature 1..1587: note = Variant of terminal deoxynucleotidyltransferase
  source 1..1587: mol_type = other DNA
atgcaccatcatcatcatcatggcggtagcggcagccacggcattcgtaccatcgattcggacttcgggaagaaacgccagaaaaaaatggataaccacgatagttccgccatctatgaaatcaaatttcacgagtttgtgctgttcattctcgaagaaaaaatgggtgcgacgcgtcgtacttttctgacagatttagcccgcaagaaagggttccgcgtcgagaatgaactgtcagacagcgttacccacatcgtggcagaaaataattcacgctctgaagtattggcttggctgaaagaacacaagatggagaagaccaagcaattcgaactgctggatattagctggcttatcgaaagcatgaaagttggtaaaccggtggacaccaaggggaaataccagttggcggaatcgggtgagatgagtgcgaacccagatccgacagagggtcgtgaaaacgagctgcctcctactatgaagaccgtttctccgtatgcgtgtcaacgccgcaccaccctgaacaaccataatcaacgttttacggacgcactggaaattcttgcggaaaattacgagttcaaacgcaacgatgatactgcgctggaatttcgtcgtgctatctccgtgctgaaaagccttccgtttgaggtacgtagcctgaaagacacggaaggattgccctggatcggtgatgaagtcaaagggattatggaagaaatcatcgaggtcggtgaatcgctggaagtgcaggccgtgctcaatgatgagcgctatcaaagcttcagtcgctttaagagtgtctttggagtgggggtgaagacagcagacaagtggtaccgtatgggtctgcgcacgctcgaggatgttcgttccagcaagaccctgaagttgaccccgatgcagaaagcgggtctgtgctattatgaagatcttgctcgcggcgttacgaaagccgaagctgacgcgatttctctgctggttcaggatgcagtcgcaactttcgacccggatgcgctggtggagattgtcggtggatttcgtcgtgggaaacctcagggtcacgacgttgatctgcttatcacatctccgggagctgagaaagagcaagaagaccagctcctgcagaaagtgaccaatctgtggaagaaacaagggttgttgctgtacggtcgtctggaatggagtcagtttgaagatgggaaactcccatccggtaaggctgatgccctggaccaccacgcgaaatgctttctgatcctcaaactttatgatcataaagtggacaaaagcaaatgggaaatgccgacgggttcgaacatgggcgaggccaaaccgtggaaagcaattcgcgtagatctggttcgttgcccctacggcggttttgcgtttgcgttgttgggttggaccggaagccgcatgttccgccgtgatctgcgctggtacgccactgacgagaagaacatgatgctggacaatcatgcgctgtatgacctgaccaagaaaatctttctcaaagctaaatcggaagaggaaattttcgcacatctggggcttgaatacctggaaccgttcgaacgtaacgca

SEQ ID NO: 2130 - protein, 529 aa, synthetic construct
  REGION 1..529: note = Variant of terminal deoxynucleotidyltransferase
MHHHHHHGGSGSHGIRTIDSDFGKKRQKKMDNHDSSAIYEIKFHEFVLFILEEKMGATRRTFLTDLARKKGFRVENELSDSVTHIVAENNSRSEVLAWLKEHKMEKTKQFELLDISWLIESMKVGKPVDTKGKYQLAESGEMSANPDPTEGRENELPPTMKTVSPYACQRRTTLNNHNQRFTDALEILAENYEFKRNDDTALEFRRAISVLKSLPFEVRSLKDTEGLPWIGDEVKGIMEEIIEVGESLEVQAVLNDERYQSFSRFKSVFGVGVKTADKWYRMGLRTLEDVRSSKTLKLTPMQKAGLCYYEDLARGVTKAEADAISLLVQDAVATFDPDALVEIVGGFRRGKPQGHDVDLLITSPGAEKEQEDQLLQKVTNLWKKQGLLLYGRLEWSQFEDGKLPSGKADALDHHAKCFLILKLYDHKVDKSKWEMPTGSNMGEAKPWKAIRVDLVRCPYGGFAFALLGWTGSRMFRRDLRWYATDEKNMMLDNHALYDLTKKIFLKAKSEEEIFAHLGLEYLEPFERNA

SEQ ID NO: 2131 - DNA, 1587 bp, synthetic construct
  misc_feature 1..1587: note = Variant of terminal deoxynucleotidyltransferase
  source 1..1587: mol_type = other DNA
atgcaccatcatcatcatcatggcggtagcggcagccacggcattcgtaccatcgattcggacttcgggaagaaacgccagaaaaaaatggataaccacgatagttccgccatctatgaaatcaaatttcacgagtttgtgctgttcattctcgaagaaaaaatgggtgcgacgcgtcgtacttttctgacagatttagcccgcaagaaagggttccgcgtcgagaatgaactgtcagacagcgttacccacatcgtggcagaaaataattcacgctctgaagtattggcttggctgaaagaacacaagatggagaagaccaagcaattcgaactgctggatattagctggcttatcgaaagcatgaaagttggtaaaccggtggacaccaaggggaaataccagttggcggaatcgggtgagatgagtgcgaacccagatccgacagagggtcgtgaaaacgagctgcctcctactatgaagaccgtttctccgtatgcgtgtcaacgccgcaccaccctgaacaaccataatcaacgttttacggacgcactggaaattcttgcggaaaattacgaggcgaaacgcaacgatgatactgcgctggaatttcgtcgtgctatctccgtgctgaaaagccttccgtttgaggtacgtagcctgaaagacacggaaggattgccctggatcggtgatgaagtcaaagggattatggaagaaatcatcgaggtcggtgaatcgctggaagtgcaggccgtgctcaatgatgagcgctatcaaagcttcaaacgctttaagagtgtctttggagtgggggtgaagacagcagacaagtggtaccgtatgggtctgcgcacgctcgaggatgttcgttccagcaagaccctgaagttgaccccgatgcagaaagcgggtctgtgctattatgaagatcttgctcgcggcgttacgaaagccgaagctgacgcgatttctctgctggttcaggatgcagtcgcaactttcgacccggatgcgctggtggagattgtcggtggatttcgtcgtgggaaacctcagggtcacgacgttgatctgcttatcacatctccgggagctgagaaagagcaagaagaccagctcctgcagaaagtgaccaatctgtggaagaaacaagggttgttgctgtacggtcgtctggaatggagtcagtttgaagatgggaaactcccatccggtaaggctgatgccctggaccaccacgcgaaatgctttctgatcctcaaactttatgatcataaagtggacaaaagcaaatgggaaatgccgacgggttcgaacatgggcgaggccaaaccgtggaaagcaattcgcgtagatctggttcgttgcccctacggcggttttgcgtttgcgttgttgggttggaccggaagccgcatgttccgccgtgatctgcgctggtacgccactgacgagaagaacatgatgctggacaatcatgcgctgtatgacctgaccaagaaaatctttctcaaagctaaatcggaagaggaaattttcgcacatctggggcttgaatacctggaaccgttcgaacgtaacgca

SEQ ID NO: 2132 - protein, 529 aa, synthetic construct
  REGION 1..529: note = Variant of terminal deoxynucleotidyltransferase
MHHHHHHGGSGSHGIRTIDSDFGKKRQKKMDNHDSSAIYEIKFHEFVLFILEEKMGATRRTFLTDLARKKGFRVENELSDSVTHIVAENNSRSEVLAWLKEHKMEKTKQFELLDISWLIESMKVGKPVDTKGKYQLAESGEMSANPDPTEGRENELPPTMKTVSPYACQRRTTLNNHNQRFTDALEILAENYEAKRNDDTALEFRRAISVLKSLPFEVRSLKDTEGLPWIGDEVKGIMEEIIEVGESLEVQAVLNDERYQSFKRFKSVFGVGVKTADKWYRMGLRTLEDVRSSKTLKLTPMQKAGLCYYEDLARGVTKAEADAISLLVQDAVATFDPDALVEIVGGFRRGKPQGHDVDLLITSPGAEKEQEDQLLQKVTNLWKKQGLLLYGRLEWSQFEDGKLPSGKADALDHHAKCFLILKLYDHKVDKSKWEMPTGSNMGEAKPWKAIRVDLVRCPYGGFAFALLGWTGSRMFRRDLRWYATDEKNMMLDNHALYDLTKKIFLKAKSEEEIFAHLGLEYLEPFERNA

SEQ ID NO: 2133 - DNA, 1587 bp, synthetic construct
  misc_feature 1..1587: note = Variant of terminal deoxynucleotidyltransferase
  source 1..1587: mol_type = other DNA
atgcaccatcatcatcatcatggcggtagcggcagccacggcattcgtaccatcgattcggacttcgggaagaaacgccagaaaaaaatggataaccacgatagttccgccatctatgaaatcaaatttcacgagtttgtgctgttcattctcgaagaaaaaatgggtgcgacgcgtcgtacttttctgacagatttagcccgcaagaaagggttccgcgtcgagaatgaactgtcagacagcgttacccacatcgtggcagaaaataattcacgctctgaagtattggcttggctgaaagaacacaagatggagaagaccaagcaattcgaactgctggatattagctggcttatcgaaagcatgaaagttggtaaaccggtggacaccaaggggaaataccagttggcggaatcgggtgagatgagtgcgaacccagatccgacagagggtcgtgaaaacgagctgcctcctactatgaagaccgtttctccgtatgcgtgtcaacgccgcaccaccctgaacaaccataatcaacgttttacggacgcactggaaattcttgcggaaaattacgagttcaaacgcaacgatgatactgcgctggaatttcgtcgtgctatctccgtgctgaaaagccttccgtttgaggtacgtagcctgaaagacacggaaggattgccctggatcggtgatgaagtcaaagggattatggaagaaatcatcgaggtcggtgaatcgctggaagtgcaggccgtgctcaatgatgaggagtatcaaagcttcaaacgctttaagagtgtctttggagtgggggtgaagacagcagacaagtggtaccgtatgggtctgcgcacgctcgaggatgttcgttccagcaagaccctgaagttgaccccgatgcagaaagcgggtctgtgctattatgaagatcttgctcgcggcgttacgaaagccgaagctgacgcgatttctctgctggttcaggatgcagtcgcaactttcgacccggatgcgctggtggagattgtcggtggatttcgtcgtgggaaacctcagggtcacgacgttgatctgcttatcacatctccgggagctgagaaagagcaagaagaccagctcctgcagaaagtgaccaatctgtggaagaaacaagggttgttgctgtacggtcgtctggaatggagtcagtttgaagatgggaaactcccatccggtaaggctgatgccctggaccaccacgcgaaatgctttctgatcctcaaactttatgatcataaagtggacaaaagcaaatgggaaatgccgacgggttcgaacatgggcgaggccaaaccgtggaaagcaattcgcgtagatctggttcgttgcccctacggcggttttgcgtttgcgttgttgggttggaccggaagccgcatgttccgccgtgatctgcgctggtacgccactgacgagaagaacatgatgctggacaatcatgcgctgtatgacctgaccaagaaaatctttctcaaagctaaatcggaagaggaaattttcgcacatctggggcttgaatacctggaaccgttcgaacgtaacgca

SEQ ID NO: 2134 - protein, 529 aa, synthetic construct
  REGION 1..529: note = Variant of terminal deoxynucleotidyltransferase
MHHHHHHGGSGSHGIRTIDSDFGKKRQKKMDNHDSSAIYEIKFHEFVLFILEEKMGATRRTFLTDLARKKGFRVENELSDSVTHIVAENNSRSEVLAWLKEHKMEKTKQFELLDISWLIESMKVGKPVDTKGKYQLAESGEMSANPDPTEGRENELPPTMKTVSPYACQRRTTLNNHNQRFTDALEILAENYEFKRNDDTALEFRRAISVLKSLPFEVRSLKDTEGLPWIGDEVKGIMEEIIEVGESLEVQAVLNDEEYQSFKRFKSVFGVGVKTADKWYRMGLRTLEDVRSSKTLKLTPMQKAGLCYYEDLARGVTKAEADAISLLVQDAVATFDPDALVEIVGGFRRGKPQGHDVDLLITSPGAEKEQEDQLLQKVTNLWKKQGLLLYGRLEWSQFEDGKLPSGKADALDHHAKCFLILKLYDHKVDKSKWEMPTGSNMGEAKPWKAIRVDLVRCPYGGFAFALLGWTGSRMFRRDLRWYATDEKNMMLDNHALYDLTKKIFLKAKSEEEIFAHLGLEYLEPFERNA

SEQ ID NO: 2135 - DNA, 1587 bp, synthetic construct
  misc_feature 1..1587: note = Variant of terminal deoxynucleotidyltransferase
  source 1..1587: mol_type = other DNA
atgcaccatcatcatcatcatggcggtagcggcagccacggcattcgtaccatcgattcggacttcgggaagaaacgccagaaaaaaatggataaccacgatagttccgccatctatgaaatcaaatttcacgagtttgtgctgttcattctcgaagaaaaaatgggtgcgacgcgtcgtacttttctgacagatttagcccgcaagaaagggttccgcgtcgagaatgaactgtcagacagcgttacccacatcgtggcagaaaataattcacgctctgaagtattggcttggctgaaagaacacaagatggagaagaccaagcaattcgaactgctggatattagctggcttatcgaaagcatgaaagttggtaaaccggtggacaccaaggggaaataccagttggcggaatcgggtgagatgagtgcgaacccagatccgacagagggtcgtgaaaacgagctgcctcctactatgaagaccgtttctccgtatgcgtgtcaacgccgcaccaccctgaacaaccataatcaacgttttacggacgcactggaaattcttgcggaaaattacgagttcaaacgcaacgatgatactgcgctggaatttcgtcgtgctatctccgtgctgaaaagccttccgtttgaggtacgtagcctgaaagacacggaaggattgccctggatcggtgatgaagtcaaagggattatggaagaaatcatcgaggtcggtgaatcgctggaagtgcaggccgtgctcaatgatgagcgctatcaaagcttcaaacgctttaagagtgtctttggagtgggggtgaagacagcagacaagtggtcgcgtatgggtctgcgcacgctcgaggatgttcgttccagcaagaccctgaagttgaccccgatgcagaaagcgggtctgtgctattatgaagatcttgctcgcggcgttacgaaagccgaagctgacgcgatttctctgctggttcaggatgcagtcgcaactttcgacccggatgcgctggtggagattgtcggtggatttcgtcgtgggaaacctcagggtcacgacgttgatctgcttatcacatctccgggagctgagaaagagcaagaagaccagctcctgcagaaagtgaccaatctgtggaagaaacaagggttgttgctgtacggtcgtctggaatggagtcagtttgaagatgggaaactcccatccggtaaggctgatgccctggaccaccacgcgaaatgctttctgatcctcaaactttatgatcataaagtggacaaaagcaaatgggaaatgccgacgggttcgaacatgggcgaggccaaaccgtggaaagcaattcgcgtagatctggttcgttgcccctacggcggttttgcgtttgcgttgttgggttggaccggaagccgcatgttccgccgtgatctgcgctggtacgccactgacgagaagaacatgatgctggacaatcatgcgctgtatgacctgaccaagaaaatctttctcaaagctaaatcggaagaggaaattttcgcacatctggggcttgaatacctggaaccgttcgaacgtaacgca

SEQ ID NO: 2136 - protein, 529 aa, synthetic construct
  REGION 1..529: note = Variant of terminal deoxynucleotidyltransferase
MHHHHHHGGSGSHGIRTIDSDFGKKRQKKMDNHDSSAIYEIKFHEFVLFILEEKMGATRRTFLTDLARKKGFRVENELSDSVTHIVAENNSRSEVLAWLKEHKMEKTKQFELLDISWLIESMKVGKPVDTKGKYQLAESGEMSANPDPTEGRENELPPTMKTVSPYACQRRTTLNNHNQRFTDALEILAENYEFKRNDDTALEFRRAISVLKSLPFEVRSLKDTEGLPWIGDEVKGIMEEIIEVGESLEVQAVLNDERYQSFKRFKSVFGVGVKTADKWSRMGLRTLEDVRSSKTLKLTPMQKAGLCYYEDLARGVTKAEADAISLLVQDAVATFDPDALVEIVGGFRRGKPQGHDVDLLITSPGAEKEQEDQLLQKVTNLWKKQGLLLYGRLEWSQFEDGKLPSGKADALDHHAKCFLILKLYDHKVDKSKWEMPTGSNMGEAKPWKAIRVDLVRCPYGGFAFALLGWTGSRMFRRDLRWYATDEKNMMLDNHALYDLTKKIFLKAKSEEEIFAHLGLEYLEPFERNA

SEQ ID NO: 2137 - DNA, 1587 bp, synthetic construct
  misc_feature 1..1587: note = Variant of terminal deoxynucleotidyltransferase
  source 1..1587: mol_type = other DNA
atgcaccatcatcatcatcatggcggtagcggcagccacggcattcgtaccatcgattcggacttcgggaagaaacgccagaaaaaaatggataaccacgatagttccgccatctatgaaatcaaatttcacgagtttgtgctgttcattctcgaagaaaaaatgggtgcgacgcgtcgtacttttctgacagatttagcccgcaagaaagggttccgcgtcgagaatgaactgtcagacagcgttacccacatcgtggcagaaaataattcacgctctgaagtattggcttggctgaaagaacacaagatggagaagaccaagcaattcgaactgctggatattagctggcttatcgaaagcatgaaagttggtaaaccggtggacaccaaggggaaataccagttggcggaatcgggtgagatgagtgcgaacccagatccgacagagggtcgtgaaaacgagctgcctcctactatgaagaccgtttctccgtatgcgtgtcaacgccgcaccaccctgaacaaccataatcaacgttttacggacgcactggaaattcttgcggaaaattacgagttcaaacgcaacgatgatactgcgctggaatttcgtcgtgctatctccgtgctgaaaagccttccgtttgaggtacgtagcctgaaagacacggaaggattgccctggatcggtgatgaagtcaaagggattatggaagaaatcatcgaggtcggtgaatcgctggaagtgcaggccgtgctcaatgatgagcgctatcaaagcttcaaacgctttaagagtgtctttggagtgggggtgaagacagcagacaagtggtaccgtatgggtctgcgcacgctcgaggatgttcgttccagcaagaccctgaagttgaccccgatgcagaaagcgggtctgtgctattatgaagatcttgctcgcggcgttacgaaagccgaagctgacgcgatttctctgctggttcaggatgcagtcgcaactttcgacccggatgcgctggtggagattgtcggtggatttcgtcgtgggaaacctcagggtcacgacgttgatctgcttatcacatctccgggagctgagaaagagcaagaagaccagctcctgcagaaagtgaccaatctgtggaagaaacaagggttgttgctgtacggtcgtctggaatggagtcagtttgaagatgggaaactcccagggggtaaggctgatgccctggaccaccacgcgaaatgctttctgatcctcaaactttatgatcataaagtggacaaaagcaaatgggaaatgccgacgggttcgaacatgggcgaggccaaaccgtggaaagcaattcgcgtagatctggttcgttgcccctacggcggttttgcgtttgcgttgttgggttggaccggaagccgcatgttccgccgtgatctgcgctggtacgccactgacgagaagaacatgatgctggacaatcatgcgctgtatgacctgaccaagaaaatctttctcaaagctaaatcggaagaggaaattttcgcacatctggggcttgaatacctggaaccgttcgaacgtaacgca

SEQ ID NO: 2138 - protein, 529 aa, synthetic construct
  REGION 1..529: note = Variant of terminal deoxynucleotidyltransferase
MHHHHHHGGSGSHGIRTIDSDFGKKRQKKMDNHDSSAIYEIKFHEFVLFILEEKMGATRRTFLTDLARKKGFRVENELSDSVTHIVAENNSRSEVLAWLKEHKMEKTKQFELLDISWLIESMKVGKPVDTKGKYQLAESGEMSANPDPTEGRENELPPTMKTVSPYACQRRTTLNNHNQRFTDALEILAENYEFKRNDDTALEFRRAISVLKSLPFEVRSLKDTEGLPWIGDEVKGIMEEIIEVGESLEVQAVLNDERYQSFKRFKSVFGVGVKTADKWYRMGLRTLEDVRSSKTLKLTPMQKAGLCYYEDLARGVTKAEADAISLLVQDAVATFDPDALVEIVGGFRRGKPQGHDVDLLITSPGAEKEQEDQLLQKVTNLWKKQGLLLYGRLEWSQFEDGKLPGGKADALDHHAKCFLILKLYDHKVDKSKWEMPTGSNMGEAKPWKAIRVDLVRCPYGGFAFALLGWTGSRMFRRDLRWYATDEKNMMLDNHALYDLTKKIFLKAKSEEEIFAHLGLEYLEPFERNA

SEQ ID NO: 2139 - DNA, 1587 bp, synthetic construct
  misc_feature 1..1587: note = Variant of terminal deoxynucleotidyltransferase
  source 1..1587: mol_type = other DNA
atgcaccatcatcatcatcatggcggtagcggcagccacggcattcgtaccatcgattcggacttcgggaagaaacgccagaaaaaaatggataaccacgatagttccgccatctatgaaatcaaatttcacgagtttgtgctgttcattctcgaagaaaaaatgggtgcgacgcgtcgtacttttctgacagatttagcccgcaagaaagggttccgcgtcgagaatgaactgtcagacagcgttacccacatcgtggcagaaaataattcacgctctgaagtattggcttggctgaaagaacacaagatggagaagaccaagcaattcgaactgctggatattagctggcttatcgaaagcatgaaagttggtaaaccggtggacaccaaggggaaataccagttggcggaatcgggtgagatgagtgcgaacccagatccgacagagggtcgtgaaaacgagctgcctcctactatgaagaccgtttctccgtatgcgtgtcaacgccgcaccaccctgaacaaccataatcaacgttttacggacgcactggaaattcttgcggaaaattacgagttcaaacgcaacgatgatactgcgctggaatttcgtcgtgctatctccgtgctgaaaagccttccgtttgaggtacgtagcctgaaagacacggaaggattgccctggatcggtgatgaagtcaaagggattatggaagaaatcatcgaggtcggtgaatcgctggaagtgcaggccgtgctcaatgatgagcgctatcaaagcttcaaacgctttaagagtgtctttggagtgggggtgaagacagcagacaagtggtaccgtatgggtctgcgcacgctcgaggatgttcgttccagcaagaccctgaagttgaccccgatgcagaaagcgggtctgtgctattatgaagatcttgctcgcggcgttacgaaagccgaagctgacgcgatttctctgctggttcaggatgcagtcgcaactttcgacccggatgcgctggtggagattgtcggtggatttcgtcgtgggaaacctcagggtcacgacgttgatctgcttatctattctccgggagctgagaaagagcaagaagaccagctcctgcagaaagtgaccaatctgtggaagaaacaagggttgttgctgtacggtcgtctggaatggagtcagtttgaagatgggaaactcccatccggtaaggctgatgccctggaccaccacgcgaaatgctttctgatcctcaaactttatgatcataaagtggacaaaagcaaatgggaaatgccgacgggttcgaacatgggcgaggccaaaccgtggaaagcaattcgcgtagatctggttcgttgcccctacggcggttttgcgtttgcgttgttgggttggaccggaagccgcatgttccgccgtgatctgcgctggtacgccactgacgagaagaacatgatgctggacaatcatgcgctgtatgacctgaccaagaaaatctttctcaaagctaaatcggaagaggaaattttcgcacatctggggcttgaatacctggaaccgttcgaacgtaacgca

SEQ ID NO: 2140 - protein, 529 aa, synthetic construct
  REGION 1..529: note = Variant of terminal deoxynucleotidyltransferase
MHHHHHHGGSGSHGIRTIDSDFGKKRQKKMDNHDSSAIYEIKFHEFVLFILEEKMGATRRTFLTDLARKKGFRVENELSDSVTHIVAENNSRSEVLAWLKEHKMEKTKQFELLDISWLIESMKVGKPVDTKGKYQLAESGEMSANPDPTEGRENELPPTMKTVSPYACQRRTTLNNHNQRFTDALEILAENYEFKRNDDTALEFRRAISVLKSLPFEVRSLKDTEGLPWIGDEVKGIMEEIIEVGESLEVQAVLNDERYQSFKRFKSVFGVGVKTADKWYRMGLRTLEDVRSSKTLKLTPMQKAGLCYYEDLARGVTKAEADAISLLVQDAVATFDPDALVEIVGGFRRGKPQGHDVDLLIYSPGAEKEQEDQLLQKVTNLWKKQGLLLYGRLEWSQFEDGKLPSGKADALDHHAKCFLILKLYDHKVDKSKWEMPTGSNMGEAKPWKAIRVDLVRCPYGGFAFALLGWTGSRMFRRDLRWYATDEKNMMLDNHALYDLTKKIFLKAKSEEEIFAHLGLEYLEPFERNA

SEQ ID NO: 2141 - DNA, 1587 bp, synthetic construct
  misc_feature 1..1587: note = Variant of terminal deoxynucleotidyltransferase
  source 1..1587: mol_type = other DNA
atgcaccatcatcatcatcatggcggtagcggcagccacggcattcgtaccatcgattcggacttcgggaagaaacgccagaaaaaaatggataaccacgatagttccgccatctatgaaatcaaatttcacgagtttgtgctgttcattctcgaagaaaaaatgggtgcgacgcgtcgtacttttctgacagatttagcccgcaagaaagggttccgcgtcgagaatgaactgtcagacagcgttacccacatcgtggcagaaaataattcacgctctgaagtattggcttggctgaaagaacacaagatggagaagaccaagcaattcgaactgctggatattagctggcttatcgaaagcatgaaagttggtaaaccggtggacaccaaggggaaataccagttggcggaatcgggtgagatgagtgcgaacccagatccgacagagggtcgtgaaaacgagctgcctcctactatgaagaccgtttctccgtatgcgtgtcaacgccgcaccaccctgaacaaccataatcaacgttttacggacgcactggaaattcttgcggaaaattacgagttcaaacgcaacgatgatactgcgctggaatttcgtcgtgctatctccgtgctgaaaagccttccgtttgaggtacgtagcctgaaagacacggaaggattgccctggatcggtgatgaagtcaaagggattatggaagaaatcatcgaggtcggtgaatcgctggaagtgcaggccgtgctcaatgatgagcgctatcaaagcttcaaacgctttaagagtgtctttggagtgggggtgaagacagcagacaagtggtaccgtatgggtctgcgcacgctcgaggatgttcgttccagcaagaccctgaagttgaccccgatgcagaaagcgggtctgtgcaattatgaagatcttgctcgcggcgttacgaaagccgaagctgacgcgatttctctgctggttcaggatgcagtcgcaactttcgacccggatgcgctggtggagattgtcggtggatttcgtcgtgggaaacctcagggtcacgacgttgatctgcttatcacatctccgggagctgagaaagagcaagaagaccagctcctgcagaaagtgaccaatctgtggaagaaacaagggttgttgctgtacggtcgtctggaatggagtcagtttgaagatgggaaactcccatccggtaaggctgatgccctggaccaccacgcgaaatgctttctgatcctcaaactttatgatcataaagtggacaaaagcaaatgggaaatgccgacgggttcgaacatgggcgaggccaaaccgtggaaagcaattcgcgtagatctggttcgttgcccctacggcggttttgcgtttgcgttgttgggttggaccggaagccgcatgttccgccgtgatctgcgctggtacgccactgacgagaagaacatgatgctggacaatcatgcgctgtatgacctgaccaagaaaatctttctcaaagctaaatcggaagaggaaattttcgcacatctggggcttgaatacctggaaccgttcgaacgtaacgca

SEQ ID NO: 2142 - protein, 529 aa, synthetic construct
  REGION 1..529: note = Variant of terminal deoxynucleotidyltransferase
MHHHHHHGGSGSHGIRTIDSDFGKKRQKKMDNHDSSAIYEIKFHEFVLFILEEKMGATRRTFLTDLARKKGFRVENELSDSVTHIVAENNSRSEVLAWLKEHKMEKTKQFELLDISWLIESMKVGKPVDTKGKYQLAESGEMSANPDPTEGRENELPPTMKTVSPYACQRRTTLNNHNQRFTDALEILAENYEFKRNDDTALEFRRAISVLKSLPFEVRSLKDTEGLPWIGDEVKGIMEEIIEVGESLEVQAVLNDERYQSFKRFKSVFGVGVKTADKWYRMGLRTLEDVRSSKTLKLTPMQKAGLCNYEDLARGVTKAEADAISLLVQDAVATFDPDALVEIVGGFRRGKPQGHDVDLLITSPGAEKEQEDQLLQKVTNLWKKQGLLLYGRLEWSQFEDGKLPSGKADALDHHAKCFLILKLYDHKVDKSKWEMPTGSNMGEAKPWKAIRVDLVRCPYGGFAFALLGWTGSRMFRRDLRWYATDEKNMMLDNHALYDLTKKIFLKAKSEEEIFAHLGLEYLEPFERNA

SEQ ID NO: 2143 - DNA, 1587 bp, synthetic construct
  misc_feature 1..1587: note = Variant of terminal deoxynucleotidyltransferase
  source 1..1587: mol_type = other DNA
atgcaccatcatcatcatcatggcggtagcggcagccacggcattcgtaccatcgattcggacttcgggaagaaacgccagaaaaaaatggataaccacgatagttccgccatctatgaaatcaaatttcacgagtttgtgctgttcattctcgaagaaaaaatgggtgcgacgcgtcgtacttttctgacagatttagcccgcaagaaagggttccgcgtcgagaatgaactgtcagacagcgttacccacatcgtggcagaaaataattcacgctctgaagtattggcttggctgaaagaacacaagatggagaagaccaagcaattcgaactgctggatattagctggcttatcgaaagcatgaaagttggtaaaccggtggacaccaaggggaaataccagttggcggaatcgggtgagatgagtgcgaacccagatccgacagagggtcgtgaaaacgagctgcctcctactatgaagaccgtttctccgtatgcgtgtcaacgccgcaccaccctgaacaaccataatcaacgttttacggacgcactggaaattcttgcggaaaatcttgagttcaaacgcaacgatgatactgcgctggaatttcgtcgtgctatctccgtgctgaaaagccttccgtttgaggtacgtagcctgaaagacacggaaggattgccctggatcggtgatgaagtcaaagggattatggaagaaatcatcgaggtcggtgaatcgctggaagtgcaggccgtgctcaatgatgagcgctatcaaagcttcaaacgctttaagagtgtctttggagtgggggtgaagacagcagacaagtggtaccgtatgggtctgcgcacgctcgaggatgttcgttccagcaagaccctgaagttgaccccgatgcagaaagcgggtctgtgctattatgaagatcttgctcgcggcgttacgaaagccgaagctgacgcgatttctctgctggttcaggatgcagtcgcaactttcgacccggatgcgctggtggagattgtcggtggatttcgtcgtgggaaacctcagggtcacgacgttgatctgcttatcacatctccgggagctgagaaagagcaagaagaccagctcctgcagaaagtgaccaatctgtggaagaaacaagggttgttgctgtacggtcgtctggaatggagtcagtttgaagatgggaaactcccatccggtaaggctgatgccctggaccaccacgcgaaatgctttctgatcctcaaactttatgatcataaagtggacaaaagcaaatgggaaatgccgacgggttcgaacatgggcgaggccaaaccgtggaaagcaattcgcgtagatctggttcgttgcccctacggcggttttgcgtttgcgttgttgggttggaccggaagccgcatgttccgccgtgatctgcgctggtacgccactgacgagaagaacatgatgctggacaatcatgcgctgtatgacctgaccaagaaaatctttctcaaagctaaatcggaagaggaaattttcgcacatctggggcttgaatacctggaaccgttcgaacgtaacgca

SEQ ID NO: 2144 - protein, 529 aa, synthetic construct
  REGION 1..529: note = Variant of terminal deoxynucleotidyltransferase
MHHHHHHGGSGSHGIRTIDSDFGKKRQKKMDNHDSSAIYEIKFHEFVLFILEEKMGATRRTFLTDLARKKGFRVENELSDSVTHIVAENNSRSEVLAWLKEHKMEKTKQFELLDISWLIESMKVGKPVDTKGKYQLAESGEMSANPDPTEGRENELPPTMKTVSPYACQRRTTLNNHNQRFTDALEILAENLEFKRNDDTALEFRRAISVLKSLPFEVRSLKDTEGLPWIGDEVKGIMEEIIEVGESLEVQAVLNDERYQSFKRFKSVFGVGVKTADKWYRMGLRTLEDVRSSKTLKLTPMQKAGLCYYEDLARGVTKAEADAISLLVQDAVATFDPDALVEIVGGFRRGKPQGHDVDLLITSPGAEKEQEDQLLQKVTNLWKKQGLLLYGRLEWSQFEDGKLPSGKADALDHHAKCFLILKLYDHKVDKSKWEMPTGSNMGEAKPWKAIRVDLVRCPYGGFAFALLGWTGSRMFRRDLRWYATDEKNMMLDNHALYDLTKKIFLKAKSEEEIFAHLGLEYLEPFERNA

SEQ ID NO: 2145 - DNA, 1587 bp, synthetic construct
  misc_feature 1..1587: note = Variant of terminal deoxynucleotidyltransferase
  source 1..1587: mol_type = other DNA
atgcaccatcatcatcatcatggcggtagcggcagccacggcattcgtaccatcgattcggacttcgggaagaaacgccagaaaaaaatggataaccacgatagttccgccatctatgaaatcaaatttcacgagtttgtgctgttcattctcgaagaaaaaatgggtgcgacgcgtcgtacttttctgacagatttagcccgcaagaaagggttccgcgtcgagaatgaactgtcagacagcgttacccacatcgtggcagaaaataattcacgctctgaagtattggcttggctgaaagaacacaagatggagaagaccaagcaattcgaactgctggatattagctggcttatcgaaagcatgaaagttggtaaaccggtggacaccaaggggaaataccagttggcggaatcgggtgagatgagtgcgaacccagatccgacagagggtcgtgaaaacgagctgcctcctactatgaagaccgtttctccgtatgcgtgtcaacgccgcaccaccctgaacaaccataatcaacgttttacggacgcactggaaattcttgcggaaaattacgagttcaaacgcaacgatgatactgcgctggaatttcgtcgtgctatctccgtgctgaaaagccttccgtttgaggtacgtagcctgaaagacacggaaggattgccctggatcggtgatgaagtcaaagggattatggaagaaatcatcgaggtcggtgaatcgctggaagtgcaggccgtgctcaatgatgagcgctatcaaagcttcaaacgctttaagagtgtctttggagtgggggtgaagacagcagacaagtggtaccgtatgggtctgcgcacgctcgaggatgttcgttccagcaagaccctgaagttgaccccgatgcagaaagcgggtctgtgctattatgaagatcttgctcgcggcgttacgaaagccgaagctgacgcgatttctctgctggttcaggatgcagtcgcaactttcgacccggatgcgctggtggagattgtcggtggatttcgtcgtgggaaacctcagggtcacgacgttgatctgcttatcacatctccgggagctgagaaagagcaagaagaccagctcctgcagaaagtgaccaatctgtggaagaaacaagggttgttgctgtacggtcgtctggaatggagtcagtttgaagatgggaaactcccatccggtaaggctgatgccctggaccatttctggaaatgctttctgatcctcaaactttatgatcataaagtggacaaaagcaaatgggaaatgccgacgggttcgaacatgggcgaggccaaaccgtggaaagcaattcgcgtagatctggttcgttgcccctacggcggttttgcgtttgcgttgttgggttggaccggaagccgcatgttccgccgtgatctgcgctggtacgccactgacgagaagaacatgatgctggacaatcatgcgctgtatgacctgaccaagaaaatctttctcaaagctaaatcggaagaggaaattttcgcacatctggggcttgaatacctggaaccgttcgaacgtaacgca

SEQ ID NO: 2146 - protein, 529 aa, synthetic construct
  REGION 1..529: note = Variant of terminal deoxynucleotidyltransferase
MHHHHHHGGSGSHGIRTIDSDFGKKRQKKMDNHDSSAIYEIKFHEFVLFILEEKMGATRRTFLTDLARKKGFRVENELSDSVTHIVAENNSRSEVLAWLKEHKMEKTKQFELLDISWLIESMKVGKPVDTKGKYQLAESGEMSANPDPTEGRENELPPTMKTVSPYACQRRTTLNNHNQRFTDALEILAENYEFKRNDDTALEFRRAISVLKSLPFEVRSLKDTEGLPWIGDEVKGIMEEIIEVGESLEVQAVLNDERYQSFKRFKSVFGVGVKTADKWYRMGLRTLEDVRSSKTLKLTPMQKAGLCYYEDLARGVTKAEADAISLLVQDAVATFDPDALVEIVGGFRRGKPQGHDVDLLITSPGAEKEQEDQLLQKVTNLWKKQGLLLYGRLEWSQFEDGKLPSGKADALDHFWKCFLILKLYDHKVDKSKWEMPTGSNMGEAKPWKAIRVDLVRCPYGGFAFALLGWTGSRMFRRDLRWYATDEKNMMLDNHALYDLTKKIFLKAKSEEEIFAHLGLEYLEPFERNA

SEQ ID NO: 2147 - DNA, 1587 bp, synthetic construct
  misc_feature 1..1587: note = Variant of terminal deoxynucleotidyltransferase
  source 1..1587: mol_type = other DNA
atgcaccatcatcatcatcatggcggtagcggcagccacggcattcgtaccatcgattcggacttcgggaagaaacgccagaaaaaaatggataaccacgatagttccgccatctatgaaatcaaatttcacgagtttgtgctgttcattctcgaagaaaaaatgggtgcgacgcgtcgtacttttctgacagatttagcccgcaagaaagggttccgcgtcgagaatgaactgtcagacagcgttacccacatcgtggcagaaaataattcacgctctgaagtattggcttggctgaaagaacacaagatggagaagaccaagcaattcgaactgctggatattagctggcttatcgaaagcatgaaagttggtaaaccggtggacaccaaggggaaataccagttggcggaatcgggtgagatgagtgcgaacccagatccgacagagggtcgtgaaaacgagctgcctcctactatgaagaccgtttctccgtatgcgtgtcaacgccgcaccaccctgaacaaccataatcaacgttttacggacgcactggaaattcttgcggaaaattacgagttcaaacgcaacgatgatactgcgctggaatttcgtcgtgctatctccgtgctgaaaagccttccgtttgaggtacgtagcctgaaagacacggaaggattgccctggatcggtgatgaagtcaaagggattatggaagaaatcatcgaggtcggtgaatcgctggaagtgcaggccgtgctcaatgatgagcgctatcaaagcttcaaacgctttaagagtgtctttggagtgggggtgaagacagcagacaagtggtaccgtatgggtattcgcacgctcgaggatgttcgttccagcaagaccctgaagttgaccccgatgcagaaagcgggtctgtgctattatgaagatcttgctcgcggcgttacgaaagccgaagctgacgcgatttctctgctggttcaggatgcagtcgcaactttcgacccggatgcgctggtggagattgtcggtggatttcgtcgtgggaaacctcagggtcacgacgttgatctgcttatcacatctccgggagctgagaaagagcaagaagaccagctcctgcagaaagtgaccaatctgtggaagaaacaagggttgttgctgtacggtcgtctggaatggagtcagtttgaagatgggaaactcccatccggtaaggctgatgccctggaccaccacgcgaaatgctttctgatcctcaaactttatgatcataaagtggacaaaagcaaatgggaaatgccgacgggttcgaacatgggcgaggccaaaccgtggaaagcaattcgcgtagatctggttcgttgcccctacggcggttttgcgtttgcgttgttgggttggaccggaagccgcatgttccgccgtgatctgcgctggtacgccactgacgagaagaacatgatgctggacaatcatgcgctgtatgacctgaccaagaaaatctttctcaaagctaaatcggaagaggaaattttcgcacatctggggcttgaatacctggaaccgttcgaacgtaacgca

SEQ ID NO: 2148 - protein, 529 aa, synthetic construct
  REGION 1..529: note = Variant of terminal deoxynucleotidyltransferase
MHHHHHHGGSGSHGIRTIDSDFGKKRQKKMDNHDSSAIYEIKFHEFVLFILEEKMGATRRTFLTDLARKKGFRVENELSDSVTHIVAENNSRSEVLAWLKEHKMEKTKQFELLDISWLIESMKVGKPVDTKGKYQLAESGEMSANPDPTEGRENELPPTMKTVSPYACQRRTTLNNHNQRFTDALEILAENYEFKRNDDTALEFRRAISVLKSLPFEVRSLKDTEGLPWIGDEVKGIMEEIIEVGESLEVQAVLNDERYQSFKRFKSVFGVGVKTADKWYRMGIRTLEDVRSSKTLKLTPMQKAGLCYYEDLARGVTKAEADAISLLVQDAVATFDPDALVEIVGGFRRGKPQGHDVDLLITSPGAEKEQEDQLLQKVTNLWKKQGLLLYGRLEWSQFEDGKLPSGKADALDHHAKCFLILKLYDHKVDKSKWEMPTGSNMGEAKPWKAIRVDLVRCPYGGFAFALLGWTGSRMFRRDLRWYATDEKNMMLDNHALYDLTKKIFLKAKSEEEIFAHLGLEYLEPFERNA

SEQ ID NO: 2149 - DNA, 1587 bp, synthetic construct
  misc_feature 1..1587: note = Variant of terminal deoxynucleotidyltransferase
  source 1..1587: mol_type = other DNA
atgcaccatcatcatcatcatggcggtagcggcagccacggcattcgtaccatcgattcggacttcgggaagaaacgccagaaaaaaatggataaccacgatagttccgccatctatgaaatcaaatttcacgagtttgtgctgttcattctcgaagaaaaaatgggtgcgacgcgtcgtacttttctgacagatttagcccgcaagaaagggttccgcgtcgagaatgaactgtcagacagcgttacccacatcgtggcagaaaataattcacgctctgaagtattggcttggctgaaagaacacaagatggagaagaccaagcaattcgaactgctggatattagctggcttatcgaaagcatgaaagttggtaaaccggtggacaccaaggggaaataccagttggcggaatcgggtgagatgagtgcgaacccagatccgacagagggtcgtgaaaacgagctgcctcctactatgaagaccgtttctccgtatgcgtgtcaacgccgcaccaccctgaacaaccataatcaacgttttacggacgcactggaaattcttgcggaaaattacgagttcaaacgcaacgatgatactgcgctggaatttcgtcgtgctatctccgtgctgaaaagccttccgtttgaggtacgtagcctgaaagacacggaaggattgccctggatcggtgatgaagtcaaagggattatggaagaaatcatcgaggtcggtgaatcgctggaagtgcaggccgtgctcaatgatgagcgctatcaaagcttcaaacgctttaagagtgtctttggagtgggggtgaagacagcagacaagtggtaccgtatgggtctgcgcacgctcgaggatgttcgttccagcaagaccctgaagttgaccccgatgcagaaagcgggtctgtgctattatgaagatcttgctcgcggcgttacgaaagccgaagctgacgcgatttctctgctggttcaggatgcagtcgcaactttcgacccggatgcgctggtggagattgtcggtggatttcgtcgtgggaaacctcagggtcacgacgttgatctgcttatcacatctccgggagctgagaaagagcaagaagaccagctcctgcagaaagtgaccaatctgtggaagaaacaagggttgttgctgtacggtcgtctggaatggagtcagtttgaagatgggaaactcccatccggtaaggctgatgccctggaccaccacgcgaaatgctttctgatcctcaaactttatgatcataaagtggacaaaagcaaatgggaaatgccgacgggttcgaacatgggcgaggccaaaccgtggaaagcaattcgcgtagatctggttcgttgcccctacggcggttttgcgtttgcgttgttgatgtggaccggaagccgcatgttccgccgtgatctgcgctggtacgccactgacgagaagaacatgatgctggacaatcatgcgctgtatgacctgaccaagaaaatctttctcaaagctaaatcggaagaggaaattttcgcacatctggggcttgaatacctggaaccgttcgaacgtaacgca

SEQ ID NO: 2150 - protein, 529 aa, synthetic construct
  REGION 1..529: note = Variant of terminal deoxynucleotidyltransferase
MHHHHHHGGSGSHGIRTIDSDFGKKRQKKMDNHDSSAIYEIKFHEFVLFILEEKMGATRRTFLTDLARKKGFRVENELSDSVTHIVAENNSRSEVLAWLKEHKMEKTKQFELLDISWLIESMKVGKPVDTKGKYQLAESGEMSANPDPTEGRENELPPTMKTVSPYACQRRTTLNNHNQRFTDALEILAENYEFKRNDDTALEFRRAISVLKSLPFEVRSLKDTEGLPWIGDEVKGIMEEIIEVGESLEVQAVLNDERYQSFKRFKSVFGVGVKTADKWYRMGLRTLEDVRSSKTLKLTPMQKAGLCYYEDLARGVTKAEADAISLLVQDAVATFDPDALVEIVGGFRRGKPQGHDVDLLITSPGAEKEQEDQLLQKVTNLWKKQGLLLYGRLEWSQFEDGKLPSGKADALDHHAKCFLILKLYDHKVDKSKWEMPTGSNMGEAKPWKAIRVDLVRCPYGGFAFALLMWTGSRMFRRDLRWYATDEKNMMLDNHALYDLTKKIFLKAKSEEEIFAHLGLEYLEPFERNA

SEQ ID NO: 2151 - DNA, 1587 bp, synthetic construct
  misc_feature 1..1587: note = Variant of terminal deoxynucleotidyltransferase
  source 1..1587: mol_type = other DNA
atgcaccatcatcatcatcatggcggtagcggcagccacggcattcgtaccatcgattcggacttcgggaagaaacgccagaaaaaaatggataaccacgatagttccgccatctatgaaatcaaatttcacgagtttgtgctgttcattctcgaagaaaaaatgggtgcgacgcgtcgtacttttctgacagatttagcccgcaagaaagggttccgcgtcgagaatgaactgtcagacagcgttacccacatcgtggcagaaaataattcacgctctgaagtattggcttggctgaaagaacacaagatggagaagaccaagcaattcgaactgctggatattagctggcttatcgaaagcatgaaagttggtaaaccggtggacaccaaggggaaataccagttggcggaatcgggtgagatgagtgcgaacccagatccgacagagggtcgtgaaaacgagctgcctcctactatgaagaccatttctccgtatgcgtgtgagcgccgcaccaccctgaacaaccataatcaacgttttacggacgcactggaaattcttgcggaaaattacgagttcaaacgcaacgatgatactgcgctggaatttcgtcgtgctatctccgtgctgaaaagccttccgtttgaggtacgtagcctgaaagacacggaaggattgccctggatcggtgatgaagtcaaagggattatggaagaaatcatcgaggtcggtgaatcgctggaagtgcaggccgtgctcaatgatgagcgctatcaaagcttcaaacgctttaagagtgtctttggagtgggggtgaagacagcagacaagtggtaccgtatgggtctgcgcacgctcgaggatgttcgttccagcaagaccctgaagttgaccccgatgcagaaagcgggtctgtgctattatgaagatcttgctcgcggcgttacgaaagccgaagctgacgcgatttctctgctggttcaggatgcagtcgcaactttcgacccggatgcgctggtggagattgtcggtggatttcgtcgtgggaaacctcagggtcacgacgttgatctgcttatcacatctccgggagctgagaaagagcaagaagaccagctcctgcagaaagtgaccaatctgtggaagaaacaagggttgttgctgtacggtcgtctggaatggagtcagtttgaagatgggaaactcccatccggtaaggctgatgccctggaccaccacgcgaaatgctttctgatcctcaaactttatgatcataaagtggacaaaagcaaatgggaaatgccgacgggttcgaacatgggcgaggccaaaccgtggaaagcaattcgcgtagatctggttcgttgcccctacggcggttttgcgtttgcgttgttgggttggaccggaagccgcatgttccgccgtgatctgcgctggtacgccactgacgagaagaacatgatgctggacaatcatgcgctgtatgacctgaccaagaaaatctttctcaaagctaaatcggaagaggaaattttcgcacatctggggcttgaatacctggaaccgttcgaacgtaacgca

SEQ ID NO: 2152 - protein, 529 aa, synthetic construct
  REGION 1..529: note = Variant of terminal deoxynucleotidyltransferase
MHHHHHHGGSGSHGIRTIDSDFGKKRQKKMDNHDSSAIYEIKFHEFVLFILEEKMGATRRTFLTDLARKKGFRVENELSDSVTHIVAENNSRSEVLAWLKEHKMEKTKQFELLDISWLIESMKVGKPVDTKGKYQLAESGEMSANPDPTEGRENELPPTMKTISPYACERRTTLNNHNQRFTDALEILAENYEFKRNDDTALEFRRAISVLKSLPFEVRSLKDTEGLPWIGDEVKGIMEEIIEVGESLEVQAVLNDERYQSFKRFKSVFGVGVKTADKWYRMGLRTLEDVRSSKTLKLTPMQKAGLCYYEDLARGVTKAEADAISLLVQDAVATFDPDALVEIVGGFRRGKPQGHDVDLLITSPGAEKEQEDQLLQKVTNLWKKQGLLLYGRLEWSQFEDGKLPSGKADALDHHAKCFLILKLYDHKVDKSKWEMPTGSNMGEAKPWKAIRVDLVRCPYGGFAFALLGWTGSRMFRRDLRWYATDEKNMMLDNHALYDLTKKIFLKAKSEEEIFAHLGLEYLEPFERNA

SEQ ID NO: 2153 - DNA, 1587 bp, synthetic construct
  misc_feature 1..1587: note = Variant of terminal deoxynucleotidyltransferase
  source 1..1587: mol_type = other DNA
atgcaccatcatcatcatcatggcggtagcggcagccacggcattcgtaccatcgattcggacttcgggaagaaacgccagaaaaaaatggataaccacgatagttccgccatctatgaaatcaaatttcacgagtttgtgctgttcattctcgaagaaaaaatgggtgcgacgcgtcgtacttttctgacagatttagcccgcaagaaagggttccgcgtcgagaatgaactgtcagacagcgttacccacatcgtggcagaaaataattcacgctctgaagtattggcttggctgaaagaacacaagatggagaagaccaagcaattcgaactgctggatattagctggcttatcgaaagcatgaaagttggtaaaccggtggacaccaaggggaaataccagttggcggaatcgggtgagatgagtgcgaacccagatccgacagagggtcgtgaaaacgagctgcctcctactatgaagaccgtttctccgtatgcgtgtcaacgccgcaccaccctgaacaaccataatcaacgttttacggacgcactggaaattcttgcggaaaattacgagttcaaacgcaacgatgatactgcgctggaatttcgtcgtgctatctccgtgctgaaaagccttccgtttgaggtacgtagcctgaaagacacggaaggattgccctggatcggtgatgaagtcaaagggattatggaagaaatcatcgaggtcggtgaatcgctggaagtgcaggccgtgctcaatgatgagcgctatcaaagcttcaaacgctttaagagtgtctttggagtgggggtgaagacagcagacaagtggtaccgtatgggtctgcgcacgctcgaggatgttcgttccagcaagaccctgaagttgaccccgatgcagaaagcgggtctgtgctattatgaagatcttgctcgcggcgttacgaaagccgaagctgacgcgatttctctgctggttcaggatgcagtcgcaactttcgacccggatgcgctggtggagattgtcggtggatttcgtcgtgggaaacctcagggtcacgacgttgatctgcttatcacatctccgggagctgagaaagagcaagaagaccagctcctgcagaaagtgaccaatctgtggaagaaacaagggttgttgctgtacggtcgtctggaatggagtcagtttgaagatgggaaactcccatccggtaaggctgatgccctggaccaccacgcgaaatgctttctgatcctcaaactttatgatcataaagtggacaaaagcaaatgggaaatgccgacgggttcgaacatgggcgaggccaaaccgtggaaagcaattcgcgtagatctggttcgttgcccctacggcggttttgcgtttgagttgttgggttggaccggaagccgcatgttccgccgtgatctgcgctggtacgccactgacgagaagaacatgatgctggacaatcatgcgctgtatgacctgaccaagaaaatctttctcaaagctaaatcggaagaggaaattttcgcacatctggggcttgaatacctggaaccgttcgaacgtaacgca

SEQ ID NO: 2154 - protein, 529 aa, synthetic construct
  REGION 1..529: note = Variant of terminal deoxynucleotidyltransferase
MHHHHHHGGSGSHGIRTIDSDFGKKRQKKMDNHDSSAIYEIKFHEFVLFILEEKMGATRRTFLTDLARKKGFRVENELSDSVTHIVAENNSRSEVLAWLKEHKMEKTKQFELLDISWLIESMKVGKPVDTKGKYQLAESGEMSANPDPTEGRENELPPTMKTVSPYACQRRTTLNNHNQRFTDALEILAENYEFKRNDDTALEFRRAISVLKSLPFEVRSLKDTEGLPWIGDEVKGIMEEIIEVGESLEVQAVLNDERYQSFKRFKSVFGVGVKTADKWYRMGLRTLEDVRSSKTLKLTPMQKAGLCYYEDLARGVTKAEADAISLLVQDAVATFDPDALVEIVGGFRRGKPQGHDVDLLITSPGAEKEQEDQLLQKVTNLWKKQGLLLYGRLEWSQFEDGKLPSGKADALDHHAKCFLILKLYDHKVDKSKWEMPTGSNMGEAKPWKAIRVDLVRCPYGGFAFELLGWTGSRMFRRDLRWYATDEKNMMLDNHALYDLTKKIFLKAKSEEEIFAHLGLEYLEPFERNA

SEQ ID NO: 2155 - DNA, 1587 bp, synthetic construct
  misc_feature 1..1587: note = Variant of terminal deoxynucleotidyltransferase
  source 1..1587: mol_type = other DNA
atgcaccatcatcatcatcatggcggtagcggcagccacggcattcgtaccatcgattcggacttcgggaagaaacgccagaaaaaaatggataaccacgatagttccgccatctatgaaatcaaatttcacgagtttgtgctgttcattctcgaagaaaaaatgggtgcgacgcgtcgtacttttctgacagatttagcccgcaagaaagggttccgcgtcgagaatgaactgtcagacagcgttacccacatcgtggcagaaaataattcacgctctgaagtattggcttggctgaaagaacacaagatggagaagaccaagcaattcgaactgctggatattagctggcttatcgaaagcatgaaagttggtaaaccggtggacaccaaggggaaataccagttggcggaatcgggtgagatgagtgcgaacccagatccgacagagggtcgtgaaaacgagctgcctcctactatgaagaccgtttctccgtatgcgtgtcaacgccgcaccaccctgaacaaccataatcaacgttttacggacgcactggaaattcttgcggaaaattacgagttcaaacgcaacgatgatactgcgctggaatttcgtcgtgctatctccgtgctgaaaagccttccgtttgaggtacgtagcctgaaagacacggaaggattgccctggatcggtgatgaagtcaaagggattatggaagaaatcatcgaggtcggtgaatcgctggaagtgcaggccgtgctcaatgatgagcgctatcaaagcttcaaacgctttaagagtgtctttggagtgggggtgaagacagcagacaagtggtaccgtatgggtctgcgcacgctcgaggatgttcgttccagcaagaccctgaagttgaccccgatgcagaaagcgggtctgtgctattatgaagatcttgctcgcggcgttacgaaagccgaagctgacgcgatttctctgctggttcaggatgcagtcgcaactttcgacccggatgcgctggtggagattgtcggtggatttcgtcgtgggaaacctcagggtcacgacgttgatctgcttatcacatctccgggagctgagaaagagcaagaagaccagctcctgcagaaagtgaccaatctgtggaagaaacaagggttgttgctgtacggtcgtctggaatggagtcagtttgaagatgggaaactcccatccggtaaggctgatgccctggaccaccacgcgaaatgctttctgatcctcaaactttatgatcataaagtggacaaaagcaaatgggaaatgccgacgggttcgaacatgggcgaggccaaaccgtggaaagcaattcgcgtagatctggttcgttgcccctacggcggttttgcgtttgcgttgttgggttggaccggaagccgcatgttccgccgtgatctgcgctggtacgccactgacgagaagaacatgatgctggacaatggggcgctgtatgacctgaccaagaaaatctttctcaaagctaaatcggaagaggaaattttcgcacatctggggcttgaatacctggaaccgttcgaacgtaacgca

SEQ ID NO: 2156 - protein, 529 aa, synthetic construct
  REGION 1..529: note = Variant of terminal deoxynucleotidyltransferase
MHHHHHHGGSGSHGIRTIDSDFGKKRQKKMDNHDSSAIYEIKFHEFVLFILEEKMGATRRTFLTDLARKKGFRVENELSDSVTHIVAENNSRSEVLAWLKEHKMEKTKQFELLDISWLIESMKVGKPVDTKGKYQLAESGEMSANPDPTEGRENELPPTMKTVSPYACQRRTTLNNHNQRFTDALEILAENYEFKRNDDTALEFRRAISVLKSLPFEVRSLKDTEGLPWIGDEVKGIMEEIIEVGESLEVQAVLNDERYQSFKRFKSVFGVGVKTADKWYRMGLRTLEDVRSSKTLKLTPMQKAGLCYYEDLARGVTKAEADAISLLVQDAVATFDPDALVEIVGGFRRGKPQGHDVDLLITSPGAEKEQEDQLLQKVTNLWKKQGLLLYGRLEWSQFEDGKLPSGKADALDHHAKCFLILKLYDHKVDKSKWEMPTGSNMGEAKPWKAIRVDLVRCPYGGFAFALLGWTGSRMFRRDLRWYATDEKNMMLDNGALYDLTKKIFLKAKSEEEIFAHLGLEYLEPFERNA

SEQ ID NO: 2157 - DNA, 1587 bp, synthetic construct
  misc_feature 1..1587: note = Variant of terminal deoxynucleotidyltransferase
  source 1..1587: mol_type = other DNA
atgcaccatcatcatcatcatggcggtagcggcagccacggcattcgtaccatcgattcggacttcgggaagaaacgccagaaaaaaatggataaccacgatagttccgccatctatgaaatcaaatttcacgagtttgtgctgttcattctcgaagaaaaaatgggtgcgacgcgtcgtacttttctgacagatttagcccgcaagaaagggttccgcgtcgagaatgaactgtcagacagcgttacccacatcgtggcagaaaataattcacgctctgaagtattggcttggctgaaagaacacaagatggagaagaccaagcaattcgaactgctggatattagctggcttatcgaaagcatgaaagttggtaaaccggtggacaccaaggggaaataccagttggcggaatcgggtgagatgagtgcgaacccagatccgacagagggtcgtgaaaacgagctgcctcctactatgaagaccgtttctccgtatgcgtgtcaacgccgcaccaccctgaacaaccataatcaacgttttacggacgcactggaaattcttgcggaaaattacgagttcaaacgcaacgatgatactgcgctggaatttcgtcgtgctatctccgtgctgaaaagccttccgtttgaggtacgtagcctgaaagacacggaaggattgccctggatcggtgatgaagtcaaagggattatggaagaaatcatcgaggtcggtgaatcgctggaagtgcaggccgtgctcaatgatgagcgctatcaaagcttcaaacgctttaagagtgtctttggagtgggggtgaagacagcagacaagtggtaccgtatgggtctgcgcacgctcgaggatgttcgttccagcaagaccctgaagttgaccccgatgcagaaagcgggtctgtgctattatgaagatcttgctcgcggcgttacgaaagccgaagctgacgcgatttctctgctggttcaggatgcagtcgcaactttcgacccggatgcgctggtggagattgtcggtggatttcgtcgtgggaaacctcagggtcacgacgttgatctgcttatcacatctccgggagctgagaaagagcaagaagaccagctcctgcagaaagtgaccaatctgtggaagaaacaagggttgttgctgtacggtcgtctggaatggagtcagtttgaagatgggaaactcccatccggtaaggctgatgccctggaccaccacgcgaaatgctttctgatcctcaaactttatgatcataaagtggacaaaagcaaatgggaaatgccgacgggttcgaacatgggcgaggccaaaccgtggaaagcaattcgcgtagatctggttcgttgcccctacggcggttttgcgtttgcgttgttgggttggaccggaagccgcatgttccgccgtgatctgcgctggtacgccactgacgagaagaacatgatgctggacaatctggcgctgtatgacctgaccaagaaaatctttctcaaagctaaatcggaagaggaaattttcgcacatctggggcttgaatacctggaaccgttcgaacgtaacgca

SEQ ID NO: 2158 - protein, 529 aa, synthetic construct
  REGION 1..529: note = Variant of terminal deoxynucleotidyltransferase
MHHHHHHGGSGSHGIRTIDSDFGKKRQKKMDNHDSSAIYEIKFHEFVLFILEEKMGATRRTFLTDLARKKGFRVENELSDSVTHIVAENNSRSEVLAWLKEHKMEKTKQFELLDISWLIESMKVGKPVDTKGKYQLAESGEMSANPDPTEGRENELPPTMKTVSPYACQRRTTLNNHNQRFTDALEILAENYEFKRNDDTALEFRRAISVLKSLPFEVRSLKDTEGLPWIGDEVKGIMEEIIEVGESLEVQAVLNDERYQSFKRFKSVFGVGVKTADKWYRMGLRTLEDVRSSKTLKLTPMQKAGLCYYEDLARGVTKAEADAISLLVQDAVATFDPDALVEIVGGFRRGKPQGHDVDLLITSPGAEKEQEDQLLQKVTNLWKKQGLLLYGRLEWSQFEDGKLPSGKADALDHHAKCFLILKLYDHKVDKSKWEMPTGSNMGEAKPWKAIRVDLVRCPYGGFAFALLGWTGSRMFRRDLRWYATDEKNMMLDNLALYDLTKKIFLKAKSEEEIFAHLGLEYLEPFERNA

SEQ ID NO: 2159 - DNA, 1587 bp, synthetic construct
  misc_feature 1..1587: note = Variant of terminal deoxynucleotidyltransferase
  source 1..1587: mol_type = other DNA
atgcaccatcatcatcatcatggcggtagcggcagccacggcattcgtaccatcgattcggacttcgggaagaaacgccagaaaaaaatggataaccacgatagttccgccatctatgaaatcaaatttcacgagtttgtgctgttcattctcgaagaaaaaatgggtgcgacgcgtcgtacttttctgacagatttagcccgcaagaaagggttccgcgtcgagaatgaactgtcagacagcgttacccacatcgtggcagaaaataattcacgctctgaagtattggcttggctgaaagaacacaagatggagaagaccaagcaattcgaactgctggatattagctggcttatcgaaagcatgaaagttggtaaaccggtggacaccaaggggaaataccagttggcggaatcgggtgagatgagtgcgaacccagatccgacagagggtcgtgaaaacgagctgcctcctactatgaagaccgtttctccgtatgcgtgtcaacgccgcaccaccctgaacaaccataatcaacgttttacggacgcactggaaattcttgcggaaaattacgagttcaaacgcaacctggatactgcgctggaatttcgtcgtgctatctccgtgctgaaaagccttccgtttgaggtacgtagcctgaaagacacggaaggattgccctggatcggtgatgaagtcaaagggattatggaagaaatcatcgaggtcggtgaatcgctggaagtgcaggccgtgctcaatgatgagcgctatcaaagcttcaaacgctttaagagtgtctttggagtgggggtgaagacagcagacaagtggtaccgtatgggtctgcgcacgctcgaggatgttcgttccagcaagaccctgaagttgaccccgatgcagaaagcgggtctgtgctattatgaagatcttgctcgcggcgttacgaaagccgaagctgacgcgatttctctgctggttcaggatgcagtcgcaactttcgacccggatgcgctggtggagattgtcggtggatttcgtcgtgggaaacctcagggtcacgacgttgatctgcttatcacatctccgggagctgagaaagagcaagaagaccagctcctgcagaaagtgaccaatctgtggaagaaacaagggttgttgctgtacggtcgtctggaatggagtcagtttgaagatgggaaactcccatccggtaaggctgatgccctggaccaccacgcgaaatgctttctgatcctcaaactttatgatcataaagtggacaaaagcaaatgggaaatgccgacgggttcgaacatgggcgaggccaaaccgtggaaagcaattcgcgtagatctggttcgttgcccctacggcggttttgcgtttgcgttgttgggttggaccggaagccgcatgttccgccgtgatctgcgctggtacgccactgacgagaagaacatgatgctggacaatcatgcgctgtatgacctgaccaagaaaatctttctcaaagctaaatcggaagaggaaattttcgcacatctggggcttgaatacctggaaccgttcgaacgtaacgca

SEQ ID NO: 2160 - protein, 529 aa, synthetic construct
  REGION 1..529: note = Variant of terminal deoxynucleotidyltransferase
MHHHHHHGGSGSHGIRTIDSDFGKKRQKKMDNHDSSAIYEIKFHEFVLFILEEKMGATRRTFLTDLARKKGFRVENELSDSVTHIVAENNSRSEVLAWLKEHKMEKTKQFELLDISWLIESMKVGKPVDTKGKYQLAESGEMSANPDPTEGRENELPPTMKTVSPYACQRRTTLNNHNQRFTDALEILAENYEFKRNLDTALEFRRAISVLKSLPFEVRSLKDTEGLPWIGDEVKGIMEEIIEVGESLEVQAVLNDERYQSFKRFKSVFGVGVKTADKWYRMGLRTLEDVRSSKTLKLTPMQKAGLCYYEDLARGVTKAEADAISLLVQDAVATFDPDALVEIVGGFRRGKPQGHDVDLLITSPGAEKEQEDQLLQKVTNLWKKQGLLLYGRLEWSQFEDGKLPSGKADALDHHAKCFLILKLYDHKVDKSKWEMPTGSNMGEAKPWKAIRVDLVRCPYGGFAFALLGWTGSRMFRRDLRWYATDEKNMMLDNHALYDLTKKIFLKAKSEEEIFAHLGLEYLEPFERNA

SEQ ID NO: 2161 - DNA, 1587 bp, synthetic construct
  misc_feature 1..1587: note = Variant of terminal deoxynucleotidyltransferase
  source 1..1587: mol_type = other DNA
atgcaccatcatcatcatcatggcggtagcggcagccacggcattcgtaccatcgattcggacttcgggaagaaacgccagaaaaaaatggataaccacgatagttccgccatctatgaaatcaaatttcacgagtttgtgctgttcattctcgaagaaaaaatgggtgcgacgcgtcgtacttttctgacagatttagcccgcaagaaagggttccgcgtcgagaatgaactgtcagacagcgttacccacatcgtggcagaaaataattcacgctctgaagtattggcttggctgaaagaacacaagatggagaagaccaagcaattcgaactgctggatattagctggcttatcgaaagcatgaaagttggtaaaccggtggacaccaaggggaaataccagttggcggaatcgggtgagatgagtgcgaacccagatccgacagagggtcgtgaaaacgagctgcctcctactatgaagaccgtttctccgtatgcgtgtcaacgccgcaccaccctgaacaaccataatcaacgttttacggacgcactggaaattcttgcggaaaattacgagttcaaacgcaacgatgatactgcgctggaatttcgtcgtgctatctccgtgctgaaaagccttccgtttgaggtacgtagcctgaaagacacggaaggattgccctggatcggtgatgaagtcaaagggattatggaagaaatcatcgaggtcggtgaatcgctggaagtgcaggccgtgctcaatgatgagcgctatcaaagcttcaaacgctttaagagtgtctttggagtgggggtgaagacagcagacaagtggtaccgtatgggtctgcgcacgctcgaggatgttcgttccagcaagaccctgaagttgaccccgatgcagaaagcgggtctgtgctattatgaagatcttgctcgcggcgttacgaaagccgaagctgacgcgatttctctgctggttcaggatgcagtcgcaactttcgacccggatgcgctggtggagattgtcggtggatttcgtcgtgggaaacctcagggtcacgacgttgatctgcttatcacatctccgggagctgagaaagagcaagaagaccagctcctgcagaaagtgaccaatctgtggaagaaacaagggttgttgctgtacggtcgtctggaatggagtcagtttgaagatgggaaactcccatccggtaaggctgatgccgcggaccatttcgcgaaatgctttctgatcctcaaactttatgatcataaagtggacaaaagcaaatgggaaatgccgacgggttcgaacatgggcgaggccaaaccgtggaaagcaattcgcgtagatctggttcgttgcccctacggcggttttgcgtttgcgttgttgggttggaccggaagccgcatgttccgccgtgatctgcgctggtacgccactgacgagaagaacatgatgctggacaatcatgcgctgtatgacctgaccaagaaaatctttctcaaagctaaatcggaagaggaaattttcgcacatctggggcttgaatacctggaaccgttcgaacgtaacgca

SEQ ID NO: 2162 - protein, 529 aa, synthetic construct
  REGION 1..529: note = Variant of terminal deoxynucleotidyltransferase
MHHHHHHGGSGSHGIRTIDSDFGKKRQKKMDNHDSSAIYEIKFHEFVLFILEEKMGATRRTFLTDLARKKGFRVENELSDSVTHIVAENNSRSEVLAWLKEHKMEKTKQFELLDISWLIESMKVGKPVDTKGKYQLAESGEMSANPDPTEGRENELPPTMKTVSPYACQRRTTLNNHNQRFTDALEILAENYEFKRNDDTALEFRRAISVLKSLPFEVRSLKDTEGLPWIGDEVKGIMEEIIEVGESLEVQAVLNDERYQSFKRFKSVFGVGVKTADKWYRMGLRTLEDVRSSKTLKLTPMQKAGLCYYEDLARGVTKAEADAISLLVQDAVATFDPDALVEIVGGFRRGKPQGHDVDLLITSPGAEKEQEDQLLQKVTNLWKKQGLLLYGRLEWSQFEDGKLPSGKADAADHFAKCFLILKLYDHKVDKSKWEMPTGSNMGEAKPWKAIRVDLVRCPYGGFAFALLGWTGSRMFRRDLRWYATDEKNMMLDNHALYDLTKKIFLKAKSEEEIFAHLGLEYLEPFERNA

SEQ ID NO: 2163 - DNA, 1587 bp, synthetic construct
  misc_feature 1..1587: note = Variant of terminal deoxynucleotidyltransferase
  source 1..1587: mol_type = other DNA
atgcaccatcatcatcatcatggcggtagcggcagccacggcattcgtaccatcgattcggacttcgggaagaaacgccagaaaaaaatggataaccacgatagttccgccatctatgaaatcaaatttcacgagtttgtgctgttcattctcgaagaaaaaatgggtgcgacgcgtcgtacttttctgacagatttagcccgcaagaaagggttccgcgtcgagaatgaactgtcagacagcgttacccacatcgtggcagaaaataattcacgctctgaagtattggcttggctgaaagaacacaagatggagaagaccaagcaattcgaactgctggatattagctggcttatcgaaagcatgaaagttggtaaaccggtggacaccaaggggaaataccagttggcggaatcgggtgagatgagtgcgaacccagatccgacagagggtcgtgaaaacgagctgcctcctactatgaagaccgtttctccgtatgcgtgtcaacgccgcaccaccctgaacaaccataatcaacgttttacggacgcactggaaattcttgcggaaaattacgagttcaaacgcaacgatgatactgcgctggaatttcgtcgtgctatctccgtgctgaaaagccttccgtttgaggtacgtagcctgaaagacacggaaggattgccctggatcggtgatgaagtcaaagggattatggaagaaatcatcgaggtcggtgaatcgctggaagtgcaggccgtgctcaatgatgagcgctatcaaagcttcattcgctttaagagtgtctttggagtgggggtgaagacagcagacaagtggtaccgtatgggtctgcgcacgctcgaggatgttcgttccagcaagaccctgaagttgaccccgatgcagaaagcgggtctgtgctattatgaagatcttgctcgcggcgttacgaaagccgaagctgacgcgatttctctgctggttcaggatgcagtcgcaactttcgacccggatgcgctggtggagattgtcggtggatttcgtcgtgggaaacctcagggtcacgacgttgatctgcttatcacatctccgggagctgagaaagagcaagaagaccagctcctgcagaaagtgaccaatctgtggaagaaacaagggttgttgctgtacggtcgtctggaatggagtcagtttgaagatgggaaactcccatccggtaaggctgatgccctggaccaccacgcgaaatgctttctgatcctcaaactttatgatcataaagtggacaaaagcaaatgggaaatgccgacgggttcgaacatgggcgaggccaaaccgtggaaagcaattcgcgtagatctggttcgttgcccctacggcggttttgcgtttgcgttgttgggttggaccggaagccgcatgttccgccgtgatctgcgctggtacgccactgacgagaagaacatgatgctggacaatcatgcgctgtatgacctgaccaagaaaatctttctcaaagctaaatcggaagaggaaattttcgcacatctggggcttgaatacctggaaccgttcgaacgtaacgca

SEQ ID NO: 2164 - protein, 529 aa, synthetic construct
  REGION 1..529: note = Variant of terminal deoxynucleotidyltransferase
MHHHHHHGGSGSHGIRTIDSDFGKKRQKKMDNHDSSAIYEIKFHEFVLFILEEKMGATRRTFLTDLARKKGFRVENELSDSVTHIVAENNSRSEVLAWLKEHKMEKTKQFELLDISWLIESMKVGKPVDTKGKYQLAESGEMSANPDPTEGRENELPPTMKTVSPYACQRRTTLNNHNQRFTDALEILAENYEFKRNDDTALEFRRAISVLKSLPFEVRSLKDTEGLPWIGDEVKGIMEEIIEVGESLEVQAVLNDERYQSFIRFKSVFGVGVKTADKWYRMGLRTLEDVRSSKTLKLTPMQKAGLCYYEDLARGVTKAEADAISLLVQDAVATFDPDALVEIVGGFRRGKPQGHDVDLLITSPGAEKEQEDQLLQKVTNLWKKQGLLLYGRLEWSQFEDGKLPSGKADALDHHAKCFLILKLYDHKVDKSKWEMPTGSNMGEAKPWKAIRVDLVRCPYGGFAFALLGWTGSRMFRRDLRWYATDEKNMMLDNHALYDLTKKIFLKAKSEEEIFAHLGLEYLEPFERNA

SEQ ID NO: 2165 - DNA, 1587 bp, synthetic construct
  misc_feature 1..1587: note = Variant of terminal deoxynucleotidyltransferase
  source 1..1587: mol_type = other DNA
atgcaccatcatcatcatcatggcggtagcggcagccacggcattcgtaccatcgattcggacttcgggaagaaacgccagaaaaaaatggataaccacgatagttccgccatctatgaaatcaaatttcacgagtttgtgctgttcattctcgaagaaaaaatgggtgcgacgcgtcgtacttttctgacagatttagcccgcaagaaagggttccgcgtcgagaatgaactgtcagacagcgttacccacatcgtggcagaaaataattcacgctctgaagtattggcttggctgaaagaacacaagatggagaagaccaagcaattcgaactgctggatattagctggcttatcgaaagcatgaaagttggtaaaccggtggacaccaaggggaaataccagttggcggaatcgggtgagatgagtgcgaacccagatccgacagagggtcgtgaaaacgagctgcctcctactatgaagaccgtttctccgtatgcgtgtcaacgccgcaccaccctgaacaaccataatcaacgttttacggacgcactggaaattcttgcggaaaattacgagttcaaacgcaacgatgatactgcgctggaatttcgtcgtgctatctccgtgctgaaaagccttccgtttgaggtacgtagcctgaaagacacggaaggattgccctggatcggtgatgaagtcaaagggattatggaagaaatcatcgaggtcggtgaatcgctggaagtgcaggccgtgctcaatgatgagcgctatcaaagcttcaaacgctttaagagtgtctttggagtgggggtgaagacagcagacaagtggtaccgtatgggtctgcgcacgctcgaggatgttcgttccagcaagaccctgaagttgaccccgatgcagaaagcgggtctgtgctattatgaagatcttgctcgcggcgttacgaaagccgaagctgacgcgatttctctgctggttcaggatgcagtcgcaactttcgacccggatgcgctggtggagattgtcggtggatttcgtcgtgggaaacctcagggtcacgacgttgatctgcttatcacatctccgggagctgagaaagagcaagaagaccagctcctgcagaaagtgaccaatctgtggaagaaacaagggttgttgctgtacggtcgtctggaatggagtcagttttgtgatgggaaactcccatccggtaaggctgatgccctggaccaccacgcgaaatgctttctgatcctcaaactttatgatcataaagtggacaaaagcaaatgggaaatgccgacgggttcgaacatgggcgaggccaaaccgtggaaagcaattcgcgtagatctggttcgttgcccctacggcggttttgcgtttgcgttgttgggttggaccggaagccgcatgttccgccgtgatctgcgctggtacgccactgacgagaagaacatgatgctggacaatcatgcgctgtatgacctgaccaagaaaatctttctcaaagctaaatcggaagaggaaattttcgcacatctggggcttgaatacctggaaccgttcgaacgtaacgca

SEQ ID NO: 2166 - protein, 529 aa, synthetic construct
  REGION 1..529: note = Variant of terminal deoxynucleotidyltransferase
MHHHHHHGGSGSHGIRTIDSDFGKKRQKKMDNHDSSAIYEIKFHEFVLFILEEKMGATRRTFLTDLARKKGFRVENELSDSVTHIVAENNSRSEVLAWLKEHKMEKTKQFELLDISWLIESMKVGKPVDTKGKYQLAESGEMSANPDPTEGRENELPPTMKTVSPYACQRRTTLNNHNQRFTDALEILAENYEFKRNDDTALEFRRAISVLKSLPFEVRSLKDTEGLPWIGDEVKGIMEEIIEVGESLEVQAVLNDERYQSFKRFKSVFGVGVKTADKWYRMGLRTLEDVRSSKTLKLTPMQKAGLCYYEDLARGVTKAEADAISLLVQDAVATFDPDALVEIVGGFRRGKPQGHDVDLLITSPGAEKEQEDQLLQKVTNLWKKQGLLLYGRLEWSQFCDGKLPSGKADALDHHAKCFLILKLYDHKVDKSKWEMPTGSNMGEAKPWKAIRVDLVRCPYGGFAFALLGWTGSRMFRRDLRWYATDEKNMMLDNHALYDLTKKIFLKAKSEEEIFAHLGLEYLEPFERNA

SEQ ID NO: 2167 - DNA, 1587 bp, synthetic construct
  misc_feature 1..1587: note = Variant of terminal deoxynucleotidyltransferase
  source 1..1587: mol_type = other DNA
atgcaccatcatcatcatcatggcggtagcggcagccacggcattcgtaccatcgattcggacttcgggaagaaacgccagaaaaaaatggataaccacgatagttccgccatctatgaaatcaaatttcacgagtttgtgctgttcattctcgaagaaaaaatgggtgcgacgcgtcgtacttttctgacagatttagcccgcaagaaagggttccgcgtcgagaatgaactgtcagacagcgttacccacatcgtggcagaaaataattcacgctctgaagtattggcttggctgaaagaacacaagatggagaagaccaagcaattcgaactgctggatattagctggcttatcgaaagcatgaaagttggtaaaccggtggacaccaaggggaaataccagttggcggaatcgggtgagatgagtgcgaacccagatccgacagagggtcgtgaaaacgagctgcctcctactatgaagaccgtttctccgtatgcgtgtcaacgccgcaccaccctgaacaaccataatcaacgttttacggacgcactggaaattcttgcggaaaattacgagttcaaacgcaacgatgatactgcgctggaatttcgtcgtgctatctccgtgctgaaaagccttccgtttgaggtacgtagcctgaaagacacggaaggattgccctggatcggtgatgaagtcaaagggattatggaagaaatcatcgaggtcggtgaatcgctggaagtgcaggccgtgctcaatgatgagcgctatcaaagcttcaaacgctttaagagtgtctttggagtgggggtgaagacagcagacaagtggtaccgtatgggtctgcgcacgctcgaggatgttcgttccagcaagaccctgaagttgaccccgatgcagaaagcgggtatttgctattatgaagatcttgctcgcggcgttacgaaagccgaagctgacgcgatttctctgctggttcaggatgcagtcgcaactttcgacccggatgcgctggtggagattgtcggtggatttcgtcgtgggaaacctcagggtcacgacgttgatctgcttatcacatctccgggagctgagaaagagcaagaagaccagctcctgcagaaagtgaccaatctgtggaagaaacaagggttgttgctgtacggtcgtctggaatggagtcagtttgaagatgggaaactcccatccggtaaggctgatgccctggaccaccacgcgaaatgctttctgatcctcaaactttatgatcataaagtggacaaaagcaaatgggaaatgccgacgggttcgaacatgggcgaggccaaaccgtggaaagcaattcgcgtagatctggttcgttgcccctacggcggttttgcgtttgcgttgttgggttggaccggaagccgcatgttccgccgtgatctgcgctggtacgccactgacgagaagaacatgatgctggacaatcatgcgctgtatgacctgaccaagaaaatctttctcaaagctaaatcggaagaggaaattttcgcacatctggggcttgaatacctggaaccgttcgaacgtaacgca

SEQ ID NO: 2168 - protein, 529 aa, synthetic construct
  REGION 1..529: note = Variant of terminal deoxynucleotidyltransferase
MHHHHHHGGSGSHGIRTIDSDFGKKRQKKMDNHDSSAIYEIKFHEFVLFILEEKMGATRRTFLTDLARKKGFRVENELSDSVTHIVAENNSRSEVLAWLKEHKMEKTKQFELLDISWLIESMKVGKPVDTKGKYQLAESGEMSANPDPTEGRENELPPTMKTVSPYACQRRTTLNNHNQRFTDALEILAENYEFKRNDDTALEFRRAISVLKSLPFEVRSLKDTEGLPWIGDEVKGIMEEIIEVGESLEVQAVLNDERYQSFKRFKSVFGVGVKTADKWYRMGLRTLEDVRSSKTLKLTPMQKAGICYYEDLARGVTKAEADAISLLVQDAVATFDPDALVEIVGGFRRGKPQGHDVDLLITSPGAEKEQEDQLLQKVTNLWKKQGLLLYGRLEWSQFEDGKLPSGKADALDHHAKCFLILKLYDHKVDKSKWEMPTGSNMGEAKPWKAIRVDLVRCPYGGFAFALLGWTGSRMFRRDLRWYATDEKNMMLDNHALYDLTKKIFLKAKSEEEIFAHLGLEYLEPFERNA

SEQ ID NO: 2169 - DNA, 1587 bp, synthetic construct
  misc_feature 1..1587: note = Variant of terminal deoxynucleotidyltransferase
  source 1..1587: mol_type = other DNA
atgcaccatcatcatcatcatggcggtagcggcagccacggcattcgtaccatcgattcggacttcgggaagaaacgccagaaaaaaatggataaccacgatagttccgccatctatgaaatcaaatttcacgagtttgtgctgttcattctcgaagaaaaaatgggtgcgacgcgtcgtacttttctgacagatttagcccgcaagaaagggttccgcgtcgagaatgaactgtcagacagcgttacccacatcgtggcagaaaataattcacgctctgaagtattggcttggctgaaagaacacaagatggagaagaccaagcaattcgaactgctggatattagctggcttatcgaaagcatgaaagttggtaaaccggtggacaccaaggggaaataccagttggcggaatcgggtgagatgagtgcgaacccagatccgacagagggtcgtgaaaacgagctgcctcctactatgaagaccgtttctccgtatgcgtgtcaacgccgcaccaccctgaacaaccataatcaacgttttacggacgcactggaaattcttgcggaaaattacgagttcaaacgcaacgatgatactgcgctggaatttcgtcgtgctatctccgtgctgaaaagccttccgtttgaggtacgtagcctgaaagacacggaaggattgccctggatcggtgatgaagtcaaagggattatggaagaaatcatcgaggtcggtgaatcgctggaagtgcaggccgtgctcaatgatgagcgctatcaaagcttcaaacgctttaagagtgtctttggatgtggggtgaagacagcagacaagtggtaccgtatgggtctgcgcacgctcgaggatgttcgttccagcaagaccctgaagttgaccccgatgcagaaagcgggtctgtgctattatgaagatcttgctcgcggcgttacgaaagccgaagctgacgcgatttctctgctggttcaggatgcagtcgcaactttcgacccggatgcgctggtggagattgtcggtggatttcgtcgtgggaaacctcagggtcacgacgttgatctgcttatcacatctccgggagctgagaaagagcaagaagaccagctcctgcagaaagtgaccaatctgtggaagaaacaagggttgttgctgtacggtcgtctggaatggagtcagtttgaagatgggaaactcccatccggtaaggctgatgccctggaccaccacgcgaaatgctttctgatcctcaaactttatgatcataaagtggacaaaagcaaatgggaaatgccgacgggttcgaacatgggcgaggccaaaccgtggaaagcaattcgcgtagatctggttcgttgcccctacggcggttttgcgtttgcgttgttgggttggaccggaagccgcatgttccgccgtgatctgcgctggtacgccactgacgagaagaacatgatgctggacaatcatgcgctgtatgacctgaccaagaaaatctttctcaaagctaaatcggaagaggaaattttcgcacatctggggcttgaatacctggaaccgttcgaacgtaacgca

SEQ ID NO: 2170 - protein, 529 aa, synthetic construct
  REGION 1..529: note = Variant of terminal deoxynucleotidyltransferase
MHHHHHHGGSGSHGIRTIDSDFGKKRQKKMDNHDSSAIYEIKFHEFVLFILEEKMGATRRTFLTDLARKKGFRVENELSDSVTHIVAENNSRSEVLAWLKEHKMEKTKQFELLDISWLIESMKVGKPVDTKGKYQLAESGEMSANPDPTEGRENELPPTMKTVSPYACQRRTTLNNHNQRFTDALEILAENYEFKRNDDTALEFRRAISVLKSLPFEVRSLKDTEGLPWIGDEVKGIMEEIIEVGESLEVQAVLNDERYQSFKRFKSVFGCGVKTADKWYRMGLRTLEDVRSSKTLKLTPMQKAGLCYYEDLARGVTKAEADAISLLVQDAVATFDPDALVEIVGGFRRGKPQGHDVDLLITSPGAEKEQEDQLLQKVTNLWKKQGLLLYGRLEWSQFEDGKLPSGKADALDHHAKCFLILKLYDHKVDKSKWEMPTGSNMGEAKPWKAIRVDLVRCPYGGFAFALLGWTGSRMFRRDLRWYATDEKNMMLDNHALYDLTKKIFLKAKSEEEIFAHLGLEYLEPFERNA

SEQ ID NO: 2171 - DNA, 1587 bp, synthetic construct
  misc_feature 1..1587: note = Variant of terminal deoxynucleotidyltransferase
  source 1..1587: mol_type = other DNA
atgcaccatcatcatcatcatggcggtagcggcagccacggcattcgtaccatcgattcggacttcgggaagaaacgccagaaaaaaatggataaccacgatagttccgccatctatgaaatcaaatttcacgagtttgtgctgttcattctcgaagaaaaaatgggtgcgacgcgtcgtacttttctgacagatttagcccgcaagaaagggttccgcgtcgagaatgaactgtcagacagcgttacccacatcgtggcagaaaataattcacgctctgaagtattggcttggctgaaagaacacaagatggagaagaccaagcaattcgaactgctggatattagctggcttatcgaaagcatgaaagttggtaaaccggtggacaccaaggggaaataccagttggcggaatcgggtgagatgagtgcgaacccagatccgacagagggtcgtgaaaacgagctgcctcctactatgaagaccgtttctccgtatgcgtgtcaacgccgcaccaccctgaacaaccataatcaacgttttacggacgcactggaaattcttgcggaaaattacgagttcaaacgcaacgatgatactgcgctggaatttcgtcgtgctatctccgtgctgaaaagccttccgtttgaggtacgtagcctgaaagacacggaaggattgccctggatcggtgatgaagtcaaagggattatggaagaaatcatcgaggtcggtgaatcgctggaagtgcaggccgtgctcaatgatgagcgctatcaaagcttcaaacgctttaagagtgtctttggagtgggggtgaagacagcagacaagtggtaccgtatgggtctgcgcacgctcgaggatgttcgttccagcaagaccctgaagttgaccccgatgcagaaagcgggtctgtgctattatgaagatcttgctcgcggcgttacgaaagccgaagctgacgcgatttctctgctggttcaggatgcagtcgcaactttcgacccggatgcgctggtggagattgtcggtggatttcgtcgtgggaaacctcagggtcacgacgttgatctgcttatcacatctccgggagctgagaaagagcaagaagaccagctcctgcagaaagtgaccaatctgtggaagaaacaagggttgttgctgtacggtcgtctggaatggagtcagtttgaagatgggaaactcccatccggtaaggctgatgccctggaccaccacgcgaaatgctttctgatcctcaaactttatgatcataaagtggacaaaagcaaatgggaaatgccgacgggttcgaacatgggcgaggccaaaccgtggaaagcaattcgcgtagatctgattcgttgcccctacggcggttttgcgtttgcgttgttgggttggaccggaagccgcatgttccgccgtgatctgcgctggtacgccactgacgagaagaacatgatgctggacaatcatgcgctgtatgacctgaccaagaaaatctttctcaaagctaaatcggaagaggaaattttcgcacatctggggcttgaatacctggaaccgttcgaacgtaacgca

SEQ ID NO: 2172 - protein, 529 aa, synthetic construct
  REGION 1..529: note = Variant of terminal deoxynucleotidyltransferase
MHHHHHHGGSGSHGIRTIDSDFGKKRQKKMDNHDSSAIYEIKFHEFVLFILEEKMGATRRTFLTDLARKKGFRVENELSDSVTHIVAENNSRSEVLAWLKEHKMEKTKQFELLDISWLIESMKVGKPVDTKGKYQLAESGEMSANPDPTEGRENELPPTMKTVSPYACQRRTTLNNHNQRFTDALEILAENYEFKRNDDTALEFRRAISVLKSLPFEVRSLKDTEGLPWIGDEVKGIMEEIIEVGESLEVQAVLNDERYQSFKRFKSVFGVGVKTADKWYRMGLRTLEDVRSSKTLKLTPMQKAGLCYYEDLARGVTKAEADAISLLVQDAVATFDPDALVEIVGGFRRGKPQGHDVDLLITSPGAEKEQEDQLLQKVTNLWKKQGLLLYGRLEWSQFEDGKLPSGKADALDHHAKCFLILKLYDHKVDKSKWEMPTGSNMGEAKPWKAIRVDLIRCPYGGFAFALLGWTGSRMFRRDLRWYATDEKNMMLDNHALYDLTKKIFLKAKSEEEIFAHLGLEYLEPFERNA

SEQ ID NO: 2173 - DNA, 1587 bp, synthetic construct
  misc_feature 1..1587: note = Variant of terminal deoxynucleotidyltransferase
  source 1..1587: mol_type = other DNA
atgcaccatcatcatcatcatggcggtagcggcagccacggcattcgtaccatcgattcggacttcgggaagaaacgccagaaaaaaatggataaccacgatagttccgccatctatgaaatcaaatttcacgagtttgtgctgttcattctcgaagaaaaaatgggtgcgacgcgtcgtacttttctgacagatttagcccgcaagaaagggttccgcgtcgagaatgaactgtcagacagcgttacccacatcgtggcagaaaataattcacgctctgaagtattggcttggctgaaagaacacaagatggagaagaccaagcaattcgaactgctggatattagctggcttatcgaaagcatgaaagttggtaaaccggtggacaccaaggggaaataccagttggcggaatcgggtgagatgagtgcgaacccagatccgacagagggtcgtgaaaacgagctgcctcctactatgaagaccgtttctccgtatgcgtgtcaacgccgcaccaccctgaacaaccataatcaacgttttacggacgcactggaaattcttgcggaaaattacgagttcaaacgcaacgatgatactgcgctggaatttcgtcgtgctatctccgtgctgaaaagccttccgtttgaggtacgtagcctgaaagacacggaaggattgccctggatcggtgatgaagtcaaagggattatggaagaaatcatcgaggtcggtgaatcgctggaagtgcaggccgtgctcaatgatgagcgctatcaaagcttcaaacgctttaagagtgtctttggagtgggggtgaagacagcagacaagtggtaccgtatgggtctgcgcacgctcgaggatgttcgttccagcaagaccctgaagttgaccccgatgcagaaagcgggtctgtgctattatgaagatcttgctcgcggcgttacgaaagccgaagctgacgcgatttctctgctggttcaggatgcagtcgcaactttcgacccggatgcgctggtggagattgtcggtggatttcgtcgtgggaaacctcagggtcacgacgttgatctgcttatcacatctccgggagctgagaaagagcaagaagaccagctcctgcagaaagtgaccaatctgtggaagaaacaagggttgttgctgtacggtcgtctggaatggagtcagtttgaagatgggaaactcccatccggtaaggctgatgccattgaccatttcgcgaaatgctttctgatcctcaaactttatgatcataaagtggacaaaagcaaatgggaaatgccgacgggttcgaacatgggcgaggccaaaccgtggaaagcaattcgcgtagatctggttcgttgcccctacggcggttttgcgtttgcgttgttgggttggaccggaagccgcatgttccgccgtgatctgcgctggtacgccactgacgagaagaacatgatgctggacaatcatgcgctgtatgacctgaccaagaaaatctttctcaaagctaaatcggaagaggaaattttcgcacatctggggcttgaatacctggaaccgttcgaacgtaacgca

SEQ ID NO: 2174 - protein, 529 aa, synthetic construct
  REGION 1..529: note = Variant of terminal deoxynucleotidyltransferase
MHHHHHHGGSGSHGIRTIDSDFGKKRQKKMDNHDSSAIYEIKFHEFVLFILEEKMGATRRTFLTDLARKKGFRVENELSDSVTHIVAENNSRSEVLAWLKEHKMEKTKQFELLDISWLIESMKVGKPVDTKGKYQLAESGEMSANPDPTEGRENELPPTMKTVSPYACQRRTTLNNHNQRFTDALEILAENYEFKRNDDTALEFRRAISVLKSLPFEVRSLKDTEGLPWIGDEVKGIMEEIIEVGESLEVQAVLNDERYQSFKRFKSVFGVGVKTADKWYRMGLRTLEDVRSSKTLKLTPMQKAGLCYYEDLARGVTKAEADAISLLVQDAVATFDPDALVEIVGGFRRGKPQGHDVDLLITSPGAEKEQEDQLLQKVTNLWKKQGLLLYGRLEWSQFEDGKLPSGKADAIDHFAKCFLILKLYDHKVDKSKWEMPTGSNMGEAKPWKAIRVDLVRCPYGGFAFALLGWTGSRMFRRDLRWYATDEKNMMLDNHALYDLTKKIFLKAKSEEEIFAHLGLEYLEPFERNA

SEQ ID NO: 2175 - DNA, 1587 bp, synthetic construct
  misc_feature 1..1587: note = Variant of terminal deoxynucleotidyltransferase
  source 1..1587: mol_type = other DNA
atgcaccatcatcatcatcatggcggtagcggcagccacggcattcgtaccatcgattcggacttcgggaagaaacgccagaaaaaaatggataaccacgatagttccgccatctatgaaatcaaatttcacgagtttgtgctgttcattctcgaagaaaaaatgggtgcgacgcgtcgtacttttctgacagatttagcccgcaagaaagggttccgcgtcgagaatgaactgtcagacagcgttacccacatcgtggcagaaaataattcacgctctgaagtattggcttggctgaaagaacacaagatggagaagaccaagcaattcgaactgctggatattagctggcttatcgaaagcatgaaagttggtaaaccggtggacaccaaggggaaataccagttggcggaatcgggtgagatgagtgcgaacccagatccgacagagggtcgtgaaaacgagctgcctcctactatgaagaccgtttctccgtatgcgtgtcaacgccgcaccaccctgaacaaccataatcaacgttttacggacgcactggaaattcttgcggaaaattacgagttcaaacgcaacgatgatactgcgctggaatttcgtcgtgctatctccgtgctgaaaagccttccgtttgaggtacgtagcctgaaagacacggaaggattgccctggatcggtgatgaagtcaaagggattatggaagaaatcatcgaggtcggtgaatcgctggaagtgcaggccgtgctcaatgatgagcgctatcaaagcttcaaacgctttaagagtgtctttggagtgggggtgaagacagcagacaagtggtaccgtatgggtctgcgcacgctcgaggatgttcgttccagcaagaccctgaagttgaccccgatgcagaaagcgggtctgtgctattatgaagatcttgctcgcggcgttacgaaagccgaagctgacgcgatttctctgctggttcaggatgcagtcgcaactttcgacccggatgcgctggtggagattgtcggtggatttcgtcgtgggaaacctcagggtcacgacgttgatctgcttatcacatctccgggagctgagaaagagcaagaagaccagctcctgcagaaagtgaccaatctgtggaagaaacaagggttgttgctgtacggtcgtctggaatggagtcagtttgaagatgggaaactcccatccggtaaggctgatgccctggacggtttcgcgaaatgctttctgatcctcaaactttatgatcataaagtggacaaaagcaaatgggaaatgccgacgggttcgaacatgggcgaggccaaaccgtggaaagcaattcgcgtagatctggttcgttgcccctacggcggttttgcgtttgcgttgttgggttggaccggaagccgcatgttccgccgtgatctgcgctggtacgccactgacgagaagaacatgatgctggacaatcatgcgctgtatgacctgaccaagaaaatctttctcaaagctaaatcggaagaggaaattttcgcacatctggggcttgaatacctggaaccgttcgaacgtaacgca

SEQ ID NO: 2176 - protein, 529 aa, synthetic construct
  REGION 1..529: note = Variant of terminal deoxynucleotidyltransferase
MHHHHHHGGSGSHGIRTIDSDFGKKRQKKMDNHDSSAIYEIKFHEFVLFILEEKMGATRRTFLTDLARKKGFRVENELSDSVTHIVAENNSRSEVLAWLKEHKMEKTKQFELLDISWLIESMKVGKPVDTKGKYQLAESGEMSANPDPTEGRENELPPTMKTVSPYACQRRTTLNNHNQRFTDALEILAENYEFKRNDDTALEFRRAISVLKSLPFEVRSLKDTEGLPWIGDEVKGIMEEIIEVGESLEVQAVLNDERYQSFKRFKSVFGVGVKTADKWYRMGLRTLEDVRSSKTLKLTPMQKAGLCYYEDLARGVTKAEADAISLLVQDAVATFDPDALVEIVGGFRRGKPQGHDVDLLITSPGAEKEQEDQLLQKVTNLWKKQGLLLYGRLEWSQFEDGKLPSGKADALDGFAKCFLILKLYDHKVDKSKWEMPTGSNMGEAKPWKAIRVDLVRCPYGGFAFALLGWTGSRMFRRDLRWYATDEKNMMLDNHALYDLTKKIFLKAKSEEEIFAHLGLEYLEPFERNA

SEQ ID NO: 2177 - DNA, 1587 bp, synthetic construct
  misc_feature 1..1587: note = Variant of terminal deoxynucleotidyltransferase
  source 1..1587: mol_type = other DNA
atgcaccatcatcatcatcatggcggtagcggcagccacggcattcgtaccatcgattcggacttcgggaagaaacgccagaaaaaaatggataaccacgatagttccgccatctatgaaatcaaatttcacgagtttgtgctgttcattctcgaagaaaaaatgggtgcgacgcgtcgtacttttctgacagatttagcccgcaagaaagggttccgcgtcgagaatgaactgtcagacagcgttacccacatcgtggcagaaaataattcacgctctgaagtattggcttggctgaaagaacacaagatggagaagaccaagcaattcgaactgctggatattagctggcttatcgaaagcatgaaagttggtaaaccggtggacaccaaggggaaataccagttggcggaatcgggtgagatgagtgcgaacccagatccgacagagggtcgtgaaaacgagctgcctcctactatgaagaccgtttctccgtatgcgtgtcaacgccgcaccaccctgaacaaccataatcaacgttttacggacgcactggaaattcttgcggaaaattacgagttcaaacgcggggatgatactgcgctggaatttcgtcgtgctatctccgtgctgaaaagccttccgtttgaggtacgtagcctgaaagacacggaaggattgccctggatcggtgatgaagtcaaagggattatggaagaaatcatcgaggtcggtgaatcgctggaagtgcaggccgtgctcaatgatgagcgctatcaaagcttcaaacgctttaagagtgtctttggagtgggggtgaagacagcagacaagtggtaccgtatgggtctgcgcacgctcgaggatgttcgttccagcaagaccctgaagttgaccccgatgcagaaagcgggtctgtgctattatgaagatcttgctcgcggcgttacgaaagccgaagctgacgcgatttctctgctggttcaggatgcagtcgcaactttcgacccggatgcgctggtggagattgtcggtggatttcgtcgtgggaaacctcagggtcacgacgttgatctgcttatcacatctccgggagctgagaaagagcaagaagaccagctcctgcagaaagtgaccaatctgtggaagaaacaagggttgttgctgtacggtcgtctggaatggagtcagtttgaagatgggaaactcccatccggtaaggctgatgccctggaccaccacgcgaaatgctttctgatcctcaaactttatgatcataaagtggacaaaagcaaatgggaaatgccgacgggttcgaacatgggcgaggccaaaccgtggaaagcaattcgcgtagatctggttcgttgcccctacggcggttttgcgtttgcgttgttgggttggaccggaagccgcatgttccgccgtgatctgcgctggtacgccactgacgagaagaacatgatgctggacaatcatgcgctgtatgacctgaccaagaaaatctttctcaaagctaaatcggaagaggaaattttcgcacatctggggcttgaatacctggaaccgttcgaacgtaacgca

SEQ ID NO: 2178 - protein, 529 aa, synthetic construct
  REGION 1..529: note = Variant of terminal deoxynucleotidyltransferase
MHHHHHHGGSGSHGIRTIDSDFGKKRQKKMDNHDSSAIYEIKFHEFVLFILEEKMGATRRTFLTDLARKKGFRVENELSDSVTHIVAENNSRSEVLAWLKEHKMEKTKQFELLDISWLIESMKVGKPVDTKGKYQLAESGEMSANPDPTEGRENELPPTMKTVSPYACQRRTTLNNHNQRFTDALEILAENYEFKRGDDTALEFRRAISVLKSLPFEVRSLKDTEGLPWIGDEVKGIMEEIIEVGESLEVQAVLNDERYQSFKRFKSVFGVGVKTADKWYRMGLRTLEDVRSSKTLKLTPMQKAGLCYYEDLARGVTKAEADAISLLVQDAVATFDPDALVEIVGGFRRGKPQGHDVDLLITSPGAEKEQEDQLLQKVTNLWKKQGLLLYGRLEWSQFEDGKLPSGKADALDHHAKCFLILKLYDHKVDKSKWEMPTGSNMGEAKPWKAIRVDLVRCPYGGFAFALLGWTGSRMFRRDLRWYATDEKNMMLDNHALYDLTKKIFLKAKSEEEIFAHLGLEYLEPFERNA

SEQ ID NO: 2179 - DNA, 1587 bp, synthetic construct
  misc_feature 1..1587: note = Variant of terminal deoxynucleotidyltransferase
  source 1..1587: mol_type = other DNA
atgcaccatcatcatcatcatggcggtagcggcagccacggcattcgtaccatcgattcggacttcgggaagaaacgccagaaaaaaatggataaccacgatagttccgccatctatgaaatcaaatttcacgagtttgtgctgttcattctcgaagaaaaaatgggtgcgacgcgtcgtacttttctgacagatttagcccgcaagaaagggttccgcgtcgagaatgaactgtcagacagcgttacccacatcgtggcagaaaataattcacgctctgaagtattggcttggctgaaagaacacaagatggagaagaccaagcaattcgaactgctggatattagctggcttatcgaaagcatgaaagttggtaaaccggtggacaccaaggggaaataccagttggcggaatcgggtgagatgagtgcgaacccagatccgacagagggtcgtgaaaacgagctgcctcctactatgaagaccgtttctccgtatgcgtgtcaacgccgcaccaccctgaacaaccataatcaacgttttacggacgcactggaaattcttgcggaaaattacgagggtaaacgcaacgatgatactgcgctggaatttcgtcgtgctatctccgtgctgaaaagccttccgtttgaggtacgtagcctgaaagacacggaaggattgccctggatcggtgatgaagtcaaagggattatggaagaaatcatcgaggtcggtgaatcgctggaagtgcaggccgtgctcaatgatgagcgctatcaaagcttcaaacgctttaagagtgtctttggagtgggggtgaagacagcagacaagtggtaccgtatgggtctgcgcacgctcgaggatgttcgttccagcaagaccctgaagttgaccccgatgcagaaagcgggtctgtgctattatgaagatcttgctcgcggcgttacgaaagccgaagctgacgcgatttctctgctggttcaggatgcagtcgcaactttcgacccggatgcgctggtggagattgtcggtggatttcgtcgtgggaaacctcagggtcacgacgttgatctgcttatcacatctccgggagctgagaaagagcaagaagaccagctcctgcagaaagtgaccaatctgtggaagaaacaagggttgttgctgtacggtcgtctggaatggagtcagtttgaagatgggaaactcccatccggtaaggctgatgccctggaccaccacgcgaaatgctttctgatcctcaaactttatgatcataaagtggacaaaagcaaatgggaaatgccgacgggttcgaacatgggcgaggccaaaccgtggaaagcaattcgcgtagatctggttcgttgcccctacggcggttttgcgtttgcgttgttgggttggaccggaagccgcatgttccgccgtgatctgcgctggtacgccactgacgagaagaacatgatgctggacaatcatgcgctgtatgacctgaccaagaaaatctttctcaaagctaaatcggaagaggaaattttcgcacatctggggcttgaatacctggaaccgttcgaacgtaacgca

SEQ ID NO: 2180 - protein, 529 aa, synthetic construct
  REGION 1..529: note = Variant of terminal deoxynucleotidyltransferase
MHHHHHHGGSGSHGIRTIDSDFGKKRQKKMDNHDSSAIYEIKFHEFVLFILEEKMGATRRTFLTDLARKKGFRVENELSDSVTHIVAENNSRSEVLAWLKEHKMEKTKQFELLDISWLIESMKVGKPVDTKGKYQLAESGEMSANPDPTEGRENELPPTMKTVSPYACQRRTTLNNHNQRFTDALEILAENYEGKRNDDTALEFRRAISVLKSLPFEVRSLKDTEGLPWIGDEVKGIMEEIIEVGESLEVQAVLNDERYQSFKRFKSVFGVGVKTADKWYRMGLRTLEDVRSSKTLKLTPMQKAGLCYYEDLARGVTKAEADAISLLVQDAVATFDPDALVEIVGGFRRGKPQGHDVDLLITSPGAEKEQEDQLLQKVTNLWKKQGLLLYGRLEWSQFEDGKLPSGKADALDHHAKCFLILKLYDHKVDKSKWEMPTGSNMGEAKPWKAIRVDLVRCPYGGFAFALLGWTGSRMFRRDLRWYATDEKNMMLDNHALYDLTKKIFLKAKSEEEIFAHLGLEYLEPFERNA

SEQ ID NO: 2181 - DNA, 1587 bp, synthetic construct
  misc_feature 1..1587: note = Variant of terminal deoxynucleotidyltransferase
  source 1..1587: mol_type = other DNA
atgcaccatcatcatcatcatggcggtagcggcagccacggcattcgtaccatcgattcggacttcgggaagaaacgccagaaaaaaatggataaccacgatagttccgccatctatgaaatcaaatttcacgagtttgtgctgttcattctcgaagaaaaaatgggtgcgacgcgtcgtacttttctgacagatttagcccgcaagaaagggttccgcgtcgagaatgaactgtcagacagcgttacccacatcgtggcagaaaataattcacgctctgaagtattggcttggctgaaagaacacaagatggagaagaccaagcaattcgaactgctggatattagctggcttatcgaaagcatgaaagttggtaaaccggtggacaccaaggggaaataccagttggcggaatcgggtgagatgagtgcgaacccagatccgacagagggtcgtgaaaacgagctgcctcctactatgaagaccgtttctccgtatgcgtgtcaacgccgcaccaccctgaacaaccataatcaacgttttacggacgcactggaaattcttgcggaaaatattgagttcaaacgcaacgatgatactgcgctggaatttcgtcgtgctatctccgtgctgaaaagccttccgtttgaggtacgtagcctgaaagacacggaaggattgccctggatcggtgatgaagtcaaagggattatggaagaaatcatcgaggtcggtgaatcgctggaagtgcaggccgtgctcaatgatgagcgctatcaaagcttcaaacgctttaagagtgtctttggagtgggggtgaagacagcagacaagtggtaccgtatgggtctgcgcacgctcgaggatgttcgttccagcaagaccctgaagttgaccccgatgcagaaagcgggtctgtgctattatgaagatcttgctcgcggcgttacgaaagccgaagctgacgcgatttctctgctggttcaggatgcagtcgcaactttcgacccggatgcgctggtggagattgtcggtggatttcgtcgtgggaaacctcagggtcacgacgttgatctgcttatcacatctccgggagctgagaaagagcaagaagaccagctcctgcagaaagtgaccaatctgtggaagaaacaagggttgttgctgtacggtcgtctggaatggagtcagtttgaagatgggaaactcccatccggtaaggctgatgccctggaccaccacgcgaaatgctttctgatcctcaaactttatgatcataaagtggacaaaagcaaatgggaaatgccgacgggttcgaacatgggcgaggccaaaccgtggaaagcaattcgcgtagatctggttcgttgcccctacggcggttttgcgtttgcgttgttgggttggaccggaagccgcatgttccgccgtgatctgcgctggtacgccactgacgagaagaacatgatgctggacaatcatgcgctgtatgacctgaccaagaaaatctttctcaaagctaaatcggaagaggaaattttcgcacatctggggcttgaatacctggaaccgttcgaacgtaacgca

SEQ ID NO: 2182 - protein, 529 aa, synthetic construct
  REGION 1..529: note = Variant of terminal deoxynucleotidyltransferase
MHHHHHHGGSGSHGIRTIDSDFGKKRQKKMDNHDSSAIYEIKFHEFVLFILEEKMGATRRTFLTDLARKKGFRVENELSDSVTHIVAENNSRSEVLAWLKEHKMEKTKQFELLDISWLIESMKVGKPVDTKGKYQLAESGEMSANPDPTEGRENELPPTMKTVSPYACQRRTTLNNHNQRFTDALEILAENIEFKRNDDTALEFRRAISVLKSLPFEVRSLKDTEGLPWIGDEVKGIMEEIIEVGESLEVQAVLNDERYQSFKRFKSVFGVGVKTADKWYRMGLRTLEDVRSSKTLKLTPMQKAGLCYYEDLARGVTKAEADAISLLVQDAVATFDPDALVEIVGGFRRGKPQGHDVDLLITSPGAEKEQEDQLLQKVTNLWKKQGLLLYGRLEWSQFEDGKLPSGKADALDHHAKCFLILKLYDHKVDKSKWEMPTGSNMGEAKPWKAIRVDLVRCPYGGFAFALLGWTGSRMFRRDLRWYATDEKNMMLDNHALYDLTKKIFLKAKSEEEIFAHLGLEYLEPFERNA

SEQ ID NO: 2183 - DNA, 1587 bp, synthetic construct
  misc_feature 1..1587: note = Variant of terminal deoxynucleotidyltransferase
  source 1..1587: mol_type = other DNA
atgcaccatcatcatcatcatggcggtagcggcagccacggcattcgtaccatcgattcggacttcgggaagaaacgccagaaaaaaatggataaccacgatagttccgccatctatgaaatcaaatttcacgagtttgtgctgttcattctcgaagaaaaaatgggtgcgacgcgtcgtacttttctgacagatttagcccgcaagaaagggttccgcgtcgagaatgaactgtcagacagcgttacccacatcgtggcagaaaataattcacgctctgaagtattggcttggctgaaagaacacaagatggagaagaccaagcaattcgaactgctggatattagctggcttatcgaaagcatgaaagttggtaaaccggtggacaccaaggggaaataccagttggcggaatcgggtgagatgagtgcgaacccagatccgacagagggtcgtgaaaacgagctgcctcctactatgaagaccgtttctccgtatgcgtgtcaacgccgcaccaccctgaacaaccataatcaacgttttacggacgcactggaaattcttgcggaaaattacgagttcaaacgcaacgatgatactgcgctggaatttcgtcgtgctatctccgtgctgaaaagccttccgtttgaggtacgtagcctgaaagacacggaaggattgccctggatcggtgatgaagtcaaagggattatggaagaaatcatcgaggtcggtgaatcgctggaagtgcgggccgtgctcaatgatgagcgctatcaaagcttcaaacgctttaagagtgtctttggagtgggggtgaagacagcagacaagtggtaccgtatgggtctgcgcacgctcgaggatgttcgttccagcaagaccctgaagttgaccccgatgcagaaagcgggtctgtgctattatgaagatcttgctcgcggcgttacgaaagccgaagctgacgcgatttctctgctggttcaggatgcagtcgcaactttcgacccggatgcgctggtggagattgtcggtggatttcgtcgtgggaaacctcagggtcacgacgttgatctgcttatcacatctccgggagctgagaaagagcaagaagaccagctcctgcagaaagtgaccaatctgtggaagaaacaagggttgttgctgtacggtcgtctggaatggagtcagtttgaagatgggaaactcccatccggtaaggctgatgccctggaccaccacgcgaaatgctttctgatcctcaaactttatgatcataaagtggacaaaagcaaatgggaaatgccgacgggttcgaacatgggcgaggccaaaccgtggaaagcaattcgcgtagatctggttcgttgcccctacggcggttttgcgtttgcgttgttgggttggaccggaagccgcatgttccgccgtgatctgcgctggtacgccactgacgagaagaacatgatgctggacaatcatgcgctgtatgacctgaccaagaaaatctttctcaaagctaaatcggaagaggaaattttcgcacatctggggcttgaatacctggaaccgttcgaacgtaacgca

SEQ ID NO: 2184 - protein, 529 aa, synthetic construct
  REGION 1..529: note = Variant of terminal deoxynucleotidyltransferase
MHHHHHHGGSGSHGIRTIDSDFGKKRQKKMDNHDSSAIYEIKFHEFVLFILEEKMGATRRTFLTDLARKKGFRVENELSDSVTHIVAENNSRSEVLAWLKEHKMEKTKQFELLDISWLIESMKVGKPVDTKGKYQLAESGEMSANPDPTEGRENELPPTMKTVSPYACQRRTTLNNHNQRFTDALEILAENYEFKRNDDTALEFRRAISVLKSLPFEVRSLKDTEGLPWIGDEVKGIMEEIIEVGESLEVRAVLNDERYQSFKRFKSVFGVGVKTADKWYRMGLRTLEDVRSSKTLKLTPMQKAGLCYYEDLARGVTKAEADAISLLVQDAVATFDPDALVEIVGGFRRGKPQGHDVDLLITSPGAEKEQEDQLLQKVTNLWKKQGLLLYGRLEWSQFEDGKLPSGKADALDHHAKCFLILKLYDHKVDKSKWEMPTGSNMGEAKPWKAIRVDLVRCPYGGFAFALLGWTGSRMFRRDLRWYATDEKNMMLDNHALYDLTKKIFLKAKSEEEIFAHLGLEYLEPFERNA

SEQ ID NO: 2185 - DNA, 1587 bp, synthetic construct
  misc_feature 1..1587: note = Variant of terminal deoxynucleotidyltransferase
  source 1..1587: mol_type = other DNA
atgcaccatcatcatcatcatggcggtagcggcagccacggcattcgtaccatcgattcggacttcgggaagaaacgccagaaaaaaatggataaccacgatagttccgccatctatgaaatcaaatttcacgagtttgtgctgttcattctcgaagaaaaaatgggtgcgacgcgtcgtacttttctgacagatttagcccgcaagaaagggttccgcgtcgagaatgaactgtcagacagcgttacccacatcgtggcagaaaataattcacgctctgaagtattggcttggctgaaagaacacaagatggagaagaccaagcaattcgaactgctggatattagctggcttatcgaaagcatgaaagttggtaaaccggtggacaccaaggggaaataccagttggcggaatcgggtgagatgagtgcgaacccagatccgacagagggtcgtgaaaacgagctgcctcctactatgaagaccgtttctccgtatgcgtgtcaacgccgcaccaccctgaacaaccataatcaacgttttacggacgcactggaaattcttgcggaaaattacgagttcaaacgcaacgatgatactgcgctggaatttcgtcgtgctatctccgtgctgaaaagccttccgtttgaggtacgtagcctgaaagacacggaaggattgccctggatcggtgatgaagtcaaagggattatggaagaaatcatcgaggtcggtgaatcgctggaagtgcaggccgtgctcaatgatgagcgctatcaaagcttcaaacgctttaagagtgtctttggagtgggggtgaagacagcagacaagtggtaccgtatgggtctgcgcacgctcgaggatgttcgttccagcaagaccctgaagttgaccccgatgcagaaagcgggtctgtgctattatgaagatcttgctcgcggcgcgacgaaagccgaagctgacgcgatttctctgctggttcaggatgcagtcgcaactttcgacccggatgcgctggtggagattgtcggtggatttcgtcgtgggaaacctcagggtcacgacgttgatctgcttatcacatctccgggagctgagaaagagcaagaagaccagctcctgcagaaagtgaccaatctgtggaagaaacaagggttgttgctgtacggtcgtctggaatggagtcagtttgaagatgggaaactcccatccggtaaggctgatgccctggaccaccacgcgaaatgctttctgatcctcaaactttatgatcataaagtggacaaaagcaaatgggaaatgccgacgggttcgaacatgggcgaggccaaaccgtggaaagcaattcgcgtagatctggttcgttgcccctacggcggttttgcgtttgcgttgttgggttggaccggaagccgcatgttccgccgtgatctgcgctggtacgccactgacgagaagaacatgatgctggacaatcatgcgctgtatgacctgaccaagaaaatctttctcaaagctaaatcggaagaggaaattttcgcacatctggggcttgaatacctggaaccgttcgaacgtaacgca

SEQ ID NO: 2186 - protein, 529 aa, synthetic construct
  REGION 1..529: note = Variant of terminal deoxynucleotidyltransferase
MHHHHHHGGSGSHGIRTIDSDFGKKRQKKMDNHDSSAIYEIKFHEFVLFILEEKMGATRRTFLTDLARKKGFRVENELSDSVTHIVAENNSRSEVLAWLKEHKMEKTKQFELLDISWLIESMKVGKPVDTKGKYQLAESGEMSANPDPTEGRENELPPTMKTVSPYACQRRTTLNNHNQRFTDALEILAENYEFKRNDDTALEFRRAISVLKSLPFEVRSLKDTEGLPWIGDEVKGIMEEIIEVGESLEVQAVLNDERYQSFKRFKSVFGVGVKTADKWYRMGLRTLEDVRSSKTLKLTPMQKAGLCYYEDLARGATKAEADAISLLVQDAVATFDPDALVEIVGGFRRGKPQGHDVDLLITSPGAEKEQEDQLLQKVTNLWKKQGLLLYGRLEWSQFEDGKLPSGKADALDHHAKCFLILKLYDHKVDKSKWEMPTGSNMGEAKPWKAIRVDLVRCPYGGFAFALLGWTGSRMFRRDLRWYATDEKNMMLDNHALYDLTKKIFLKAKSEEEIFAHLGLEYLEPFERNA

SEQ ID NO: 2187 - DNA, 1587 bp, synthetic construct
  misc_feature 1..1587: note = Variant of terminal deoxynucleotidyltransferase
  source 1..1587: mol_type = other DNA
atgcaccatcatcatcatcatggcggtagcggcagccacggcattcgtaccatcgattcggacttcgggaagaaacgccagaaaaaaatggataaccacgatagttccgccatctatgaaatcaaatttcacgagtttgtgctgttcattctcgaagaaaaaatgggtgcgacgcgtcgtacttttctgacagatttagcccgcaagaaagggttccgcgtcgagaatgaactgtcagacagcgttacccacatcgtggcagaaaataattcacgctctgaagtattggcttggctgaaagaacacaagatggagaagaccaagcaattcgaactgctggatattagctggcttatcgaaagcatgaaagttggtaaaccggtggacaccaaggggaaataccagttggcggaatcgggtgagatgagtgcgaacccagatccgacagagggtcgtgaaaacgagctgcctcctactatgaagaccgtttctccgtatgcgtgtcaacgccgcaccaccctgaacaaccataatcaacgttttacggacgcactggaaattcttgcggaaaattacgaggataaacgcaacgatgatactgcgctggaatttcgtcgtgctatctccgtgctgaaaagccttccgtttgaggtacgtagcctgaaagacacggaaggattgccctggatcggtgatgaagtcaaagggattatggaagaaatcatcgaggtcggtgaatcgctggaagtgcaggccgtgctcaatgatgagcgctatcaaagcttcaaacgctttaagagtgtctttggagtgggggtgaagacagcagacaagtggtaccgtatgggtctgcgcacgctcgaggatgttcgttccagcaagaccctgaagttgaccccgatgcagaaagcgggtctgtgctattatgaagatcttgctcgcggcgttacgaaagccgaagctgacgcgatttctctgctggttcaggatgcagtcgcaactttcgacccggatgcgctggtggagattgtcggtggatttcgtcgtgggaaacctcagggtcacgacgttgatctgcttatcacatctccgggagctgagaaagagcaagaagaccagctcctgcagaaagtgaccaatctgtggaagaaacaagggttgttgctgtacggtcgtctggaatggagtcagtttgaagatgggaaactcccatccggtaaggctgatgccctggaccaccacgcgaaatgctttctgatcctcaaactttatgatcataaagtggacaaaagcaaatgggaaatgccgacgggttcgaacatgggcgaggccaaaccgtggaaagcaattcgcgtagatctggttcgttgcccctacggcggttttgcgtttgcgttgttgggttggaccggaagccgcatgttccgccgtgatctgcgctggtacgccactgacgagaagaacatgatgctggacaatcatgcgctgtatgacctgaccaagaaaatctttctcaaagctaaatcggaagaggaaattttcgcacatctggggcttgaatacctggaaccgttcgaacgtaacgca

SEQ ID NO: 2188 - protein, 529 aa, synthetic construct
  REGION 1..529: note = Variant of terminal deoxynucleotidyltransferase
MHHHHHHGGSGSHGIRTIDSDFGKKRQKKMDNHDSSAIYEIKFHEFVLFILEEKMGATRRTFLTDLARKKGFRVENELSDSVTHIVAENNSRSEVLAWLKEHKMEKTKQFELLDISWLIESMKVGKPVDTKGKYQLAESGEMSANPDPTEGRENELPPTMKTVSPYACQRRTTLNNHNQRFTDALEILAENYEDKRNDDTALEFRRAISVLKSLPFEVRSLKDTEGLPWIGDEVKGIMEEIIEVGESLEVQAVLNDERYQSFKRFKSVFGVGVKTADKWYRMGLRTLEDVRSSKTLKLTPMQKAGLCYYEDLARGVTKAEADAISLLVQDAVATFDPDALVEIVGGFRRGKPQGHDVDLLITSPGAEKEQEDQLLQKVTNLWKKQGLLLYGRLEWSQFEDGKLPSGKADALDHHAKCFLILKLYDHKVDKSKWEMPTGSNMGEAKPWKAIRVDLVRCPYGGFAFALLGWTGSRMFRRDLRWYATDEKNMMLDNHALYDLTKKIFLKAKSEEEIFAHLGLEYLEPFERNA

SEQ ID NO: 2189 - DNA, 1587 bp, synthetic construct
  misc_feature 1..1587: note = Variant of terminal deoxynucleotidyltransferase
  source 1..1587: mol_type = other DNA
atgcaccatcatcatcatcatggcggtagcggcagccacggcattcgtaccatcgattcggacttcgggaagaaacgccagaaaaaaatggataaccacgatagttccgccatctatgaaatcaaatttcacgagtttgtgctgttcattctcgaagaaaaaatgggtgcgacgcgtcgtacttttctgacagatttagcccgcaagaaagggttccgcgtcgagaatgaactgtcagacagcgttacccacatcgtggcagaaaataattcacgctctgaagtattggcttggctgaaagaacacaagatggagaagaccaagcaattcgaactgctggatattagctggcttatcgaaagcatgaaagttggtaaaccggtggacaccaaggggaaataccagttggcggaatcgggtgagatgagtgcgaacccagatccgacagagggtcgtgaaaacgagctgcctcctactatgaagaccgtttctccgtatgcgtgtcaacgccgcaccaccctgaacaaccataatcaacgttttacggacgcactggaaattcttgcggaaaattacgagttcaaacgcaacgatgatactgcgctggaatttcgtcgtgctatctccgtgctgaaaagccttccgtttgaggtacgtagcctgaaagacacggaaggattgccctggatcggtgatgaagtcaaagggattatggaagaaatcatcgaggtcggtgaatcgctggaagtgcaggccgtgctcaatgatgagcgctatcaaagcttcaaacgctttaagagtgtctttggagtgggggtgaagacagcagacaagtggtaccgtatgggtctgcgcacgctcgaggatgttcgttccagcaagaccctgccgttgaccccgatgcagaaagcgggtctgtgctattatgaagatcttgctcgcggcgttacgaaagccgaagctgacgcgatttctctgctggttcaggatgcagtcgcaactttcgacccggatgcgctggtggagattgtcggtggatttcgtcgtgggaaacctcagggtcacgacgttgatctgcttatcacatctccgggagctgagaaagagcaagaagaccagctcctgcagaaagtgaccaatctgtggaagaaacaagggttgttgctgtacggtcgtctggaatggagtcagtttgaagatgggaaactcccatccggtaaggctgatgccctggaccaccacgcgaaatgctttctgatcctcaaactttatgatcataaagtggacaaaagcaaatgggaaatgccgacgggttcgaacatgggcgaggccaaaccgtggaaagcaattcgcgtagatctggttcgttgcccctacggcggttttgcgtttgcgttgttgggttggaccggaagccgcatgttccgccgtgatctgcgctggtacgccactgacgagaagaacatgatgctggacaatcatgcgctgtatgacctgaccaagaaaatctttctcaaagctaaatcggaagaggaaattttcgcacatctggggcttgaatacctggaaccgttcgaacgtaacgca

SEQ ID NO: 2190 - protein, 529 aa, synthetic construct
  REGION 1..529: note = Variant of terminal deoxynucleotidyltransferase
MHHHHHHGGSGSHGIRTIDSDFGKKRQKKMDNHDSSAIYEIKFHEFVLFILEEKMGATRRTFLTDLARKKGFRVENELSDSVTHIVAENNSRSEVLAWLKEHKMEKTKQFELLDISWLIESMKVGKPVDTKGKYQLAESGEMSANPDPTEGRENELPPTMKTVSPYACQRRTTLNNHNQRFTDALEILAENYEFKRNDDTALEFRRAISVLKSLPFEVRSLKDTEGLPWIGDEVKGIMEEIIEVGESLEVQAVLNDERYQSFKRFKSVFGVGVKTADKWYRMGLRTLEDVRSSKTLPLTPMQKAGLCYYEDLARGVTKAEADAISLLVQDAVATFDPDALVEIVGGFRRGKPQGHDVDLLITSPGAEKEQEDQLLQKVTNLWKKQGLLLYGRLEWSQFEDGKLPSGKADALDHHAKCFLILKLYDHKVDKSKWEMPTGSNMGEAKPWKAIRVDLVRCPYGGFAFALLGWTGSRMFRRDLRWYATDEKNMMLDNHALYDLTKKIFLKAKSEEEIFAHLGLEYLEPFERNA

SEQ ID NO: 2191 - DNA, 1587 bp, synthetic construct
  misc_feature 1..1587: note = Variant of terminal deoxynucleotidyltransferase
  source 1..1587: mol_type = other DNA
atgcaccatcatcatcatcatggcggtagcggcagccacggcattcgtaccatcgattcggacttcgggaagaaacgccagaaaaaaatggataaccacgatagttccgccatctatgaaatcaaatttcacgagtttgtgctgttcattctcgaagaaaaaatgggtgcgacgcgtcgtacttttctgacagatttagcccgcaagaaagggttccgcgtcgagaatgaactgtcagacagcgttacccacatcgtggcagaaaataattcacgctctgaagtattggcttggctgaaagaacacaagatggagaagaccaagcaattcgaactgctggatattagctggcttatcgaaagcatgaaagttggtaaaccggtggacaccaaggggaaataccagttggcggaatcgggtgagatgagtgcgaacccagatccgacagagggtcgtgaaaacgagctgcctcctactatgaagaccgtttctccgtatgcgtgtcaacgccgcaccaccctgaacaaccataatcaacgttttacggacgcactggaaattcttgcggaaaattacgagttcaaacgcaacgatgatactgcgctggaatttcgtcgtgctatctccgtgctgaaaagccttccgtttgaggtacgtagcctgaaagacacggaaggattgccctggatcggtgatgaagtcaaagggattatggaagaaatcatcgaggtcggtgaatcgctggaagtgcaggccgtgctcaatgatgagcgctatcaaagcttcaaacgctttaagagtgtctttggagtgggggtgaagacagcagacaagtggtaccgtatgggtctgcgcacgctcgaggatgttcgttccagcaagaccctgaagttgaccccgatgcagaaagcgggtctgtgctattatgaagatcttgctcgcggcgttacgaaagccgaagctgacgcgatttctctgctggttcaggatgcagtcgcaactttcgacccggatgcgctggtggagattgtcggtggatttcgtcgtgggaaacctcagggtcacgacgttgatctgcttatcacatctccgggagctgagaaagagcaagaagaccagctcctgcagaaagtgaccaatctgtggaagaaacaagggttgttgctgtacggtcgtctggaatggacgcagtttgaagatgggaaactcccatccggtaaggctgatgccctggaccaccacgcgaaatgctttctgatcctcaaactttatgatcataaagtggacaaaagcaaatgggaaatgccgacgggttcgaacatgggcgaggccaaaccgtggaaagcaattcgcgtagatctggttcgttgcccctacggcggttttgcgtttgcgttgttgggttggaccggaagccgcatgttccgccgtgatctgcgctggtacgccactgacgagaagaacatgatgctggacaatcatgcgctgtatgacctgaccaagaaaatctttctcaaagctaaatcggaagaggaaattttcgcacatctggggcttgaatacctggaaccgttcgaacgtaacgca

SEQ ID NO: 2192 - protein, 529 aa, synthetic construct
  REGION 1..529: note = Variant of terminal deoxynucleotidyltransferase
MHHHHHHGGSGSHGIRTIDSDFGKKRQKKMDNHDSSAIYEIKFHEFVLFILEEKMGATRRTFLTDLARKKGFRVENELSDSVTHIVAENNSRSEVLAWLKEHKMEKTKQFELLDISWLIESMKVGKPVDTKGKYQLAESGEMSANPDPTEGRENELPPTMKTVSPYACQRRTTLNNHNQRFTDALEILAENYEFKRNDDTALEFRRAISVLKSLPFEVRSLKDTEGLPWIGDEVKGIMEEIIEVGESLEVQAVLNDERYQSFKRFKSVFGVGVKTADKWYRMGLRTLEDVRSSKTLKLTPMQKAGLCYYEDLARGVTKAEADAISLLVQDAVATFDPDALVEIVGGFRRGKPQGHDVDLLITSPGAEKEQEDQLLQKVTNLWKKQGLLLYGRLEWTQFEDGKLPSGKADALDHHAKCFLILKLYDHKVDKSKWEMPTGSNMGEAKPWKAIRVDLVRCPYGGFAFALLGWTGSRMFRRDLRWYATDEKNMMLDNHALYDLTKKIFLKAKSEEEIFAHLGLEYLEPFERNA

SEQ ID NO: 2193 - DNA, 1587 bp, synthetic construct
  misc_feature 1..1587: note = Variant of terminal deoxynucleotidyltransferase
  source 1..1587: mol_type = other DNA
atgcaccatcatcatcatcatggcggtagcggcagccacggcattcgtaccatcgattcggacttcgggaagaaacgccagaaaaaaatggataaccacgatagttccgccatctatgaaatcaaatttcacgagtttgtgctgttcattctcgaagaaaaaatgggtgcgacgcgtcgtacttttctgacagatttagcccgcaagaaagggttccgcgtcgagaatgaactgtcagacagcgttacccacatcgtggcagaaaataattcacgctctgaagtattggcttggctgaaagaacacaagatggagaagaccaagcaattcgaactgctggatattagctggcttatcgaaagcatgaaagttggtaaaccggtggacaccaaggggaaataccagttggcggaatcgggtgagatgagtgcgaacccagatccgacagagggtcgtgaaaacgagctgcctcctactatgaagaccgtttctccgtatgcgtgtcaacgccgcaccaccctgaacaaccataatcaacgttttacggacgcactggaaattcttgcggaaaattacgagttcaaacgcaacgatgatactgcgctggaatttcgtcgtgctatctccgtgctgaaaagccttccgtttgaggtacgtagcctgaaagacacggaaggattgccctggatcggtgatgaagtcaaagggattatggaagaaatcatcgaggtcggtgaatcgctggaagtgcaggccgtgctcaatgatgagcgcgtgcaaagcttcaaacgctttaagagtgtctttggagtgggggtgaagacagcagacaagtggtaccgtatgggtctgcgcacgctcgaggatgttcgttccagcaagaccctgaagttgaccccgatgcagaaagcgggtctgtgctattatgaagatcttgctcgcggcgttacgaaagccgaagctgacgcgatttctctgctggttcaggatgcagtcgcaactttcgacccggatgcgctggtggagattgtcggtggatttcgtcgtgggaaacctcagggtcacgacgttgatctgcttatcacatctccgggagctgagaaagagcaagaagaccagctcctgcagaaagtgaccaatctgtggaagaaacaagggttgttgctgtacggtcgtctggaatggagtcagtttgaagatgggaaactcccatccggtaaggctgatgccctggaccaccacgcgaaatgctttctgatcctcaaactttatgatcataaagtggacaaaagcaaatgggaaatgccgacgggttcgaacatgggcgaggccaaaccgtggaaagcaattcgcgtagatctggttcgttgcccctacggcggttttgcgtttgcgttgttgggttggaccggaagccgcatgttccgccgtgatctgcgctggtacgccactgacgagaagaacatgatgctggacaatcatgcgctgtatgacctgaccaagaaaatctttctcaaagctaaatcggaagaggaaattttcgcacatctggggcttgaatacctggaaccgttcgaacgtaacgca

SEQ ID NO: 2194 - protein, 529 aa, synthetic construct
  REGION 1..529: note = Variant of terminal deoxynucleotidyltransferase
MHHHHHHGGSGSHGIRTIDSDFGKKRQKKMDNHDSSAIYEIKFHEFVLFILEEKMGATRRTFLTDLARKKGFRVENELSDSVTHIVAENNSRSEVLAWLKEHKMEKTKQFELLDISWLIESMKVGKPVDTKGKYQLAESGEMSANPDPTEGRENELPPTMKTVSPYACQRRTTLNNHNQRFTDALEILAENYEFKRNDDTALEFRRAISVLKSLPFEVRSLKDTEGLPWIGDEVKGIMEEIIEVGESLEVQAVLNDERVQSFKRFKSVFGVGVKTADKWYRMGLRTLEDVRSSKTLKLTPMQKAGLCYYEDLARGVTKAEADAISLLVQDAVATFDPDALVEIVGGFRRGKPQGHDVDLLITSPGAEKEQEDQLLQKVTNLWKKQGLLLYGRLEWSQFEDGKLPSGKADALDHHAKCFLILKLYDHKVDKSKWEMPTGSNMGEAKPWKAIRVDLVRCPYGGFAFALLGWTGSRMFRRDLRWYATDEKNMMLDNHALYDLTKKIFLKAKSEEEIFAHLGLEYLEPFERNA

SEQ ID NO: 2195 - DNA, 1587 bp, synthetic construct
  misc_feature 1..1587: note = Variant of terminal deoxynucleotidyltransferase
  source 1..1587: mol_type = other DNA
atgcaccatcatcatcatcatggcggtagcggcagccacggcattcgtaccatcgattcggacttcgggaagaaacgccagaaaaaaatggataaccacgatagttccgccatctatgaaatcaaatttcacgagtttgtgctgttcattctcgaagaaaaaatgggtgcgacgcgtcgtacttttctgacagatttagcccgcaagaaagggttccgcgtcgagaatgaactgtcagacagcgttacccacatcgtggcagaaaataattcacgctctgaagtattggcttggctgaaagaacacaagatggagaagaccaagcaattcgaactgctggatattagctggcttatcgaaagcatgaaagttggtaaaccggtggacaccaaggggaaataccagttggcggaatcgggtgagatgagtgcgaacccagatccgacagagggtcgtgaaaacgagctgcctcctactatgaagaccgtttctccgtatgcgtgtcaacgccgcaccaccctgaacaaccataatcaacgttttacggacgcactggaaattcttgcggaaaattacgagttcaaacgccgtgatgatactgcgctggaatttcgtcgtgctatctccgtgctgaaaagccttccgtttgaggtacgtagcctgaaagacacggaaggattgccctggatcggtgatgaagtcaaagggattatggaagaaatcatcgaggtcggtgaatcgctggaagtgcaggccgtgctcaatgatgagcgctatcaaagcttcaaacgctttaagagtgtctttggagtgggggtgaagacagcagacaagtggtaccgtatgggtctgcgcacgctcgaggatgttcgttccagcaagaccctgaagttgaccccgatgcagaaagcgggtctgtgctattatgaagatcttgctcgcggcgttacgaaagccgaagctgacgcgatttctctgctggttcaggatgcagtcgcaactttcgacccggatgcgctggtggagattgtcggtggatttcgtcgtgggaaacctcagggtcacgacgttgatctgcttatcacatctccgggagctgagaaagagcaagaagaccagctcctgcagaaagtgaccaatctgtggaagaaacaagggttgttgctgtacggtcgtctggaatggagtcagtttgaagatgggaaactcccatccggtaaggctgatgccctggaccaccacgcgaaatgctttctgatcctcaaactttatgatcataaagtggacaaaagcaaatgggaaatgccgacgggttcgaacatgggcgaggccaaaccgtggaaagcaattcgcgtagatctggttcgttgcccctacggcggttttgcgtttgcgttgttgggttggaccggaagccgcatgttccgccgtgatctgcgctggtacgccactgacgagaagaacatgatgctggacaatcatgcgctgtatgacctgaccaagaaaatctttctcaaagctaaatcggaagaggaaattttcgcacatctggggcttgaatacctggaaccgttcgaacgtaacgca

SEQ ID NO: 2196 - protein, 529 aa, synthetic construct
  REGION 1..529: note = Variant of terminal deoxynucleotidyltransferase
MHHHHHHGGSGSHGIRTIDSDFGKKRQKKMDNHDSSAIYEIKFHEFVLFILEEKMGATRRTFLTDLARKKGFRVENELSDSVTHIVAENNSRSEVLAWLKEHKMEKTKQFELLDISWLIESMKVGKPVDTKGKYQLAESGEMSANPDPTEGRENELPPTMKTVSPYACQRRTTLNNHNQRFTDALEILAENYEFKRRDDTALEFRRAISVLKSLPFEVRSLKDTEGLPWIGDEVKGIMEEIIEVGESLEVQAVLNDERYQSFKRFKSVFGVGVKTADKWYRMGLRTLEDVRSSKTLKLTPMQKAGLCYYEDLARGVTKAEADAISLLVQDAVATFDPDALVEIVGGFRRGKPQGHDVDLLITSPGAEKEQEDQLLQKVTNLWKKQGLLLYGRLEWSQFEDGKLPSGKADALDHHAKCFLILKLYDHKVDKSKWEMPTGSNMGEAKPWKAIRVDLVRCPYGGFAFALLGWTGSRMFRRDLRWYATDEKNMMLDNHALYDLTKKIFLKAKSEEEIFAHLGLEYLEPFERNA

SEQ ID NO: 2197 - DNA, 1587 bp, synthetic construct
  misc_feature 1..1587: note = Variant of terminal deoxynucleotidyltransferase
  source 1..1587: mol_type = other DNA
atgcaccatcatcatcatcatggcggtagcggcagccacggcattcgtaccatcgattcggacttcgggaagaaacgccagaaaaaaatggataaccacgatagttccgccatctatgaaatcaaatttcacgagtttgtgctgttcattctcgaagaaaaaatgggtgcgacgcgtcgtacttttctgacagatttagcccgcaagaaagggttccgcgtcgagaatgaactgtcagacagcgttacccacatcgtggcagaaaataattcacgctctgaagtattggcttggctgaaagaacacaagatggagaagaccaagcaattcgaactgctggatattagctggcttatcgaaagcatgaaagttggtaaaccggtggacaccaaggggaaataccagttggcggaatcgggtgagatgagtgcgaacccagatccgacagagggtcgtgaaaacgagctgcctcctactatgaagaccgtttctccgtatgcgtgtcaacgccgcaccaccctgaacaaccataatcaacgttttacggacgcactggaaattcttgcggaaaattacgagttcaaacgcaacgatgatactgcgctggaatttcgtcgtgctatctccgtgctgaaaagccttccgtttgaggtacgtagcctgaaagacacggaaggattgccctggatcggtgatgaagtcaaagggattatggaagaaatcatcgaggtcggtgaatcgctggaagtgcaggccgtgctcaatgatgagcgctatcaaagcttcaaacgctttaagagtgtctttggagtgggggtgaagacagcagacaagtggtaccgtatgggtctgcgcacgctcgaggatgttcgttccagcaagaccctgaagttgaccccgatgcagaaagcgggtctgtgctattatgaagatcttgctcgcggcgttacgaaagccgaagctgacgcgatttctctgctggttcaggatgcagtcgcaactttcgacccggatgcgctggtggagattgtcggtggatttcgtcgtgggaaacctcagggtcacgacgttgatctgcttatcacatctccgggagctgagaaagagcaagaagaccagctcctgcagaaagtgaccaatctgtggaagaaacaagggttgttgctgtacggtcgtctggaatggagtcagtttgaagatgggaaactcccatccggtaaggctgatgccctggaccaccacgcgaaatgctttctgatcctcaaactttatgatcataaagtggacaaaagcaaatgggaaatgccgacgggttcgaacatgggcgaggccaaaccgtggaaagcaattcgcgtagatctggttcgttgcccctacggcggttttgcgtttgcgttgttgggttggaccggaagccgcatgttccgccgtgatctgcgctggtacgccactgacgagaagaacatgatgctggacaattgtgcgctgtatgacctgaccaagaaaatctttctcaaagctaaatcggaagaggaaattttcgcacatctggggcttgaatacctggaaccgttcgaacgtaacgca

SEQ ID NO: 2198 - protein, 529 aa, synthetic construct
  REGION 1..529: note = Variant of terminal deoxynucleotidyltransferase
MHHHHHHGGSGSHGIRTIDSDFGKKRQKKMDNHDSSAIYEIKFHEFVLFILEEKMGATRRTFLTDLARKKGFRVENELSDSVTHIVAENNSRSEVLAWLKEHKMEKTKQFELLDISWLIESMKVGKPVDTKGKYQLAESGEMSANPDPTEGRENELPPTMKTVSPYACQRRTTLNNHNQRFTDALEILAENYEFKRNDDTALEFRRAISVLKSLPFEVRSLKDTEGLPWIGDEVKGIMEEIIEVGESLEVQAVLNDERYQSFKRFKSVFGVGVKTADKWYRMGLRTLEDVRSSKTLKLTPMQKAGLCYYEDLARGVTKAEADAISLLVQDAVATFDPDALVEIVGGFRRGKPQGHDVDLLITSPGAEKEQEDQLLQKVTNLWKKQGLLLYGRLEWSQFEDGKLPSGKADALDHHAKCFLILKLYDHKVDKSKWEMPTGSNMGEAKPWKAIRVDLVRCPYGGFAFALLGWTGSRMFRRDLRWYATDEKNMMLDNCALYDLTKKIFLKAKSEEEIFAHLGLEYLEPFERNA

SEQ ID NO: 2199 - DNA, 1587 bp, synthetic construct
  misc_feature 1..1587: note = Variant of terminal deoxynucleotidyltransferase
  source 1..1587: mol_type = other DNA
atgcaccatcatcatcatcatggcggtagcggcagccacggcattcgtaccatcgattcggacttcgggaagaaacgccagaaaaaaatggataaccacgatagttccgccatctatgaaatcaaatttcacgagtttgtgctgttcattctcgaagaaaaaatgggtgcgacgcgtcgtacttttctgacagatttagcccgcaagaaagggttccgcgtcgagaatgaactgtcagacagcgttacccacatcgtggcagaaaataattcacgctctgaagtattggcttggctgaaagaacacaagatggagaagaccaagcaattcgaactgctggatattagctggcttatcgaaagcatgaaagttggtaaaccggtggacaccaaggggaaataccagttggcggaatcgggtgagatgagtgcgaacccagatccgacagagggtcgtgaaaacgagctgcctcctactatgaagaccgtttctccgtatgcgtgtcaacgccgcaccaccctgaacaaccataatcaacgttttacggacgcactggaaattcttgcggaaaattacgagttcaaacgcaacgatgatactgcgctggaatttcgtcgtgctatctccgtgctgaaaagccttccgtttgaggtacgtagcctgaaagacacggaaggattgccctggatcggtgatgaagtcaaagggattatggaagaaatcatcgaggtcggtgaatcgctggaagtgcaggccgtgctcaatgatgagcgctatcaaagcttcaaacgctttaagagtgtctttggagtgggggtgaagacagcagacaagtggtaccgtatgggtctgcgcacgctcgaggatgttcgttccagcaagaccctgaagttgaccccgatgcagaaagcgggtctgtgctattatgaagatcttgctcgcggcgttacgaaagccgaagctgacgcgatttctctgctggttcaggatgcagtcgcaactttcgacccggatgcgctggtggagattgtcggtggacagcgtcgtgggaaacctcagggtcacgacgttgatctgcttatcacatctccgggagctgagaaagagcaagaagaccagctcctgcagaaagtgaccaatctgtggaagaaacaagggttgttgctgtacggtcgtctggaatggagtcagtttgaagatgggaaactcccatccggtaaggctgatgccctggaccaccacgcgaaatgctttctgatcctcaaactttatgatcataaagtggacaaaagcaaatgggaaatgccgacgggttcgaacatgggcgaggccaaaccgtggaaagcaattcgcgtagatctggttcgttgcccctacggcggttttgcgtttgcgttgttgggttggaccggaagccgcatgttccgccgtgatctgcgctggtacgccactgacgagaagaacatgatgctggacaatcatgcgctgtatgacctgaccaagaaaatctttctcaaagctaaatcggaagaggaaattttcgcacatctggggcttgaatacctggaaccgttcgaacgtaacgca

SEQ ID NO: 2200 - protein, 529 aa, synthetic construct
  REGION 1..529: note = Variant of terminal deoxynucleotidyltransferase
MHHHHHHGGSGSHGIRTIDSDFGKKRQKKMDNHDSSAIYEIKFHEFVLFILEEKMGATRRTFLTDLARKKGFRVENELSDSVTHIVAENNSRSEVLAWLKEHKMEKTKQFELLDISWLIESMKVGKPVDTKGKYQLAESGEMSANPDPTEGRENELPPTMKTVSPYACQRRTTLNNHNQRFTDALEILAENYEFKRNDDTALEFRRAISVLKSLPFEVRSLKDTEGLPWIGDEVKGIMEEIIEVGESLEVQAVLNDERYQSFKRFKSVFGVGVKTADKWYRMGLRTLEDVRSSKTLKLTPMQKAGLCYYEDLARGVTKAEADAISLLVQDAVATFDPDALVEIVGGQRRGKPQGHDVDLLITSPGAEKEQEDQLLQKVTNLWKKQGLLLYGRLEWSQFEDGKLPSGKADALDHHAKCFLILKLYDHKVDKSKWEMPTGSNMGEAKPWKAIRVDLVRCPYGGFAFALLGWTGSRMFRRDLRWYATDEKNMMLDNHALYDLTKKIFLKAKSEEEIFAHLGLEYLEPFERNA

SEQ ID NO: 2201 - DNA, 1587 bp, synthetic construct
  misc_feature 1..1587: note = Variant of terminal deoxynucleotidyltransferase
  source 1..1587: mol_type = other DNA
atgcaccatcatcatcatcatggcggtagcggcagccacggcattcgtaccatcgattcggacttcgggaagaaacgccagaaaaaaatggataaccacgatagttccgccatctatgaaatcaaatttcacgagtttgtgctgttcattctcgaagaaaaaatgggtgcgacgcgtcgtacttttctgacagatttagcccgcaagaaagggttccgcgtcgagaatgaactgtcagacagcgttacccacatcgtggcagaaaataattcacgctctgaagtattggcttggctgaaagaacacaagatggagaagaccaagcaattcgaactgctggatattagctggcttatcgaaagcatgaaagttggtaaaccggtggacaccaaggggaaataccagttggcggaatcgggtgagatgagtgcgaacccagatccgacagagggtcgtgaaaacgagctgcctcctactatgaagaccgtttctccgtatgcgtgtcaacgccgcaccaccctgaacaaccataatcaacgttttacggacgcactggaaattcttgcggaaaattacgagttcaaacgcaacgatgatactgcgctggaatttcgtcgtgctatctccgtgctgaaaagccttccgtttgaggtacgtagcctgaaagacacggaaggattgccctggatcggtgatgaagtcaaagggattatggaagaaatcatcgaggtcggtgaatcgctggaagtgcaggccgtgctcaatgatgagcgctatcaaagcttcaaacgctttaagagtgtctttggagtgggggtgaagacagcagacaagtggtaccgtatgggtctgcgcacgctcgaggatgttcgttccagcaagaccctgaagttgaccccgatgcagaaagcgggtctgtgctattatgaagatcttgctcgcggcgttacgaaagccgaagctgacgcgatttctctgctggttcaggatgcagtcgcaactttcgacccggatgcgctggtggagattgtcggtggatttcgtcgtgggaaacctcagggtcacgacgttgatctgcttatcacatctccgggagctgagaaagagcaagaagaccagctcctgcagaaagtgaccaatctgtggaagaaacaagggttgttgctgtacggtcgtctggaatggagtcagtttgaagatgggaaactcccatccggtaaggctgatgccctggaccaccacgcgaaatgctttctgatcctcaaactttatgatcataaagtggacaaaagcaaatgggaaatgccgacgggttcgaacatgggcgaggccaaaccgtggaaagcaattcgcgtagatctggttcgttgcccctacggcggttttgcgtttgcgttgttgggttggaccggaagccgcatgttccgccgtgatctgcgctggtacgccactgacgagaagaacatgatgctggacaattgggcgctgtatgacctgaccaagaaaatctttctcaaagctaaatcggaagaggaaattttcgcacatctggggcttgaatacctggaaccgttcgaacgtaacgca

SEQ ID NO: 2202 - protein, 529 aa, synthetic construct
  REGION 1..529: note = Variant of terminal deoxynucleotidyltransferase
MHHHHHHGGSGSHGIRTIDSDFGKKRQKKMDNHDSSAIYEIKFHEFVLFILEEKMGATRRTFLTDLARKKGFRVENELSDSVTHIVAENNSRSEVLAWLKEHKMEKTKQFELLDISWLIESMKVGKPVDTKGKYQLAESGEMSANPDPTEGRENELPPTMKTVSPYACQRRTTLNNHNQRFTDALEILAENYEFKRNDDTALEFRRAISVLKSLPFEVRSLKDTEGLPWIGDEVKGIMEEIIEVGESLEVQAVLNDERYQSFKRFKSVFGVGVKTADKWYRMGLRTLEDVRSSKTLKLTPMQKAGLCYYEDLARGVTKAEADAISLLVQDAVATFDPDALVEIVGGFRRGKPQGHDVDLLITSPGAEKEQEDQLLQKVTNLWKKQGLLLYGRLEWSQFEDGKLPSGKADALDHHAKCFLILKLYDHKVDKSKWEMPTGSNMGEAKPWKAIRVDLVRCPYGGFAFALLGWTGSRMFRRDLRWYATDEKNMMLDNWALYDLTKKIFLKAKSEEEIFAHLGLEYLEPFERNA

SEQ ID NO: 2203 - DNA, 1587 bp, synthetic construct
  misc_feature 1..1587: note = Variant of terminal deoxynucleotidyltransferase
  source 1..1587: mol_type = other DNA
atgcaccatcatcatcatcatggcggtagcggcagccacggcattcgtaccatcgattcggacttcgggaagaaacgccagaaaaaaatggataaccacgatagttccgccatctatgaaatcaaatttcacgagtttgtgctgttcattctcgaagaaaaaatgggtgcgacgcgtcgtacttttctgacagatttagcccgcaagaaagggttccgcgtcgagaatgaactgtcagacagcgttacccacatcgtggcagaaaataattcacgctctgaagtattggcttggctgaaagaacacaagatggagaagaccaagcaattcgaactgctggatattagctggcttatcgaaagcatgaaagttggtaaaccggtggacaccaaggggaaataccagttggcggaatcgggtgagatgagtgcgaacccagatccgacagagggtcgtgaaaacgagctgcctcctactatgaagaccgtttctccgtatgcgtgtcaacgccgcaccaccctgaacaaccataatcaacgttttacggacgcactggaaattcttgcggaaaattacgagttcaaacgcaacgatgatactgcgctggaatttcgtcgtgctatctccgtgctgaaaagccttccgtttgaggtacgtagcctgaaagacacggaaggattgccctggatcggtgatgaagtcaaagggattatggaagaaatcatcgaggtcggtgaatcgctggaagtgcaggccgtgctcaatgatgagcgctatcaaagcttcaaacgctttaagagtgtctttggagtgggggtgaagacagcagacaagtggtaccgtatgggtctgcgcacgctcgaggatgttcgttccagcaagaccctgaagttgaccccgatgcagaaagcgggtctgtgctattatgaagatcttgctcgcggcgttacgaaagccgaagctgacgcgatttctctgctggttcaggatgcagtcgcaactttcgacccggatgcgctggtggagattgtcggtggatttcgtcgtgggaaacctcagggtcacgacgttgatctgcttatcacatctccgggagctgagaaagagcaagaagaccagctcctgcagaaagtgaccaatctgtggaagaaacaagggttgttgctgtacggtcgtctggaatggagtcagtttgaagatgggaaactcccatccggtaaggctgattttctggaccatttcgcgaaatgctttctgatcctcaaactttatgatcataaagtggacaaaagcaaatgggaaatgccgacgggttcgaacatgggcgaggccaaaccgtggaaagcaattcgcgtagatctggttcgttgcccctacggcggttttgcgtttgcgttgttgggttggaccggaagccgcatgttccgccgtgatctgcgctggtacgccactgacgagaagaacatgatgctggacaatcatgcgctgtatgacctgaccaagaaaatctttctcaaagctaaatcggaagaggaaattttcgcacatctggggcttgaatacctggaaccgttcgaacgtaacgca

SEQ ID NO: 2204 - protein, 529 aa, synthetic construct
  REGION 1..529: note = Variant of terminal deoxynucleotidyltransferase
MHHHHHHGGSGSHGIRTIDSDFGKKRQKKMDNHDSSAIYEIKFHEFVLFILEEKMGATRRTFLTDLARKKGFRVENELSDSVTHIVAENNSRSEVLAWLKEHKMEKTKQFELLDISWLIESMKVGKPVDTKGKYQLAESGEMSANPDPTEGRENELPPTMKTVSPYACQRRTTLNNHNQRFTDALEILAENYEFKRNDDTALEFRRAISVLKSLPFEVRSLKDTEGLPWIGDEVKGIMEEIIEVGESLEVQAVLNDERYQSFKRFKSVFGVGVKTADKWYRMGLRTLEDVRSSKTLKLTPMQKAGLCYYEDLARGVTKAEADAISLLVQDAVATFDPDALVEIVGGFRRGKPQGHDVDLLITSPGAEKEQEDQLLQKVTNLWKKQGLLLYGRLEWSQFEDGKLPSGKADFLDHFAKCFLILKLYDHKVDKSKWEMPTGSNMGEAKPWKAIRVDLVRCPYGGFAFALLGWTGSRMFRRDLRWYATDEKNMMLDNHALYDLTKKIFLKAKSEEEIFAHLGLEYLEPFERNA

SEQ ID NO: 2205 - DNA, 1587 bp, synthetic construct
  misc_feature 1..1587: note = Variant of terminal deoxynucleotidyltransferase
  source 1..1587: mol_type = other DNA
atgcaccatcatcatcatcatggcggtagcggcagccacggcattcgtaccatcgattcggacttcgggaagaaacgccagaaaaaaatggataaccacgatagttccgccatctatgaaatcaaatttcacgagtttgtgctgttcattctcgaagaaaaaatgggtgcgacgcgtcgtacttttctgacagatttagcccgcaagaaagggttccgcgtcgagaatgaactgtcagacagcgttacccacatcgtggcagaaaataattcacgctctgaagtattggcttggctgaaagaacacaagatggagaagaccaagcaattcgaactgctggatattagctggcttatcgaaagcatgaaagttggtaaaccggtggacaccaaggggaaataccagttggcggaatcgggtgagatgagtgcgaacccagatccgacagagggtcgtgaaaacgagctgcctcctactatgaagaccgtttctccgtatgcgtgtcaacgccgcaccaccctgaacaaccataatcaacgttttacggacgcactggaaattcttgcggaaaattacgagttcaaacgcaacgatgatactgcgctggaatttcgtcgtgctatctccgtgctgaaaagccttccgtttgaggtacgtagcctgaaagacacggaaggattgccctggatcggtgatgaagtcaaagggattatggaagaaatcatcgaggtcggtgaatcgctggaagtgcaggccgtgctcaatgatgagcgctatcaaagcttcaaacgctttaagagtgtctttggagtgggggtgaagacagcagacaagtggtaccgtatgggtctgcgcacgctcgaggatgttcgttccagcaagaccctgaagttgaccccgatgcagaaagcgggtctgtgctattatgaagatcttgctcgcggcgttacgaaagccgaagctgacgcgatttctctgctggttcaggatgcagtcgcaactttcgacccggatgcgctggtggagattgtcggtggatttcgtcgtgggaaacctcagggtcacgacgttgatctgcttatcacatctccgggagctgagaaagagcaagaagaccagctcctgcagaaagtgaccaatctgtggaagaaacaagggttgttgctgtacggtcgtctggaatggagtcagtttgaagatgggaaactcccatccggtaaggctgatgccctggactttttcgcgaaatgctttctgatcctcaaactttatgatcataaagtggacaaaagcaaatgggaaatgccgacgggttcgaacatgggcgaggccaaaccgtggaaagcaattcgcgtagatctggttcgttgcccctacggcggttttgcgtttgcgttgttgggttggaccggaagccgcatgttccgccgtgatctgcgctggtacgccactgacgagaagaacatgatgctggacaatcatgcgctgtatgacctgaccaagaaaatctttctcaaagctaaatcggaagaggaaattttcgcacatctggggcttgaatacctggaaccgttcgaacgtaacgca

SEQ ID NO: 2206 - protein, 529 aa, synthetic construct
  REGION 1..529: note = Variant of terminal deoxynucleotidyltransferase
MHHHHHHGGSGSHGIRTIDSDFGKKRQKKMDNHDSSAIYEIKFHEFVLFILEEKMGATRRTFLTDLARKKGFRVENELSDSVTHIVAENNSRSEVLAWLKEHKMEKTKQFELLDISWLIESMKVGKPVDTKGKYQLAESGEMSANPDPTEGRENELPPTMKTVSPYACQRRTTLNNHNQRFTDALEILAENYEFKRNDDTALEFRRAISVLKSLPFEVRSLKDTEGLPWIGDEVKGIMEEIIEVGESLEVQAVLNDERYQSFKRFKSVFGVGVKTADKWYRMGLRTLEDVRSSKTLKLTPMQKAGLCYYEDLARGVTKAEADAISLLVQDAVATFDPDALVEIVGGFRRGKPQGHDVDLLITSPGAEKEQEDQLLQKVTNLWKKQGLLLYGRLEWSQFEDGKLPSGKADALDFFAKCFLILKLYDHKVDKSKWEMPTGSNMGEAKPWKAIRVDLVRCPYGGFAFALLGWTGSRMFRRDLRWYATDEKNMMLDNHALYDLTKKIFLKAKSEEEIFAHLGLEYLEPFERNA

SEQ ID NO: 2207 - DNA, 1587 bp, synthetic construct
  misc_feature 1..1587: note = Variant of terminal deoxynucleotidyltransferase
  source 1..1587: mol_type = other DNA
atgcaccatcatcatcatcatggcggtagcggcagccacggcattcgtaccatcgattcggacttcgggaagaaacgccagaaaaaaatggataaccacgatagttccgccatctatgaaatcaaatttcacgagtttgtgctgttcattctcgaagaaaaaatgggtgcgacgcgtcgtacttttctgacagatttagcccgcaagaaagggttccgcgtcgagaatgaactgtcagacagcgttacccacatcgtggcagaaaataattcacgctctgaagtattggcttggctgaaagaacacaagatggagaagaccaagcaattcgaactgctggatattagctggcttatcgaaagcatgaaagttggtaaaccggtggacaccaaggggaaataccagttggcggaatcgggtgagatgagtgcgaacccagatccgacagagggtcgtgaaaacgagctgcctcctactatgaagaccgtttctccgtatgcgtgtcaacgccgcaccaccctgaacaaccataatcaacgttttacggacgcactgtgtattcttgcggaaaattacgagttcaaacgcaacgatgatactgcgctggaatttcgtcgtgctatctccgtgctgaaaagccttccgtttgaggtacgtagcctgaaagacacggaaggattgccctggatcggtgatgaagtcaaagggattatggaagaaatcatcgaggtcggtgaatcgctggaagtgcaggccgtgctcaatgatgagcgctatcaaagcttcaaacgctttaagagtgtctttggagtgggggtgaagacagcagacaagtggtaccgtatgggtctgcgcacgctcgaggatgttcgttccagcaagaccctgaagttgaccccgatgcagaaagcgggtctgtgctattatgaagatcttgctcgcggcgttacgaaagccgaagctgacgcgatttctctgctggttcaggatgcagtcgcaactttcgacccggatgcgctggtggagattgtcggtggatttcgtcgtgggaaacctcagggtcacgacgttgatctgcttatcacatctccgggagctgagaaagagcaagaagaccagctcctgcagaaagtgaccaatctgtggaagaaacaagggttgttgctgtacggtcgtctggaatggagtcagtttgaagatgggaaactcccatccggtaaggctgatgccctggaccaccacgcgaaatgctttctgatcctcaaactttatgatcataaagtggacaaaagcaaatgggaaatgccgacgggttcgaacatgggcgaggccaaaccgtggaaagcaattcgcgtagatctggttcgttgcccctacggcggttttgcgtttgcgttgttgggttggaccggaagccgcatgttccgccgtgatctgcgctggtacgccactgacgagaagaacatgatgctggacaatcatgcgctgtatgacctgaccaagaaaatctttctcaaagctaaatcggaagaggaaattttcgcacatctggggcttgaatacctggaaccgttcgaacgtaacgca

SEQ ID NO: 2208 - protein, 529 aa, synthetic construct
  REGION 1..529: note = Variant of terminal deoxynucleotidyltransferase
MHHHHHHGGSGSHGIRTIDSDFGKKRQKKMDNHDSSAIYEIKFHEFVLFILEEKMGATRRTFLTDLARKKGFRVENELSDSVTHIVAENNSRSEVLAWLKEHKMEKTKQFELLDISWLIESMKVGKPVDTKGKYQLAESGEMSANPDPTEGRENELPPTMKTVSPYACQRRTTLNNHNQRFTDALCILAENYEFKRNDDTALEFRRAISVLKSLPFEVRSLKDTEGLPWIGDEVKGIMEEIIEVGESLEVQAVLNDERYQSFKRFKSVFGVGVKTADKWYRMGLRTLEDVRSSKTLKLTPMQKAGLCYYEDLARGVTKAEADAISLLVQDAVATFDPDALVEIVGGFRRGKPQGHDVDLLITSPGAEKEQEDQLLQKVTNLWKKQGLLLYGRLEWSQFEDGKLPSGKADALDHHAKCFLILKLYDHKVDKSKWEMPTGSNMGEAKPWKAIRVDLVRCPYGGFAFALLGWTGSRMFRRDLRWYATDEKNMMLDNHALYDLTKKIFLKAKSEEEIFAHLGLEYLEPFERNA

SEQ ID NO: 2209 - DNA, 1587 bp, synthetic construct
  misc_feature 1..1587: note = Variant of terminal deoxynucleotidyltransferase
  source 1..1587: mol_type = other DNA
atgcaccatcatcatcatcatggcggtagcggcagccacggcattcgtaccatcgattcggacttcgggaagaaacgccagaaaaaaatggataaccacgatagttccgccatctatgaaatcaaatttcacgagtttgtgctgttcattctcgaagaaaaaatgggtgcgacgcgtcgtacttttctgacagatttagcccgcaagaaagggttccgcgtcgagaatgaactgtcagacagcgttacccacatcgtggcagaaaataattcacgctctgaagtattggcttggctgaaagaacacaagatggagaagaccaagcaattcgaactgctggatattagctggcttatcgaaagcatgaaagttggtaaaccggtggacaccaaggggaaataccagttggcggaatcgggtgagatgagtgcgaacccagatccgacagagggtcgtgaaaacgagctgcctcctactatgaagaccgtttctccgtatgcgtgtcaacgccgcaccaccctgaacaaccataatcaacgttttacggacgcactggaaattcttgcggaaaattacgagttcaaacgcaacgatgatactgcgctggaatttcgtcgtgctatctccgtgctgaaaagccttccgtttgaggtacgtagcctgaaagacacggaaggattgccctggatcggtgatgaagtcaaagggattatggaagaaatcatcgaggtcggtgaatcgctggaagtgcaggccgtgctcaatgatgagcgctatcaaagcttcaaacgctttaagagtgtctttggagtgggggtgaagacagcagacaagtggtaccgtatgggtctgcgcacgctcgaggatgttcgttccagcaagaccctgcttttgaccccgatgcagaaagcgggtctgtgctattatgaagatcttgctcgcggcgttacgaaagccgaagctgacgcgatttctctgctggttcaggatgcagtcgcaactttcgacccggatgcgctggtggagattgtcggtggatttcgtcgtgggaaacctcagggtcacgacgttgatctgcttatcacatctccgggagctgagaaagagcaagaagaccagctcctgcagaaagtgaccaatctgtggaagaaacaagggttgttgctgtacggtcgtctggaatggagtcagtttgaagatgggaaactcccatccggtaaggctgatgccctggaccaccacgcgaaatgctttctgatcctcaaactttatgatcataaagtggacaaaagcaaatgggaaatgccgacgggttcgaacatgggcgaggccaaaccgtggaaagcaattcgcgtagatctggttcgttgcccctacggcggttttgcgtttgcgttgttgggttggaccggaagccgcatgttccgccgtgatctgcgctggtacgccactgacgagaagaacatgatgctggacaatcatgcgctgtatgacctgaccaagaaaatctttctcaaagctaaatcggaagaggaaattttcgcacatctggggcttgaatacctggaaccgttcgaacgtaacgca

SEQ ID NO: 2210 - protein, 529 aa, synthetic construct
  REGION 1..529: note = Variant of terminal deoxynucleotidyltransferase
MHHHHHHGGSGSHGIRTIDSDFGKKRQKKMDNHDSSAIYEIKFHEFVLFILEEKMGATRRTFLTDLARKKGFRVENELSDSVTHIVAENNSRSEVLAWLKEHKMEKTKQFELLDISWLIESMKVGKPVDTKGKYQLAESGEMSANPDPTEGRENELPPTMKTVSPYACQRRTTLNNHNQRFTDALEILAENYEFKRNDDTALEFRRAISVLKSLPFEVRSLKDTEGLPWIGDEVKGIMEEIIEVGESLEVQAVLNDERYQSFKRFKSVFGVGVKTADKWYRMGLRTLEDVRSSKTLLLTPMQKAGLCYYEDLARGVTKAEADAISLLVQDAVATFDPDALVEIVGGFRRGKPQGHDVDLLITSPGAEKEQEDQLLQKVTNLWKKQGLLLYGRLEWSQFEDGKLPSGKADALDHHAKCFLILKLYDHKVDKSKWEMPTGSNMGEAKPWKAIRVDLVRCPYGGFAFALLGWTGSRMFRRDLRWYATDEKNMMLDNHALYDLTKKIFLKAKSEEEIFAHLGLEYLEPFERNA

SEQ ID NO: 2211 - DNA, 1587 bp, synthetic construct
  misc_feature 1..1587: note = Variant of terminal deoxynucleotidyltransferase
  source 1..1587: mol_type = other DNA
atgcaccatcatcatcatcatggcggtagcggcagccacggcattcgtaccatcgattcggacttcgggaagaaacgccagaaaaaaatggataaccacgatagttccgccatctatgaaatcaaatttcacgagtttgtgctgttcattctcgaagaaaaaatgggtgcgacgcgtcgtacttttctgacagatttagcccgcaagaaagggttccgcgtcgagaatgaactgtcagacagcgttacccacatcgtggcagaaaataattcacgctctgaagtattggcttggctgaaagaacacaagatggagaagaccaagcaattcgaactgctggatattagctggcttatcgaaagcatgaaagttggtaaaccggtggacaccaaggggaaataccagttggcggaatcgggtgagatgagtgcgaacccagatccgacagagggtcgtgaaaacgagctgcctcctactatgaagaccgtttctccgtatgcgtgtcaacgccgcaccaccctgaacaaccataatcaacgttttacggacgcactggaaattcttgcggaaaattacgagttcaaacgcaacgatgatactgcgctggaatttcgtcgtgctatctccgtgctgaaaagccttccgtttgaggtacgtagcctgaaagacacggaaggattgccctggatcggtgatgaagtcaaagggattatggaagaaatcatcgaggtcggtgaatcgctggaagtgcaggccgtgctcaatgatgagcgctatcaaagcttcaaacgctttaagagtgtctttggagtgggggtgaagacagcagacaagtggtaccgtatgggtctgcgcacgctcgaggatgttcgttccagcaagaccctgaagttgaccccgatgcagaaagcgggtctgtgctattatgaagatcttgctcgcggcgttacgaaagccgaagctgacgcgatttctctgctggttcaggatgcagtcgcaactttcgacccggatgcgctggtggagattgtcggtggatttcgtcgtgggaaacctcagggtcacgacgttgatctgcttatcacatctccgggagctgagaaagagcaagaagaccagctcctgcagaaagtgaccaatctgtggaagaaacaagggttgttgctgtacggtcgtctggaatggagtcagtttactgatgggaaactcccatccggtaaggctgatgccctggaccaccacgcgaaatgctttctgatcctcaaactttatgatcataaagtggacaaaagcaaatgggaaatgccgacgggttcgaacatgggcgaggccaaaccgtggaaagcaattcgcgtagatctggttcgttgcccctacggcggttttgcgtttgcgttgttgggttggaccggaagccgcatgttccgccgtgatctgcgctggtacgccactgacgagaagaacatgatgctggacaatcatgcgctgtatgacctgaccaagaaaatctttctcaaagctaaatcggaagaggaaattttcgcacatctggggcttgaatacctggaaccgttcgaacgtaacgca

SEQ ID NO: 2212 - protein, 529 aa, synthetic construct
  REGION 1..529: note = Variant of terminal deoxynucleotidyltransferase
MHHHHHHGGSGSHGIRTIDSDFGKKRQKKMDNHDSSAIYEIKFHEFVLFILEEKMGATRRTFLTDLARKKGFRVENELSDSVTHIVAENNSRSEVLAWLKEHKMEKTKQFELLDISWLIESMKVGKPVDTKGKYQLAESGEMSANPDPTEGRENELPPTMKTVSPYACQRRTTLNNHNQRFTDALEILAENYEFKRNDDTALEFRRAISVLKSLPFEVRSLKDTEGLPWIGDEVKGIMEEIIEVGESLEVQAVLNDERYQSFKRFKSVFGVGVKTADKWYRMGLRTLEDVRSSKTLKLTPMQKAGLCYYEDLARGVTKAEADAISLLVQDAVATFDPDALVEIVGGFRRGKPQGHDVDLLITSPGAEKEQEDQLLQKVTNLWKKQGLLLYGRLEWSQFTDGKLPSGKADALDHHAKCFLILKLYDHKVDKSKWEMPTGSNMGEAKPWKAIRVDLVRCPYGGFAFALLGWTGSRMFRRDLRWYATDEKNMMLDNHALYDLTKKIFLKAKSEEEIFAHLGLEYLEPFERNA

SEQ ID NO: 2213 - DNA, 1587 bp, synthetic construct
  misc_feature 1..1587: note = Variant of terminal deoxynucleotidyltransferase
  source 1..1587: mol_type = other DNA
atgcaccatcatcatcatcatggcggtagcggcagccacggcattcgtaccatcgattcggacttcgggaagaaacgccagaaaaaaatggataaccacgatagttccgccatctatgaaatcaaatttcacgagtttgtgctgttcattctcgaagaaaaaatgggtgcgacgcgtcgtacttttctgacagatttagcccgcaagaaagggttccgcgtcgagaatgaactgtcagacagcgttacccacatcgtggcagaaaataattcacgctctgaagtattggcttggctgaaagaacacaagatggagaagaccaagcaattcgaactgctggatattagctggcttatcgaaagcatgaaagttggtaaaccggtggacaccaaggggaaataccagttggcggaatcgggtgagatgagtgcgaacccagatccgacagagggtcgtgaaaacgagctgcctcctactatgaagaccgtttctccgtatgcgtgtcaacgccgcaccaccctgaacaaccataatcaacgttttacggacgcactggaaattcttgcggaaaattacgagttcaaacgcaacgatgatactgcgctggaatttcgtcgtgctatctccgtgctgaaaagccttccgtttgaggtacgtagcctgaaagacacggaaggattgccctggatcggtgatgaagtcaaagggattatggaagaaatcatcgaggtcggtgaatcgctggaagtgcaggccgtgctcaatgatgagcgctatcaaagcttcaaacgctttaagagtgtctttggagtgggggtgaagacagcagacaagtggtaccgtatgggtctgcgcacgctcgaggatgtttggtccagcaagaccctgaagttgaccccgatgcagaaagcgggtctgtgctattatgaagatcttgctcgcggcgttacgaaagccgaagctgacgcgatttctctgctggttcaggatgcagtcgcaactttcgacccggatgcgctggtggagattgtcggtggatttcgtcgtgggaaacctcagggtcacgacgttgatctgcttatcacatctccgggagctgagaaagagcaagaagaccagctcctgcagaaagtgaccaatctgtggaagaaacaagggttgttgctgtacggtcgtctggaatggagtcagtttgaagatgggaaactcccatccggtaaggctgatgccctggaccaccacgcgaaatgctttctgatcctcaaactttatgatcataaagtggacaaaagcaaatgggaaatgccgacgggttcgaacatgggcgaggccaaaccgtggaaagcaattcgcgtagatctggttcgttgcccctacggcggttttgcgtttgcgttgttgggttggaccggaagccgcatgttccgccgtgatctgcgctggtacgccactgacgagaagaacatgatgctggacaatcatgcgctgtatgacctgaccaagaaaatctttctcaaagctaaatcggaagaggaaattttcgcacatctggggcttgaatacctggaaccgttcgaacgtaacgca

SEQ ID NO: 2214 - protein, 529 aa, synthetic construct
  REGION 1..529: note = Variant of terminal deoxynucleotidyltransferase
MHHHHHHGGSGSHGIRTIDSDFGKKRQKKMDNHDSSAIYEIKFHEFVLFILEEKMGATRRTFLTDLARKKGFRVENELSDSVTHIVAENNSRSEVLAWLKEHKMEKTKQFELLDISWLIESMKVGKPVDTKGKYQLAESGEMSANPDPTEGRENELPPTMKTVSPYACQRRTTLNNHNQRFTDALEILAENYEFKRNDDTALEFRRAISVLKSLPFEVRSLKDTEGLPWIGDEVKGIMEEIIEVGESLEVQAVLNDERYQSFKRFKSVFGVGVKTADKWYRMGLRTLEDVWSSKTLKLTPMQKAGLCYYEDLARGVTKAEADAISLLVQDAVATFDPDALVEIVGGFRRGKPQGHDVDLLITSPGAEKEQEDQLLQKVTNLWKKQGLLLYGRLEWSQFEDGKLPSGKADALDHHAKCFLILKLYDHKVDKSKWEMPTGSNMGEAKPWKAIRVDLVRCPYGGFAFALLGWTGSRMFRRDLRWYATDEKNMMLDNHALYDLTKKIFLKAKSEEEIFAHLGLEYLEPFERNA

SEQ ID NO: 2215 - DNA, 1587 bp, synthetic construct
  misc_feature 1..1587: note = Variant of terminal deoxynucleotidyltransferase
  source 1..1587: mol_type = other DNA
atgcaccatcatcatcatcatggcggtagcggcagccacggcattcgtaccatcgattcggacttcgggaagaaacgccagaaaaaaatggataaccacgatagttccgccatctatgaaatcaaatttcacgagtttgtgctgttcattctcgaagaaaaaatgggtgcgacgcgtcgtacttttctgacagatttagcccgcaagaaagggttccgcgtcgagaatgaactgtcagacagcgttacccacatcgtggcagaaaataattcacgctctgaagtattggcttggctgaaagaacacaagatggagaagaccaagcaattcgaactgctggatattagctggcttatcgaaagcatgaaagttggtaaaccggtggacaccaaggggaaataccagttggcggaatcgggtgagatgagtgcgaacccagatccgacagagggtcgtgaaaacgagctgcctcctactatgaagaccgtttctccgtatgcgtgtcaacgccgcaccaccctgaacaaccataatcaacgttttacggacgcactggaaattcttgcggaaaattaccggttcaaacgcaacgatgatactgcgctggaatttcgtcgtgctatctccgtgctgaaaagccttccgtttgaggtacgtagcctgaaagacacggaaggattgccctggatcggtgatgaagtcaaagggattatggaagaaatcatcgaggtcggtgaatcgctggaagtgcaggccgtgctcaatgatgagcgctatcaaagcttcaaacgctttaagagtgtctttggagtgggggtgaagacagcagacaagtggtaccgtatgggtctgcgcacgctcgaggatgttcgttccagcaagaccctgaagttgaccccgatgcagaaagcgggtctgtgctattatgaagatcttgctcgcggcgttacgaaagccgaagctgacgcgatttctctgctggttcaggatgcagtcgcaactttcgacccggatgcgctggtggagattgtcggtggatttcgtcgtgggaaacctcagggtcacgacgttgatctgcttatcacatctccgggagctgagaaagagcaagaagaccagctcctgcagaaagtgaccaatctgtggaagaaacaagggttgttgctgtacggtcgtctggaatggagtcagtttgaagatgggaaactcccatccggtaaggctgatgccctggaccaccacgcgaaatgctttctgatcctcaaactttatgatcataaagtggacaaaagcaaatgggaaatgccgacgggttcgaacatgggcgaggccaaaccgtggaaagcaattcgcgtagatctggttcgttgcccctacggcggttttgcgtttgcgttgttgggttggaccggaagccgcatgttccgccgtgatctgcgctggtacgccactgacgagaagaacatgatgctggacaatcatgcgctgtatgacctgaccaagaaaatctttctcaaagctaaatcggaagaggaaattttcgcacatctggggcttgaatacctggaaccgttcgaacgtaacgca

SEQ ID NO: 2216 - protein, 529 aa, synthetic construct
  REGION 1..529: note = Variant of terminal deoxynucleotidyltransferase
MHHHHHHGGSGSHGIRTIDSDFGKKRQKKMDNHDSSAIYEIKFHEFVLFILEEKMGATRRTFLTDLARKKGFRVENELSDSVTHIVAENNSRSEVLAWLKEHKMEKTKQFELLDISWLIESMKVGKPVDTKGKYQLAESGEMSANPDPTEGRENELPPTMKTVSPYACQRRTTLNNHNQRFTDALEILAENYRFKRNDDTALEFRRAISVLKSLPFEVRSLKDTEGLPWIGDEVKGIMEEIIEVGESLEVQAVLNDERYQSFKRFKSVFGVGVKTADKWYRMGLRTLEDVRSSKTLKLTPMQKAGLCYYEDLARGVTKAEADAISLLVQDAVATFDPDALVEIVGGFRRGKPQGHDVDLLITSPGAEKEQEDQLLQKVTNLWKKQGLLLYGRLEWSQFEDGKLPSGKADALDHHAKCFLILKLYDHKVDKSKWEMPTGSNMGEAKPWKAIRVDLVRCPYGGFAFALLGWTGSRMFRRDLRWYATDEKNMMLDNHALYDLTKKIFLKAKSEEEIFAHLGLEYLEPFERNA

SEQ ID NO: 2217 - DNA, 1587 bp, synthetic construct
  misc_feature 1..1587: note = Variant of terminal deoxynucleotidyltransferase
  source 1..1587: mol_type = other DNA
atgcaccatcatcatcatcatggcggtagcggcagccacggcattcgtaccatcgattcggacttcgggaagaaacgccagaaaaaaatggataaccacgatagttccgccatctatgaaatcaaatttcacgagtttgtgctgttcattctcgaagaaaaaatgggtgcgacgcgtcgtacttttctgacagatttagcccgcaagaaagggttccgcgtcgagaatgaactgtcagacagcgttacccacatcgtggcagaaaataattcacgctctgaagtattggcttggctgaaagaacacaagatggagaagaccaagcaattcgaactgctggatattagctggcttatcgaaagcatgaaagttggtaaaccggtggacaccaaggggaaataccagttggcggaatcgggtgagatgagtgcgaacccagatccgacagagggtcgtgaaaacgagctgcctcctactatgaagaccgtttctccgtatgcgtgtcaacgccgcaccaccctgaacaaccataatcaacgttttacggacgcactggaaattcttgcggaaaattacgagttcaaacgcaacgatgatactgcgctggaatttcgtcgtgctatctccgtgctgaaaagccttccgtttgaggtacgtagcctgaaagacacggaaggattgccctggatcggtgatgaagtcaaagggattatggaagaaatcatcgaggtcggtgaatcgctggaagtgcaggccgtgctcaatgatgagcgctatcaaagcttcaaacgctttaagagtgtctttggagtgggggtgaagacagcagacaagtggtaccgtatgggtctgcgctcgctcgaggatgttcgttccagcaagaccctgaagttgaccccgatgcagaaagcgggtctgtgctattatgaagatcttgctcgcggcgttacgaaagccgaagctgacgcgatttctctgctggttcaggatgcagtcgcaactttcgacccggatgcgctggtggagattgtcggtggatttcgtcgtgggaaacctcagggtcacgacgttgatctgcttatcacatctccgggagctgagaaagagcaagaagaccagctcctgcagaaagtgaccaatctgtggaagaaacaagggttgttgctgtacggtcgtctggaatggagtcagtttgaagatgggaaactcccatccggtaaggctgatgccctggaccaccacgcgaaatgctttctgatcctcaaactttatgatcataaagtggacaaaagcaaatgggaaatgccgacgggttcgaacatgggcgaggccaaaccgtggaaagcaattcgcgtagatctggttcgttgcccctacggcggttttgcgtttgcgttgttgggttggaccggaagccgcatgttccgccgtgatctgcgctggtacgccactgacgagaagaacatgatgctggacaatcatgcgctgtatgacctgaccaagaaaatctttctcaaagctaaatcggaagaggaaattttcgcacatctggggcttgaatacctggaaccgttcgaacgtaacgca

SEQ ID NO: 2218 - protein, 529 aa, synthetic construct
  REGION 1..529: note = Variant of terminal deoxynucleotidyltransferase
MHHHHHHGGSGSHGIRTIDSDFGKKRQKKMDNHDSSAIYEIKFHEFVLFILEEKMGATRRTFLTDLARKKGFRVENELSDSVTHIVAENNSRSEVLAWLKEHKMEKTKQFELLDISWLIESMKVGKPVDTKGKYQLAESGEMSANPDPTEGRENELPPTMKTVSPYACQRRTTLNNHNQRFTDALEILAENYEFKRNDDTALEFRRAISVLKSLPFEVRSLKDTEGLPWIGDEVKGIMEEIIEVGESLEVQAVLNDERYQSFKRFKSVFGVGVKTADKWYRMGLRSLEDVRSSKTLKLTPMQKAGLCYYEDLARGVTKAEADAISLLVQDAVATFDPDALVEIVGGFRRGKPQGHDVDLLITSPGAEKEQEDQLLQKVTNLWKKQGLLLYGRLEWSQFEDGKLPSGKADALDHHAKCFLILKLYDHKVDKSKWEMPTGSNMGEAKPWKAIRVDLVRCPYGGFAFALLGWTGSRMFRRDLRWYATDEKNMMLDNHALYDLTKKIFLKAKSEEEIFAHLGLEYLEPFERNA

SEQ ID NO: 2219 - DNA, 1587 bp, synthetic construct
  misc_feature 1..1587: note = Variant of terminal deoxynucleotidyltransferase
  source 1..1587: mol_type = other DNA
atgcaccatcatcatcatcatggcggtagcggcagccacggcattcgtaccatcgattcggacttcgggaagaaacgccagaaaaaaatggataaccacgatagttccgccatctatgaaatcaaatttcacgagtttgtgctgttcattctcgaagaaaaaatgggtgcgacgcgtcgtacttttctgacagatttagcccgcaagaaagggttccgcgtcgagaatgaactgtcagacagcgttacccacatcgtggcagaaaataattcacgctctgaagtattggcttggctgaaagaacacaagatggagaagaccaagcaattcgaactgctggatattagctggcttatcgaaagcatgaaagttggtaaaccggtggacaccaaggggaaataccagttggcggaatcgggtgagatgagtgcgaacccagatccgacagagggtcgtgaaaacgagctgcctcctactatgaagaccgtttctccgtatgcgtgtcaacgccgcaccaccctgaacaaccataatcaacgttttacggacgcactggaaattcttgcggaaaattacgagttcaaacgcaacgatgatactgcgctggaatttcgtcgtgctatctccgtgctgaaaagccttccgtttgaggtacgtagcctgaaagacacggaaggattgccctggatcggtgatgaagtcaaagggattatggaagaaatcatcgaggtcggtgaatcgctggaagtgcaggccgtgctcaatgatgagcgctatcaaagcttcaaacgctttaagagtgtctttggagtgggggtgaagacagcagacaagtggttgcgtatgggtctgcgcacgctcgaggatgttcgttccagcaagaccctgaagttgaccccgatgcagaaagcgggtctgtgctattatgaagatcttgctcgcggcgttacgaaagccgaagctgacgcgatttctctgctggttcaggatgcagtcgcaactttcgacccggatgcgctggtggagattgtcggtggatttcgtcgtgggaaacctcagggtcacgacgttgatctgcttatcacatctccgggagctgagaaagagcaagaagaccagctcctgcagaaagtgaccaatctgtggaagaaacaagggttgttgctgtacggtcgtctggaatggagtcagtttgaagatgggaaactcccatccggtaaggctgatgccctggaccaccacgcgaaatgctttctgatcctcaaactttatgatcataaagtggacaaaagcaaatgggaaatgccgacgggttcgaacatgggcgaggccaaaccgtggaaagcaattcgcgtagatctggttcgttgcccctacggcggttttgcgtttgcgttgttgggttggaccggaagccgcatgttccgccgtgatctgcgctggtacgccactgacgagaagaacatgatgctggacaatcatgcgctgtatgacctgaccaagaaaatctttctcaaagctaaatcggaagaggaaattttcgcacatctggggcttgaatacctggaaccgttcgaacgtaacgca

SEQ ID NO: 2220 - protein, 529 aa, synthetic construct
  REGION 1..529: note = Variant of terminal deoxynucleotidyltransferase
MHHHHHHGGSGSHGIRTIDSDFGKKRQKKMDNHDSSAIYEIKFHEFVLFILEEKMGATRRTFLTDLARKKGFRVENELSDSVTHIVAENNSRSEVLAWLKEHKMEKTKQFELLDISWLIESMKVGKPVDTKGKYQLAESGEMSANPDPTEGRENELPPTMKTVSPYACQRRTTLNNHNQRFTDALEILAENYEFKRNDDTALEFRRAISVLKSLPFEVRSLKDTEGLPWIGDEVKGIMEEIIEVGESLEVQAVLNDERYQSFKRFKSVFGVGVKTADKWLRMGLRTLEDVRSSKTLKLTPMQKAGLCYYEDLARGVTKAEADAISLLVQDAVATFDPDALVEIVGGFRRGKPQGHDVDLLITSPGAEKEQEDQLLQKVTNLWKKQGLLLYGRLEWSQFEDGKLPSGKADALDHHAKCFLILKLYDHKVDKSKWEMPTGSNMGEAKPWKAIRVDLVRCPYGGFAFALLGWTGSRMFRRDLRWYATDEKNMMLDNHALYDLTKKIFLKAKSEEEIFAHLGLEYLEPFERNA

SEQ ID NO: 2221 - DNA, 1587 bp, synthetic construct
  misc_feature 1..1587: note = Variant of terminal deoxynucleotidyltransferase
  source 1..1587: mol_type = other DNA
atgcaccatcatcatcatcatggcggtagcggcagccacggcattcgtaccatcgattcggacttcgggaagaaacgccagaaaaaaatggataaccacgatagttccgccatctatgaaatcaaatttcacgagtttgtgctgttcattctcgaagaaaaaatgggtgcgacgcgtcgtacttttctgacagatttagcccgcaagaaagggttccgcgtcgagaatgaactgtcagacagcgttacccacatcgtggcagaaaataattcacgctctgaagtattggcttggctgaaagaacacaagatggagaagaccaagcaattcgaactgctggatattagctggcttatcgaaagcatgaaagttggtaaaccggtggacaccaaggggaaataccagttggcggaatcgggtgagatgagtgcgaacccagatccgacagagggtcgtgaaaacgagctgcctcctactatgaagaccgtttctccgtatgcgtgtcaacgccgcaccaccctgaacaaccataatcaacgttttacggacgcactggaaattcttgcggaaaattacgagttcaaacgcaacgatgatactgcgctggaatttcgtcgtgctatctccgtgctgaaaagccttccgtttgaggtacgtagcctgaaagacacggaaggattgccctggatcggtgatgaagtcaaagggattatggaagaaatcatcgaggtcggtgaatcgctggaagtgcaggccgtgctcaatgatgagcgctatcaaagcttcaaacgctttaagagtgtctttggagtgggggtgaagacagcagacaagtggtaccgtatgggtctgcgcacgctcgaggatgttcgttccagcaagaccctgaagttgaccccgatgcagaaagcgggtatgtgctattatgaagatcttgctcgcggcgttacgaaagccgaagctgacgcgatttctctgctggttcaggatgcagtcgcaactttcgacccggatgcgctggtggagattgtcggtggatttcgtcgtgggaaacctcagggtcacgacgttgatctgcttatcacatctccgggagctgagaaagagcaagaagaccagctcctgcagaaagtgaccaatctgtggaagaaacaagggttgttgctgtacggtcgtctggaatggagtcagtttgaagatgggaaactcccatccggtaaggctgatgccctggaccaccacgcgaaatgctttctgatcctcaaactttatgatcataaagtggacaaaagcaaatgggaaatgccgacgggttcgaacatgggcgaggccaaaccgtggaaagcaattcgcgtagatctggttcgttgcccctacggcggttttgcgtttgcgttgttgggttggaccggaagccgcatgttccgccgtgatctgcgctggtacgccactgacgagaagaacatgatgctggacaatcatgcgctgtatgacctgaccaagaaaatctttctcaaagctaaatcggaagaggaaattttcgcacatctggggcttgaatacctggaaccgttcgaacgtaacgca

SEQ ID NO: 2222 - protein, 529 aa, synthetic construct
  REGION 1..529: note = Variant of terminal deoxynucleotidyltransferase
MHHHHHHGGSGSHGIRTIDSDFGKKRQKKMDNHDSSAIYEIKFHEFVLFILEEKMGATRRTFLTDLARKKGFRVENELSDSVTHIVAENNSRSEVLAWLKEHKMEKTKQFELLDISWLIESMKVGKPVDTKGKYQLAESGEMSANPDPTEGRENELPPTMKTVSPYACQRRTTLNNHNQRFTDALEILAENYEFKRNDDTALEFRRAISVLKSLPFEVRSLKDTEGLPWIGDEVKGIMEEIIEVGESLEVQAVLNDERYQSFKRFKSVFGVGVKTADKWYRMGLRTLEDVRSSKTLKLTPMQKAGMCYYEDLARGVTKAEADAISLLVQDAVATFDPDALVEIVGGFRRGKPQGHDVDLLITSPGAEKEQEDQLLQKVTNLWKKQGLLLYGRLEWSQFEDGKLPSGKADALDHHAKCFLILKLYDHKVDKSKWEMPTGSNMGEAKPWKAIRVDLVRCPYGGFAFALLGWTGSRMFRRDLRWYATDEKNMMLDNHALYDLTKKIFLKAKSEEEIFAHLGLEYLEPFERNA

SEQ ID NO: 2223 - DNA, 1587 bp, synthetic construct
  misc_feature 1..1587: note = Variant of terminal deoxynucleotidyltransferase
  source 1..1587: mol_type = other DNA
atgcaccatcatcatcatcatggcggtagcggcagccacggcattcgtaccatcgattcggacttcgggaagaaacgccagaaaaaaatggataaccacgatagttccgccatctatgaaatcaaatttcacgagtttgtgctgttcattctcgaagaaaaaatgggtgcgacgcgtcgtacttttctgacagatttagcccgcaagaaagggttccgcgtcgagaatgaactgtcagacagcgttacccacatcgtggcagaaaataattcacgctctgaagtattggcttggctgaaagaacacaagatggagaagaccaagcaattcgaactgctggatattagctggcttatcgaaagcatgaaagttggtaaaccggtggacaccaaggggaaataccagttggcggaatcgggtgagatgagtgcgaacccagatccgacagagggtcgtgaaaacgagctgcctcctactatgaagaccgtttctccgtatgcgtgtcaacgccgcaccaccctgaacaaccataatcaacgttttacggacgcactggaaattcttgcggaaaatggggagttcaaacgcaacgatgatactgcgctggaatttcgtcgtgctatctccgtgctgaaaagccttccgtttgaggtacgtagcctgaaagacacggaaggattgccctggatcggtgatgaagtcaaagggattatggaagaaatcatcgaggtcggtgaatcgctggaagtgcaggccgtgctcaatgatgagcgctatcaaagcttcaaacgctttaagagtgtctttggagtgggggtgaagacagcagacaagtggtaccgtatgggtctgcgcacgctcgaggatgttcgttccagcaagaccctgaagttgaccccgatgcagaaagcgggtctgtgctattatgaagatcttgctcgcggcgttacgaaagccgaagctgacgcgatttctctgctggttcaggatgcagtcgcaactttcgacccggatgcgctggtggagattgtcggtggatttcgtcgtgggaaacctcagggtcacgacgttgatctgcttatcacatctccgggagctgagaaagagcaagaagaccagctcctgcagaaagtgaccaatctgtggaagaaacaagggttgttgctgtacggtcgtctggaatggagtcagtttgaagatgggaaactcccatccggtaaggctgatgccctggaccaccacgcgaaatgctttctgatcctcaaactttatgatcataaagtggacaaaagcaaatgggaaatgccgacgggttcgaacatgggcgaggccaaaccgtggaaagcaattcgcgtagatctggttcgttgcccctacggcggttttgcgtttgcgttgttgggttggaccggaagccgcatgttccgccgtgatctgcgctggtacgccactgacgagaagaacatgatgctggacaatcatgcgctgtatgacctgaccaagaaaatctttctcaaagctaaatcggaagaggaaattttcgcacatctggggcttgaatacctggaaccgttcgaacgtaacgca

SEQ ID NO: 2224 - protein, 529 aa, synthetic construct
  REGION 1..529: note = Variant of terminal deoxynucleotidyltransferase
MHHHHHHGGSGSHGIRTIDSDFGKKRQKKMDNHDSSAIYEIKFHEFVLFILEEKMGATRRTFLTDLARKKGFRVENELSDSVTHIVAENNSRSEVLAWLKEHKMEKTKQFELLDISWLIESMKVGKPVDTKGKYQLAESGEMSANPDPTEGRENELPPTMKTVSPYACQRRTTLNNHNQRFTDALEILAENGEFKRNDDTALEFRRAISVLKSLPFEVRSLKDTEGLPWIGDEVKGIMEEIIEVGESLEVQAVLNDERYQSFKRFKSVFGVGVKTADKWYRMGLRTLEDVRSSKTLKLTPMQKAGLCYYEDLARGVTKAEADAISLLVQDAVATFDPDALVEIVGGFRRGKPQGHDVDLLITSPGAEKEQEDQLLQKVTNLWKKQGLLLYGRLEWSQFEDGKLPSGKADALDHHAKCFLILKLYDHKVDKSKWEMPTGSNMGEAKPWKAIRVDLVRCPYGGFAFALLGWTGSRMFRRDLRWYATDEKNMMLDNHALYDLTKKIFLKAKSEEEIFAHLGLEYLEPFERNA

SEQ ID NO: 2225 - DNA, 1587 bp, synthetic construct
  misc_feature 1..1587: note = Variant of terminal deoxynucleotidyltransferase
  source 1..1587: mol_type = other DNA
atgcaccatcatcatcatcatggcggtagcggcagccacggcattcgtaccatcgattcggacttcgggaagaaacgccagaaaaaaatggataaccacgatagttccgccatctatgaaatcaaatttcacgagtttgtgctgttcattctcgaagaaaaaatgggtgcgacgcgtcgtacttttctgacagatttagcccgcaagaaagggttccgcgtcgagaatgaactgtcagacagcgttacccacatcgtggcagaaaataattcacgctctgaagtattggcttggctgaaagaacacaagatggagaagaccaagcaattcgaactgctggatattagctggcttatcgaaagcatgaaagttggtaaaccggtggacaccaaggggaaataccagttggcggaatcgggtgagatgagtgcgaacccagatccgacagagggtcgtgaaaacgagctgcctcctactatgaagaccgtttctccgtatgcgtgtcaacgccgcaccaccctgaacaaccataatcaacgttttacggacgcactggaaattcttgcggaaaattacgagttcaaacgcaacgatgatactgcgctggaatttcgtcgtgctatctccgtgctgaaaagccttccgtttgaggtacgtagcctgaaagacacggaaggattgccctggatcggtgatgaagtcaaagggattatggaagaaatcatcgaggtcggtgaatcgctggaagtgcaggccgtgctcaatgatgagcgctatcaaagcttcaaacgctttaagagtgtctttggagtgggggtgaagacagcagacaagtggtaccgtatgggtctgcgcacgctcgaggatgttcgttccagcaagaccctgaagttgaccccgatgcagaaagcgggtctgtgctattatgaagatcttgctcgcggcgttacgaaagccgaagctgacgcgatttctctgctggttcaggatgcagtcgcaactttcgacccggatgcgctggtggagattgtcggtggatttcgtcgtgggaaacctcagggtcacgacgttgatctgcttatcacatctccgggagctgagaaagagcaagaagaccagctcctgcagaaagtgaccaatctgtggaagaaacaagggttgttgctgtacggtcgtctggaatggagtcagtttgaagatgggaaactcccatccggtaaggctgatgccactgaccatttcgcgaaatgctttctgatcctcaaactttatgatcataaagtggacaaaagcaaatgggaaatgccgacgggttcgaacatgggcgaggccaaaccgtggaaagcaattcgcgtagatctggttcgttgcccctacggcggttttgcgtttgcgttgttgggttggaccggaagccgcatgttccgccgtgatctgcgctggtacgccactgacgagaagaacatgatgctggacaatcatgcgctgtatgacctgaccaagaaaatctttctcaaagctaaatcggaagaggaaattttcgcacatctggggcttgaatacctggaaccgttcgaacgtaacgca

SEQ ID NO: 2226 - protein, 529 aa, synthetic construct
  REGION 1..529: note = Variant of terminal deoxynucleotidyltransferase
MHHHHHHGGSGSHGIRTIDSDFGKKRQKKMDNHDSSAIYEIKFHEFVLFILEEKMGATRRTFLTDLARKKGFRVENELSDSVTHIVAENNSRSEVLAWLKEHKMEKTKQFELLDISWLIESMKVGKPVDTKGKYQLAESGEMSANPDPTEGRENELPPTMKTVSPYACQRRTTLNNHNQRFTDALEILAENYEFKRNDDTALEFRRAISVLKSLPFEVRSLKDTEGLPWIGDEVKGIMEEIIEVGESLEVQAVLNDERYQSFKRFKSVFGVGVKTADKWYRMGLRTLEDVRSSKTLKLTPMQKAGLCYYEDLARGVTKAEADAISLLVQDAVATFDPDALVEIVGGFRRGKPQGHDVDLLITSPGAEKEQEDQLLQKVTNLWKKQGLLLYGRLEWSQFEDGKLPSGKADATDHFAKCFLILKLYDHKVDKSKWEMPTGSNMGEAKPWKAIRVDLVRCPYGGFAFALLGWTGSRMFRRDLRWYATDEKNMMLDNHALYDLTKKIFLKAKSEEEIFAHLGLEYLEPFERNA

SEQ ID NO: 2227 - DNA, 1587 bp, synthetic construct
  misc_feature 1..1587: note = Variant of terminal deoxynucleotidyltransferase
  source 1..1587: mol_type = other DNA
atgcaccatcatcatcatcatggcggtagcggcagccacggcattcgtaccatcgattcggacttcgggaagaaacgccagaaaaaaatggataaccacgatagttccgccatctatgaaatcaaatttcacgagtttgtgctgttcattctcgaagaaaaaatgggtgcgacgcgtcgtacttttctgacagatttagcccgcaagaaagggttccgcgtcgagaatgaactgtcagacagcgttacccacatcgtggcagaaaataattcacgctctgaagtattggcttggctgaaagaacacaagatggagaagaccaagcaattcgaactgctggatattagctggcttatcgaaagcatgaaagttggtaaaccggtggacaccaaggggaaataccagttggcggaatcgggtgagatgagtgcgaacccagatccgacagagggtcgtgaaaacgagctgcctcctactatgaagaccgtttctccgtatgcgtgtcaacgccgcaccaccctgaacaaccataatcaacgttttacggacgcactggaaattcttgcggaaaattacgagttcaaacgcaacgatgatactgcgctggaatttcgtcgtgctatctccgtgctgaaaagccttccgtttgaggtacgtagcctgaaagacacggaaggattgccctggatcggtgatgaagtcaaagggattatggaagaaatcatcgaggtcggtgaatcgctggaagtgcaggccgtgctcaatgatgagcgctatcaaagcttcaaacgctttaagagtgtctttggagtgggggtgaagacagcagacaagtggtaccgtatgggtatgcgcacgctcgaggatgttcgttccagcaagaccctgaagttgaccccgatgcagaaagcgggtctgtgctattatgaagatcttgctcgcggcgttacgaaagccgaagctgacgcgatttctctgctggttcaggatgcagtcgcaactttcgacccggatgcgctggtggagattgtcggtggatttcgtcgtgggaaacctcagggtcacgacgttgatctgcttatcacatctccgggagctgagaaagagcaagaagaccagctcctgcagaaagtgaccaatctgtggaagaaacaagggttgttgctgtacggtcgtctggaatggagtcagtttgaagatgggaaactcccatccggtaaggctgatgccctggaccaccacgcgaaatgctttctgatcctcaaactttatgatcataaagtggacaaaagcaaatgggaaatgccgacgggttcgaacatgggcgaggccaaaccgtggaaagcaattcgcgtagatctggttcgttgcccctacggcggttttgcgtttgcgttgttgggttggaccggaagccgcatgttccgccgtgatctgcgctggtacgccactgacgagaagaacatgatgctggacaatcatgcgctgtatgacctgaccaagaaaatctttctcaaagctaaatcggaagaggaaattttcgcacatctggggcttgaatacctggaaccgttcgaacgtaacgca

SEQ ID NO: 2228 - protein, 529 aa, synthetic construct
  REGION 1..529: note = Variant of terminal deoxynucleotidyltransferase
MHHHHHHGGSGSHGIRTIDSDFGKKRQKKMDNHDSSAIYEIKFHEFVLFILEEKMGATRRTFLTDLARKKGFRVENELSDSVTHIVAENNSRSEVLAWLKEHKMEKTKQFELLDISWLIESMKVGKPVDTKGKYQLAESGEMSANPDPTEGRENELPPTMKTVSPYACQRRTTLNNHNQRFTDALEILAENYEFKRNDDTALEFRRAISVLKSLPFEVRSLKDTEGLPWIGDEVKGIMEEIIEVGESLEVQAVLNDERYQSFKRFKSVFGVGVKTADKWYRMGMRTLEDVRSSKTLKLTPMQKAGLCYYEDLARGVTKAEADAISLLVQDAVATFDPDALVEIVGGFRRGKPQGHDVDLLITSPGAEKEQEDQLLQKVTNLWKKQGLLLYGRLEWSQFEDGKLPSGKADALDHHAKCFLILKLYDHKVDKSKWEMPTGSNMGEAKPWKAIRVDLVRCPYGGFAFALLGWTGSRMFRRDLRWYATDEKNMMLDNHALYDLTKKIFLKAKSEEEIFAHLGLEYLEPFERNA

SEQ ID NO: 2229 - DNA, 1587 bp, synthetic construct
  misc_feature 1..1587: note = Variant of terminal deoxynucleotidyltransferase
  source 1..1587: mol_type = other DNA
atgcaccatcatcatcatcatggcggtagcggcagccacggcattcgtaccatcgattcggacttcgggaagaaacgccagaaaaaaatggataaccacgatagttccgccatctatgaaatcaaatttcacgagtttgtgctgttcattctcgaagaaaaaatgggtgcgacgcgtcgtacttttctgacagatttagcccgcaagaaagggttccgcgtcgagaatgaactgtcagacagcgttacccacatcgtggcagaaaataattcacgctctgaagtattggcttggctgaaagaacacaagatggagaagaccaagcaattcgaactgctggatattagctggcttatcgaaagcatgaaagttggtaaaccggtggacaccaaggggaaataccagttggcggaatcgggtgagatgagtgcgaacccagatccgacagagggtcgtgaaaacgagctgcctcctactatgaagaccatttctccgtatgcgtgtaggcgccgcaccaccctgaacaaccataatcaacgttttacggacgcactggaaattcttgcggaaaattacgagttcaaacgcaacgatgatactgcgctggaatttcgtcgtgctatctccgtgctgaaaagccttccgtttgaggtacgtagcctgaaagacacggaaggattgccctggatcggtgatgaagtcaaagggattatggaagaaatcatcgaggtcggtgaatcgctggaagtgcaggccgtgctcaatgatgagcgctatcaaagcttcaaacgctttaagagtgtctttggagtgggggtgaagacagcagacaagtggtaccgtatgggtctgcgcacgctcgaggatgttcgttccagcaagaccctgaagttgaccccgatgcagaaagcgggtctgtgctattatgaagatcttgctcgcggcgttacgaaagccgaagctgacgcgatttctctgctggttcaggatgcagtcgcaactttcgacccggatgcgctggtggagattgtcggtggatttcgtcgtgggaaacctcagggtcacgacgttgatctgcttatcacatctccgggagctgagaaagagcaagaagaccagctcctgcagaaagtgaccaatctgtggaagaaacaagggttgttgctgtacggtcgtctggaatggagtcagtttgaagatgggaaactcccatccggtaaggctgatgccctggaccaccacgcgaaatgctttctgatcctcaaactttatgatcataaagtggacaaaagcaaatgggaaatgccgacgggttcgaacatgggcgaggccaaaccgtggaaagcaattcgcgtagatctggttcgttgcccctacggcggttttgcgtttgcgttgttgggttggaccggaagccgcatgttccgccgtgatctgcgctggtacgccactgacgagaagaacatgatgctggacaatcatgcgctgtatgacctgaccaagaaaatctttctcaaagctaaatcggaagaggaaattttcgcacatctggggcttgaatacctggaaccgttcgaacgtaacgca

SEQ ID NO: 2230 - protein, 529 aa, synthetic construct
  REGION 1..529: note = Variant of terminal deoxynucleotidyltransferase
MHHHHHHGGSGSHGIRTIDSDFGKKRQKKMDNHDSSAIYEIKFHEFVLFILEEKMGATRRTFLTDLARKKGFRVENELSDSVTHIVAENNSRSEVLAWLKEHKMEKTKQFELLDISWLIESMKVGKPVDTKGKYQLAESGEMSANPDPTEGRENELPPTMKTISPYACRRRTTLNNHNQRFTDALEILAENYEFKRNDDTALEFRRAISVLKSLPFEVRSLKDTEGLPWIGDEVKGIMEEIIEVGESLEVQAVLNDERYQSFKRFKSVFGVGVKTADKWYRMGLRTLEDVRSSKTLKLTPMQKAGLCYYEDLARGVTKAEADAISLLVQDAVATFDPDALVEIVGGFRRGKPQGHDVDLLITSPGAEKEQEDQLLQKVTNLWKKQGLLLYGRLEWSQFEDGKLPSGKADALDHHAKCFLILKLYDHKVDKSKWEMPTGSNMGEAKPWKAIRVDLVRCPYGGFAFALLGWTGSRMFRRDLRWYATDEKNMMLDNHALYDLTKKIFLKAKSEEEIFAHLGLEYLEPFERNA

SEQ ID NO: 2231 - DNA, 1587 bp, synthetic construct
  misc_feature 1..1587: note = Variant of terminal deoxynucleotidyltransferase
  source 1..1587: mol_type = other DNA
atgcaccatcatcatcatcatggcggtagcggcagccacggcattcgtaccatcgattcggacttcgggaagaaacgccagaaaaaaatggataaccacgatagttccgccatctatgaaatcaaatttcacgagtttgtgctgttcattctcgaagaaaaaatgggtgcgacgcgtcgtacttttctgacagatttagcccgcaagaaagggttccgcgtcgagaatgaactgtcagacagcgttacccacatcgtggcagaaaataattcacgctctgaagtattggcttggctgaaagaacacaagatggagaagaccaagcaattcgaactgctggatattagctggcttatcgaaagcatgaaagttggtaaaccggtggacaccaaggggaaataccagttggcggaatcgggtgagatgagtgcgaacccagatccgacagagggtcgtgaaaacgagctgcctcctactatgaagaccgtttctccgtatgcgtgtcaacgccgcaccaccctgaacaaccataatcaacgttttacggacgcactggaaattcttgcggaaaattacgagttcaaacgcctggatgatactgcgctggaatttcgtcgtgctatctccgtgctgaaaagccttccgtttgaggtacgtagcctgaaagacacggaaggattgccctggatcggtgatgaagtcaaagggattatggaagaaatcatcgaggtcggtgaatcgctggaagtgcaggccgtgctcaatgatgagcgctatcaaagcttcaaacgctttaagagtgtctttggagtgggggtgaagacagcagacaagtggtaccgtatgggtctgcgcacgctcgaggatgttcgttccagcaagaccctgaagttgaccccgatgcagaaagcgggtctgtgctattatgaagatcttgctcgcggcgttacgaaagccgaagctgacgcgatttctctgctggttcaggatgcagtcgcaactttcgacccggatgcgctggtggagattgtcggtggatttcgtcgtgggaaacctcagggtcacgacgttgatctgcttatcacatctccgggagctgagaaagagcaagaagaccagctcctgcagaaagtgaccaatctgtggaagaaacaagggttgttgctgtacggtcgtctggaatggagtcagtttgaagatgggaaactcccatccggtaaggctgatgccctggaccaccacgcgaaatgctttctgatcctcaaactttatgatcataaagtggacaaaagcaaatgggaaatgccgacgggttcgaacatgggcgaggccaaaccgtggaaagcaattcgcgtagatctggttcgttgcccctacggcggttttgcgtttgcgttgttgggttggaccggaagccgcatgttccgccgtgatctgcgctggtacgccactgacgagaagaacatgatgctggacaatcatgcgctgtatgacctgaccaagaaaatctttctcaaagctaaatcggaagaggaaattttcgcacatctggggcttgaatacctggaaccgttcgaacgtaacgca

SEQ ID NO: 2232 - protein, 529 aa, synthetic construct
  REGION 1..529: note = Variant of terminal deoxynucleotidyltransferase
MHHHHHHGGSGSHGIRTIDSDFGKKRQKKMDNHDSSAIYEIKFHEFVLFILEEKMGATRRTFLTDLARKKGFRVENELSDSVTHIVAENNSRSEVLAWLKEHKMEKTKQFELLDISWLIESMKVGKPVDTKGKYQLAESGEMSANPDPTEGRENELPPTMKTVSPYACQRRTTLNNHNQRFTDALEILAENYEFKRLDDTALEFRRAISVLKSLPFEVRSLKDTEGLPWIGDEVKGIMEEIIEVGESLEVQAVLNDERYQSFKRFKSVFGVGVKTADKWYRMGLRTLEDVRSSKTLKLTPMQKAGLCYYEDLARGVTKAEADAISLLVQDAVATFDPDALVEIVGGFRRGKPQGHDVDLLITSPGAEKEQEDQLLQKVTNLWKKQGLLLYGRLEWSQFEDGKLPSGKADALDHHAKCFLILKLYDHKVDKSKWEMPTGSNMGEAKPWKAIRVDLVRCPYGGFAFALLGWTGSRMFRRDLRWYATDEKNMMLDNHALYDLTKKIFLKAKSEEEIFAHLGLEYLEPFERNA

SEQ ID NO: 2233 - DNA, 1587 bp, synthetic construct
  misc_feature 1..1587: note = Variant of terminal deoxynucleotidyltransferase
  source 1..1587: mol_type = other DNA
atgcaccatcatcatcatcatggcggtagcggcagccacggcattcgtaccatcgattcggacttcgggaagaaacgccagaaaaaaatggataaccacgatagttccgccatctatgaaatcaaatttcacgagtttgtgctgttcattctcgaagaaaaaatgggtgcgacgcgtcgtacttttctgacagatttagcccgcaagaaagggttccgcgtcgagaatgaactgtcagacagcgttacccacatcgtggcagaaaataattcacgctctgaagtattggcttggctgaaagaacacaagatggagaagaccaagcaattcgaactgctggatattagctggcttatcgaaagcatgaaagttggtaaaccggtggacaccaaggggaaataccagttggcggaatcgggtgagatgagtgcgaacccagatccgacagagggtcgtgaaaacgagctgcctcctactatgaagaccgtttctccgtatgcgtgtcaacgccgcaccaccctgaacaaccataatcaacgttttacggacgcactggaaattcttgcggaaaattacgagttcaaacgcaacgatgatactgcgctggaatttcgtcgtgctatctccgtgctgaaaagccttccgtttgaggtacgtagcctgaaagacacggaaggattgccctggatcggtgatgaagtcaaagggattatggaagaaatcatcgaggtcggtgaatcgctggaagtgcaggccgtgctcaatgatgagcgctatcaaagcttcaaacgctttaagagtgtctttggagtgggggtgaagacagcagacaagtggtaccgtatgggtctgcgcacgctcgaggatgttcgttccagcaagaccctgaagttgaccccgatgcagaaagcgggtctgtgctattatgaagatcttgctcgcggcgttacgaaagccgaagctgacgcgatttctctgctggttcaggatgcagtcgcaactttcgacccggatgcgctggtggagattgtcggtggatttcgtcgtgggaaacctcagggtcacgacgttgatctgcttatcacatctccgggagctgagaaagagcaagaagaccagctcctgcagaaagtgaccaatctgtggaagaaacaagggttgttgctgtacggtcgtctggaatggagtcagtttgaagatgggaaactcccatccggttttgctgatgccctggaccaccacgcgaaatgctttctgatcctcaaactttatgatcataaagtggacaaaagcaaatgggaaatgccgacgggttcgaacatgggcgaggccaaaccgtggaaagcaattcgcgtagatctggttcgttgcccctacggcggttttgcgtttgcgttgttgggttggaccggaagccgcatgttccgccgtgatctgcgctggtacgccactgacgagaagaacatgatgctggacaatcatgcgctgtatgacctgaccaagaaaatctttctcaaagctaaatcggaagaggaaattttcgcacatctggggcttgaatacctggaaccgttcgaacgtaacgca

SEQ ID NO: 2234 - protein, 529 aa, synthetic construct
  REGION 1..529: note = Variant of terminal deoxynucleotidyltransferase
MHHHHHHGGSGSHGIRTIDSDFGKKRQKKMDNHDSSAIYEIKFHEFVLFILEEKMGATRRTFLTDLARKKGFRVENELSDSVTHIVAENNSRSEVLAWLKEHKMEKTKQFELLDISWLIESMKVGKPVDTKGKYQLAESGEMSANPDPTEGRENELPPTMKTVSPYACQRRTTLNNHNQRFTDALEILAENYEFKRNDDTALEFRRAISVLKSLPFEVRSLKDTEGLPWIGDEVKGIMEEIIEVGESLEVQAVLNDERYQSFKRFKSVFGVGVKTADKWYRMGLRTLEDVRSSKTLKLTPMQKAGLCYYEDLARGVTKAEADAISLLVQDAVATFDPDALVEIVGGFRRGKPQGHDVDLLITSPGAEKEQEDQLLQKVTNLWKKQGLLLYGRLEWSQFEDGKLPSGFADALDHHAKCFLILKLYDHKVDKSKWEMPTGSNMGEAKPWKAIRVDLVRCPYGGFAFALLGWTGSRMFRRDLRWYATDEKNMMLDNHALYDLTKKIFLKAKSEEEIFAHLGLEYLEPFERNA

SEQ ID NO: 2235 - DNA, 1587 bp, synthetic construct
  misc_feature 1..1587: note = Variant of terminal deoxynucleotidyltransferase
  source 1..1587: mol_type = other DNA
atgcaccatcatcatcatcatggcggtagcggcagccacggcattcgtaccatcgattcggacttcgggaagaaacgccagaaaaaaatggataaccacgatagttccgccatctatgaaatcaaatttcacgagtttgtgctgttcattctcgaagaaaaaatgggtgcgacgcgtcgtacttttctgacagatttagcccgcaagaaagggttccgcgtcgagaatgaactgtcagacagcgttacccacatcgtggcagaaaataattcacgctctgaagtattggcttggctgaaagaacacaagatggagaagaccaagcaattcgaactgctggatattagctggcttatcgaaagcatgaaagttggtaaaccggtggacaccaaggggaaataccagttggcggaatcgggtgagatgagtgcgaacccagatccgacagagggtcgtgaaaacgagctgcctcctactatgaagaccgtttctccgtatgcgtgtcaacgccgcaccaccctgaacaaccataatcaacgttttacggacgcactggaaattcttgcggaaaattacgagttcaaacgcaacgatgatactgcgctggaatttcgtcgtgctatctccgtgctgaaaagccttccgtttgaggtacgtagcctgaaagacacggaaggattgccctggatcggtgatgaagtcaaagggattatggaagaaatcatcgaggtcggtgaatcgctggaagtgcaggccgtgctcaatgatgagcgctatcaaagcttcaaacgctttaagagtgtctttggagtgggggtgaagacagcagacaagtggtaccgtatgggtctgcgcacgctcgaggatgcgcgttccagcaagaccctgaagttgaccccgatgcagaaagcgggtctgtgctattatgaagatcttgctcgcggcgttacgaaagccgaagctgacgcgatttctctgctggttcaggatgcagtcgcaactttcgacccggatgcgctggtggagattgtcggtggatttcgtcgtgggaaacctcagggtcacgacgttgatctgcttatcacatctccgggagctgagaaagagcaagaagaccagctcctgcagaaagtgaccaatctgtggaagaaacaagggttgttgctgtacggtcgtctggaatggagtcagtttgaagatgggaaactcccatccggtaaggctgatgccctggaccaccacgcgaaatgctttctgatcctcaaactttatgatcataaagtggacaaaagcaaatgggaaatgccgacgggttcgaacatgggcgaggccaaaccgtggaaagcaattcgcgtagatctggttcgttgcccctacggcggttttgcgtttgcgttgttgggttggaccggaagccgcatgttccgccgtgatctgcgctggtacgccactgacgagaagaacatgatgctggacaatcatgcgctgtatgacctgaccaagaaaatctttctcaaagctaaatcggaagaggaaattttcgcacatctggggcttgaatacctggaaccgttcgaacgtaacgca

SEQ ID NO: 2236 - protein, 529 aa, synthetic construct
  REGION 1..529: note = Variant of terminal deoxynucleotidyltransferase
MHHHHHHGGSGSHGIRTIDSDFGKKRQKKMDNHDSSAIYEIKFHEFVLFILEEKMGATRRTFLTDLARKKGFRVENELSDSVTHIVAENNSRSEVLAWLKEHKMEKTKQFELLDISWLIESMKVGKPVDTKGKYQLAESGEMSANPDPTEGRENELPPTMKTVSPYACQRRTTLNNHNQRFTDALEILAENYEFKRNDDTALEFRRAISVLKSLPFEVRSLKDTEGLPWIGDEVKGIMEEIIEVGESLEVQAVLNDERYQSFKRFKSVFGVGVKTADKWYRMGLRTLEDARSSKTLKLTPMQKAGLCYYEDLARGVTKAEADAISLLVQDAVATFDPDALVEIVGGFRRGKPQGHDVDLLITSPGAEKEQEDQLLQKVTNLWKKQGLLLYGRLEWSQFEDGKLPSGKADALDHHAKCFLILKLYDHKVDKSKWEMPTGSNMGEAKPWKAIRVDLVRCPYGGFAFALLGWTGSRMFRRDLRWYATDEKNMMLDNHALYDLTKKIFLKAKSEEEIFAHLGLEYLEPFERNA

SEQ ID NO: 2237 - DNA, 1587 bp, synthetic construct
  misc_feature 1..1587: note = Variant of terminal deoxynucleotidyltransferase
  source 1..1587: mol_type = other DNA
atgcaccatcatcatcatcatggcggtagcggcagccacggcattcgtaccatcgattcggacttcgggaagaaacgccagaaaaaaatggataaccacgatagttccgccatctatgaaatcaaatttcacgagtttgtgctgttcattctcgaagaaaaaatgggtgcgacgcgtcgtacttttctgacagatttagcccgcaagaaagggttccgcgtcgagaatgaactgtcagacagcgttacccacatcgtggcagaaaataattcacgctctgaagtattggcttggctgaaagaacacaagatggagaagaccaagcaattcgaactgctggatattagctggcttatcgaaagcatgaaagttggtaaaccggtggacaccaaggggaaataccagttggcggaatcgggtgagatgagtgcgaacccagatccgacagagggtcgtgaaaacgagctgcctcctactatgaagaccgtttctccgtatgcgtgtcaacgccgcaccaccctgaacaaccataatcaacgttttacggacgcactggaaattcttgcggaaaattacgagttcaaacgcaacgcggatactgcgctggaatttcgtcgtgctatctccgtgctgaaaagccttccgtttgaggtacgtagcctgaaagacacggaaggattgccctggatcggtgatgaagtcaaagggattatggaagaaatcatcgaggtcggtgaatcgctggaagtgcaggccgtgctcaatgatgagcgctatcaaagcttcaaacgctttaagagtgtctttggagtgggggtgaagacagcagacaagtggtaccgtatgggtctgcgcacgctcgaggatgttcgttccagcaagaccctgaagttgaccccgatgcagaaagcgggtctgtgctattatgaagatcttgctcgcggcgttacgaaagccgaagctgacgcgatttctctgctggttcaggatgcagtcgcaactttcgacccggatgcgctggtggagattgtcggtggatttcgtcgtgggaaacctcagggtcacgacgttgatctgcttatcacatctccgggagctgagaaagagcaagaagaccagctcctgcagaaagtgaccaatctgtggaagaaacaagggttgttgctgtacggtcgtctggaatggagtcagtttgaagatgggaaactcccatccggtaaggctgatgccctggaccaccacgcgaaatgctttctgatcctcaaactttatgatcataaagtggacaaaagcaaatgggaaatgccgacgggttcgaacatgggcgaggccaaaccgtggaaagcaattcgcgtagatctggttcgttgcccctacggcggttttgcgtttgcgttgttgggttggaccggaagccgcatgttccgccgtgatctgcgctggtacgccactgacgagaagaacatgatgctggacaatcatgcgctgtatgacctgaccaagaaaatctttctcaaagctaaatcggaagaggaaattttcgcacatctggggcttgaatacctggaaccgttcgaacgtaacgca

SEQ ID NO: 2238 - protein, 529 aa, synthetic construct
  REGION 1..529: note = Variant of terminal deoxynucleotidyltransferase
MHHHHHHGGSGSHGIRTIDSDFGKKRQKKMDNHDSSAIYEIKFHEFVLFILEEKMGATRRTFLTDLARKKGFRVENELSDSVTHIVAENNSRSEVLAWLKEHKMEKTKQFELLDISWLIESMKVGKPVDTKGKYQLAESGEMSANPDPTEGRENELPPTMKTVSPYACQRRTTLNNHNQRFTDALEILAENYEFKRNADTALEFRRAISVLKSLPFEVRSLKDTEGLPWIGDEVKGIMEEIIEVGESLEVQAVLNDERYQSFKRFKSVFGVGVKTADKWYRMGLRTLEDVRSSKTLKLTPMQKAGLCYYEDLARGVTKAEADAISLLVQDAVATFDPDALVEIVGGFRRGKPQGHDVDLLITSPGAEKEQEDQLLQKVTNLWKKQGLLLYGRLEWSQFEDGKLPSGKADALDHHAKCFLILKLYDHKVDKSKWEMPTGSNMGEAKPWKAIRVDLVRCPYGGFAFALLGWTGSRMFRRDLRWYATDEKNMMLDNHALYDLTKKIFLKAKSEEEIFAHLGLEYLEPFERNA

SEQ ID NO: 2239 - DNA, 1587 bp, synthetic construct
  misc_feature 1..1587: note = Variant of terminal deoxynucleotidyltransferase
  source 1..1587: mol_type = other DNA
atgcaccatcatcatcatcatggcggtagcggcagccacggcattcgtaccatcgattcggacttcgggaagaaacgccagaaaaaaatggataaccacgatagttccgccatctatgaaatcaaatttcacgagtttgtgctgttcattctcgaagaaaaaatgggtgcgacgcgtcgtacttttctgacagatttagcccgcaagaaagggttccgcgtcgagaatgaactgtcagacagcgttacccacatcgtggcagaaaataattcacgctctgaagtattggcttggctgaaagaacacaagatggagaagaccaagcaattcgaactgctggatattagctggcttatcgaaagcatgaaagttggtaaaccggtggacaccaaggggaaataccagttggcggaatcgggtgagatgagtgcgaacccagatccgacagagggtcgtgaaaacgagctgcctcctactatgaagaccgtttctccgtatgcgtgtcaacgccgcaccaccctgaacaaccataatcaacgttttacggacgcactggaaattcttgcggaaaattacgagttcaaacgcaacgatgatactgcgctggaatttcgtcgtgctatctccgtgctgaaaagccttccgtttgaggtacgtagcctgaaagacacggaaggattgccctggatcggtgatgaagtcaaagggattatggaagaaatcatcgaggtcggtgaatcgctggaagtgcaggccgtgctcaatgatgagcgctatcaaagcttcaaacgctttaagagtgtctttggagtgggggtgaagacagcagacaagtggtaccgtatgggtctgcgcacgctcgaggatgttcgttccagcaagaccctgaagttgaccccgatgcagaaagcgggtctgtgctattatgaagatcttgctcgcggcgttacgaaagccgaagctgacgcgatttctctgctggttcaggatgcagtcgcaactttcgacccggatgcgctggtggagattgtcggtggatttcgtcgtgggaaacctcagggtcacgacgttgatctgcttatcacatctccgggagctgagaaagagcaagaagaccagctcctgcagaaagtgaccaatctgtggaagaaacaagggttgttgctgtacggtcgtctggaatggagtcagtttgaagatgggaaactcccatccggtaaggctgatgccctggaccaccattttaaatgctttctgatcctcaaactttatgatcataaagtggacaaaagcaaatgggaaatgccgacgggttcgaacatgggcgaggccaaaccgtggaaagcaattcgcgtagatctggttcgttgcccctacggcggttttgcgtttgcgttgttgggttggaccggaagccgcatgttccgccgtgatctgcgctggtacgccactgacgagaagaacatgatgctggacaatcatgcgctgtatgacctgaccaagaaaatctttctcaaagctaaatcggaagaggaaattttcgcacatctggggcttgaatacctggaaccgttcgaacgtaacgca

SEQ ID NO: 2240 - protein, 529 aa, synthetic construct
  REGION 1..529: note = Variant of terminal deoxynucleotidyltransferase
MHHHHHHGGSGSHGIRTIDSDFGKKRQKKMDNHDSSAIYEIKFHEFVLFILEEKMGATRRTFLTDLARKKGFRVENELSDSVTHIVAENNSRSEVLAWLKEHKMEKTKQFELLDISWLIESMKVGKPVDTKGKYQLAESGEMSANPDPTEGRENELPPTMKTVSPYACQRRTTLNNHNQRFTDALEILAENYEFKRNDDTALEFRRAISVLKSLPFEVRSLKDTEGLPWIGDEVKGIMEEIIEVGESLEVQAVLNDERYQSFKRFKSVFGVGVKTADKWYRMGLRTLEDVRSSKTLKLTPMQKAGLCYYEDLARGVTKAEADAISLLVQDAVATFDPDALVEIVGGFRRGKPQGHDVDLLITSPGAEKEQEDQLLQKVTNLWKKQGLLLYGRLEWSQFEDGKLPSGKADALDHHFKCFLILKLYDHKVDKSKWEMPTGSNMGEAKPWKAIRVDLVRCPYGGFAFALLGWTGSRMFRRDLRWYATDEKNMMLDNHALYDLTKKIFLKAKSEEEIFAHLGLEYLEPFERNA

SEQ ID NO: 2241 - DNA, 1587 bp, synthetic construct
  misc_feature 1..1587: note = Variant of terminal deoxynucleotidyltransferase
  source 1..1587: mol_type = other DNA
atgcaccatcatcatcatcatggcggtagcggcagccacggcattcgtaccatcgattcggacttcgggaagaaacgccagaaaaaaatggataaccacgatagttccgccatctatgaaatcaaatttcacgagtttgtgctgttcattctcgaagaaaaaatgggtgcgacgcgtcgtacttttctgacagatttagcccgcaagaaagggttccgcgtcgagaatgaactgtcagacagcgttacccacatcgtggcagaaaataattcacgctctgaagtattggcttggctgaaagaacacaagatggagaagaccaagcaattcgaactgctggatattagctggcttatcgaaagcatgaaagttggtaaaccggtggacaccaaggggaaataccagttggcggaatcgggtgagatgagtgcgaacccagatccgacagagggtcgtgaaaacgagctgcctcctactatgaagaccgtttctccgtatgcgtgtcaacgccgcaccaccctgaacaaccataatcaacgttttacggacgcactggaaattcttgcggaaaattacgagttcaaacgcaacgatgatactgcgctggaatttcgtcgtgctatctccgtgctgaaaagccttccgtttgaggtacgtagcctgaaagacacggaaggattgccctggatcggtgatgaagtcaaagggattatggaagaaatcatcgaggtcggtgaatcgctggaagtgcaggccgtgctcaatgatgagcgctatcaagcgttcaaacgctttaagagtgtctttggagtgggggtgaagacagcagacaagtggtaccgtatgggtctgcgcacgctcgaggatgttcgttccagcaagaccctgaagttgaccccgatgcagaaagcgggtctgtgctattatgaagatcttgctcgcggcgttacgaaagccgaagctgacgcgatttctctgctggttcaggatgcagtcgcaactttcgacccggatgcgctggtggagattgtcggtggatttcgtcgtgggaaacctcagggtcacgacgttgatctgcttatcacatctccgggagctgagaaagagcaagaagaccagctcctgcagaaagtgaccaatctgtggaagaaacaagggttgttgctgtacggtcgtctggaatggagtcagtttgaagatgggaaactcccatccggtaaggctgatgccctggaccaccacgcgaaatgctttctgatcctcaaactttatgatcataaagtggacaaaagcaaatgggaaatgccgacgggttcgaacatgggcgaggccaaaccgtggaaagcaattcgcgtagatctggttcgttgcccctacggcggttttgcgtttgcgttgttgggttggaccggaagccgcatgttccgccgtgatctgcgctggtacgccactgacgagaagaacatgatgctggacaatcatgcgctgtatgacctgaccaagaaaatctttctcaaagctaaatcggaagaggaaattttcgcacatctggggcttgaatacctggaaccgttcgaacgtaacgca

SEQ ID NO: 2242 - protein, 529 aa, synthetic construct
  REGION 1..529: note = Variant of terminal deoxynucleotidyltransferase
MHHHHHHGGSGSHGIRTIDSDFGKKRQKKMDNHDSSAIYEIKFHEFVLFILEEKMGATRRTFLTDLARKKGFRVENELSDSVTHIVAENNSRSEVLAWLKEHKMEKTKQFELLDISWLIESMKVGKPVDTKGKYQLAESGEMSANPDPTEGRENELPPTMKTVSPYACQRRTTLNNHNQRFTDALEILAENYEFKRNDDTALEFRRAISVLKSLPFEVRSLKDTEGLPWIGDEVKGIMEEIIEVGESLEVQAVLNDERYQAFKRFKSVFGVGVKTADKWYRMGLRTLEDVRSSKTLKLTPMQKAGLCYYEDLARGVTKAEADAISLLVQDAVATFDPDALVEIVGGFRRGKPQGHDVDLLITSPGAEKEQEDQLLQKVTNLWKKQGLLLYGRLEWSQFEDGKLPSGKADALDHHAKCFLILKLYDHKVDKSKWEMPTGSNMGEAKPWKAIRVDLVRCPYGGFAFALLGWTGSRMFRRDLRWYATDEKNMMLDNHALYDLTKKIFLKAKSEEEIFAHLGLEYLEPFERNA

SEQ ID NO: 2243 - DNA, 1587 bp, synthetic construct
  misc_feature 1..1587: note = Variant of terminal deoxynucleotidyltransferase
  source 1..1587: mol_type = other DNA
atgcaccatcatcatcatcatggcggtagcggcagccacggcattcgtaccatcgattcggacttcgggaagaaacgccagaaaaaaatggataaccacgatagttccgccatctatgaaatcaaatttcacgagtttgtgctgttcattctcgaagaaaaaatgggtgcgacgcgtcgtacttttctgacagatttagcccgcaagaaagggttccgcgtcgagaatgaactgtcagacagcgttacccacatcgtggcagaaaataattcacgctctgaagtattggcttggctgaaagaacacaagatggagaagaccaagcaattcgaactgctggatattagctggcttatcgaaagcatgaaagttggtaaaccggtggacaccaaggggaaataccagttggcggaatcgggtgagatgagtgcgaacccagatccgacagagggtcgtgaaaacgagctgcctcctactatgaagaccgtttctccgtatgcgtgtcaacgccgcaccaccctgaacaaccataatcaacgttttacggacgcactggaaattcttgcggaaaattacgagttcaaacgcaacgatgatactgcgctggaatttcgtcgtgctatctccgtgctgaaaagccttccgtttgaggtacgtagcctgaaagacacggaaggattgccctggatcggtgatgaagtcaaagggattatggaagaaatcatcgaggtcggtgaatcgctggaagtgcaggccgtgctcaatgatgagcgctatcaaagcttcaaacgctttaagagtgtctttggagtgggggtgaagacagcagacaagtggtaccgtatgggtctgcgcacgctcgaggatgttcgttccagcaagaccctgaagttgaccccgatgcagaaagcgggtctgtgctattatgaagatcttgctcgcggcgttacgaaagccgaagctgacgcgatttctctgctggttcaggatgcagtcgcaactttcgacccggatgcgctggtggagattgtcggtggatttcgtcgtgggaaacctcagggtcacgacgttgatctgcttatcacatctccgggagctgagaaagagcaagaagaccagctcctgcagaaagtgaccaatctgtggaagaaacaagggttgttgctgtacggtcgtcgtgaatggagtcagtttgaagatgggaaactcccatccggtaaggctgatgccctggaccaccacgcgaaatgctttctgatcctcaaactttatgatcataaagtggacaaaagcaaatgggaaatgccgacgggttcgaacatgggcgaggccaaaccgtggaaagcaattcgcgtagatctggttcgttgcccctacggcggttttgcgtttgcgttgttgggttggaccggaagccgcatgttccgccgtgatctgcgctggtacgccactgacgagaagaacatgatgctggacaatcatgcgctgtatgacctgaccaagaaaatctttctcaaagctaaatcggaagaggaaattttcgcacatctggggcttgaatacctggaaccgttcgaacgtaacgca

SEQ ID NO: 2244 - protein, 529 aa, synthetic construct
  REGION 1..529: note = Variant of terminal deoxynucleotidyltransferase
MHHHHHHGGSGSHGIRTIDSDFGKKRQKKMDNHDSSAIYEIKFHEFVLFILEEKMGATRRTFLTDLARKKGFRVENELSDSVTHIVAENNSRSEVLAWLKEHKMEKTKQFELLDISWLIESMKVGKPVDTKGKYQLAESGEMSANPDPTEGRENELPPTMKTVSPYACQRRTTLNNHNQRFTDALEILAENYEFKRNDDTALEFRRAISVLKSLPFEVRSLKDTEGLPWIGDEVKGIMEEIIEVGESLEVQAVLNDERYQSFKRFKSVFGVGVKTADKWYRMGLRTLEDVRSSKTLKLTPMQKAGLCYYEDLARGVTKAEADAISLLVQDAVATFDPDALVEIVGGFRRGKPQGHDVDLLITSPGAEKEQEDQLLQKVTNLWKKQGLLLYGRREWSQFEDGKLPSGKADALDHHAKCFLILKLYDHKVDKSKWEMPTGSNMGEAKPWKAIRVDLVRCPYGGFAFALLGWTGSRMFRRDLRWYATDEKNMMLDNHALYDLTKKIFLKAKSEEEIFAHLGLEYLEPFERNA

SEQ ID NO: 2245 - DNA, 1587 bp, synthetic construct
  misc_feature 1..1587: note = Variant of terminal deoxynucleotidyltransferase
  source 1..1587: mol_type = other DNA
atgcaccatcatcatcatcatggcggtagcggcagccacggcattcgtaccatcgattcggacttcgggaagaaacgccagaaaaaaatggataaccacgatagttccgccatctatgaaatcaaatttcacgagtttgtgctgttcattctcgaagaaaaaatgggtgcgacgcgtcgtacttttctgacagatttagcccgcaagaaagggttccgcgtcgagaatgaactgtcagacagcgttacccacatcgtggcagaaaataattcacgctctgaagtattggcttggctgaaagaacacaagatggagaagaccaagcaattcgaactgctggatattagctggcttatcgaaagcatgaaagttggtaaaccggtggacaccaaggggaaataccagttggcggaatcgggtgagatgagtgcgaacccagatccgacagagggtcgtgaaaacgagctgcctcctactatgaagaccgtttctccgtatgcgtgtcaacgccgcaccaccctgaacaaccataatcaacgttttacggacgcactggaaattcttgcggaaaattacgagttcaaacgcaacgatgatactgcgctggaatttcgtcgtgctatctccgtgctgaaaagccttccgtttgaggtacgtagcctgaaagacacggaaggattgccctggatcggtgatgaagtcaaagggattatggaagaaatcatcgaggtcggtgaatcgctggaagtgcaggccgtgctcaatgatgagcgctatcaaagcttcaaacgctttaagagtgtctttggagtgggggtgaagacagcagacaagtggtaccgtatgggtctgcgcacgctcgaggatgttcgttccagcaagaccctgaagttgaccccgatgcagaaagcgggtctgtgctattatgaagatcttgctcgcggcgttacgaaagccgaagctgacgcgatttctctgctggttcaggatgcagtcgcaactttcgacccggatgcgctggtggagattgtcggtggatttcgtcgtgggaaacctcagggtcacgacgttgatctgcttatcacatctccgggagctgagaaagagcaagaagaccagctcctgcagaaagtgaccaatctgtggaagaaacaagggttgttgctgtacggtcgtctggaatggagtcagtttgaagatgggaaactcccatccggtaaggctgatgcctttgaccatttcgcgaaatgctttctgatcctcaaactttatgatcataaagtggacaaaagcaaatgggaaatgccgacgggttcgaacatgggcgaggccaaaccgtggaaagcaattcgcgtagatctggttcgttgcccctacggcggttttgcgtttgcgttgttgggttggaccggaagccgcatgttccgccgtgatctgcgctggtacgccactgacgagaagaacatgatgctggacaatcatgcgctgtatgacctgaccaagaaaatctttctcaaagctaaatcggaagaggaaattttcgcacatctggggcttgaatacctggaaccgttcgaacgtaacgca

SEQ ID NO: 2246 - protein, 529 aa, synthetic construct
  REGION 1..529: note = Variant of terminal deoxynucleotidyltransferase
MHHHHHHGGSGSHGIRTIDSDFGKKRQKKMDNHDSSAIYEIKFHEFVLFILEEKMGATRRTFLTDLARKKGFRVENELSDSVTHIVAENNSRSEVLAWLKEHKMEKTKQFELLDISWLIESMKVGKPVDTKGKYQLAESGEMSANPDPTEGRENELPPTMKTVSPYACQRRTTLNNHNQRFTDALEILAENYEFKRNDDTALEFRRAISVLKSLPFEVRSLKDTEGLPWIGDEVKGIMEEIIEVGESLEVQAVLNDERYQSFKRFKSVFGVGVKTADKWYRMGLRTLEDVRSSKTLKLTPMQKAGLCYYEDLARGVTKAEADAISLLVQDAVATFDPDALVEIVGGFRRGKPQGHDVDLLITSPGAEKEQEDQLLQKVTNLWKKQGLLLYGRLEWSQFEDGKLPSGKADAFDHFAKCFLILKLYDHKVDKSKWEMPTGSNMGEAKPWKAIRVDLVRCPYGGFAFALLGWTGSRMFRRDLRWYATDEKNMMLDNHALYDLTKKIFLKAKSEEEIFAHLGLEYLEPFERNA

SEQ ID NO: 2247 - DNA, 1587 bp, synthetic construct
  misc_feature 1..1587: note = Variant of terminal deoxynucleotidyltransferase
  source 1..1587: mol_type = other DNA
atgcaccatcatcatcatcatggcggtagcggcagccacggcattcgtaccatcgattcggacttcgggaagaaacgccagaaaaaaatggataaccacgatagttccgccatctatgaaatcaaatttcacgagtttgtgctgttcattctcgaagaaaaaatgggtgcgacgcgtcgtacttttctgacagatttagcccgcaagaaagggttccgcgtcgagaatgaactgtcagacagcgttacccacatcgtggcagaaaataattcacgctctgaagtattggcttggctgaaagaacacaagatggagaagaccaagcaattcgaactgctggatattagctggcttatcgaaagcatgaaagttggtaaaccggtggacaccaaggggaaataccagttggcggaatcgggtgagatgagtgcgaacccagatccgacagagggtcgtgaaaacgagctgcctcctactatgaagaccgtttctccgtatgcgtgtcaacgccgcaccaccctgaacaaccataatcaacgttttacggacgcactggaaattcttgcggaaaattacgagttcaaacgcaacgatgatactgcgctggaatttcgtcgtgctatctccgtgctgaaaagccttccgtttgaggtacgtagcctgaaagacacggaaggattgccctggatcggtgatgaagtcaaagggattatggaagaaatcatcgaggtcggtgaatcgctggaagtgcaggccgtgctcaatgatgagtggtatcaaagcttcaaacgctttaagagtgtctttggagtgggggtgaagacagcagacaagtggtaccgtatgggtctgcgcacgctcgaggatgttcgttccagcaagaccctgaagttgaccccgatgcagaaagcgggtctgtgctattatgaagatcttgctcgcggcgttacgaaagccgaagctgacgcgatttctctgctggttcaggatgcagtcgcaactttcgacccggatgcgctggtggagattgtcggtggatttcgtcgtgggaaacctcagggtcacgacgttgatctgcttatcacatctccgggagctgagaaagagcaagaagaccagctcctgcagaaagtgaccaatctgtggaagaaacaagggttgttgctgtacggtcgtctggaatggagtcagtttgaagatgggaaactcccatccggtaaggctgatgccctggacgcgggtgcgaaatgctttctgatcctcaaactttatgatcataaagtggacaaaagcaaatgggaaatgccgacgggttcgaacatgggcgaggccaaaccgtggaaagcaattcgcgtagatctggttcgttgcccctacggcggttttgcgtttgcgttgttgcagtggaccggaagccgcatgttccgccgtgatctgcgctggtacgccactgacgagaagaacatgatgctggacaatcatgcgctgtatgacctgaccaagaaaatctttctcaaagctaaatcggaagaggaaattttcgcacatctggggcttgaatacctggaaccgttcgaacgtaacgca

SEQ ID NO: 2248 - protein, 529 aa, synthetic construct
  REGION 1..529: note = Variant of terminal deoxynucleotidyltransferase
MHHHHHHGGSGSHGIRTIDSDFGKKRQKKMDNHDSSAIYEIKFHEFVLFILEEKMGATRRTFLTDLARKKGFRVENELSDSVTHIVAENNSRSEVLAWLKEHKMEKTKQFELLDISWLIESMKVGKPVDTKGKYQLAESGEMSANPDPTEGRENELPPTMKTVSPYACQRRTTLNNHNQRFTDALEILAENYEFKRNDDTALEFRRAISVLKSLPFEVRSLKDTEGLPWIGDEVKGIMEEIIEVGESLEVQAVLNDEWYQSFKRFKSVFGVGVKTADKWYRMGLRTLEDVRSSKTLKLTPMQKAGLCYYEDLARGVTKAEADAISLLVQDAVATFDPDALVEIVGGFRRGKPQGHDVDLLITSPGAEKEQEDQLLQKVTNLWKKQGLLLYGRLEWSQFEDGKLPSGKADALDAGAKCFLILKLYDHKVDKSKWEMPTGSNMGEAKPWKAIRVDLVRCPYGGFAFALLQWTGSRMFRRDLRWYATDEKNMMLDNHALYDLTKKIFLKAKSEEEIFAHLGLEYLEPFERNA

SEQ ID NO: 2249 - DNA, 1587 bp, synthetic construct
  misc_feature 1..1587: note = Variant of terminal deoxynucleotidyltransferase
  source 1..1587: mol_type = other DNA
atgcaccatcatcatcatcatggcggtagcggcagccacggcattcgtaccatcgattcggacttcgggaagaaacgccagaaaaaaatggataaccacgatagttccgccatctatgaaatcaaatttcacgagtttgtgctgttcattctcgaagaaaaaatgggtgcgacgcgtcgtacttttctgacagatttagcccgcaagaaagggttccgcgtcgagaatgaactgtcagacagcgttacccacatcgtggcagaaaataattcacgctctgaagtattggcttggctgaaagaacacaagatggagaagaccaagcaattcgaactgctggatattagctggcttatcgaaagcatgaaagttggtaaaccggtggacaccaaggggaaataccagttggcggaatcgggtgagatgagtgcgaacccagatccgacagagggtcgtgaaaacgagctgcctcctactatgaagaccgtttctccgtatgcgtgtcaacgccgcaccaccctgaacaaccataatcaacgttttacggacgcactggaaattcttgcggaaaattacgagttcaaacgcaacgatgatactgcgctggaatttcgtcgtgctatctccgtgctgaaaagccttccgtttgaggtacgtagcctgaaagacacggaaggattgccctggatcggtgatgaagtcaaagggattatggaagaaatcatcgaggtcggtgaatcgctggaagtgcaggccgtgctcaatgatgagtggtatcaaagcttcaaacgctttaagagtgtctttggagtgggggtgaagacagcagacaaatggtaccgtatgggtctgcgcacgctcgaggatgttcgttccagcaagaccctgaagttgaccccgatgcagaaagcgggtctgtgctattatgaagatcttgctcgcggcgttacgaaagccgaagctgacgcgatttctctgctggttcaggatgcagtcgcaactttcgacccggatgcgctggtggagattgtcggtggatttcgtcgtgggaaacctcagggtcacgacgttgatctgcttatcacatctccgggagctgagaaagagcaagaagaccagctcctgcagaaagtgaccaatctgtggaagaaacaagggttgttgctgtacggtcgtctggaatggagtcagtttgaagatgggaaactcccatccggtaaggctgatgccctggacgcgggtgcgaaatgctttctgatcctcaaactttatgatcataaagtggacaaaagcaaatgggaaatgccgacgggttcgaacatgggcgaggccaaaccgtggaaagcaattcgcgtagatctggttcgttgcccctacggcggttttgcgtttgcgttgttggggtggaccggaagccgcatgttccgccgtgatctgcgctggtacgccactgacgagaagaacatgatgctggacaatcatgcgctgtatgacctgaccaagaaaatctttctcaaagctaaatcggaagaggaaattttcgcacatctggggcttgaatacctggaaccgttcgaacgtaacgca

SEQ ID NO: 2250 - protein, 529 aa, synthetic construct
  REGION 1..529: note = Variant of terminal deoxynucleotidyltransferase
MHHHHHHGGSGSHGIRTIDSDFGKKRQKKMDNHDSSAIYEIKFHEFVLFILEEKMGATRRTFLTDLARKKGFRVENELSDSVTHIVAENNSRSEVLAWLKEHKMEKTKQFELLDISWLIESMKVGKPVDTKGKYQLAESGEMSANPDPTEGRENELPPTMKTVSPYACQRRTTLNNHNQRFTDALEILAENYEFKRNDDTALEFRRAISVLKSLPFEVRSLKDTEGLPWIGDEVKGIMEEIIEVGESLEVQAVLNDEWYQSFKRFKSVFGVGVKTADKWYRMGLRTLEDVRSSKTLKLTPMQKAGLCYYEDLARGVTKAEADAISLLVQDAVATFDPDALVEIVGGFRRGKPQGHDVDLLITSPGAEKEQEDQLLQKVTNLWKKQGLLLYGRLEWSQFEDGKLPSGKADALDAGAKCFLILKLYDHKVDKSKWEMPTGSNMGEAKPWKAIRVDLVRCPYGGFAFALLGWTGSRMFRRDLRWYATDEKNMMLDNHALYDLTKKIFLKAKSEEEIFAHLGLEYLEPFERNA

SEQ ID NO: 2251 - DNA, 1587 bp, synthetic construct
  misc_feature 1..1587: note = Variant of terminal deoxynucleotidyltransferase
  source 1..1587: mol_type = other DNA
atgcaccatcatcatcatcatggcggtagcggcagccacggcattcgtaccatcgattcggacttcgggaagaaacgccagaaaaaaatggataaccacgatagttccgccatctatgaaatcaaatttcacgagtttgtgctgttcattctcgaagaaaaaatgggtgcgacgcgtcgtacttttctgacagatttagcccgcaagaaagggttccgcgtcgagaatgaactgtcagacagcgttacccacatcgtggcagaaaataattcacgctctgaagtattggcttggctgaaagaacacaagatggagaagaccaagcaattcgaactgctggatattagctggcttatcgaaagcatgaaagttggtaaaccggtggacaccaaggggaaataccagttggcggaatcgggtgagatgagtgcgaacccagatccgacagagggtcgtgaaaacgagctgcctcctactatgaagaccgtttctccgtatgcgtgtcaacgccgcaccaccctgaacaaccataatcaacgttttacggacgcactggaaattcttgcggaaaattacgagttcaaacgcaacgatgatactgcgctggaatttcgtcgtgctatctccgtgctgaaaagccttccgtttgaggtacgtagcctgaaagacacggaaggattgccctggatcggtgatgaagtcaaagggattatggaagaaatcatcgaggtcggtgaatcgctggaagtgcaggccgtgctcaatgatgagtggtatcaaagcttcaaacgctttaagagtgtctttggagtgggggtgaagacagcagacaagtggtaccgtatgggtctgcgcacgctcgaggatgttcgttccagcaagaccctgaagttgaccccgatgcagaaagcgggtctgtgctattatgaagatcttgctcgcggcgttacgaaagccgaagctgacgcgatttctctgctggttcaggatgcagtcgcaactttcgacccggatgcgctggtggagattgtcggtggatttcgtcgtgggaaacctcagggtcacgacgttgatctgcttatcacatctccgggagctgagaaagagcaagaagaccagctcctgcagaaagtgaccaatctgtggaagaaacaagggttgttgctgtacggtcgtctggaatggagtcagtttgaagatgggaaactcccatccggtaaggctgatgccggtgacgcgcatgcgaaatgctttctgatcctcaaactttatgatcataaagtggacaaaagcaaatgggaaatgccgacgggttcgaacatgggcgaggccaaaccgtggaaagcaattcgcgtagatctggttcgttgcccctacggcggttttgcgtttgcgttgttgcagtggaccggaagccgcatgttccgccgtgatctgcgctggtacgccactgacgagaagaacatgatgctggacaatcatgcgctgtatgacctgaccaagaaaatctttctcaaagctaaatcggaagaggaaattttcgcacatctggggcttgaatacctggaaccgttcgaacgtaacgca

SEQ ID NO: 2252 - protein, 529 aa, synthetic construct
  REGION 1..529: note = Variant of terminal deoxynucleotidyltransferase
MHHHHHHGGSGSHGIRTIDSDFGKKRQKKMDNHDSSAIYEIKFHEFVLFILEEKMGATRRTFLTDLARKKGFRVENELSDSVTHIVAENNSRSEVLAWLKEHKMEKTKQFELLDISWLIESMKVGKPVDTKGKYQLAESGEMSANPDPTEGRENELPPTMKTVSPYACQRRTTLNNHNQRFTDALEILAENYEFKRNDDTALEFRRAISVLKSLPFEVRSLKDTEGLPWIGDEVKGIMEEIIEVGESLEVQAVLNDEWYQSFKRFKSVFGVGVKTADKWYRMGLRTLEDVRSSKTLKLTPMQKAGLCYYEDLARGVTKAEADAISLLVQDAVATFDPDALVEIVGGFRRGKPQGHDVDLLITSPGAEKEQEDQLLQKVTNLWKKQGLLLYGRLEWSQFEDGKLPSGKADAGDAHAKCFLILKLYDHKVDKSKWEMPTGSNMGEAKPWKAIRVDLVRCPYGGFAFALLQWTGSRMFRRDLRWYATDEKNMMLDNHALYDLTKKIFLKAKSEEEIFAHLGLEYLEPFERNA

SEQ ID NO: 2253 - DNA, 1587 bp, synthetic construct
  misc_feature 1..1587: note = Variant of terminal deoxynucleotidyltransferase
  source 1..1587: mol_type = other DNA
atgcaccatcatcatcatcatggcggtagcggcagccacggcattcgtaccatcgattcggacttcgggaagaaacgccagaaaaaaatggataaccacgatagttccgccatctatgaaatcaaatttcacgagtttgtgctgttcattctcgaagaaaaaatgggtgcgacgcgtcgtacttttctgacagatttagcccgcaagaaagggttccgcgtcgagaatgaactgtcagacagcgttacccacatcgtggcagaaaataattcacgctctgaagtattggcttggctgaaagaacacaagatggagaagaccaagcaattcgaactgctggatattagctggcttatcgaaagcatgaaagttggtaaaccggtggacaccaaggggaaataccagttggcggaatcgggtgagatgagtgcgaacccagatccgacagagggtcgtgaaaacgagctgcctcctactatgaagaccgtttctccgtatgcgtgtcaacgccgcaccaccctgaacaaccataatcaacgttttacggacgcactggaaattcttgcggaaaattacgagttcaaacgcaacgatgatactgcgctggaatttcgtcgtgctatctccgtgctgaaaagccttccgtttgaggtacgtagcctgaaagacacggaaggattgccctggatcggtgatgaagtcaaagggattatggaagaaatcatcgaggtcggtgaatcgctggaagtgcaggccgtgctcaatgatgagtggtatcaaagcttccaccgctttaagagtgtctttggagtgggggtgaagacagcagacaagtggtaccgtatgggtctgcgcaccctcgaggatgttcgttccagcaagaccctgaagttgaccccgatgcagaaagcgggtctgtgctattatgaagatcttgctcgcggcgttacgaaagccgaagctgacgcgatttctctgctggttcaggatgcagtcgcaactttcgacccggatgcgctggtggagattgtcggtggatttcgtcgtgggaaacctcagggtcacgacgttgatctgcttatcacatctccgggagctgagaaagagcaagaagaccagctcctgcagaaagtgaccaatctgtggaagaaacaagggttgttgctgtacggtcgtctggaatggagtcagtttgaagatgggaaactcccatccggtaaggctgatgccggtgacgcgggtgcgaaatgctttctgatcctcaaactttatgatcataaagtggacaaaagcaaatgggaaatgccgacgggttcgaacatgggcgaggccaaaccgtggaaagcaattcgcgtagatctggttcgttgcccctacggcggttttgcgtttgcgttgttgcagtggaccggaagccgcatgttccgccgtgatctgcgctggtacgccactgacgagaagaacatgatgctggacaatcatgcgctgtatgacctgaccaagaaaatctttctcaaagctaaatcggaagaggaaattttcgcacatctggggcttgaatacctggaaccgttcgaacgtaacgca

SEQ ID NO: 2254 - protein, 529 aa, synthetic construct
  REGION 1..529: note = Variant of terminal deoxynucleotidyltransferase
MHHHHHHGGSGSHGIRTIDSDFGKKRQKKMDNHDSSAIYEIKFHEFVLFILEEKMGATRRTFLTDLARKKGFRVENELSDSVTHIVAENNSRSEVLAWLKEHKMEKTKQFELLDISWLIESMKVGKPVDTKGKYQLAESGEMSANPDPTEGRENELPPTMKTVSPYACQRRTTLNNHNQRFTDALEILAENYEFKRNDDTALEFRRAISVLKSLPFEVRSLKDTEGLPWIGDEVKGIMEEIIEVGESLEVQAVLNDEWYQSFHRFKSVFGVGVKTADKWYRMGLRTLEDVRSSKTLKLTPMQKAGLCYYEDLARGVTKAEADAISLLVQDAVATFDPDALVEIVGGFRRGKPQGHDVDLLITSPGAEKEQEDQLLQKVTNLWKKQGLLLYGRLEWSQFEDGKLPSGKADAGDAGAKCFLILKLYDHKVDKSKWEMPTGSNMGEAKPWKAIRVDLVRCPYGGFAFALLQWTGSRMFRRDLRWYATDEKNMMLDNHALYDLTKKIFLKAKSEEEIFAHLGLEYLEPFERNA

SEQ ID NO: 2255 - DNA, 1587 bp, synthetic construct
  misc_feature 1..1587: note = Variant of terminal deoxynucleotidyltransferase
  source 1..1587: mol_type = other DNA
atgcaccatcatcatcatcatggcggtagcggcagccacggcattcgtaccatcgattcggacttcgggaagaaacgccagaaaaaaatggataaccacgatagttccgccatctatgaaatcaaatttcacgagtttgtgctgttcattctcgaagaaaaaatgggtgcgacgcgtcgtacttttctgacagatttagcccgcaagaaagggttccgcgtcgagaatgaactgtcagacagcgttacccacatcgtggcagaaaataattcacgctctgaagtattggcttggctgaaagaacacaagatggagaagaccaagcaattcgaactgctggatattagctggcttatcgaaagcatgaaagttggtaaaccggtggacaccaaggggaaataccagttggcggaatcgggtgagatgagtgcgaacccagatccgacagagggtcgtgaaaacgagctgcctcctactatgaagaccgtttctccgtatgcgtgtcaacgccgcaccaccctgaacaaccataatcaacgttttacggacgcactggaaattcttgcggaaaattacgagttcaaacgcaacgatgatactgcgctggaatttcgtcgtgctatctccgtgctgaaaagccttccgtttgaggtacgtagcctgaaagacacggaaggattgccctggatcggtgatgaagtcaaagggattatggaagaaatcatcgaggtcggtgaatcgctggaagtgcaggccgtgctcaatgatgagtggtatcaaagcttcaaacgctttaagagtgtctttggagtgggggtgaagacagcagacaagtggtaccgtatgggtctgcgcacgctcgaggatgttcgttccagcaagaccctgaagttgaccccgatgcagaaagcgggtctgtgctattatgaagatcttgctcgcggcgttacgaaagccgaagctgacgcgatttctctgctggttcaggatgcagtcgcaactttcgacccggatgcgctggtggagattgtcggtggatttcgtcgtgggaaacctcagggtcacgacgttgatctgcttatcacatctccgggagctgagaaagagcaagaagaccagctcctgcagaaagtgaccaatctgtggaagaaacaagggttgttgctgtacggtcgtctggaatggagtcagtttgaagatgggaaactcccatccggtaaggctgatgccctggacgcgcatgcgaaatgctttctgatcctcaaactttatgatcataaagtggacaaaagcaaatgggaaatgccgacgggttcgaacatgggcgaggccaaaccgtggaaagcaattcgcgtagatctggttcgttgcccctacggcggttttgcgtttgcgttgttgcagtggaccggaagccgcatgttccgccgtgatctgcgctggtacgccactgacgagaagaacatgatgctggacaatcatgcgctgtatgacctgaccaagaaaatctttctcaaagctaaatcggaagaggaaattttcgcacatctggggcttgaatacctggaaccgttcgaacgtaacgca

SEQ ID NO: 2256 - protein, 529 aa, synthetic construct
  REGION 1..529: note = Variant of terminal deoxynucleotidyltransferase
MHHHHHHGGSGSHGIRTIDSDFGKKRQKKMDNHDSSAIYEIKFHEFVLFILEEKMGATRRTFLTDLARKKGFRVENELSDSVTHIVAENNSRSEVLAWLKEHKMEKTKQFELLDISWLIESMKVGKPVDTKGKYQLAESGEMSANPDPTEGRENELPPTMKTVSPYACQRRTTLNNHNQRFTDALEILAENYEFKRNDDTALEFRRAISVLKSLPFEVRSLKDTEGLPWIGDEVKGIMEEIIEVGESLEVQAVLNDEWYQSFKRFKSVFGVGVKTADKWYRMGLRTLEDVRSSKTLKLTPMQKAGLCYYEDLARGVTKAEADAISLLVQDAVATFDPDALVEIVGGFRRGKPQGHDVDLLITSPGAEKEQEDQLLQKVTNLWKKQGLLLYGRLEWSQFEDGKLPSGKADALDAHAKCFLILKLYDHKVDKSKWEMPTGSNMGEAKPWKAIRVDLVRCPYGGFAFALLQWTGSRMFRRDLRWYATDEKNMMLDNHALYDLTKKIFLKAKSEEEIFAHLGLEYLEPFERNA

SEQ ID NO: 2257 - DNA, 1587 bp, synthetic construct
  misc_feature 1..1587: note = Variant of terminal deoxynucleotidyltransferase
  source 1..1587: mol_type = other DNA
atgcaccatcatcatcatcatggcggtagcggcagccacggcattcgtaccatcgattcggacttcgggaagaaacgccagaaaaaaatggataaccacgatagttccgccatctatgaaatcaaatttcacgagtttgtgctgttcattctcgaagaaaaaatgggtgcgacgcgtcgtacttttctgacagatttagcccgcaagaaagggttccgcgtcgagaatgaactgtcagacagcgttacccacatcgtggcagaaaataattcacgctctgaagtattggcttggctgaaagaacacaagatggagaagaccaagcaattcgaactgctggatattagctggcttatcgaaagcatgaaagttggtaaaccggtggacaccaaggggaaataccagttggcggaatcgggtgagatgagtgcgaacccagatccgacagagggtcgtgaaaacgagctgcctcctactatgaagaccgtttctccgtatgcgtgtcaacgccgcaccaccctgaacaaccataatcaacgttttacggacgcactggaaattcttgcggaaaattacgagttcaaacgcaacgatgatactgcgctggaatttcgtcgtgctatctccgtgctgaaaagccttccgtttgaggtacgtagcctgaaagacacggaaggattgccctggatcggtgatgaagtcaaagggattatggaagaaatcatcgaggtcggtgaatcgctggaagtgcaggccgtgctcaatgatgagtggtatcaaagcttcaaacgctttaagagtgtctttggagtgggggtgaagacagcagacaagtggtaccgtatgggtctgcgcacgctcgaggatgttcgttccagcaagaccctgaagttgaccccgatgcagaaagcgggtctgtgctattatgaagatcttgctcgcggcgttacgaaagccgaagctgacgcgatttctctgctggttcaggatgcagtcgcaactttcgacccggatgcgctggtggagattgtcggtggatttcgtcgtgggaaacctcagggtcacgacgttgatctgcttatcacatctccgggagctgagaaagagcaagaagaccagctcctgcagaaagtgaccaatctgtggaagaaacaagggttgttgctgtacggtcgtctggaatggagtcagtttgaagatgggaaactcccatccggtaaggctgatgccctggaccaccacgcgaaatgctttctgatcctcaaactttatgatcataaagtggacaaaagcaaatgggaaatgccgacgggttcgaacatgggcgaggccaaaccgtggaaagcaattcgcgtagatctggttcgttgcccctacggcggttttgcgtttgcgttgttgcagtggaccggaagccgcatgttccgccgtgatctgcgctggtacgccactgacgagaagaacatgatgctggacaatcatgcgctgtatgacctgaccaagaaaatctttctcaaagctaaatcggaagaggaaattttcgcacatctggggcttgaatacctggaaccgttcgaacgtaacgca

SEQ ID NO: 2258 - protein, 529 aa, synthetic construct
  REGION 1..529: note = Variant of terminal deoxynucleotidyltransferase
MHHHHHHGGSGSHGIRTIDSDFGKKRQKKMDNHDSSAIYEIKFHEFVLFILEEKMGATRRTFLTDLARKKGFRVENELSDSVTHIVAENNSRSEVLAWLKEHKMEKTKQFELLDISWLIESMKVGKPVDTKGKYQLAESGEMSANPDPTEGRENELPPTMKTVSPYACQRRTTLNNHNQRFTDALEILAENYEFKRNDDTALEFRRAISVLKSLPFEVRSLKDTEGLPWIGDEVKGIMEEIIEVGESLEVQAVLNDEWYQSFKRFKSVFGVGVKTADKWYRMGLRTLEDVRSSKTLKLTPMQKAGLCYYEDLARGVTKAEADAISLLVQDAVATFDPDALVEIVGGFRRGKPQGHDVDLLITSPGAEKEQEDQLLQKVTNLWKKQGLLLYGRLEWSQFEDGKLPSGKADALDHHAKCFLILKLYDHKVDKSKWEMPTGSNMGEAKPWKAIRVDLVRCPYGGFAFALLQWTGSRMFRRDLRWYATDEKNMMLDNHALYDLTKKIFLKAKSEEEIFAHLGLEYLEPFERNA

SEQ ID NO: 2259 - DNA, 1587 bp, synthetic construct
  misc_feature 1..1587: note = Variant of terminal deoxynucleotidyltransferase
  source 1..1587: mol_type = other DNA
atgcaccatcatcatcatcatggcggtagcggcagccacggcattcgtaccatcgattcggacttcgggaagaaacgccagaaaaaaatggataaccacgatagttccgccatctatgaaatcaaatttcacgagtttgtgctgttcattctcgaagaaaaaatgggtgcgacgcgtcgtacttttctgacagatttagcccgcaagaaagggttccgcgtcgagaatgaactgtcagacagcgttacccacatcgtggcagaaaataattcacgctctgaagtattggcttggctgaaagaacacaagatggagaagaccaagcaattcgaactgctggatattagctggcttatcgaaagcatgaaagttggtaaaccggtggacaccaaggggaaataccagttggcggaatcgggtgagatgagtgcgaacccagatccgacagagggtcgtgaaaacgagctgcctcatactatgaagaccgtttctccgtatgcgtgtcaacgccgcaccaccctgaacaaccataatcaacgttttacggacgcactggaaattcttgcggaaaattacgagttcaaacgcaacgatgatactgcgctggaatttcgtcgtgctatctccgtgctgaaaagccttccgtttgaggtacgtagcctgaaagacacggaaggattgccctggatcggtgatgaagtcaaagggattatggaagaaatcatcgaggtcggtgaatcgctggaagtgcaggccgtgctcaatgatgagtggtatcaaagcttcaaacgctttaagagtgtctttggagtgggggtggtgacagcagacaaatggtaccgtatgggtctgcgcacgctcgaggatgttcgttccagcaagaccctgaagttgaccccgatgcagaaagcgggtctgtgctattatgaagatcttgctcgcggcgttacgaaagccgaagctgacgcgatttctctgctggttcaggatgcagtcgcaactttcgacccggatgcgctggtggagattgtcggtggatttcgtcgtgggaaacctcagggtcacgacgttgatctgcttatcacatctccgggagctgagaaagagcaagaagaccagctcctgcagaaagtgaccaatctgtggaagaaacaagggttgttgctgtacggtcgtctggaatggagtcagtttgaagatgggaaactcccatccggtaaggctgatgccggtgacgcgggtgcgaaatgctttctgatcctcaaactttatgatcataaagtggacaaaagcaaatgggaaatgccgacgggttcgaacatgggcgaggccaaaccgtggaaagcaattcgcgtagatctggttcgttgcccctacggcggttttgcgtttgcgttgttgggttggaccggaagccgcatgttccgccgtgatctgcgctggtacgccactgacgagaagaacatgatgctggacaatcatgcgctgtatgacctgaccaagaaaatctttctcaaagctaaatcggaagaggaaattttcgcacatctggggcttgaatacctggaaccgttcgaacgtaacgca

SEQ ID NO: 2260 - protein, 529 aa, synthetic construct
  REGION 1..529: note = Variant of terminal deoxynucleotidyltransferase
MHHHHHHGGSGSHGIRTIDSDFGKKRQKKMDNHDSSAIYEIKFHEFVLFILEEKMGATRRTFLTDLARKKGFRVENELSDSVTHIVAENNSRSEVLAWLKEHKMEKTKQFELLDISWLIESMKVGKPVDTKGKYQLAESGEMSANPDPTEGRENELPHTMKTVSPYACQRRTTLNNHNQRFTDALEILAENYEFKRNDDTALEFRRAISVLKSLPFEVRSLKDTEGLPWIGDEVKGIMEEIIEVGESLEVQAVLNDEWYQSFKRFKSVFGVGVVTADKWYRMGLRTLEDVRSSKTLKLTPMQKAGLCYYEDLARGVTKAEADAISLLVQDAVATFDPDALVEIVGGFRRGKPQGHDVDLLITSPGAEKEQEDQLLQKVTNLWKKQGLLLYGRLEWSQFEDGKLPSGKADAGDAGAKCFLILKLYDHKVDKSKWEMPTGSNMGEAKPWKAIRVDLVRCPYGGFAFALLGWTGSRMFRRDLRWYATDEKNMMLDNHALYDLTKKIFLKAKSEEEIFAHLGLEYLEPFERNA

SEQ ID NO: 2261 - DNA, 1587 bp, synthetic construct
  misc_feature 1..1587: note = Variant of terminal deoxynucleotidyltransferase
  source 1..1587: mol_type = other DNA
atgcaccatcatcatcatcatggcggtagcggcagccacggcattcgtaccatcgattcggacttcgggaagaaacgccagaaaaaaatggataaccacgatagttccgccatctatgaaatcaaatttcacgagtttgtgctgttcattctcgaagaaaaaatgggtgcgacgcgtcgtacttttctgacagatttagcccgcaagaaagggttccgcgtcgagaatgaactgtcagacagcgttacccacatcgtggcagaaaataattcacgctctgaagtattggcttggctgaaagaacacaagatggagaagaccaagcaattcgaactgctggatattagctggcttatcgaaagcatgaaagttggtaaaccggtggacaccaaggggaaataccagttggcggaatcgggtgagatgagtgcgaacccagatccgacagagggtcgtgaaaacgagctgcctcctactatgaagaccgtttctccgtatgcgtgtcaacgccgcaccaccctgaacaaccataatcaacgttttacggacgcactggaaattcttgcggaaaattacgagttcaaacgcaacgatgatactgcgctggaatttcgtcgtgctatctccgtgctgaaaagccttccgtttgaggtacgtagcctgaaagacacggaaggattgccctggatcggtgatgaagtcaaagggattatggaagaaatcatcgaggtcggtgaatcgctggaagtgcaggccgtgctcaatgatgagtggtatcaaagcttcaaacgctttaagagtgtctttggagtgggggtggtgacagcagacaaatggtaccgtatgggtctgcgcacgctcgaggatgttcgttccagcaagaccctgaagttgaccccgatgcagaaagcgggtctgtgctattatgaagatcttgctcgcggcgttacgaaagccgaagctgacgcgatttctctgctggttcaggatgcagtcgcaactttcgacccggatgcgctggtggagattgtcggtggatttcgtcgtgggaaacctcagggtcacgacgttgatctgcttatcacatctccgggagctgagaaagagcaagaagaccagctcctgcagaaagtgaccaatctgtggaagaaacaagggttgttgctgtacggtcgtctggaatggagtcagtttgaagatgggaaactcccatccggtaaggctgatgccggtgaccaccatgcgaaatgctttctgatcctcaaactttatgatcataaagtggacaaaagcaaatgggaaatgccgacgggttcgaacatgggcgaggccaaaccgtggaaagcaattcgcgtagatctggttcgttgcccctacggcggttttgcgtttgcgttgttgcagtggaccggaagccgcatgttccgccgtgatctgcgctggtacgccactgacgagaagaacatgatgctggacaatcatgcgctgtatgacctgaccaagaaaatctttctcaaagctaaatcggaagaggaaattttcgcacatctggggcttgaatacctggaaccgttcgaacgtaacgca

SEQ ID NO: 2262 - protein, 529 aa, synthetic construct
  REGION 1..529: note = Variant of terminal deoxynucleotidyltransferase
MHHHHHHGGSGSHGIRTIDSDFGKKRQKKMDNHDSSAIYEIKFHEFVLFILEEKMGATRRTFLTDLARKKGFRVENELSDSVTHIVAENNSRSEVLAWLKEHKMEKTKQFELLDISWLIESMKVGKPVDTKGKYQLAESGEMSANPDPTEGRENELPPTMKTVSPYACQRRTTLNNHNQRFTDALEILAENYEFKRNDDTALEFRRAISVLKSLPFEVRSLKDTEGLPWIGDEVKGIMEEIIEVGESLEVQAVLNDEWYQSFKRFKSVFGVGVVTADKWYRMGLRTLEDVRSSKTLKLTPMQKAGLCYYEDLARGVTKAEADAISLLVQDAVATFDPDALVEIVGGFRRGKPQGHDVDLLITSPGAEKEQEDQLLQKVTNLWKKQGLLLYGRLEWSQFEDGKLPSGKADAGDHHAKCFLILKLYDHKVDKSKWEMPTGSNMGEAKPWKAIRVDLVRCPYGGFAFALLQWTGSRMFRRDLRWYATDEKNMMLDNHALYDLTKKIFLKAKSEEEIFAHLGLEYLEPFERNA

SEQ ID NO: 2263 - DNA, 1587 bp, synthetic construct
  misc_feature 1..1587: note = Variant of terminal deoxynucleotidyltransferase
  source 1..1587: mol_type = other DNA
atgcaccatcatcatcatcatggcggtagcggcagccacggcattcgtaccatcgattcggacttcgggaagaaacgccagaaaaaaatggataaccacgatagttccgccatctatgaaatcaaatttcacgagtttgtgctgttcattctcgaagaaaaaatgggtgcgacgcgtcgtacttttctgacagatttagcccgcaagaaagggttccgcgtcgagaatgaactgtcagacagcgttacccacatcgtggcagaaaataattcacgctctgaagtattggcttggctgaaagaacacaagatggagaagaccaagcaattcgaactgctggatattagctggcttatcgaaagcatgaaagttggtaaaccggtggacaccaaggggaaataccagttggcggaatcgggtgagatgagtgcgaacccagatccgacagagggtcgtgaaaacgagctgcctcctactatgaagaccgtttctccgtatgcgtgtcaacgccgcaccaccctgaacaaccataatcaacgttttacggacgcactggaaattcttgcggaaaattacgagttcaaacgcaacgatgatactgcgctggaatttcgtcgtgctatctccgtgctgaaaagccttccgtttgaggtacgtagcctgaaagacacggaaggattgccctggatcggtgatgaagtcaaagggattatggaagaaatcatcgaggtcggtgaatcgctggaagtgcaggccgtgctcaatgatgagtggtatcaaagcttcaaacgctttaagagtgtctttggagtgggggtgaagacagcagacaagtggtaccgtatgggtctgcgcacgctcgaggatgttcgttccagcaagaccctgaagttgaccccgatgcagaaagcgggtctgtgctattatgaagatcttgctcgcggcgttacgaaagccgaagctgacgcgatttctctgctggttcaggatgcagtcgcaactttcgacccggatgcgctggtggagattgtcggtggatttcgtcgtgggaaacctcagggtcacgacgttgatctgcttatcacatctccgggagctgagaaagagcaagaagaccagctcctgcagaaagtgaccaatctgtggaagaaacaagggttgttgctgtacggtcgtctggaatggagtcagtttgaagatgggaaactcccatccggtaaggctgatgccggtgaccacggtgcgaaatgctttctgatcctcaaactttatgatcataaagtggacaaaagcaaatgggaaatgccgacgggttcgaacatgggcgaggccaaaccgtggaaagcaattcgcgtagatctggttcgttgcccctacggcggttttgcgtttgcgttgttgggttggaccggaagccgcatgttccgccgtgatctgcgctggtacgccactgacgagaagaacatgatgctggacaatcatgcgctgtatgacctgaccaagaaaatctttctcaaagctaaatcggaagaggaaattttcgcacatctggggcttgaatacctggaaccgttcgaacgtaacgca

SEQ ID NO: 2264 - protein, 529 aa, synthetic construct
  REGION 1..529: note = Variant of terminal deoxynucleotidyltransferase
MHHHHHHGGSGSHGIRTIDSDFGKKRQKKMDNHDSSAIYEIKFHEFVLFILEEKMGATRRTFLTDLARKKGFRVENELSDSVTHIVAENNSRSEVLAWLKEHKMEKTKQFELLDISWLIESMKVGKPVDTKGKYQLAESGEMSANPDPTEGRENELPPTMKTVSPYACQRRTTLNNHNQRFTDALEILAENYEFKRNDDTALEFRRAISVLKSLPFEVRSLKDTEGLPWIGDEVKGIMEEIIEVGESLEVQAVLNDEWYQSFKRFKSVFGVGVKTADKWYRMGLRTLEDVRSSKTLKLTPMQKAGLCYYEDLARGVTKAEADAISLLVQDAVATFDPDALVEIVGGFRRGKPQGHDVDLLITSPGAEKEQEDQLLQKVTNLWKKQGLLLYGRLEWSQFEDGKLPSGKADAGDHGAKCFLILKLYDHKVDKSKWEMPTGSNMGEAKPWKAIRVDLVRCPYGGFAFALLGWTGSRMFRRDLRWYATDEKNMMLDNHALYDLTKKIFLKAKSEEEIFAHLGLEYLEPFERNA

SEQ ID NO: 2265 - DNA, 1587 bp, synthetic construct
  misc_feature 1..1587: note = Variant of terminal deoxynucleotidyltransferase
  source 1..1587: mol_type = other DNA
atgcaccatcatcatcatcatggcggtagcggcagccacggcattcgtaccatcgattcggacttcgggaagaaacgccagaaaaaaatggataaccacgatagttccgccatctatgaaatcaaatttcacgagtttgtgctgttcattctcgaagaaaaaatgggtgcgacgcgtcgtacttttctgacagatttagcccgcaagaaagggttccgcgtcgagaatgaactgtcagacagcgttacccacatcgtggcagaaaataattcacgctctgaagtattggcttggctgaaagaacacaagatggagaagaccaagcaattcgaactgctggatattagctggcttatcgaaagcatgaaagttggtaaaccggtggacaccaaggggaaataccagttggcggaatcgggtgagatgagtgcgaacccagatccgacagagggtcgtgaaaacgagctgcctcctactatgaagaccgtttctccgtatgcgtgtcaacgccgcaccaccctgaacaaccataatcaacgttttacggacgcactggaaattcttgcggaaaattacgagttcaaacgcaacgatgatactgcgctggaatttcgtcgtgctatctccgtgctgaaaagccttccgtttgaggtacgtagcctgaaagacacggaaggattgccctggatcggtgatgaagtcaaagggattatggaagaaatcatcgaggtcggtgaatcgctggaagtgcaggccgtgctcaatgatgagtggtatcaaagcttcaaacgctttaagagtgtctttggagtgggggtgaagacagcagacaaatggtaccgtatgggtctgcgcacgctcgaggatgttcgttccagcaagaccctgaagttgaccccgatgcagaaagcgggtctgtgctattatgaagatcttgctcgcggcgttacgaaagccgaagctgacgcgatttctctgctggttcaggatgcagtcgcaactttcgacccggatgcgctggtggagattgtcggtggatttcgtcgtgggaaacctcagggtcacgacgttgatctgcttatcacatctccgggagctgagaaagagcaagaagaccagctcctgcagaaagtgaccaatctgtggaagaaacaagggttgttgctgtacggtcgtctggaatggagtcagtttgaagatgggaaactcccatccggtaaggctgatgccctggacgcgcatgcgaaatgctttctgatcctcaaactttatgatcataaagtggacaaaagcaaatgggaaatgccgacgggttcgaacatgggcgaggccaaaccgtggaaagcaattcgcgtagatctggttcgttgcccctacggcggttttgcgtttgcgttgttgggttggaccggaagccgcatgttccgccgtgatctgcgctggtacgccactgacgagaagaacatgatgctggacaatcatgcgctgtatgacctgaccaagaaaatctttctcaaagctaaatcggaagaggaaattttcgcacatctggggcttgaatacctggaaccgttcgaacgtaacgca

SEQ ID NO: 2266 - protein, 529 aa, synthetic construct
  REGION 1..529: note = Variant of terminal deoxynucleotidyltransferase
MHHHHHHGGSGSHGIRTIDSDFGKKRQKKMDNHDSSAIYEIKFHEFVLFILEEKMGATRRTFLTDLARKKGFRVENELSDSVTHIVAENNSRSEVLAWLKEHKMEKTKQFELLDISWLIESMKVGKPVDTKGKYQLAESGEMSANPDPTEGRENELPPTMKTVSPYACQRRTTLNNHNQRFTDALEILAENYEFKRNDDTALEFRRAISVLKSLPFEVRSLKDTEGLPWIGDEVKGIMEEIIEVGESLEVQAVLNDEWYQSFKRFKSVFGVGVKTADKWYRMGLRTLEDVRSSKTLKLTPMQKAGLCYYEDLARGVTKAEADAISLLVQDAVATFDPDALVEIVGGFRRGKPQGHDVDLLITSPGAEKEQEDQLLQKVTNLWKKQGLLLYGRLEWSQFEDGKLPSGKADALDAHAKCFLILKLYDHKVDKSKWEMPTGSNMGEAKPWKAIRVDLVRCPYGGFAFALLGWTGSRMFRRDLRWYATDEKNMMLDNHALYDLTKKIFLKAKSEEEIFAHLGLEYLEPFERNA

SEQ ID NO: 2267 - DNA, 1587 bp, synthetic construct
  misc_feature 1..1587: note = Variant of terminal deoxynucleotidyltransferase
  source 1..1587: mol_type = other DNA
atgcaccatcatcatcatcatggcggtagcggcagccacggcattcgtaccatcgattcggacttcgggaagaaacgccagaaaaaaatggataaccacgatagttccgccatctatgaaatcaaatttcacgagtttgtgctgttcattctcgaagaaaaaatgggtgcgacgcgtcgtacttttctgacagatttagcccgcaagaaagggttccgcgtcgagaatgaactgtcagacagcgttacccacatcgtggcagaaaataattcacgctctgaagtattggcttggctgaaagaacacaagatggagaagaccaagcaattcgaactgctggatattagctggcttatcgaaagcatgaaagttggtaaaccggtggacaccaaggggaaataccagttggcggaatcgggtgagatgagtgcgaacccagatccgacagagggtcgtgaaaacgagctgcctcctactatgaagaccgtttctccgtatgcgtgtcaacgccgcaccaccctgaacaaccataatcaacgttttacggacgcattcgaaattcttgcggaaaattacgagttcaaacgcaacgatgatactgcgctggaatttcgtcgtgctatctccgtgctgaaaagccttccgtttgaggtacgtagcctgaaagacacggaaggattgccctggatcggtgatgaagtcaaagggattatggaagaaatcatcgaggtcggtgaatcgctggaagtgcaggccgtgctcaatgatgagtggtatcaaagcttcaaacgctttaagagtgtctttggagtgggggtgaagacagcagacaagtggtaccgtatgggtctgcgcacgctcgaggatgttcgttccagcaagaccctgaagttgaccccgatgcagaaagcgggtctgtgctattatgaagatcttgctcgcggcgttacgaaagccgaagctgacgcgatttctctgctggttcaggatgcagtcgcaactttcgacccggatgcgctggtggagattgtcggtggatttcgtcgtgggaaacctcagggtcacgacgttgatctgcttatcacatctccgggagctgagaaagagcaagaagaccagctcctgcagaaagtgaccaatctgtggaagaaacaagggttgttgctgtacggtcgtctggaatggagtcagtttgaagatgggaaactcccatccggtaaggctgatgccggtgacgcgggtgcgaaatgctttctgatcctcaaactttatgatcataaagtggacaaaagcaaatgggaaatgccgacgggttcgaacatgggcgaggccaaaccgtggaaagcaattcgcgtagatctggttcgttgcccctacggcggttttgcgtttgcgttgttggggtggaccggaagccgcatgttccgccgtgatctgcgctggtacgccactgacgagaagaacatgatgctggacaatcatgcgctgtatgacctgaccaagaaaatctttctcaaagctaaatcggaagaggaaattttcgcacatctggggcttgaatacctggaaccgttcgaacgtaacgca

SEQ ID NO: 2268 - protein, 529 aa, synthetic construct
  REGION 1..529: note = Variant of terminal deoxynucleotidyltransferase
MHHHHHHGGSGSHGIRTIDSDFGKKRQKKMDNHDSSAIYEIKFHEFVLFILEEKMGATRRTFLTDLARKKGFRVENELSDSVTHIVAENNSRSEVLAWLKEHKMEKTKQFELLDISWLIESMKVGKPVDTKGKYQLAESGEMSANPDPTEGRENELPPTMKTVSPYACQRRTTLNNHNQRFTDAFEILAENYEFKRNDDTALEFRRAISVLKSLPFEVRSLKDTEGLPWIGDEVKGIMEEIIEVGESLEVQAVLNDEWYQSFKRFKSVFGVGVKTADKWYRMGLRTLEDVRSSKTLKLTPMQKAGLCYYEDLARGVTKAEADAISLLVQDAVATFDPDALVEIVGGFRRGKPQGHDVDLLITSPGAEKEQEDQLLQKVTNLWKKQGLLLYGRLEWSQFEDGKLPSGKADAGDAGAKCFLILKLYDHKVDKSKWEMPTGSNMGEAKPWKAIRVDLVRCPYGGFAFALLGWTGSRMFRRDLRWYATDEKNMMLDNHALYDLTKKIFLKAKSEEEIFAHLGLEYLEPFERNA

SEQ ID NO: 2269 - DNA, 1587 bp, synthetic construct
  misc_feature 1..1587: note = Variant of terminal deoxynucleotidyltransferase
  source 1..1587: mol_type = other DNA
atgcaccatcatcatcatcatggcggtagcggcagccacggcattcgtaccatcgattcggacttcgggaagaaacgccagaaaaaaatggataaccacgatagttccgccatctatgaaatcaaatttcacgagtttgtgctgttcattctcgaagaaaaaatgggtgcgacgcgtcgtacttttctgacagatttagcccgcaagaaagggttccgcgtcgagaatgaactgtcagacagcgttacccacatcgtggcagaaaataattcacgctctgaagtattggcttggctgaaagaacacaagatggagaagaccaagcaattcgaactgctggatattagctggcttatcgaaagcatgaaagttggtaaaccggtggacaccaaggggaaataccagttggcggaatcgggtgagatgagtgcgaacccagatccgacagagggtcgtgaaaacgagctgcctcctactatgaagaccgtttctccgtatgcgtgtcaacgccgcaccaccctgaacaaccataatcaacgttttacggacgcactggaaattcttgcggaaaattacgagttcaaacgcaacgatgatactgcgctggaatttcgtcgtgctatctccgtgctgaaaagccttccgtttgaggtacgtagcctgaaagacacggaaggattgccctggatcggtgatgaagtcaaagggattatggaagaaatcatcgaggtcggtgaatcgctggaagtgcaggccgtgctcaatgatgagtggtatcaaagcttcaaacgctttaagagtgtctttggagtgggggtggtgacagcagacaaatggtaccgtatgggtctgcgcaacctcgaggatgttcgttccagcaagaccctgaagttgaccccgatgcagaaagcgggtctgtgctattatgaagatcttgctcgcggcgttacgaaagccgaagctgacgcgatttctctgctggttcaggatgcagtcgcaactttcgacccggatgcgctggtggagattgtcggtggatttcgtcgtgggaaacctcagggtcacgacgttgatctgcttatcacatctccgggagctgagaaagagcaagaagaccagctcctgcagaaagtgaccaatctgtggaagaaacaagggttgttgctatacggtcgtctggaatggagtcagtttgaagatgggaaactcccatccggtaaggctgatgccggtgacgcgcatgcgaaatggtttctgatcctcaaactttatgatcataaagtggacaaaagcaaatgggaaatgccgacgggttcgaacatgggcgaggccaaaccgtggaaagcaattcgcgtagatctggttcgttgcccctacggcggttttgcgtttgcgttgttgcagtggaccggaagccgcatgttccgccgtgatctgcgctggtacgccactgacgagaagaacatgatgctggacaatcatgcgctgtatgacctgaccaagaaaatctttctcaaagctaaatcggaagaggaaattttcgcacatctggggcttgaatacctggaaccgttcgaacgtaacgca

SEQ ID NO: 2270 - protein, 529 aa, synthetic construct
  REGION 1..529: note = Variant of terminal deoxynucleotidyltransferase
MHHHHHHGGSGSHGIRTIDSDFGKKRQKKMDNHDSSAIYEIKFHEFVLFILEEKMGATRRTFLTDLARKKGFRVENELSDSVTHIVAENNSRSEVLAWLKEHKMEKTKQFELLDISWLIESMKVGKPVDTKGKYQLAESGEMSANPDPTEGRENELPPTMKTVSPYACQRRTTLNNHNQRFTDALEILAENYEFKRNDDTALEFRRAISVLKSLPFEVRSLKDTEGLPWIGDEVKGIMEEIIEVGESLEVQAVLNDEWYQSFKRFKSVFGVGVVTADKWYRMGLRNLEDVRSSKTLKLTPMQKAGLCYYEDLARGVTKAEADAISLLVQDAVATFDPDALVEIVGGFRRGKPQGHDVDLLITSPGAEKEQEDQLLQKVTNLWKKQGLLLYGRLEWSQFEDGKLPSGKADAGDAHAKWFLILKLYDHKVDKSKWEMPTGSNMGEAKPWKAIRVDLVRCPYGGFAFALLQWTGSRMFRRDLRWYATDEKNMMLDNHALYDLTKKIFLKAKSEEEIFAHLGLEYLEPFERNA

SEQ ID NO: 2271 - DNA, 1587 bp, synthetic construct
  misc_feature 1..1587: note = Variant of terminal deoxynucleotidyltransferase
  source 1..1587: mol_type = other DNA
atgcaccatcatcatcatcatggcggtagcggcagccacggcattcgtaccatcgattcggacttcgggaagaaacgccagaaaaaaatggataaccacgatagttccgccatctatgaaatcaaatttcacgagtttgtgctgttcattctcgaagaaaaaatgggtgcgacgcgtcgtacttttctgacagatttagcccgcaagaaagggttccgcgtcgagaatgaactgtcagacagcgttacccacatcgtggcagaaaataattcacgctctgaagtattggcttggctgaaagaacacaagatggagaagaccaagcaattcgaactgctggatattagctggcttatcgaaagcatgaaagttggtaaaccggtggacaccaaggggaaataccagttggcggaatcgggtgagatgagtgcgaacccagatccgacagagggtcgtgaaaacgagctgcctcctactatgaagaccgtttctccgtatgcgtgtcaacgccgcaccaccctgaacaaccataatcaacgttttacggacgcactggaaattcttgcggaaaattacgagttcaaacgcaacgatgatactgcgctggaatttcgtcgtgctatctccgtgctgaaaagccttccgtttgaggtacgtagcctgaaagacacggaaggattgccctggatcggtgatgaagtcaaagggattatggaagaaatcatcgaggtcggtgaatcgctggaagtgcaggccgtgctcaatgatgagtggtatcaaagcttcaaacgctttaagagtgtctttggagtgggggtgaagacagcagacaaatggtaccgtatgggtctgcgcacgctcgaggatgttcgttccagcaagaccctgaagttgaccccgatgcagaaagcgggtctgtgctattatgaagatcttgctcgcggcgttacgaaagccgaagctgacgcgatttctctgctggttcaggatgcagtcgcaactttcgacccggatgcgctggtggagattgtcggtggatttcgtcgtgggaaacctcagggtcacgacgttgatctgcttatcacatctccgggagctgagaaagagcaagaagaccagctcctgcagaaagtgaccaatctgtggaagaaacaagggttgttgctgtacggtcgtctggaatggagtcagtttgaagatgggaaactcccatccggtaaggctgatgccctggaccacggtgcgaaatgctttctgatcctcaaactttatgatcataaagtggacaaaagcaaatgggaaatgccgacgggttcgaacatgggcgaggccaaaccgtggaaagcaattcgcgtagatctggttcgttgcccctacggcggttttgcgtttgcgttgttgggttggaccggaagccgcatgttccgccgtgatctgcgctggtacgccactgacgagaagaacatgatgctggacaatcatgcgctgtatgacctgaccaagaaaatctttctcaaagctaaatcggaagaggaaattttcgcacatctggggcttgaatacctggaaccgttcgaacgtaacgca

SEQ ID NO: 2272 - protein, 529 aa, synthetic construct
  REGION 1..529: note = Variant of terminal deoxynucleotidyltransferase
MHHHHHHGGSGSHGIRTIDSDFGKKRQKKMDNHDSSAIYEIKFHEFVLFILEEKMGATRRTFLTDLARKKGFRVENELSDSVTHIVAENNSRSEVLAWLKEHKMEKTKQFELLDISWLIESMKVGKPVDTKGKYQLAESGEMSANPDPTEGRENELPPTMKTVSPYACQRRTTLNNHNQRFTDALEILAENYEFKRNDDTALEFRRAISVLKSLPFEVRSLKDTEGLPWIGDEVKGIMEEIIEVGESLEVQAVLNDEWYQSFKRFKSVFGVGVKTADKWYRMGLRTLEDVRSSKTLKLTPMQKAGLCYYEDLARGVTKAEADAISLLVQDAVATFDPDALVEIVGGFRRGKPQGHDVDLLITSPGAEKEQEDQLLQKVTNLWKKQGLLLYGRLEWSQFEDGKLPSGKADALDHGAKCFLILKLYDHKVDKSKWEMPTGSNMGEAKPWKAIRVDLVRCPYGGFAFALLGWTGSRMFRRDLRWYATDEKNMMLDNHALYDLTKKIFLKAKSEEEIFAHLGLEYLEPFERNA

SEQ ID NO: 2273 - DNA, 1587 bp, synthetic construct
  misc_feature 1..1587: note = Variant of terminal deoxynucleotidyltransferase
  source 1..1587: mol_type = other DNA
atgcaccatcatcatcatcatggcggtagcggcagccacggcattcgtaccatcgattcggacttcgggaagaaacgccagaaaaaaatggataaccacgatagttccgccatctatgaaatcaaatttcacgagtttgtgctgttcattctcgaagaaaaaatgggtgcgacgcgtcgtacttttctgacagatttagcccgcaagaaagggttccgcgtcgagaatgaactgtcagacagcgttacccacatcgtggcagaaaataattcacgctctgaagtattggcttggctgaaagaacacaagatggagaagaccaagcaattcgaactgctggatattagctggcttatcgaaagcatgaaagttggtaaaccggtggacaccaaggggaaataccagttggcggaatcgggtgagatgagtgcgaacccagatccgacagagggtcgtgaaaacgagctgcctcctactatgaagaccgtttctccgtatgcgtgtcaacgccgcaccaccctgaacaaccataatcaacgttttacggacgcactggaaattcttgcggaaaattacgagttcaaacgcaacgatgatactgcgctggaatttcgtcgtgctatctccgtgctgaaaagccttccgtttgaggtacgtagcctgaaagacacggaaggattgccctggatcggtgatgaagtcaaagggattatggaagaaatcatcgaggtcggtgaatcgctggaagtgcaggccgtgctcaatgatgagtggtatcaaagcttccaccgctttaagagtgtctttggagtgggggtgaagacagcagacaagtggtaccgtatgggtctgcgcaccctcgaggatgttcgttccagcaagaccctgaagttgaccccgatgcagaaagcgggtctgtgctattatgaagatcttgctcgcggcgttacgaaagccgaagctgacgcgatttctctgctggttcaggatgcagtcgcaactttcgacccggatgcgctggtggagattgtcggtggatttcgtcgtgggaaacctcagggtcacgacgttgatctgcttatcacatctccgggagctgagaaagagcaagaagaccagctcctgcagaaagtgaccaatctgtggaagaaacaagggttgttgctgtacggtcgtctggaatggagtcagtttgaagatgggaaactcccatccggtaaggctgatgccctggacgcgggtgcgaaatgctttctgatcctcaaactttatgatcataaagtggacaaaagcaaatgggaaatgccgacgggttcgaacatgggcgaggccaaaccgtggaaagcaattcgcgtagatctggttcgttgcccctacggcggttttgcgtttgcgttgttgggttggaccggaagccgcatgttccgccgtgatctgcgctggtacgccactgacgagaagaacatgatgctggacaatcatgcgctgtatgacctgaccaagaaaatctttctcaaagctaaatcggaagaggaaattttcgcacatctggggcttgaatacctggaaccgttcgaacgtaacgca

SEQ ID NO: 2274 - protein, 529 aa, synthetic construct
  REGION 1..529: note = Variant of terminal deoxynucleotidyltransferase
MHHHHHHGGSGSHGIRTIDSDFGKKRQKKMDNHDSSAIYEIKFHEFVLFILEEKMGATRRTFLTDLARKKGFRVENELSDSVTHIVAENNSRSEVLAWLKEHKMEKTKQFELLDISWLIESMKVGKPVDTKGKYQLAESGEMSANPDPTEGRENELPPTMKTVSPYACQRRTTLNNHNQRFTDALEILAENYEFKRNDDTALEFRRAISVLKSLPFEVRSLKDTEGLPWIGDEVKGIMEEIIEVGESLEVQAVLNDEWYQSFHRFKSVFGVGVKTADKWYRMGLRTLEDVRSSKTLKLTPMQKAGLCYYEDLARGVTKAEADAISLLVQDAVATFDPDALVEIVGGFRRGKPQGHDVDLLITSPGAEKEQEDQLLQKVTNLWKKQGLLLYGRLEWSQFEDGKLPSGKADALDAGAKCFLILKLYDHKVDKSKWEMPTGSNMGEAKPWKAIRVDLVRCPYGGFAFALLGWTGSRMFRRDLRWYATDEKNMMLDNHALYDLTKKIFLKAKSEEEIFAHLGLEYLEPFERNA

SEQ ID NO: 2275 - DNA, 1587 bp, synthetic construct
  misc_feature 1..1587: note = Variant of terminal deoxynucleotidyltransferase
  source 1..1587: mol_type = other DNA
atgcaccatcatcatcatcatggcggtagcggcagccacggcattcgtaccatcgattcggacttcgggaagaaacgccagaaaaaaatggataaccacgatagttccgccatctatgaaatcaaatttcacgagtttgtgctgttcattctcgaagaaaaaatgggtgcgacgcgtcgtacttttctgacagatttagcccgcaagaaagggttccgcgtcgagaatgaactgtcagacagcgttacccacatcgtggcagaaaataattcacgctctgaagtattggcttggctgaaagaacacaagatggagaagaccaagcaattcgaactgctggatattagctggcttatcgaaagcatgaaagttggtaaaccggtggacaccaaggggaaataccagttggcggaatcgggtgagatgagtgcgaacccagatccgacagagggtcgtgaaaacgagctgcctcctactatgaagaccgtttctccgtatgcgtgtcaacgccgcaccaccctgaacaaccataatcaacgttttacggacgcactggaaattcttgcggaaaattacgagttcaaacgcaacgatgatactgcgctggaatttcgtcgtgctatctccgtgctgaaaagccttccgtttgaggtacgtagcctgaaagacacggaaggattgccctggatcggtgatgaagtcaaagggattatggaagaaatcatcgaggtcggtgaatcgctggaagtgcaggccgtgctcaatgatgagtggtatcaaagcttcaaacgctttaagagtgtctttggagtgggggtgaagacagcagacaattggtaccgtatgggtctgcgcacgctcgaggatgttcgttccagcaagaccctgaagttgaccccgatgcagaaagcgggtctgtgctattatgaagatcttgctcgcggcgttacgaaagccgaagctgacgcgatttctctgctggttcaggatgcagtcgcaactttcgacccggatgcgctggtggagattgtcggtggatttcgtcgtgggaaacctcagggtcacgacgttgatctgcttatcacatctccgggagctgagaaagagcaagaagaccagctcctgcagaaagtgaccaatctgtggaagaaacaagggttgttgctgtacggtcgtctggaatggagtcagtttgaagatgggaaactcccatccggtaaggctgatgccggtgacgcgcatgcgaaatgctttctgatcctcaaactttatgatcataaagtggacaaaagcaaatgggaaatgccgacgggttcgaacatgggcgaggccaaaccgtggaaagcaattcgcgtagatctggttcgttgcccctacggcggttttgcgtttgcgttgttgcagtggaccggaagccgcatgttccgccgtgatctgcgctggtacgccactgacgagaagaacatgatgctggacaatcatgcgctgtatgacctgaccaagaaaatctttctcaaagctaaatcggaagaggaaattttcgcacatctggggcttgaatacctggaaccgttcgaacgtaacgca

SEQ ID NO: 2276 - protein, 529 aa, synthetic construct
  REGION 1..529: note = Variant of terminal deoxynucleotidyltransferase
MHHHHHHGGSGSHGIRTIDSDFGKKRQKKMDNHDSSAIYEIKFHEFVLFILEEKMGATRRTFLTDLARKKGFRVENELSDSVTHIVAENNSRSEVLAWLKEHKMEKTKQFELLDISWLIESMKVGKPVDTKGKYQLAESGEMSANPDPTEGRENELPPTMKTVSPYACQRRTTLNNHNQRFTDALEILAENYEFKRNDDTALEFRRAISVLKSLPFEVRSLKDTEGLPWIGDEVKGIMEEIIEVGESLEVQAVLNDEWYQSFKRFKSVFGVGVKTADNWYRMGLRTLEDVRSSKTLKLTPMQKAGLCYYEDLARGVTKAEADAISLLVQDAVATFDPDALVEIVGGFRRGKPQGHDVDLLITSPGAEKEQEDQLLQKVTNLWKKQGLLLYGRLEWSQFEDGKLPSGKADAGDAHAKCFLILKLYDHKVDKSKWEMPTGSNMGEAKPWKAIRVDLVRCPYGGFAFALLQWTGSRMFRRDLRWYATDEKNMMLDNHALYDLTKKIFLKAKSEEEIFAHLGLEYLEPFERNA

SEQ ID NO: 2277 - DNA, 1587 bp, synthetic construct
  misc_feature 1..1587: note = Variant of terminal deoxynucleotidyltransferase
  source 1..1587: mol_type = other DNA
atgcaccatcatcatcatcatggcggtagcggcagccacggcattcgtaccatcgattcggacttcgggaagaaacgccagaaaaaaatggataaccacgatagttccgccatctatgaaatcaaatttcacgagtttgtgctgttcattctcgaagaaaaaatgggtgcgacgcgtcgtacttttctgacagatttagcccgcaagaaagggttccgcgtcgagaatgaactgtcagacagcgttacccacatcgtggcagaaaataattcacgctctgaagtattggcttggctgaaagaacacaagatggagaagaccaagcaattcgaactgctggatattagctggcttatcgaaagcatgaaagttggtaaaccggtggacaccaaggggaaataccagttggcggaatcgggtgagatgagtgcgaacccagatccgacagagggtcgtgaaaacgagctgcctcctactatgaagaccgtttctccgtatgcgtgtcaacgccgcaccaccctgaacaaccataatcaacgttttacggacgcattcgaaattcttgcggaaaattacgagttcaaacgcaacgatgatactgcgctggaatttcgtcgtgctatctccgtgctgaaaagccttccgtttgaggtacgtagcctgaaagacacggaaggattgccctggatcggtgatgaagtcaaagggattatggaagaaatcatcgaggtcggtgaatcgctggaagtgcaggccgtgctcaatgatgagtggtatcaaagcttcaaacgctttaagagtgtctttggagtgggggtggtgacagcagacaaatggtaccgtatgggtctgcgcacgctcgaggatgttcgttccagcaagaccctgaagttgaccccgatgcagaaagcgggtctgtgctattatgaagatcttgctcgcggcgttacgaaagccgaagctgacgcgatttctctgctggttcaggatgcagtcgcaactttcgacccggatgcgctggtggagattgtcggtggatttcgtcgtgggaaacctcagggtcacgacgttgatctgcttatcacatctccgggagctgagaaagagcaagaagaccagctcctgcagaaagtgaccaatctgtggaagaaacaagggttgttgctgtacggtcgtctggaatggagtcagtttgaagatgggaaactcccatccggtaaggctgatgccctggacgcgggtgcgaaatgctttctgatcctcaaactttatgatcataaagtggacaaaagcaaatgggaaatgccgacgggttcgaacatgggcgaggccaaaccgtggaaagcaattcgcgtagatctggttcgttgcccctacggcggttttgcgtttgcgttgttgggttggaccggaagccgcatgttccgccgtgatctgcgctggtacgccactgacgagaagaacatgatgctggacaatcatgcgctgtatgacctgaccaagaaaatctttctcaaagctaaatcggaagaggaaattttcgcacatctggggcttgaatacctggaaccgttcgaacgtaacgca

SEQ ID NO: 2278 - protein, 529 aa, synthetic construct
  REGION 1..529: note = Variant of terminal deoxynucleotidyltransferase
MHHHHHHGGSGSHGIRTIDSDFGKKRQKKMDNHDSSAIYEIKFHEFVLFILEEKMGATRRTFLTDLARKKGFRVENELSDSVTHIVAENNSRSEVLAWLKEHKMEKTKQFELLDISWLIESMKVGKPVDTKGKYQLAESGEMSANPDPTEGRENELPPTMKTVSPYACQRRTTLNNHNQRFTDAFEILAENYEFKRNDDTALEFRRAISVLKSLPFEVRSLKDTEGLPWIGDEVKGIMEEIIEVGESLEVQAVLNDEWYQSFKRFKSVFGVGVVTADKWYRMGLRTLEDVRSSKTLKLTPMQKAGLCYYEDLARGVTKAEADAISLLVQDAVATFDPDALVEIVGGFRRGKPQGHDVDLLITSPGAEKEQEDQLLQKVTNLWKKQGLLLYGRLEWSQFEDGKLPSGKADALDAGAKCFLILKLYDHKVDKSKWEMPTGSNMGEAKPWKAIRVDLVRCPYGGFAFALLGWTGSRMFRRDLRWYATDEKNMMLDNHALYDLTKKIFLKAKSEEEIFAHLGLEYLEPFERNA

SEQ ID NO: 2279 - DNA, 1587 bp, synthetic construct
  misc_feature 1..1587: note = Variant of terminal deoxynucleotidyltransferase
  source 1..1587: mol_type = other DNA
atgcaccatcatcatcatcatggcggtagcggcagccacggcattcgtaccatcgattcggacttcgggaagaaacgccagaaaaaaatggataaccacgatagttccgccatctatgaaatcaaatttcacgagtttgtgctgttcattctcgaagaaaaaatgggtgcgacgcgtcgtacttttctgacagatttagcccgcaagaaagggttccgcgtcgagaatgaactgtcagacagcgttacccacatcgtggcagaaaataattcacgctctgaagtattggcttggctgaaagaacacaagatggagaagaccaagcaattcgaactgctggatattagctggcttatcgaaagcatgaaagttggtaaaccggtggacaccaaggggaaataccagttggcggaatcgggtgagatgagtgcgaacccagatccgacagagggtcgtgaaaacgagctgcctcctactatgaagaccgtttctccgtatgcgtgtcaacgccgcaccaccctgaacaaccataatcaacgttttacggacgcactggaaattcttgcggaaaattacgagttcaaacgcaacgatgatactgcgctggaatttcgtcgtgctatctccgtgctgaaaagccttccgtttgaggtacgtagcctgaaagacacggaaggattgccctggatcggtgatgaagtcaaagggattatggaagaaatcatcgaggtcggtgaatcgctggaagtgcaggccgtgctcaatgatgagtggtatcaaagcttcaaacgctttaagagtgtctttggagtgggggtggtgacagcagacaaatggtaccgtatgggtctgcgcacgctcgaggatgttcgttccagcaagaccctgaagttgaccccgatgcagaaagcgggtctgtgctattatgaagatcttgctcgcggcgttacgaaagccgaagctgacgcgatttctctgctggttcaggatgcagtcgcaactttcgacccggatgcgctggtggagattgtcggtggatttcgtcgtgggaaacctcagggtcacgacgttgatctgcttatcacatctccgggagctgagaaagagcaagaagaccagctcctgcagaaagtgaccaatctgtggaagaaacaagggttgttgctgtacggtcgtctggaatggagtcagtttgaagatgggaaactcccatccggtaaggctgatgccggtgaccaccatgcgaaatggtttctgatcctcaaactttatgatcataaagtggacaaaagcaaatgggaaatgccgacgggttcgaacatgggcgaggccaaaccgtggaaagcaattcgcgtagatctggttcgttgcccctacggcggttttgcgtttgcgttgttgcagtggaccggaagccgcatgttccgccgtgatctgcgctggtacgccactgacgagaagaacatgatgctggacaatcatgcgctgtatgacctgaccaagaaaatctttctcaaagctaaatcggaagaggaaattttcgcacatctggggcttgaatacctggaaccgttcgaacgtaacgca

SEQ ID NO: 2280 - protein, 529 aa, synthetic construct
  REGION 1..529: note = Variant of terminal deoxynucleotidyltransferase
MHHHHHHGGSGSHGIRTIDSDFGKKRQKKMDNHDSSAIYEIKFHEFVLFILEEKMGATRRTFLTDLARKKGFRVENELSDSVTHIVAENNSRSEVLAWLKEHKMEKTKQFELLDISWLIESMKVGKPVDTKGKYQLAESGEMSANPDPTEGRENELPPTMKTVSPYACQRRTTLNNHNQRFTDALEILAENYEFKRNDDTALEFRRAISVLKSLPFEVRSLKDTEGLPWIGDEVKGIMEEIIEVGESLEVQAVLNDEWYQSFKRFKSVFGVGVVTADKWYRMGLRTLEDVRSSKTLKLTPMQKAGLCYYEDLARGVTKAEADAISLLVQDAVATFDPDALVEIVGGFRRGKPQGHDVDLLITSPGAEKEQEDQLLQKVTNLWKKQGLLLYGRLEWSQFEDGKLPSGKADAGDHHAKWFLILKLYDHKVDKSKWEMPTGSNMGEAKPWKAIRVDLVRCPYGGFAFALLQWTGSRMFRRDLRWYATDEKNMMLDNHALYDLTKKIFLKAKSEEEIFAHLGLEYLEPFERNA

SEQ ID NO: 2281 - DNA, 1587 bp, synthetic construct
  misc_feature 1..1587: note = Variant of terminal deoxynucleotidyltransferase
  source 1..1587: mol_type = other DNA
atgcaccatcatcatcatcatggcggtagcggcagccacggcattcgtaccatcgattcggacttcgggaagaaacgccagaaaaaaatggataaccacgatagttccgccatctatgaaatcaaatttcacgagtttgtgctgttcattctcgaagaaaaaatgggtgcgacgcgtcgtacttttctgacagatttagcccgcaagaaagggttccgcgtcgagaatgaactgtcagacagcgttacccacatcgtggcagaaaataattcacgctctgaagtattggcttggctgaaagaacacaagatggagaagaccaagcaattcgaactgctggatattagctggcttatcgaaagcatgaaagttggtaaaccggtggacaccaaggggaaataccagttggcggaatcgggtgagatgagtgcgaacccagatccgacagagggtcgtgaaaacgagctgcctcctactatgaagaccgtttctccgtatgcgtgtcaacgccgcaccaccctgaacaaccataatcaacgttttacggacgcactggaaattcttgcggaaaattacgagttcaaacgcaacgatgatactgcgctggaatttcgtcgtgctatctccgtgctgaaaagccttccgtttgaggtacgtagcctgaaagacacggaaggattgccctggatcggtgatgaagtcaaagggattatggaagaaatcatcgaggtcggtgaatcgctggaagtgcaggccgtgctcaatgatgagtggtatcaaagcttcaaacgctttaagagtgtctttggagtgggggtgaagacagcagacaagtggtaccgtatgggtctgcgcacgctcgaggatgttcgttccagcaagaccctgaagttgaccccgatgcagaaagcgggtctgtgctattatgaagatcttgctcgcggcgttacgaaagccgaagctgacgcgatttctctgctggttcaggatgcagtcgcaactttcgacccggatgcgctggtggagattgtcggtggatttcgtcgtgggaaacctcagggtcacgacgttgatctgcttatcacatctccgggagctgagaaagagcaagaagaccagctcctgcagaaagtgaccaatctgtggaagaaacaagggttgttgctgtacggtcgtctggaatggagtcagtttgaagatgggaaactcccatccggtaaggctgatgccggtgacgcgcatgcgaaatggtttctgatcctcaaactttatgatcataaagtggacaaaagcaaatgggaaatgccgacgggttcgaacatgggcgaggccaaaccgtggaaagcaattcgcgtagatctggttcgttgcccctacggcggttttgcgtttgcgttgttgcagtggaccggaagccgcatgttccgccgtgatctgcgctggtacgccactgacgagaagaacatgatgctggacaatcatgcgctgtatgacctgaccaagaaaatctttctcaaagctaaatcggaagaggaaattttcgcacatctggggcttgaatacctggaaccgttcgaacgtaacgca

SEQ ID NO: 2282 - protein, 529 aa, synthetic construct
  REGION 1..529: note = Variant of terminal deoxynucleotidyltransferase
MHHHHHHGGSGSHGIRTIDSDFGKKRQKKMDNHDSSAIYEIKFHEFVLFILEEKMGATRRTFLTDLARKKGFRVENELSDSVTHIVAENNSRSEVLAWLKEHKMEKTKQFELLDISWLIESMKVGKPVDTKGKYQLAESGEMSANPDPTEGRENELPPTMKTVSPYACQRRTTLNNHNQRFTDALEILAENYEFKRNDDTALEFRRAISVLKSLPFEVRSLKDTEGLPWIGDEVKGIMEEIIEVGESLEVQAVLNDEWYQSFKRFKSVFGVGVKTADKWYRMGLRTLEDVRSSKTLKLTPMQKAGLCYYEDLARGVTKAEADAISLLVQDAVATFDPDALVEIVGGFRRGKPQGHDVDLLITSPGAEKEQEDQLLQKVTNLWKKQGLLLYGRLEWSQFEDGKLPSGKADAGDAHAKWFLILKLYDHKVDKSKWEMPTGSNMGEAKPWKAIRVDLVRCPYGGFAFALLQWTGSRMFRRDLRWYATDEKNMMLDNHALYDLTKKIFLKAKSEEEIFAHLGLEYLEPFERNA

SEQ ID NO: 2283 - DNA, 1587 bp, synthetic construct
  misc_feature 1..1587: note = Variant of terminal deoxynucleotidyltransferase
  source 1..1587: mol_type = other DNA
atgcaccatcatcatcatcatggcggtagcggcagccacggcattcgtaccatcgattcggacttcgggaagaaacgccagaaaaaaatggataaccacgatagttccgccatctatgaaatcaaatttcacgagtttgtgctgttcattctcgaagaaaaaatgggtgcgacgcgtcgtacttttctgacagatttagcccgcaagaaagggttccgcgtcgagaatgaactgtcagacagcgttacccacatcgtggcagaaaataattcacgctctgaagtattggcttggctgaaagaacacaagatggagaagaccaagcaattcgaactgctggatattagctggcttatcgaaagcatgaaagttggtaaaccggtggacaccaaggggaaataccagttggcggaatcgggtgagatgagtgcgaacccagatccgacagagggtcgtgaaaacgagctgcctcctactatgaagaccgtttctccgtatgcgtgtcaacgccgcaccaccctgaacaaccataatcaacgttttacggacgcactggaaattcttgcggaaaattacgagttcaaacgcaacgatgatactgcgctggaatttcgtcgtgctatctccgtgctgaaaagccttccgtttgaggtacgtagcctgaaagacacggaaggattgccctggatcggtgatgaagtcaaagggattatggaagaaatcatcgaggtcggtgaatcgctggaagtgcaggccgtgctcaatgatgagtggtatcaaagcttcaaacgctttaagagtgtctttggagtgggggtggtgacagcagacaaatggtaccgtatgggtctgcgcacgctcgaggatgttcgttccagcaagaccctgaagttgaccccgatgcagaaagcgggtctgtgctattatgaagatcttgctcgcggcgttacgaaagccgaagctgacgcgatttctctgctggttcaggatgcagtcgcaactttcgacccggatgcgctggtggagattgtcggtggatttcgtcgtgggaaacctcagggtcacgacgttgatctgcttatcacatctccgggagctgagaaagagcaagaagaccagctcctgcagaaagtgaccaatctgtggaagaaacaagggttgttgctgtacggtcgtctggaatggagtcagtttgaagatgggaaactcccatccggtaaggctgatgccctggaccaccatgcgaaatgctttctgatcctcaaactttatgatcataaagtggacaaaagcaaatgggaaatgccgacgggttcgaacatgggcgaggccaaaccgtggaaagcaattcgcgtagatctggttcgttgcccctacggcggttttgcgtttgcgttgttgcagtggaccggaagccgcatgttccgccgtgatctgcgctggtacgccactgacgagaagaacatgatgctggacaatcatgcgctgtatgacctgaccaagaaaatctttctcaaagctaaatcggaagaggaaattttcgcacatctggggcttgaatacctggaaccgttcgaacgtaacgca

SEQ ID NO: 2284 - protein, 529 aa, synthetic construct
  REGION 1..529: note = Variant of terminal deoxynucleotidyltransferase
MHHHHHHGGSGSHGIRTIDSDFGKKRQKKMDNHDSSAIYEIKFHEFVLFILEEKMGATRRTFLTDLARKKGFRVENELSDSVTHIVAENNSRSEVLAWLKEHKMEKTKQFELLDISWLIESMKVGKPVDTKGKYQLAESGEMSANPDPTEGRENELPPTMKTVSPYACQRRTTLNNHNQRFTDALEILAENYEFKRNDDTALEFRRAISVLKSLPFEVRSLKDTEGLPWIGDEVKGIMEEIIEVGESLEVQAVLNDEWYQSFKRFKSVFGVGVVTADKWYRMGLRTLEDVRSSKTLKLTPMQKAGLCYYEDLARGVTKAEADAISLLVQDAVATFDPDALVEIVGGFRRGKPQGHDVDLLITSPGAEKEQEDQLLQKVTNLWKKQGLLLYGRLEWSQFEDGKLPSGKADALDHHAKCFLILKLYDHKVDKSKWEMPTGSNMGEAKPWKAIRVDLVRCPYGGFAFALLQWTGSRMFRRDLRWYATDEKNMMLDNHALYDLTKKIFLKAKSEEEIFAHLGLEYLEPFERNA

SEQ ID NO: 2285 - DNA, 1587 bp, synthetic construct
  misc_feature 1..1587: note = Variant of terminal deoxynucleotidyltransferase
  source 1..1587: mol_type = other DNA
atgcaccatcatcatcatcatggcggtagcggcagccacggcattcgtaccatcgattcggacttcgggaagaaacgccagaaaaaaatggataaccacgatagttccgccatctatgaaatcaaatttcacgagtttgtgctgttcattctcgaagaaaaaatgggtgcgacgcgtcgtacttttctgacagatttagcccgcaagaaagggttccgcgtcgagaatgaactgtcagacagcgttacccacatcgtggcagaaaataattcacgctctgaagtattggcttggctgaaagaacacaagatggagaagaccaagcaattcgaactgctggatattagctggcttatcgaaagcatgaaagttggtaaaccggtggacaccaaggggaaataccagttggcggaatcgggtgagatgagtgcgaacccagatccgacagagggtcgtgaaaacgagctgcctcctactatgaagaccgtttctccgtatgcgtgtcaacgccgcaccaccctgaacaaccataatcaacgttttacggacgcactggaaattcttgcggaaaattacgagttcaaacgcaacgatgatactgcgctggaatttcgtcgtgctatctccgtgctgaaaagccttccgtttgaggtacgtagcctgaaagacacggaaggattgccctggatcggtgatgaagtcaaagggattatggaagaaatcatcgaggtcggtgaatcgctggaagtgcaggccgtgctcaatgatgagtggtatcaaagcttcaaacgctttaagagtgtctttggagtgggggtgaagacagcagacaagtggtaccgtatgggtctgcgcacgctcgaggatgttcgttccagcaagaccctgaagttgaccccgatgcagaaagcgggtctgtgctattatgaagatcttgctcgcggcgttacgaaagccgaagctgacgcgatttctctgctggttcaggatgcagtcgcaactttcgacccggatgcgctggtggagattgtcggtggatttcgtcgtgggaaacctcagggtcacgacgttgatctgcttatcacatctccgggagctgagaaagagcaagaagaccagctcctgcagaaagtgaccaatctgtggaagaaacaagggttgttgctgtacggtcgtctggaatggagtcagtttgaagatgggaaactcccatccggtaaggctgatgccggtgacgcgcatgcgaaatggtttctgatcctcaaactttatgatcataaagtggacaaaagcaaatgggaaatgccgacgggttcgaacatgggcgaggccaaaccgtggaaagcaattcgcgtagatctggttcgttgcccctacggcggttttgcgtttgcgttgttgggttggaccggaagccgcatgttccgccgtgatctgcgctggtacgccactgacgagaagaacatgatgctggacaatcatgcgctgtatgacctgaccaagaaaatctttctcaaagctaaatcggaagaggaaattttcgcacatctggggcttgaatacctggaaccgttcgaacgtaacgca

SEQ ID NO: 2286 - protein, 529 aa, synthetic construct
  REGION 1..529: note = Variant of terminal deoxynucleotidyltransferase
MHHHHHHGGSGSHGIRTIDSDFGKKRQKKMDNHDSSAIYEIKFHEFVLFILEEKMGATRRTFLTDLARKKGFRVENELSDSVTHIVAENNSRSEVLAWLKEHKMEKTKQFELLDISWLIESMKVGKPVDTKGKYQLAESGEMSANPDPTEGRENELPPTMKTVSPYACQRRTTLNNHNQRFTDALEILAENYEFKRNDDTALEFRRAISVLKSLPFEVRSLKDTEGLPWIGDEVKGIMEEIIEVGESLEVQAVLNDEWYQSFKRFKSVFGVGVKTADKWYRMGLRTLEDVRSSKTLKLTPMQKAGLCYYEDLARGVTKAEADAISLLVQDAVATFDPDALVEIVGGFRRGKPQGHDVDLLITSPGAEKEQEDQLLQKVTNLWKKQGLLLYGRLEWSQFEDGKLPSGKADAGDAHAKWFLILKLYDHKVDKSKWEMPTGSNMGEAKPWKAIRVDLVRCPYGGFAFALLGWTGSRMFRRDLRWYATDEKNMMLDNHALYDLTKKIFLKAKSEEEIFAHLGLEYLEPFERNA

SEQ ID NO: 2287 - DNA, 1587 bp, synthetic construct
  misc_feature 1..1587: note = Variant of terminal deoxynucleotidyltransferase
  source 1..1587: mol_type = other DNA
atgcaccatcatcatcatcatggcggtagcggcagccacggcattcgtaccatcgattcggacttcgggaagaaacgccagaaaaaaatggataaccacgatagttccgccatctatgaaatcaaatttcacgagtttgtgctgttcattctcgaagaaaaaatgggtgcgacgcgtcgtacttttctgacagatttagcccgcaagaaagggttccgcgtcgagaatgaactgtcagacagcgttacccacatcgtggcagaaaataattcacgctctgaagtattggcttggctgaaagaacacaagatggagaagaccaagcaattcgaactgctggatattagctggcttatcgaaagcatgaaagttggtaaaccggtggacaccaaggggaaataccagttggcggaatcgggtgagatgagtgcgaacccagatccgacagagggtcgtgaaaacgagctgcctcctactatgaagaccgtttctccgtatgcgtgtcaacgccgcaccaccctgaacaaccataatcaacgttttacggacgcactggaaattcttgcggaaaattacgagttcaaacgcaacgatgatactgcgctggaatttcgtcgtgctatctccgtgctgaaaagccttccgtttgaggtacgtagcctgaaagacacggaaggattgccctggatcggtgatgaagtcaaagggattatggaagaaatcatcgaggtcggtgaatcgctggaagtgcaggccgtgctcaatgatgagtggtatcaaagcttcaaacgctttaagagtgtctttggagtgggggtgaagacagcagacaagtggtaccgtatgggtctgcgcacgctcgaggatgttcgttccagcaagaccctgaagttgaccccgatgcagaaagcgggtctgtgctattatgaagatcttgctcgcggcgttacgaaagccgaagctgacgcgatttctctgctggttcaggatgcagtcgcaactttcgacccggatgcgctggtggagattgtcggtggatttcgtcgtgggaaacctcagggtcacgacgttgatctgcttatcacatctccgggagctgagaaagagcaagaagaccagctcctgcagaaagtgaccaatctgtggaagaaacaagggttgttgctgtacggtcgtctggaatggagtcagtttgaagatgggaaactcccatccggtaaggctgatgccctggacgcgcatgcgaaatggtttctgatcctcaaactttatgatcataaagtggacaaaagcaaatgggaaatgccgacgggttcgaacatgggcgaggccaaaccgtggaaagcaattcgcgtagatctggttcgttgcccctacggcggttttgcgtttgcgttgttgcagtggaccggaagccgcatgttccgccgtgatctgcgctggtacgccactgacgagaagaacatgatgctggacaatcatgcgctgtatgacctgaccaagaaaatctttctcaaagctaaatcggaagaggaaattttcgcacatctggggcttgaatacctggaaccgttcgaacgtaacgca

SEQ ID NO: 2288 - protein, 529 aa, synthetic construct
  REGION 1..529: note = Variant of terminal deoxynucleotidyltransferase
MHHHHHHGGSGSHGIRTIDSDFGKKRQKKMDNHDSSAIYEIKFHEFVLFILEEKMGATRRTFLTDLARKKGFRVENELSDSVTHIVAENNSRSEVLAWLKEHKMEKTKQFELLDISWLIESMKVGKPVDTKGKYQLAESGEMSANPDPTEGRENELPPTMKTVSPYACQRRTTLNNHNQRFTDALEILAENYEFKRNDDTALEFRRAISVLKSLPFEVRSLKDTEGLPWIGDEVKGIMEEIIEVGESLEVQAVLNDEWYQSFKRFKSVFGVGVKTADKWYRMGLRTLEDVRSSKTLKLTPMQKAGLCYYEDLARGVTKAEADAISLLVQDAVATFDPDALVEIVGGFRRGKPQGHDVDLLITSPGAEKEQEDQLLQKVTNLWKKQGLLLYGRLEWSQFEDGKLPSGKADALDAHAKWFLILKLYDHKVDKSKWEMPTGSNMGEAKPWKAIRVDLVRCPYGGFAFALLQWTGSRMFRRDLRWYATDEKNMMLDNHALYDLTKKIFLKAKSEEEIFAHLGLEYLEPFERNA

SEQ ID NO: 2289 - DNA, 1587 bp, synthetic construct
  misc_feature 1..1587: note = Variant of terminal deoxynucleotidyltransferase
  source 1..1587: mol_type = other DNA
atgcaccatcatcatcatcatggcggtagcggcagccacggcattcgtaccatcgattcggacttcgggaagaaacgccagaaaaaaatggataaccacgatagttccgccatctatgaaatcaaatttcacgagtttgtgctgttcattctcgaagaaaaaatgggtgcgacgcgtcgtacttttctgacagatttagcccgcaagaaagggttccgcgtcgagaatgaactgtcagacagcgttacccacatcgtggcagaaaataattcacgctctgaagtattggcttggctgaaagaacacaagatggagaagaccaagcaattcgaactgctggatattagctggcttatcgaaagcatgaaagttggtaaaccggtggacaccaaggggaaataccagttggcggaatcgggtgagatgagtgcgaacccagatccgacagagggtcgtgaaaacgagctgcctcctactatgaagaccgtttctccgtatgcgtgtcaacgccgcaccaccctgaacaaccataatcaacgttttacggacgcactggaaattcttgcggaaaattacgagttcaaacgcaacgatgatactgcgctggaatttcgtcgtgctatctccgtgctgaaaagccttccgtttgaggtacgtagcctgaaagacacggaaggattgccctggatcggtgatgaagtcaaagggattatggaagaaatcatcgaggtcggtgaatcgctggaagtgcaggccgtgctcaatgatgagtggtatcaaagcttcaaacgctttaagagtgtctttggagtgggggtggtgacagcagacaaatggtaccgtatgggtctgcgcacgctcgaggatgttcgttccagcaagaccctgaagttgaccccgatgcagaaagcgggtctgtgctattatgaagatcttgctcgcggcgttacgaaagccgaagctgacgcgatttctctgctggttcaggatgcagtcgcaactttcgacccggatgcgctggtggagattgtcggtggatttcgtcgtgggaaacctcagggtcacgacgttgatctgcttatcacatctccgggagctgagaaagagcaagaagaccagctcctgcagaaagtgaccaatctgtggaagaaacaagggttgttgctgtacggtcgtctggaatggagtcagtttgaagatgggaaactcccatccggtaaggctgatgccctggacgcgggtgcgaaatggtttctgatcctcaaactttatgatcataaagtggacaaaagcaaatgggaaatgccgacgggttcgaacatgggcgaggccaaaccgtggaaagcaattcgcgtagatctggttcgttgcccctacggcggttttgcgtttgcgttgttgcagtggaccggaagccgcatgttccgccgtgatctgcgctggtacgccactgacgagaagaacatgatgctggacaatcatgcgctgtatgacctgaccaagaaaatctttctcaaagctaaatcggaagaggaaattttcgcacatctggggcttgaatacctggaaccgttcgaacgtaacgca

SEQ ID NO: 2290 - protein, 529 aa, synthetic construct
  REGION 1..529: note = Variant of terminal deoxynucleotidyltransferase
MHHHHHHGGSGSHGIRTIDSDFGKKRQKKMDNHDSSAIYEIKFHEFVLFILEEKMGATRRTFLTDLARKKGFRVENELSDSVTHIVAENNSRSEVLAWLKEHKMEKTKQFELLDISWLIESMKVGKPVDTKGKYQLAESGEMSANPDPTEGRENELPPTMKTVSPYACQRRTTLNNHNQRFTDALEILAENYEFKRNDDTALEFRRAISVLKSLPFEVRSLKDTEGLPWIGDEVKGIMEEIIEVGESLEVQAVLNDEWYQSFKRFKSVFGVGVVTADKWYRMGLRTLEDVRSSKTLKLTPMQKAGLCYYEDLARGVTKAEADAISLLVQDAVATFDPDALVEIVGGFRRGKPQGHDVDLLITSPGAEKEQEDQLLQKVTNLWKKQGLLLYGRLEWSQFEDGKLPSGKADALDAGAKWFLILKLYDHKVDKSKWEMPTGSNMGEAKPWKAIRVDLVRCPYGGFAFALLQWTGSRMFRRDLRWYATDEKNMMLDNHALYDLTKKIFLKAKSEEEIFAHLGLEYLEPFERNA

SEQ ID NO: 2291 - DNA, 1587 bp, synthetic construct
  misc_feature 1..1587: note = Variant of terminal deoxynucleotidyltransferase
  source 1..1587: mol_type = other DNA
atgcaccatcatcatcatcatggcggtagcggcagccacggcattcgtaccatcgattcggacttcgggaagaaagcgaggaaaaaaatggataaccacgatagttccgccatctatgaaatcaaatttcacgagtttgtgctgttcattctcgaagaaaaaatgggtgcgacgcgtcgtacttttctgacagatttagcccgcaagaaagggttccgcgtcgagaatgaactgtcagacagcgttacccacatcgtggcagaaaataattcacgctctgaagtattggcttggctgaaagaacacaagatggagaagaccaagcaattcgaactgctggatattagctggcttatcgaaagcatgaaagttggtaaaccggtggacaccaaggggaaataccagttggcggaatcgggtgagatgagtgcgaacccagatccgacagagggtcgtgaaaacgagctgcctcctactatgaagaccgtttctccgtatgcgtgtcaacgccgcaccaccctgaacaaccataatcaacgttttacggacgcactggaaattcttgcggaaaattacgagttcaaacgcaacgatgatactgcgctggaatttcgtcgtgctatctccgtgctgaaaagccttccgtttgaggtacgtagcctgaaagacacggaaggattgccctggatcggtgatgaagtcaaagggattatggaagaaatcatcgaggtcggtgaatcgctggaagtgcaggccgtgctcaatgatgagtggtatcaaagcttcaaacgctttaagagtgtctttggagtgggggtgaagacagcagacaagtggtaccgtatgggtctgcgcacgctcgaggatgttcgttccagcaagaccctgaagttgaccccgatgcagaaagcgggtctgtgctattatgaagatcttgctcgcggcgttacgaaagccgaagctgacgcgatttctctgctggttcaggatgcagtcgcaactttcgacccggatgcgctggtggagattgtcggtggatttcgtcgtgggaaacctcagggtcacgacgttgatctgcttatcacatctccgggagctgagaaagagcaagaagaccagctcctgcagaaagtgaccaatctgtggaagaaacaagggttgttgctgtacggtcgtctggaatggagtcagtttgaagatgggaaactcccatccggtaaggctgatgccctggaccaccacgcgaaatgctttctgatcctcaaactttatgatcataaagtggacaaaagcaaatgggaaatgccgacgggttcgaacatgggcgaggccaaaccgtggaaagcaattcgcgtagatctggttcgttgcccctacggcggttttgcgtttgcgttgttgggttggaccggaagccgcatgttccgccgtgatctgcgctggtacgccactgacgagaagaacatgatgctggacaatcatgcgctgtatgacctgaccaagaaaatctttctcaaagctaaatcggaagaggaaattttcgcacatctggggcttgaatacctggaaccgttcgaacgtaacgca

SEQ ID NO: 2292 - protein, 529 aa, synthetic construct
  REGION 1..529: note = Variant of terminal deoxynucleotidyltransferase
MHHHHHHGGSGSHGIRTIDSDFGKKARKKMDNHDSSAIYEIKFHEFVLFILEEKMGATRRTFLTDLARKKGFRVENELSDSVTHIVAENNSRSEVLAWLKEHKMEKTKQFELLDISWLIESMKVGKPVDTKGKYQLAESGEMSANPDPTEGRENELPPTMKTVSPYACQRRTTLNNHNQRFTDALEILAENYEFKRNDDTALEFRRAISVLKSLPFEVRSLKDTEGLPWIGDEVKGIMEEIIEVGESLEVQAVLNDEWYQSFKRFKSVFGVGVKTADKWYRMGLRTLEDVRSSKTLKLTPMQKAGLCYYEDLARGVTKAEADAISLLVQDAVATFDPDALVEIVGGFRRGKPQGHDVDLLITSPGAEKEQEDQLLQKVTNLWKKQGLLLYGRLEWSQFEDGKLPSGKADALDHHAKCFLILKLYDHKVDKSKWEMPTGSNMGEAKPWKAIRVDLVRCPYGGFAFALLGWTGSRMFRRDLRWYATDEKNMMLDNHALYDLTKKIFLKAKSEEEIFAHLGLEYLEPFERNA

SEQ ID NO: 2293 - DNA, 1587 bp, synthetic construct
  misc_feature 1..1587: note = Variant of terminal deoxynucleotidyltransferase
  source 1..1587: mol_type = other DNA
atgcaccatcatcatcatcatggcggtagcggcagccacggcattcgtaccatcgattcggacttcgggaagaaagggcagaaaaaaatggataaccacgatagttccgccatctatgaaatcaaatttcacgagtttgtgctgttcattctcgaagaaaaaatgggtgcgacgcgtcgtacttttctgacagatttagcccgcaagaaagggttccgcgtcgagaatgaactgtcagacagcgttacccacatcgtggcagaaaataattcacgctctgaagtattggcttggctgaaagaacacaagatggagaagaccaagcaattcgaactgctggatattagctggcttatcgaaagcatgaaagttggtaaaccggtggacaccaaggggaaataccagttggcggaatcgggtgagatgagtgcgaacccagatccgacagagggtcgtgaaaacgagctgcctcctactatgaagaccgtttctccgtatgcgtgtcaacgccgcaccaccctgaacaaccataatcaacgttttacggacgcactggaaattcttgcggaaaattacgagttcaaacgcaacgatgatactgcgctggaatttcgtcgtgctatctccgtgctgaaaagccttccgtttgaggtacgtagcctgaaagacacggaaggattgccctggatcggtgatgaagtcaaagggattatggaagaaatcatcgaggtcggtgaatcgctggaagtgcaggccgtgctcaatgatgagtggtatcaaagcttcaaacgctttaagagtgtctttggagtgggggtgaagacagcagacaagtggtaccgtatgggtctgcgcacgctcgaggatgttcgttccagcaagaccctgaagttgaccccgatgcagaaagcgggtctgtgctattatgaagatcttgctcgcggcgttacgaaagccgaagctgacgcgatttctctgctggttcaggatgcagtcgcaactttcgacccggatgcgctggtggagattgtcggtggatttcgtcgtgggaaacctcagggtcacgacgttgatctgcttatcacatctccgggagctgagaaagagcaagaagaccagctcctgcagaaagtgaccaatctgtggaagaaacaagggttgttgctgtacggtcgtctggaatggagtcagtttgaagatgggaaactcccatccggtaaggctgatgccctggaccaccacgcgaaatgctttctgatcctcaaactttatgatcataaagtggacaaaagcaaatgggaaatgccgacgggttcgaacatgggcgaggccaaaccgtggaaagcaattcgcgtagatctggttcgttgcccctacggcggttttgcgtttgcgttgttgggttggaccggaagccgcatgttccgccgtgatctgcgctggtacgccactgacgagaagaacatgatgctggacaatcatgcgctgtatgacctgaccaagaaaatctttctcaaagctaaatcggaagaggaaattttcgcacatctggggcttgaatacctggaaccgttcgaacgtaacgca

SEQ ID NO: 2294 - protein, 529 aa, synthetic construct
  REGION 1..529: note = Variant of terminal deoxynucleotidyltransferase
MHHHHHHGGSGSHGIRTIDSDFGKKGQKKMDNHDSSAIYEIKFHEFVLFILEEKMGATRRTFLTDLARKKGFRVENELSDSVTHIVAENNSRSEVLAWLKEHKMEKTKQFELLDISWLIESMKVGKPVDTKGKYQLAESGEMSANPDPTEGRENELPPTMKTVSPYACQRRTTLNNHNQRFTDALEILAENYEFKRNDDTALEFRRAISVLKSLPFEVRSLKDTEGLPWIGDEVKGIMEEIIEVGESLEVQAVLNDEWYQSFKRFKSVFGVGVKTADKWYRMGLRTLEDVRSSKTLKLTPMQKAGLCYYEDLARGVTKAEADAISLLVQDAVATFDPDALVEIVGGFRRGKPQGHDVDLLITSPGAEKEQEDQLLQKVTNLWKKQGLLLYGRLEWSQFEDGKLPSGKADALDHHAKCFLILKLYDHKVDKSKWEMPTGSNMGEAKPWKAIRVDLVRCPYGGFAFALLGWTGSRMFRRDLRWYATDEKNMMLDNHALYDLTKKIFLKAKSEEEIFAHLGLEYLEPFERNA

SEQ ID NO: 2295 - DNA, 1587 bp, synthetic construct
  misc_feature 1..1587: note = Variant of terminal deoxynucleotidyltransferase
  source 1..1587: mol_type = other DNA
atgcaccatcatcatcatcatggcggtagcggcagccacggcattcgtaccatcgattcggacttcgggaagaaacgccagaaaaaaatggataaccacgatagttccgccatctatgaaatcaaatttcacgagtttgtgctgttcattctcgaagaaaaaatgggtgcgacgcgtcgtacttttctgacagatttagcccgcaagaaagggttccgcgtcgagaatgaactgtcagacagcgttacccacatcgtggcagaaaataattcacgctctgaagtattggcttggctgaaagaacacaagatggagaagaccaagcaattcgaactgctggatattagctggcttatcgaaagcatgaaagttggtaaaccggtggacaccaaggggaaataccagttggcggaatcgggtgagatgagtgcgaacccagatccgacagagggtcgtgaaaacgagctgcctcctactatgaagaccgtttctccgtatgcgtgtcaacgccgcaccaccctgaacaaccataatcaacgttttacggacgcactggaaattcttgcggaaaattacgagttcaaacgcaacgatgatactgcgctggaatttcgtcgtgctatctccgtgctgaaaagccttccgtttgaggtacgtagcctgaaagacacggaaggattgccctggatcggtgatgaagtcaaagggattatggaagaaatcatcgaggtcggtaattcgctggaagtgcaggccgtgctcaatgatgagtggtatcaaagcttcaaacgctttaagagtgtctttggagtgggggtgaagacagcagacaagtggtaccgtatgggtctgcgcacgctcgaggatgttcgttccagcaagaccctgaagttgaccccgatgcagaaagcgggtctgtgctattatgaagatcttgctcgcggcgttacgaaagccgaagctgacgcgatttctctgctggttcaggatgcagtcgcaactttcgacccggatgcgctggtggagattgtcggtggatttcgtcgtgggaaacctcagggtcacgacgttgatctgcttatcacatctccgggagctgagaaagagcaagaagaccagctcctgcagaaagtgaccaatctgtggaagaaacaagggttgttgctgtacggtcgtctggaatggagtcagtttgaagatgggaaactcccatccggtaaggctgatgccctggaccaccacgcgaaatgctttctgatcctcaaactttatgatcataaagtggacaaaagcaaatgggaaatgccgacgggttcgaacatgggcgaggccaaaccgtggaaagcaattcgcgtagatctggttcgttgcccctacggcggttttgcgtttgcgttgttgggttggaccggaagccgcatgttccgccgtgatctgcgctggtacgccactgacgagaagaacatgatgctggacaatcatgcgctgtatgacctgaccaagaaaatctttctcaaagctaaatcggaagaggaaattttcgcacatctggggcttgaatacctggaaccgttcgaacgtaacgca

SEQ ID NO: 2296 - protein, 529 aa, synthetic construct
  REGION 1..529: note = Variant of terminal deoxynucleotidyltransferase
MHHHHHHGGSGSHGIRTIDSDFGKKRQKKMDNHDSSAIYEIKFHEFVLFILEEKMGATRRTFLTDLARKKGFRVENELSDSVTHIVAENNSRSEVLAWLKEHKMEKTKQFELLDISWLIESMKVGKPVDTKGKYQLAESGEMSANPDPTEGRENELPPTMKTVSPYACQRRTTLNNHNQRFTDALEILAENYEFKRNDDTALEFRRAISVLKSLPFEVRSLKDTEGLPWIGDEVKGIMEEIIEVGNSLEVQAVLNDEWYQSFKRFKSVFGVGVKTADKWYRMGLRTLEDVRSSKTLKLTPMQKAGLCYYEDLARGVTKAEADAISLLVQDAVATFDPDALVEIVGGFRRGKPQGHDVDLLITSPGAEKEQEDQLLQKVTNLWKKQGLLLYGRLEWSQFEDGKLPSGKADALDHHAKCFLILKLYDHKVDKSKWEMPTGSNMGEAKPWKAIRVDLVRCPYGGFAFALLGWTGSRMFRRDLRWYATDEKNMMLDNHALYDLTKKIFLKAKSEEEIFAHLGLEYLEPFERNA

SEQ ID NO: 2297 - DNA, 1587 bp, synthetic construct
  misc_feature 1..1587: note = Variant of terminal deoxynucleotidyltransferase
  source 1..1587: mol_type = other DNA
atgcaccatcatcatcatcatggcggtagcggcagccacggcattcgtaccatcgattcggacttcgggaagaaacgccagaaaaaaatggataaccacgatagttccgccatctatgaaatcaaatttcacgagtttgtgctgttcattctcgaagaaaaaatgggtgcgacgcgtcgtacttttctgacagatttagcccgcaagaaagggttccgcgtcgagaatgaactgtcagacagcgttacccacatcgtggcagaaaataattcacgctctgaagtattggcttggctgaaagaacacaagatggagaagaccaagcaattcgaactgctggatattagctggcttatcgaaagcatgaaagttggtaaaccggtggacaccaaggggaaataccagttggcggaatcgggtgagatgagtgcgaacccagatccgacagagggtcgtgaaaacgagctgcctcctactatgaagaccgtttctccgtatgcgtgtcaacgccgcaccaccctgaacaaccataatcaacgttttacggacgcactggaaattcttgcggaaaattacgagttcaaacgcaacgatgatactgcgctggaatttcgtcgtgctatctccgtgctgaaaagccttccgtttgaggtacgtagcctgaaagacacggaaggattgccctggatcggtgatgaagtcaaagggattatggaagaaatcatcgaggtcggtgaatcgcgtgaagtgcaggccgtgctcaatgatgagtggtatcaaagcttcaaacgctttaagagtgtctttggagtgggggtgaagacagcagacaagtggtaccgtatgggtctgcgcacgctcgaggatgttcgttccagcaagaccctgaagttgaccccgatgcagaaagcgggtctgtgctattatgaagatcttgctcgcggcgttacgaaagccgaagctgacgcgatttctctgctggttcaggatgcagtcgcaactttcgacccggatgcgctggtggagattgtcggtggatttcgtcgtgggaaacctcagggtcacgacgttgatctgcttatcacatctccgggagctgagaaagagcaagaagaccagctcctgcagaaagtgaccaatctgtggaagaaacaagggttgttgctgtacggtcgtctggaatggagtcagtttgaagatgggaaactcccatccggtaaggctgatgccctggaccaccacgcgaaatgctttctgatcctcaaactttatgatcataaagtggacaaaagcaaatgggaaatgccgacgggttcgaacatgggcgaggccaaaccgtggaaagcaattcgcgtagatctggttcgttgcccctacggcggttttgcgtttgcgttgttgggttggaccggaagccgcatgttccgccgtgatctgcgctggtacgccactgacgagaagaacatgatgctggacaatcatgcgctgtatgacctgaccaagaaaatctttctcaaagctaaatcggaagaggaaattttcgcacatctggggcttgaatacctggaaccgttcgaacgtaacgca

SEQ ID NO: 2298 - protein, 529 aa, synthetic construct
  REGION 1..529: note = Variant of terminal deoxynucleotidyltransferase
MHHHHHHGGSGSHGIRTIDSDFGKKRQKKMDNHDSSAIYEIKFHEFVLFILEEKMGATRRTFLTDLARKKGFRVENELSDSVTHIVAENNSRSEVLAWLKEHKMEKTKQFELLDISWLIESMKVGKPVDTKGKYQLAESGEMSANPDPTEGRENELPPTMKTVSPYACQRRTTLNNHNQRFTDALEILAENYEFKRNDDTALEFRRAISVLKSLPFEVRSLKDTEGLPWIGDEVKGIMEEIIEVGESREVQAVLNDEWYQSFKRFKSVFGVGVKTADKWYRMGLRTLEDVRSSKTLKLTPMQKAGLCYYEDLARGVTKAEADAISLLVQDAVATFDPDALVEIVGGFRRGKPQGHDVDLLITSPGAEKEQEDQLLQKVTNLWKKQGLLLYGRLEWSQFEDGKLPSGKADALDHHAKCFLILKLYDHKVDKSKWEMPTGSNMGEAKPWKAIRVDLVRCPYGGFAFALLGWTGSRMFRRDLRWYATDEKNMMLDNHALYDLTKKIFLKAKSEEEIFAHLGLEYLEPFERNA

SEQ ID NO: 2299 - DNA, 1587 bp, synthetic construct
  misc_feature 1..1587: note = Variant of terminal deoxynucleotidyltransferase
  source 1..1587: mol_type = other DNA
atgcaccatcatcatcatcatggcggtagcggcagccacggcattcgtaccatcgattcggacttcgggaagaaaattcagaaaaaaatggataaccacgatagttccgccatctatgaaatcaaatttcacgagtttgtgctgttcattctcgaagaaaaaatgggtgcgacgcgtcgtacttttctgacagatttagcccgcaagaaagggttccgcgtcgagaatgaactgtcagacagcgttacccacatcgtggcagaaaataattcacgctctgaagtattggcttggctgaaagaacacaagatggagaagaccaagcaattcgaactgctggatattagctggcttatcgaaagcatgaaagttggtaaaccggtggacaccaaggggaaataccagttggcggaatcgggtgagatgagtgcgaacccagatccgacagagggtcgtgaaaacgagctgcctcctactatgaagaccgtttctccgtatgcgtgtcaacgccgcaccaccctgaacaaccataatcaacgttttacggacgcactggaaattcttgcggaaaattacgagttcaaacgcaacgatgatactgcgctggaatttcgtcgtgctatctccgtgctgaaaagccttccgtttgaggtacgtagcctgaaagacacggaaggattgccctggatcggtgatgaagtcaaagggattatggaagaaatcatcgaggtcggtgaatcgctggaagtgcaggccgtgctcaatgatgagtggtatcaaagcttcaaacgctttaagagtgtctttggagtgggggtgaagacagcagacaagtggtaccgtatgggtctgcgcacgctcgaggatgttcgttccagcaagaccctgaagttgaccccgatgcagaaagcgggtctgtgctattatgaagatcttgctcgcggcgttacgaaagccgaagctgacgcgatttctctgctggttcaggatgcagtcgcaactttcgacccggatgcgctggtggagattgtcggtggatttcgtcgtgggaaacctcagggtcacgacgttgatctgcttatcacatctccgggagctgagaaagagcaagaagaccagctcctgcagaaagtgaccaatctgtggaagaaacaagggttgttgctgtacggtcgtctggaatggagtcagtttgaagatgggaaactcccatccggtaaggctgatgccctggaccaccacgcgaaatgctttctgatcctcaaactttatgatcataaagtggacaaaagcaaatgggaaatgccgacgggttcgaacatgggcgaggccaaaccgtggaaagcaattcgcgtagatctggttcgttgcccctacggcggttttgcgtttgcgttgttgggttggaccggaagccgcatgttccgccgtgatctgcgctggtacgccactgacgagaagaacatgatgctggacaatcatgcgctgtatgacctgaccaagaaaatctttctcaaagctaaatcggaagaggaaattttcgcacatctggggcttgaatacctggaaccgttcgaacgtaacgca

SEQ ID NO: 2300 - protein, 529 aa, synthetic construct
  REGION 1..529: note = Variant of terminal deoxynucleotidyltransferase
MHHHHHHGGSGSHGIRTIDSDFGKKIQKKMDNHDSSAIYEIKFHEFVLFILEEKMGATRRTFLTDLARKKGFRVENELSDSVTHIVAENNSRSEVLAWLKEHKMEKTKQFELLDISWLIESMKVGKPVDTKGKYQLAESGEMSANPDPTEGRENELPPTMKTVSPYACQRRTTLNNHNQRFTDALEILAENYEFKRNDDTALEFRRAISVLKSLPFEVRSLKDTEGLPWIGDEVKGIMEEIIEVGESLEVQAVLNDEWYQSFKRFKSVFGVGVKTADKWYRMGLRTLEDVRSSKTLKLTPMQKAGLCYYEDLARGVTKAEADAISLLVQDAVATFDPDALVEIVGGFRRGKPQGHDVDLLITSPGAEKEQEDQLLQKVTNLWKKQGLLLYGRLEWSQFEDGKLPSGKADALDHHAKCFLILKLYDHKVDKSKWEMPTGSNMGEAKPWKAIRVDLVRCPYGGFAFALLGWTGSRMFRRDLRWYATDEKNMMLDNHALYDLTKKIFLKAKSEEEIFAHLGLEYLEPFERNA

SEQ ID NO: 2301 - DNA, 1587 bp, synthetic construct
  misc_feature 1..1587: note = Variant of terminal deoxynucleotidyltransferase
  source 1..1587: mol_type = other DNA
atgcaccatcatcatcatcatcctggtagcggcagccacggcattcgtaccatcgattcggacttcgggaagaaacgccagaaaaaaatggataaccacgatagttccgccatctatgaaatcaaatttcacgagtttgtgctgttcattctcgaagaaaaaatgggtgcgacgcgtcgtacttttctgacagatttagcccgcaagaaagggttccgcgtcgagaatgaactgtcagacagcgttacccacatcgtggcagaaaataattcacgctctgaagtattggcttggctgaaagaacacaagatggagaagaccaagcaattcgaactgctggatattagctggcttatcgaaagcatgaaagttggtaaaccggtggacaccaaggggaaataccagttggcggaatcgggtgagatgagtgcgaacccagatccgacagagggtcgtgaaaacgagctgcctcctactatgaagaccgtttctccgtatgcgtgtcaacgccgcaccaccctgaacaaccataatcaacgttttacggacgcactggaaattcttgcggaaaattacgagttcaaacgcaacgatgatactgcgctggaatttcgtcgtgctatctccgtgctgaaaagccttccgtttgaggtacgtagcctgaaagacacggaaggattgccctggatcggtgatgaagtcaaagggattatggaagaaatcatcgaggtcggtgaatcgctggaagtgcaggccgtgctcaatgatgagtggtatcaaagcttcaaacgctttaagagtgtctttggagtgggggtgaagacagcagacaagtggtaccgtatgggtctgcgcacgctcgaggatgttcgttccagcaagaccctgaagttgaccccgatgcagaaagcgggtctgtgctattatgaagatcttgctcgcggcgttacgaaagccgaagctgacgcgatttctctgctggttcaggatgcagtcgcaactttcgacccggatgcgctggtggagattgtcggtggatttcgtcgtgggaaacctcagggtcacgacgttgatctgcttatcacatctccgggagctgagaaagagcaagaagaccagctcctgcagaaagtgaccaatctgtggaagaaacaagggttgttgctgtacggtcgtctggaatggagtcagtttgaagatgggaaactcccatccggtaaggctgatgccctggaccaccacgcgaaatgctttctgatcctcaaactttatgatcataaagtggacaaaagcaaatgggaaatgccgacgggttcgaacatgggcgaggccaaaccgtggaaagcaattcgcgtagatctggttcgttgcccctacggcggttttgcgtttgcgttgttgggttggaccggaagccgcatgttccgccgtgatctgcgctggtacgccactgacgagaagaacatgatgctggacaatcatgcgctgtatgacctgaccaagaaaatctttctcaaagctaaatcggaagaggaaattttcgcacatctggggcttgaatacctggaaccgttcgaacgtaacgca

SEQ ID NO: 2302 - protein, 529 aa, synthetic construct
  REGION 1..529: note = Variant of terminal deoxynucleotidyltransferase
MHHHHHHPGSGSHGIRTIDSDFGKKRQKKMDNHDSSAIYEIKFHEFVLFILEEKMGATRRTFLTDLARKKGFRVENELSDSVTHIVAENNSRSEVLAWLKEHKMEKTKQFELLDISWLIESMKVGKPVDTKGKYQLAESGEMSANPDPTEGRENELPPTMKTVSPYACQRRTTLNNHNQRFTDALEILAENYEFKRNDDTALEFRRAISVLKSLPFEVRSLKDTEGLPWIGDEVKGIMEEIIEVGESLEVQAVLNDEWYQSFKRFKSVFGVGVKTADKWYRMGLRTLEDVRSSKTLKLTPMQKAGLCYYEDLARGVTKAEADAISLLVQDAVATFDPDALVEIVGGFRRGKPQGHDVDLLITSPGAEKEQEDQLLQKVTNLWKKQGLLLYGRLEWSQFEDGKLPSGKADALDHHAKCFLILKLYDHKVDKSKWEMPTGSNMGEAKPWKAIRVDLVRCPYGGFAFALLGWTGSRMFRRDLRWYATDEKNMMLDNHALYDLTKKIFLKAKSEEEIFAHLGLEYLEPFERNA

SEQ ID NO: 2303 - DNA, 1587 bp, synthetic construct
  misc_feature 1..1587: note = Variant of terminal deoxynucleotidyltransferase
  source 1..1587: mol_type = other DNA
atgcacgggcatcatcatcatggcggtagcggcagccacggcattcgtaccatcgattcggacttcgggaagaaacgccagaaaaaaatggataaccacgatagttccgccatctatgaaatcaaatttcacgagtttgtgctgttcattctcgaagaaaaaatgggtgcgacgcgtcgtacttttctgacagatttagcccgcaagaaagggttccgcgtcgagaatgaactgtcagacagcgttacccacatcgtggcagaaaataattcacgctctgaagtattggcttggctgaaagaacacaagatggagaagaccaagcaattcgaactgctggatattagctggcttatcgaaagcatgaaagttggtaaaccggtggacaccaaggggaaataccagttggcggaatcgggtgagatgagtgcgaacccagatccgacagagggtcgtgaaaacgagctgcctcctactatgaagaccgtttctccgtatgcgtgtcaacgccgcaccaccctgaacaaccataatcaacgttttacggacgcactggaaattcttgcggaaaattacgagttcaaacgcaacgatgatactgcgctggaatttcgtcgtgctatctccgtgctgaaaagccttccgtttgaggtacgtagcctgaaagacacggaaggattgccctggatcggtgatgaagtcaaagggattatggaagaaatcatcgaggtcggtgaatcgctggaagtgcaggccgtgctcaatgatgagtggtatcaaagcttcaaacgctttaagagtgtctttggagtgggggtgaagacagcagacaagtggtaccgtatgggtctgcgcacgctcgaggatgttcgttccagcaagaccctgaagttgaccccgatgcagaaagcgggtctgtgctattatgaagatcttgctcgcggcgttacgaaagccgaagctgacgcgatttctctgctggttcaggatgcagtcgcaactttcgacccggatgcgctggtggagattgtcggtggatttcgtcgtgggaaacctcagggtcacgacgttgatctgcttatcacatctccgggagctgagaaagagcaagaagaccagctcctgcagaaagtgaccaatctgtggaagaaacaagggttgttgctgtacggtcgtctggaatggagtcagtttgaagatgggaaactcccatccggtaaggctgatgccctggaccaccacgcgaaatgctttctgatcctcaaactttatgatcataaagtggacaaaagcaaatgggaaatgccgacgggttcgaacatgggcgaggccaaaccgtggaaagcaattcgcgtagatctggttcgttgcccctacggcggttttgcgtttgcgttgttgggttggaccggaagccgcatgttccgccgtgatctgcgctggtacgccactgacgagaagaacatgatgctggacaatcatgcgctgtatgacctgaccaagaaaatctttctcaaagctaaatcggaagaggaaattttcgcacatctggggcttgaatacctggaaccgttcgaacgtaacgca

SEQ ID NO: 2304 - protein, 529 aa, synthetic construct
  REGION 1..529: note = Variant of terminal deoxynucleotidyltransferase
MHGHHHHGGSGSHGIRTIDSDFGKKRQKKMDNHDSSAIYEIKFHEFVLFILEEKMGATRRTFLTDLARKKGFRVENELSDSVTHIVAENNSRSEVLAWLKEHKMEKTKQFELLDISWLIESMKVGKPVDTKGKYQLAESGEMSANPDPTEGRENELPPTMKTVSPYACQRRTTLNNHNQRFTDALEILAENYEFKRNDDTALEFRRAISVLKSLPFEVRSLKDTEGLPWIGDEVKGIMEEIIEVGESLEVQAVLNDEWYQSFKRFKSVFGVGVKTADKWYRMGLRTLEDVRSSKTLKLTPMQKAGLCYYEDLARGVTKAEADAISLLVQDAVATFDPDALVEIVGGFRRGKPQGHDVDLLITSPGAEKEQEDQLLQKVTNLWKKQGLLLYGRLEWSQFEDGKLPSGKADALDHHAKCFLILKLYDHKVDKSKWEMPTGSNMGEAKPWKAIRVDLVRCPYGGFAFALLGWTGSRMFRRDLRWYATDEKNMMLDNHALYDLTKKIFLKAKSEEEIFAHLGLEYLEPFERNA

SEQ ID NO: 2305 - DNA, 1587 bp, synthetic construct
  misc_feature 1..1587: note = Variant of terminal deoxynucleotidyltransferase
  source 1..1587: mol_type = other DNA
atgcaccatcatcatcatcatggcggtagcggcagccacggcattcgtaccatcgattcggacttcgggaagaaacgccagaaaaaaatggataaccacgatagtggggccatctatgaaatcaaatttcacgagtttgtgctgttcattctcgaagaaaaaatgggtgcgacgcgtcgtacttttctgacagatttagcccgcaagaaagggttccgcgtcgagaatgaactgtcagacagcgttacccacatcgtggcagaaaataattcacgctctgaagtattggcttggctgaaagaacacaagatggagaagaccaagcaattcgaactgctggatattagctggcttatcgaaagcatgaaagttggtaaaccggtggacaccaaggggaaataccagttggcggaatcgggtgagatgagtgcgaacccagatccgacagagggtcgtgaaaacgagctgcctcctactatgaagaccgtttctccgtatgcgtgtcaacgccgcaccaccctgaacaaccataatcaacgttttacggacgcactggaaattcttgcggaaaattacgagttcaaacgcaacgatgatactgcgctggaatttcgtcgtgctatctccgtgctgaaaagccttccgtttgaggtacgtagcctgaaagacacggaaggattgccctggatcggtgatgaagtcaaagggattatggaagaaatcatcgaggtcggtgaatcgctggaagtgcaggccgtgctcaatgatgagtggtatcaaagcttcaaacgctttaagagtgtctttggagtgggggtgaagacagcagacaagtggtaccgtatgggtctgcgcacgctcgaggatgttcgttccagcaagaccctgaagttgaccccgatgcagaaagcgggtctgtgctattatgaagatcttgctcgcggcgttacgaaagccgaagctgacgcgatttctctgctggttcaggatgcagtcgcaactttcgacccggatgcgctggtggagattgtcggtggatttcgtcgtgggaaacctcagggtcacgacgttgatctgcttatcacatctccgggagctgagaaagagcaagaagaccagctcctgcagaaagtgaccaatctgtggaagaaacaagggttgttgctgtacggtcgtctggaatggagtcagtttgaagatgggaaactcccatccggtaaggctgatgccctggaccaccacgcgaaatgctttctgatcctcaaactttatgatcataaagtggacaaaagcaaatgggaaatgccgacgggttcgaacatgggcgaggccaaaccgtggaaagcaattcgcgtagatctggttcgttgcccctacggcggttttgcgtttgcgttgttgggttggaccggaagccgcatgttccgccgtgatctgcgctggtacgccactgacgagaagaacatgatgctggacaatcatgcgctgtatgacctgaccaagaaaatctttctcaaagctaaatcggaagaggaaattttcgcacatctggggcttgaatacctggaaccgttcgaacgtaacgca

SEQ ID NO: 2306 - protein, 529 aa, synthetic construct
  REGION 1..529: note = Variant of terminal deoxynucleotidyltransferase
MHHHHHHGGSGSHGIRTIDSDFGKKRQKKMDNHDSGAIYEIKFHEFVLFILEEKMGATRRTFLTDLARKKGFRVENELSDSVTHIVAENNSRSEVLAWLKEHKMEKTKQFELLDISWLIESMKVGKPVDTKGKYQLAESGEMSANPDPTEGRENELPPTMKTVSPYACQRRTTLNNHNQRFTDALEILAENYEFKRNDDTALEFRRAISVLKSLPFEVRSLKDTEGLPWIGDEVKGIMEEIIEVGESLEVQAVLNDEWYQSFKRFKSVFGVGVKTADKWYRMGLRTLEDVRSSKTLKLTPMQKAGLCYYEDLARGVTKAEADAISLLVQDAVATFDPDALVEIVGGFRRGKPQGHDVDLLITSPGAEKEQEDQLLQKVTNLWKKQGLLLYGRLEWSQFEDGKLPSGKADALDHHAKCFLILKLYDHKVDKSKWEMPTGSNMGEAKPWKAIRVDLVRCPYGGFAFALLGWTGSRMFRRDLRWYATDEKNMMLDNHALYDLTKKIFLKAKSEEEIFAHLGLEYLEPFERNA

SEQ ID NO: 2307 - DNA, 1587 bp, synthetic construct
  misc_feature 1..1587: note = Variant of terminal deoxynucleotidyltransferase
  source 1..1587: mol_type = other DNA
atgcaccatcatcatcatcatggcggtagcggcagccacggcattcgtaccatcgattcggacttcgggaagaaacagcagaaaaaaatggataaccacgatagttccgccatctatgaaatcaaatttcacgagtttgtgctgttcattctcgaagaaaaaatgggtgcgacgcgtcgtacttttctgacagatttagcccgcaagaaagggttccgcgtcgagaatgaactgtcagacagcgttacccacatcgtggcagaaaataattcacgctctgaagtattggcttggctgaaagaacacaagatggagaagaccaagcaattcgaactgctggatattagctggcttatcgaaagcatgaaagttggtaaaccggtggacaccaaggggaaataccagttggcggaatcgggtgagatgagtgcgaacccagatccgacagagggtcgtgaaaacgagctgcctcctactatgaagaccgtttctccgtatgcgtgtcaacgccgcaccaccctgaacaaccataatcaacgttttacggacgcactggaaattcttgcggaaaattacgagttcaaacgcaacgatgatactgcgctggaatttcgtcgtgctatctccgtgctgaaaagccttccgtttgaggtacgtagcctgaaagacacggaaggattgccctggatcggtgatgaagtcaaagggattatggaagaaatcatcgaggtcggtgaatcgctggaagtgcaggccgtgctcaatgatgagtggtatcaaagcttcaaacgctttaagagtgtctttggagtgggggtgaagacagcagacaagtggtaccgtatgggtctgcgcacgctcgaggatgttcgttccagcaagaccctgaagttgaccccgatgcagaaagcgggtctgtgctattatgaagatcttgctcgcggcgttacgaaagccgaagctgacgcgatttctctgctggttcaggatgcagtcgcaactttcgacccggatgcgctggtggagattgtcggtggatttcgtcgtgggaaacctcagggtcacgacgttgatctgcttatcacatctccgggagctgagaaagagcaagaagaccagctcctgcagaaagtgaccaatctgtggaagaaacaagggttgttgctgtacggtcgtctggaatggagtcagtttgaagatgggaaactcccatccggtaaggctgatgccctggaccaccacgcgaaatgctttctgatcctcaaactttatgatcataaagtggacaaaagcaaatgggaaatgccgacgggttcgaacatgggcgaggccaaaccgtggaaagcaattcgcgtagatctggttcgttgcccctacggcggttttgcgtttgcgttgttgggttggaccggaagccgcatgttccgccgtgatctgcgctggtacgccactgacgagaagaacatgatgctggacaatcatgcgctgtatgacctgaccaagaaaatctttctcaaagctaaatcggaagaggaaattttcgcacatctggggcttgaatacctggaaccgttcgaacgtaacgca

SEQ ID NO: 2308 - protein, 529 aa, synthetic construct
  REGION 1..529: note = Variant of terminal deoxynucleotidyltransferase
MHHHHHHGGSGSHGIRTIDSDFGKKQQKKMDNHDSSAIYEIKFHEFVLFILEEKMGATRRTFLTDLARKKGFRVENELSDSVTHIVAENNSRSEVLAWLKEHKMEKTKQFELLDISWLIESMKVGKPVDTKGKYQLAESGEMSANPDPTEGRENELPPTMKTVSPYACQRRTTLNNHNQRFTDALEILAENYEFKRNDDTALEFRRAISVLKSLPFEVRSLKDTEGLPWIGDEVKGIMEEIIEVGESLEVQAVLNDEWYQSFKRFKSVFGVGVKTADKWYRMGLRTLEDVRSSKTLKLTPMQKAGLCYYEDLARGVTKAEADAISLLVQDAVATFDPDALVEIVGGFRRGKPQGHDVDLLITSPGAEKEQEDQLLQKVTNLWKKQGLLLYGRLEWSQFEDGKLPSGKADALDHHAKCFLILKLYDHKVDKSKWEMPTGSNMGEAKPWKAIRVDLVRCPYGGFAFALLGWTGSRMFRRDLRWYATDEKNMMLDNHALYDLTKKIFLKAKSEEEIFAHLGLEYLEPFERNA

SEQ ID NO: 2309 - DNA, 1587 bp, synthetic construct
  misc_feature 1..1587: note = Variant of terminal deoxynucleotidyltransferase
  source 1..1587: mol_type = other DNA
atgcaccatcatcatcatcatggcggtagcggcagccacggcattcgtaccatcgattcggacttcgggaagaaacgccagaaaaaaatggataaccacgatagttccgccatctatgaaatcaaatttcacgagtttgtgctgttcattctcgaagaaaaaatgggtgcgaatcgtcgtacttttctgacagatttagcccgcaagaaagggttccgcgtcgagaatgaactgtcagacagcgttacccacatcgtggcagaaaataattcacgctctgaagtattggcttggctgaaagaacacaagatggagaagaccaagcaattcgaactgctggatattagctggcttatcgaaagcatgaaagttggtaaaccggtggacaccaaggggaaataccagttggcggaatcgggtgagatgagtgcgaacccagatccgacagagggtcgtgaaaacgagctgcctcctactatgaagaccgtttctccgtatgcgtgtcaacgccgcaccaccctgaacaaccataatcaacgttttacggacgcactggaaattcttgcggaaaattacgagttcaaacgcaacgatgatactgcgctggaatttcgtcgtgctatctccgtgctgaaaagccttccgtttgaggtacgtagcctgaaagacacggaaggattgccctggatcggtgatgaagtcaaagggattatggaagaaatcatcgaggtcggtgaatcgctggaagtgcaggccgtgctcaatgatgagtggtatcaaagcttcaaacgctttaagagtgtctttggagtgggggtgaagacagcagacaagtggtaccgtatgggtctgcgcacgctcgaggatgttcgttccagcaagaccctgaagttgaccccgatgcagaaagcgggtctgtgctattatgaagatcttgctcgcggcgttacgaaagccgaagctgacgcgatttctctgctggttcaggatgcagtcgcaactttcgacccggatgcgctggtggagattgtcggtggatttcgtcgtgggaaacctcagggtcacgacgttgatctgcttatcacatctccgggagctgagaaagagcaagaagaccagctcctgcagaaagtgaccaatctgtggaagaaacaagggttgttgctgtacggtcgtctggaatggagtcagtttgaagatgggaaactcccatccggtaaggctgatgccctggaccaccacgcgaaatgctttctgatcctcaaactttatgatcataaagtggacaaaagcaaatgggaaatgccgacgggttcgaacatgggcgaggccaaaccgtggaaagcaattcgcgtagatctggttcgttgcccctacggcggttttgcgtttgcgttgttgggttggaccggaagccgcatgttccgccgtgatctgcgctggtacgccactgacgagaagaacatgatgctggacaatcatgcgctgtatgacctgaccaagaaaatctttctcaaagctaaatcggaagaggaaattttcgcacatctggggcttgaatacctggaaccgttcgaacgtaacgca

SEQ ID NO: 2310 - protein, 529 aa, synthetic construct
  REGION 1..529: note = Variant of terminal deoxynucleotidyltransferase
MHHHHHHGGSGSHGIRTIDSDFGKKRQKKMDNHDSSAIYEIKFHEFVLFILEEKMGANRRTFLTDLARKKGFRVENELSDSVTHIVAENNSRSEVLAWLKEHKMEKTKQFELLDISWLIESMKVGKPVDTKGKYQLAESGEMSANPDPTEGRENELPPTMKTVSPYACQRRTTLNNHNQRFTDALEILAENYEFKRNDDTALEFRRAISVLKSLPFEVRSLKDTEGLPWIGDEVKGIMEEIIEVGESLEVQAVLNDEWYQSFKRFKSVFGVGVKTADKWYRMGLRTLEDVRSSKTLKLTPMQKAGLCYYEDLARGVTKAEADAISLLVQDAVATFDPDALVEIVGGFRRGKPQGHDVDLLITSPGAEKEQEDQLLQKVTNLWKKQGLLLYGRLEWSQFEDGKLPSGKADALDHHAKCFLILKLYDHKVDKSKWEMPTGSNMGEAKPWKAIRVDLVRCPYGGFAFALLGWTGSRMFRRDLRWYATDEKNMMLDNHALYDLTKKIFLKAKSEEEIFAHLGLEYLEPFERNA

SEQ ID NO: 2311 - DNA, 1587 bp, synthetic construct
  misc_feature 1..1587: note = Variant of terminal deoxynucleotidyltransferase
  source 1..1587: mol_type = other DNA
atgcaccatcatcatcatcatggcggtagcggcagccacggcattcgtaccatcgattcggacttcgggaagaaacgccagaaaaaaatggataaccacgatagttccgccatctatgaaatcaaatttcacgagtttgtgctgttcattctcgaagaaaaaatgggtgcgacgcgtcgtacttttctgacagatttagcccgcaagaaagggttccgcgtcgagccggaactgtcagacagcgttacccacatcgtggcagaaaataattcacgctctgaagtattggcttggctgaaagaacacaagatggagaagaccaagcaattcgaactgctggatattagctggcttatcgaaagcatgaaagttggtaaaccggtggacaccaaggggaaataccagttggcggaatcgggtgagatgagtgcgaacccagatccgacagagggtcgtgaaaacgagctgcctcctactatgaagaccgtttctccgtatgcgtgtcaacgccgcaccaccctgaacaaccataatcaacgttttacggacgcactggaaattcttgcggaaaattacgagttcaaacgcaacgatgatactgcgctggaatttcgtcgtgctatctccgtgctgaaaagccttccgtttgaggtacgtagcctgaaagacacggaaggattgccctggatcggtgatgaagtcaaagggattatggaagaaatcatcgaggtcggtgaatcgctggaagtgcaggccgtgctcaatgatgagtggtatcaaagcttcaaacgctttaagagtgtctttggagtgggggtgaagacagcagacaagtggtaccgtatgggtctgcgcacgctcgaggatgttcgttccagcaagaccctgaagttgaccccgatgcagaaagcgggtctgtgctattatgaagatcttgctcgcggcgttacgaaagccgaagctgacgcgatttctctgctggttcaggatgcagtcgcaactttcgacccggatgcgctggtggagattgtcggtggatttcgtcgtgggaaacctcagggtcacgacgttgatctgcttatcacatctccgggagctgagaaagagcaagaagaccagctcctgcagaaagtgaccaatctgtggaagaaacaagggttgttgctgtacggtcgtctggaatggagtcagtttgaagatgggaaactcccatccggtaaggctgatgccctggaccaccacgcgaaatgctttctgatcctcaaactttatgatcataaagtggacaaaagcaaatgggaaatgccgacgggttcgaacatgggcgaggccaaaccgtggaaagcaattcgcgtagatctggttcgttgcccctacggcggttttgcgtttgcgttgttgggttggaccggaagccgcatgttccgccgtgatctgcgctggtacgccactgacgagaagaacatgatgctggacaatcatgcgctgtatgacctgaccaagaaaatctttctcaaagctaaatcggaagaggaaattttcgcacatctggggcttgaatacctggaaccgttcgaacgtaacgca

SEQ ID NO: 2312 - protein, 529 aa, synthetic construct
  REGION 1..529: note = Variant of terminal deoxynucleotidyltransferase
MHHHHHHGGSGSHGIRTIDSDFGKKRQKKMDNHDSSAIYEIKFHEFVLFILEEKMGATRRTFLTDLARKKGFRVEPELSDSVTHIVAENNSRSEVLAWLKEHKMEKTKQFELLDISWLIESMKVGKPVDTKGKYQLAESGEMSANPDPTEGRENELPPTMKTVSPYACQRRTTLNNHNQRFTDALEILAENYEFKRNDDTALEFRRAISVLKSLPFEVRSLKDTEGLPWIGDEVKGIMEEIIEVGESLEVQAVLNDEWYQSFKRFKSVFGVGVKTADKWYRMGLRTLEDVRSSKTLKLTPMQKAGLCYYEDLARGVTKAEADAISLLVQDAVATFDPDALVEIVGGFRRGKPQGHDVDLLITSPGAEKEQEDQLLQKVTNLWKKQGLLLYGRLEWSQFEDGKLPSGKADALDHHAKCFLILKLYDHKVDKSKWEMPTGSNMGEAKPWKAIRVDLVRCPYGGFAFALLGWTGSRMFRRDLRWYATDEKNMMLDNHALYDLTKKIFLKAKSEEEIFAHLGLEYLEPFERNA

SEQ ID NO: 2313 - DNA, 1587 bp, synthetic construct
  misc_feature 1..1587: note = Variant of terminal deoxynucleotidyltransferase
  source 1..1587: mol_type = other DNA
atgcaccatcatcatcatcatggcggtagcggcagccacggcattcgtaccatcgattcggacttcgggaagaaaacgcagaaaaaaatggataaccacgatagttccgccatctatgaaatcaaatttcacgagtttgtgctgttcattctcgaagaaaaaatgggtgcgacgcgtcgtacttttctgacagatttagcccgcaagaaagggttccgcgtcgagaatgaactgtcagacagcgttacccacatcgtggcagaaaataattcacgctctgaagtattggcttggctgaaagaacacaagatggagaagaccaagcaattcgaactgctggatattagctggcttatcgaaagcatgaaagttggtaaaccggtggacaccaaggggaaataccagttggcggaatcgggtgagatgagtgcgaacccagatccgacagagggtcgtgaaaacgagctgcctcctactatgaagaccgtttctccgtatgcgtgtcaacgccgcaccaccctgaacaaccataatcaacgttttacggacgcactggaaattcttgcggaaaattacgagttcaaacgcaacgatgatactgcgctggaatttcgtcgtgctatctccgtgctgaaaagccttccgtttgaggtacgtagcctgaaagacacggaaggattgccctggatcggtgatgaagtcaaagggattatggaagaaatcatcgaggtcggtgaatcgctggaagtgcaggccgtgctcaatgatgagtggtatcaaagcttcaaacgctttaagagtgtctttggagtgggggtgaagacagcagacaagtggtaccgtatgggtctgcgcacgctcgaggatgttcgttccagcaagaccctgaagttgaccccgatgcagaaagcgggtctgtgctattatgaagatcttgctcgcggcgttacgaaagccgaagctgacgcgatttctctgctggttcaggatgcagtcgcaactttcgacccggatgcgctggtggagattgtcggtggatttcgtcgtgggaaacctcagggtcacgacgttgatctgcttatcacatctccgggagctgagaaagagcaagaagaccagctcctgcagaaagtgaccaatctgtggaagaaacaagggttgttgctgtacggtcgtctggaatggagtcagtttgaagatgggaaactcccatccggtaaggctgatgccctggaccaccacgcgaaatgctttctgatcctcaaactttatgatcataaagtggacaaaagcaaatgggaaatgccgacgggttcgaacatgggcgaggccaaaccgtggaaagcaattcgcgtagatctggttcgttgcccctacggcggttttgcgtttgcgttgttgggttggaccggaagccgcatgttccgccgtgatctgcgctggtacgccactgacgagaagaacatgatgctggacaatcatgcgctgtatgacctgaccaagaaaatctttctcaaagctaaatcggaagaggaaattttcgcacatctggggcttgaatacctggaaccgttcgaacgtaacgca

SEQ ID NO: 2314 - protein, 529 aa, synthetic construct
  REGION 1..529: note = Variant of terminal deoxynucleotidyltransferase
MHHHHHHGGSGSHGIRTIDSDFGKKTQKKMDNHDSSAIYEIKFHEFVLFILEEKMGATRRTFLTDLARKKGFRVENELSDSVTHIVAENNSRSEVLAWLKEHKMEKTKQFELLDISWLIESMKVGKPVDTKGKYQLAESGEMSANPDPTEGRENELPPTMKTVSPYACQRRTTLNNHNQRFTDALEILAENYEFKRNDDTALEFRRAISVLKSLPFEVRSLKDTEGLPWIGDEVKGIMEEIIEVGESLEVQAVLNDEWYQSFKRFKSVFGVGVKTADKWYRMGLRTLEDVRSSKTLKLTPMQKAGLCYYEDLARGVTKAEADAISLLVQDAVATFDPDALVEIVGGFRRGKPQGHDVDLLITSPGAEKEQEDQLLQKVTNLWKKQGLLLYGRLEWSQFEDGKLPSGKADALDHHAKCFLILKLYDHKVDKSKWEMPTGSNMGEAKPWKAIRVDLVRCPYGGFAFALLGWTGSRMFRRDLRWYATDEKNMMLDNHALYDLTKKIFLKAKSEEEIFAHLGLEYLEPFERNA

SEQ ID NO: 2315 - DNA, 1587 bp, synthetic construct
  misc_feature 1..1587: note = Variant of terminal deoxynucleotidyltransferase
  source 1..1587: mol_type = other DNA
atgcaccatcatcatcatcatggcggtagcggcagccacggcattcgtaccatcgattcggacttcgggaagaaacgccagaaaaaaatggataaccacgatagttccgccatctatgaaatcaaatttcacgagtttgtgctgttcattctcgaagaaaaaatgggtgcgatgcgtcgtacttttctgacagatttagcccgcaagaaagggttccgcgtcgagaatgaactgtcagacagcgttacccacatcgtggcagaaaataattcacgctctgaagtattggcttggctgaaagaacacaagatggagaagaccaagcaattcgaactgctggatattagctggcttatcgaaagcatgaaagttggtaaaccggtggacaccaaggggaaataccagttggcggaatcgggtgagatgagtgcgaacccagatccgacagagggtcgtgaaaacgagctgcctcctactatgaagaccgtttctccgtatgcgtgtcaacgccgcaccaccctgaacaaccataatcaacgttttacggacgcactggaaattcttgcggaaaattacgagttcaaacgcaacgatgatactgcgctggaatttcgtcgtgctatctccgtgctgaaaagccttccgtttgaggtacgtagcctgaaagacacggaaggattgccctggatcggtgatgaagtcaaagggattatggaagaaatcatcgaggtcggtgaatcgctggaagtgcaggccgtgctcaatgatgagtggtatcaaagcttcaaacgctttaagagtgtctttggagtgggggtgaagacagcagacaagtggtaccgtatgggtctgcgcacgctcgaggatgttcgttccagcaagaccctgaagttgaccccgatgcagaaagcgggtctgtgctattatgaagatcttgctcgcggcgttacgaaagccgaagctgacgcgatttctctgctggttcaggatgcagtcgcaactttcgacccggatgcgctggtggagattgtcggtggatttcgtcgtgggaaacctcagggtcacgacgttgatctgcttatcacatctccgggagctgagaaagagcaagaagaccagctcctgcagaaagtgaccaatctgtggaagaaacaagggttgttgctgtacggtcgtctggaatggagtcagtttgaagatgggaaactcccatccggtaaggctgatgccctggaccaccacgcgaaatgctttctgatcctcaaactttatgatcataaagtggacaaaagcaaatgggaaatgccgacgggttcgaacatgggcgaggccaaaccgtggaaagcaattcgcgtagatctggttcgttgcccctacggcggttttgcgtttgcgttgttgggttggaccggaagccgcatgttccgccgtgatctgcgctggtacgccactgacgagaagaacatgatgctggacaatcatgcgctgtatgacctgaccaagaaaatctttctcaaagctaaatcggaagaggaaattttcgcacatctggggcttgaatacctggaaccgttcgaacgtaacgca

SEQ ID NO: 2316 - protein, 529 aa, synthetic construct
  REGION 1..529: note = Variant of terminal deoxynucleotidyltransferase
MHHHHHHGGSGSHGIRTIDSDFGKKRQKKMDNHDSSAIYEIKFHEFVLFILEEKMGAMRRTFLTDLARKKGFRVENELSDSVTHIVAENNSRSEVLAWLKEHKMEKTKQFELLDISWLIESMKVGKPVDTKGKYQLAESGEMSANPDPTEGRENELPPTMKTVSPYACQRRTTLNNHNQRFTDALEILAENYEFKRNDDTALEFRRAISVLKSLPFEVRSLKDTEGLPWIGDEVKGIMEEIIEVGESLEVQAVLNDEWYQSFKRFKSVFGVGVKTADKWYRMGLRTLEDVRSSKTLKLTPMQKAGLCYYEDLARGVTKAEADAISLLVQDAVATFDPDALVEIVGGFRRGKPQGHDVDLLITSPGAEKEQEDQLLQKVTNLWKKQGLLLYGRLEWSQFEDGKLPSGKADALDHHAKCFLILKLYDHKVDKSKWEMPTGSNMGEAKPWKAIRVDLVRCPYGGFAFALLGWTGSRMFRRDLRWYATDEKNMMLDNHALYDLTKKIFLKAKSEEEIFAHLGLEYLEPFERNA

SEQ ID NO: 2317 - DNA, 1587 bp, synthetic construct
  misc_feature 1..1587: note = Variant of terminal deoxynucleotidyltransferase
  source 1..1587: mol_type = other DNA
atgcaccatcatcatcatcatggcggtagcggcagccacggcattcgtaccatcgattcggacttcgggaagaaacgccagaaaaaaatggataaccacgatagtaaggccatctatgaaatcaaatttcacgagtttgtgctgttcattctcgaagaaaaaatgggtgcgacgcgtcgtacttttctgacagatttagcccgcaagaaagggttccgcgtcgagaatgaactgtcagacagcgttacccacatcgtggcagaaaataattcacgctctgaagtattggcttggctgaaagaacacaagatggagaagaccaagcaattcgaactgctggatattagctggcttatcgaaagcatgaaagttggtaaaccggtggacaccaaggggaaataccagttggcggaatcgggtgagatgagtgcgaacccagatccgacagagggtcgtgaaaacgagctgcctcctactatgaagaccgtttctccgtatgcgtgtcaacgccgcaccaccctgaacaaccataatcaacgttttacggacgcactggaaattcttgcggaaaattacgagttcaaacgcaacgatgatactgcgctggaatttcgtcgtgctatctccgtgctgaaaagccttccgtttgaggtacgtagcctgaaagacacggaaggattgccctggatcggtgatgaagtcaaagggattatggaagaaatcatcgaggtcggtgaatcgctggaagtgcaggccgtgctcaatgatgagtggtatcaaagcttcaaacgctttaagagtgtctttggagtgggggtgaagacagcagacaagtggtaccgtatgggtctgcgcacgctcgaggatgttcgttccagcaagaccctgaagttgaccccgatgcagaaagcgggtctgtgctattatgaagatcttgctcgcggcgttacgaaagccgaagctgacgcgatttctctgctggttcaggatgcagtcgcaactttcgacccggatgcgctggtggagattgtcggtggatttcgtcgtgggaaacctcagggtcacgacgttgatctgcttatcacatctccgggagctgagaaagagcaagaagaccagctcctgcagaaagtgaccaatctgtggaagaaacaagggttgttgctgtacggtcgtctggaatggagtcagtttgaagatgggaaactcccatccggtaaggctgatgccctggaccaccacgcgaaatgctttctgatcctcaaactttatgatcataaagtggacaaaagcaaatgggaaatgccgacgggttcgaacatgggcgaggccaaaccgtggaaagcaattcgcgtagatctggttcgttgcccctacggcggttttgcgtttgcgttgttgggttggaccggaagccgcatgttccgccgtgatctgcgctggtacgccactgacgagaagaacatgatgctggacaatcatgcgctgtatgacctgaccaagaaaatctttctcaaagctaaatcggaagaggaaattttcgcacatctggggcttgaatacctggaaccgttcgaacgtaacgca

SEQ ID NO: 2318 - protein, 529 aa, synthetic construct
  REGION 1..529: note = Variant of terminal deoxynucleotidyltransferase
MHHHHHHGGSGSHGIRTIDSDFGKKRQKKMDNHDSKAIYEIKFHEFVLFILEEKMGATRRTFLTDLARKKGFRVENELSDSVTHIVAENNSRSEVLAWLKEHKMEKTKQFELLDISWLIESMKVGKPVDTKGKYQLAESGEMSANPDPTEGRENELPPTMKTVSPYACQRRTTLNNHNQRFTDALEILAENYEFKRNDDTALEFRRAISVLKSLPFEVRSLKDTEGLPWIGDEVKGIMEEIIEVGESLEVQAVLNDEWYQSFKRFKSVFGVGVKTADKWYRMGLRTLEDVRSSKTLKLTPMQKAGLCYYEDLARGVTKAEADAISLLVQDAVATFDPDALVEIVGGFRRGKPQGHDVDLLITSPGAEKEQEDQLLQKVTNLWKKQGLLLYGRLEWSQFEDGKLPSGKADALDHHAKCFLILKLYDHKVDKSKWEMPTGSNMGEAKPWKAIRVDLVRCPYGGFAFALLGWTGSRMFRRDLRWYATDEKNMMLDNHALYDLTKKIFLKAKSEEEIFAHLGLEYLEPFERNA

SEQ ID NO: 2319 - DNA, 1587 bp, synthetic construct
  misc_feature 1..1587: note = Variant of terminal deoxynucleotidyltransferase
  source 1..1587: mol_type = other DNA
atgcaccatcatcatcatcatggcggtagcggcagccacggcattcgtaccatcgattcggacttcgggaagaaacgccagaaaaaaatggataaccacgatagttccgccatctatgaaatcaaatttcacgagtttgtgctgttcattctcgaagaaaaaatgggtgcgacgcgtcgtacttttctgacagatttagcccgcaagaaagggttccgcgtcgagaatgaactgtcagacagcgttacccacatcgtggcagaaaataattcacgctctgaagtattggcttggctgaaagaacacaagatggagaagaccaagcaattcgaactgctggatattagctggcttatcgaaagcatgaaagttggtaaaccggtggacaccaaggggaaataccagttggcggaatcgggtgagatgagtgcgaacccagatccgacagagggtcgtgaaaacgagctgcctcctactatgaagaccgtttctccgtatgcgtgtcaacgccgcaccaccctgaacaaccataatcaacgttttacggacgcactggaaattcttgcggaaaattacgagttcaaacgcaacgatgatactgcgctggaatttcgtcgtgctatctccgtgctgaaaagccttccgtttgaggtacgtagcctgaaagacacggaaggattgccctggatcggtgatgaagtcaaagggattatggaagaaatcatcgaggtcggtgaatcgctggaagtgcaggcccttctcaatgatgagtggtatcaaagcttcaaacgctttaagagtgtctttggagtgggggtgaagacagcagacaagtggtaccgtatgggtctgcgcacgctcgaggatgttcgttccagcaagaccctgaagttgaccccgatgcagaaagcgggtctgtgctattatgaagatcttgctcgcggcgttacgaaagccgaagctgacgcgatttctctgctggttcaggatgcagtcgcaactttcgacccggatgcgctggtggagattgtcggtggatttcgtcgtgggaaacctcagggtcacgacgttgatctgcttatcacatctccgggagctgagaaagagcaagaagaccagctcctgcagaaagtgaccaatctgtggaagaaacaagggttgttgctgtacggtcgtctggaatggagtcagtttgaagatgggaaactcccatccggtaaggctgatgccctggaccaccacgcgaaatgctttctgatcctcaaactttatgatcataaagtggacaaaagcaaatgggaaatgccgacgggttcgaacatgggcgaggccaaaccgtggaaagcaattcgcgtagatctggttcgttgcccctacggcggttttgcgtttgcgttgttgggttggaccggaagccgcatgttccgccgtgatctgcgctggtacgccactgacgagaagaacatgatgctggacaatcatgcgctgtatgacctgaccaagaaaatctttctcaaagctaaatcggaagaggaaattttcgcacatctggggcttgaatacctggaaccgttcgaacgtaacgca

SEQ ID NO: 2320 - protein, 529 aa, synthetic construct
  REGION 1..529: note = Variant of terminal deoxynucleotidyltransferase
MHHHHHHGGSGSHGIRTIDSDFGKKRQKKMDNHDSSAIYEIKFHEFVLFILEEKMGATRRTFLTDLARKKGFRVENELSDSVTHIVAENNSRSEVLAWLKEHKMEKTKQFELLDISWLIESMKVGKPVDTKGKYQLAESGEMSANPDPTEGRENELPPTMKTVSPYACQRRTTLNNHNQRFTDALEILAENYEFKRNDDTALEFRRAISVLKSLPFEVRSLKDTEGLPWIGDEVKGIMEEIIEVGESLEVQALLNDEWYQSFKRFKSVFGVGVKTADKWYRMGLRTLEDVRSSKTLKLTPMQKAGLCYYEDLARGVTKAEADAISLLVQDAVATFDPDALVEIVGGFRRGKPQGHDVDLLITSPGAEKEQEDQLLQKVTNLWKKQGLLLYGRLEWSQFEDGKLPSGKADALDHHAKCFLILKLYDHKVDKSKWEMPTGSNMGEAKPWKAIRVDLVRCPYGGFAFALLGWTGSRMFRRDLRWYATDEKNMMLDNHALYDLTKKIFLKAKSEEEIFAHLGLEYLEPFERNA

SEQ ID NO: 2321 - DNA, 1587 bp, synthetic construct
  misc_feature 1..1587: note = Variant of terminal deoxynucleotidyltransferase
  source 1..1587: mol_type = other DNA
atgcaccatcatcatcatcatggcggtagcggcagccacggcattcgtaccatcgattcggacttcgggaagaaacgccagaaaaaaatggataaccacgatagttccgccatctatgaaatcaaatttcacgagtttgtgctgttcattctcgaagaaaaaatgggtgcgacgcgtcgtacttggctgacagatttagcccgcaagaaagggttccgcgtcgagaatgaactgtcagacagcgttacccacatcgtggcagaaaataattcacgctctgaagtattggcttggctgaaagaacacaagatggagaagaccaagcaattcgaactgctggatattagctggcttatcgaaagcatgaaagttggtaaaccggtggacaccaaggggaaataccagttggcggaatcgggtgagatgagtgcgaacccagatccgacagagggtcgtgaaaacgagctgcctcctactatgaagaccgtttctccgtatgcgtgtcaacgccgcaccaccctgaacaaccataatcaacgttttacggacgcactggaaattcttgcggaaaattacgagttcaaacgcaacgatgatactgcgctggaatttcgtcgtgctatctccgtgctgaaaagccttccgtttgaggtacgtagcctgaaagacacggaaggattgccctggatcggtgatgaagtcaaagggattatggaagaaatcatcgaggtcggtgaatcgctggaagtgcaggccgtgctcaatgatgagtggtatcaaagcttcaaacgctttaagagtgtctttggagtgggggtgaagacagcagacaagtggtaccgtatgggtctgcgcacgctcgaggatgttcgttccagcaagaccctgaagttgaccccgatgcagaaagcgggtctgtgctattatgaagatcttgctcgcggcgttacgaaagccgaagctgacgcgatttctctgctggttcaggatgcagtcgcaactttcgacccggatgcgctggtggagattgtcggtggatttcgtcgtgggaaacctcagggtcacgacgttgatctgcttatcacatctccgggagctgagaaagagcaagaagaccagctcctgcagaaagtgaccaatctgtggaagaaacaagggttgttgctgtacggtcgtctggaatggagtcagtttgaagatgggaaactcccatccggtaaggctgatgccctggaccaccacgcgaaatgctttctgatcctcaaactttatgatcataaagtggacaaaagcaaatgggaaatgccgacgggttcgaacatgggcgaggccaaaccgtggaaagcaattcgcgtagatctggttcgttgcccctacggcggttttgcgtttgcgttgttgggttggaccggaagccgcatgttccgccgtgatctgcgctggtacgccactgacgagaagaacatgatgctggacaatcatgcgctgtatgacctgaccaagaaaatctttctcaaagctaaatcggaagaggaaattttcgcacatctggggcttgaatacctggaaccgttcgaacgtaacgca

SEQ ID NO: 2322 - protein, 529 aa, synthetic construct
  REGION 1..529: note = Variant of terminal deoxynucleotidyltransferase
MHHHHHHGGSGSHGIRTIDSDFGKKRQKKMDNHDSSAIYEIKFHEFVLFILEEKMGATRRTWLTDLARKKGFRVENELSDSVTHIVAENNSRSEVLAWLKEHKMEKTKQFELLDISWLIESMKVGKPVDTKGKYQLAESGEMSANPDPTEGRENELPPTMKTVSPYACQRRTTLNNHNQRFTDALEILAENYEFKRNDDTALEFRRAISVLKSLPFEVRSLKDTEGLPWIGDEVKGIMEEIIEVGESLEVQAVLNDEWYQSFKRFKSVFGVGVKTADKWYRMGLRTLEDVRSSKTLKLTPMQKAGLCYYEDLARGVTKAEADAISLLVQDAVATFDPDALVEIVGGFRRGKPQGHDVDLLITSPGAEKEQEDQLLQKVTNLWKKQGLLLYGRLEWSQFEDGKLPSGKADALDHHAKCFLILKLYDHKVDKSKWEMPTGSNMGEAKPWKAIRVDLVRCPYGGFAFALLGWTGSRMFRRDLRWYATDEKNMMLDNHALYDLTKKIFLKAKSEEEIFAHLGLEYLEPFERNA

SEQ ID NO: 2323 - DNA, 1587 bp, synthetic construct
  misc_feature 1..1587: note = Variant of terminal deoxynucleotidyltransferase
  source 1..1587: mol_type = other DNA
atgcaccatcatcatcatcatggcggtagcggcagccacggcattcgtaccatcgattcggacttcgggaagaaacgccagaaaaaaatggataaccacgatagttccgccatctatgaaatcaaatttcacgagtttgtgctgttcattctcgaagaaaaaatgggtgcgacgcgtcgtacttttctgacagatttagcccgcaagaaagggttccgcgtcgagaatgaactgtcagacagcgttacccacatcgtggcagaaaataattcacgctctgaagtattggcttggctgaaagaacacaagatggagaagaccaagcaattcgaactgctggatattagctggcttatcgaaagcatgaaagttggtaaaccggtggacaccaaggggaaataccagttggcggaatcgggtgagatgagtgcgaacccagatccgacagagtcgcgtgaaaacgagctgcctcctactatgaagaccgtttctccgtatgcgtgtcaacgccgcaccaccctgaacaaccataatcaacgttttacggacgcactggaaattcttgcggaaaattacgagttcaaacgcaacgatgatactgcgctggaatttcgtcgtgctatctccgtgctgaaaagccttccgtttgaggtacgtagcctgaaagacacggaaggattgccctggatcggtgatgaagtcaaagggattatggaagaaatcatcgaggtcggtgaatcgctggaagtgcaggccgtgctcaatgatgagtggtatcaaagcttcaaacgctttaagagtgtctttggagtgggggtgaagacagcagacaagtggtaccgtatgggtctgcgcacgctcgaggatgttcgttccagcaagaccctgaagttgaccccgatgcagaaagcgggtctgtgctattatgaagatcttgctcgcggcgttacgaaagccgaagctgacgcgatttctctgctggttcaggatgcagtcgcaactttcgacccggatgcgctggtggagattgtcggtggatttcgtcgtgggaaacctcagggtcacgacgttgatctgcttatcacatctccgggagctgagaaagagcaagaagaccagctcctgcagaaagtgaccaatctgtggaagaaacaagggttgttgctgtacggtcgtctggaatggagtcagtttgaagatgggaaactcccatccggtaaggctgatgccctggaccaccacgcgaaatgctttctgatcctcaaactttatgatcataaagtggacaaaagcaaatgggaaatgccgacgggttcgaacatgggcgaggccaaaccgtggaaagcaattcgcgtagatctggttcgttgcccctacggcggttttgcgtttgcgttgttgggttggaccggaagccgcatgttccgccgtgatctgcgctggtacgccactgacgagaagaacatgatgctggacaatcatgcgctgtatgacctgaccaagaaaatctttctcaaagctaaatcggaagaggaaattttcgcacatctggggcttgaatacctggaaccgttcgaacgtaacgca

SEQ ID NO: 2324 - protein, 529 aa, synthetic construct
  REGION 1..529: note = Variant of terminal deoxynucleotidyltransferase
MHHHHHHGGSGSHGIRTIDSDFGKKRQKKMDNHDSSAIYEIKFHEFVLFILEEKMGATRRTFLTDLARKKGFRVENELSDSVTHIVAENNSRSEVLAWLKEHKMEKTKQFELLDISWLIESMKVGKPVDTKGKYQLAESGEMSANPDPTESRENELPPTMKTVSPYACQRRTTLNNHNQRFTDALEILAENYEFKRNDDTALEFRRAISVLKSLPFEVRSLKDTEGLPWIGDEVKGIMEEIIEVGESLEVQAVLNDEWYQSFKRFKSVFGVGVKTADKWYRMGLRTLEDVRSSKTLKLTPMQKAGLCYYEDLARGVTKAEADAISLLVQDAVATFDPDALVEIVGGFRRGKPQGHDVDLLITSPGAEKEQEDQLLQKVTNLWKKQGLLLYGRLEWSQFEDGKLPSGKADALDHHAKCFLILKLYDHKVDKSKWEMPTGSNMGEAKPWKAIRVDLVRCPYGGFAFALLGWTGSRMFRRDLRWYATDEKNMMLDNHALYDLTKKIFLKAKSEEEIFAHLGLEYLEPFERNA

SEQ ID NO: 2325 - DNA, 1587 bp, synthetic construct
  misc_feature 1..1587: note = Variant of terminal deoxynucleotidyltransferase
  source 1..1587: mol_type = other DNA
atgcaccatcatcatcatcatggcggtagcggcagccacggcattcgtaccatcgattcggacttcgggaagaaacgccagaaaaaaatggataaccacgatagttccgccatctatgaaatcaaatttcacgagtttgtgctgttcattctcgaagaaaaaatgggtgcgagtcgtcgtacttttctgacagatttagcccgcaagaaagggttccgcgtcgagaatgaactgtcagacagcgttacccacatcgtggcagaaaataattcacgctctgaagtattggcttggctgaaagaacacaagatggagaagaccaagcaattcgaactgctggatattagctggcttatcgaaagcatgaaagttggtaaaccggtggacaccaaggggaaataccagttggcggaatcgggtgagatgagtgcgaacccagatccgacagagggtcgtgaaaacgagctgcctcctactatgaagaccgtttctccgtatgcgtgtcaacgccgcaccaccctgaacaaccataatcaacgttttacggacgcactggaaattcttgcggaaaattacgagttcaaacgcaacgatgatactgcgctggaatttcgtcgtgctatctccgtgctgaaaagccttccgtttgaggtacgtagcctgaaagacacggaaggattgccctggatcggtgatgaagtcaaagggattatggaagaaatcatcgaggtcggtgaatcgctggaagtgcaggccgtgctcaatgatgagtggtatcaaagcttcaaacgctttaagagtgtctttggagtgggggtgaagacagcagacaagtggtaccgtatgggtctgcgcacgctcgaggatgttcgttccagcaagaccctgaagttgaccccgatgcagaaagcgggtctgtgctattatgaagatcttgctcgcggcgttacgaaagccgaagctgacgcgatttctctgctggttcaggatgcagtcgcaactttcgacccggatgcgctggtggagattgtcggtggatttcgtcgtgggaaacctcagggtcacgacgttgatctgcttatcacatctccgggagctgagaaagagcaagaagaccagctcctgcagaaagtgaccaatctgtggaagaaacaagggttgttgctgtacggtcgtctggaatggagtcagtttgaagatgggaaactcccatccggtaaggctgatgccctggaccaccacgcgaaatgctttctgatcctcaaactttatgatcataaagtggacaaaagcaaatgggaaatgccgacgggttcgaacatgggcgaggccaaaccgtggaaagcaattcgcgtagatctggttcgttgcccctacggcggttttgcgtttgcgttgttgggttggaccggaagccgcatgttccgccgtgatctgcgctggtacgccactgacgagaagaacatgatgctggacaatcatgcgctgtatgacctgaccaagaaaatctttctcaaagctaaatcggaagaggaaattttcgcacatctggggcttgaatacctggaaccgttcgaacgtaacgca

SEQ ID NO: 2326 - protein, 529 aa, synthetic construct
  REGION 1..529: note = Variant of terminal deoxynucleotidyltransferase
MHHHHHHGGSGSHGIRTIDSDFGKKRQKKMDNHDSSAIYEIKFHEFVLFILEEKMGASRRTFLTDLARKKGFRVENELSDSVTHIVAENNSRSEVLAWLKEHKMEKTKQFELLDISWLIESMKVGKPVDTKGKYQLAESGEMSANPDPTEGRENELPPTMKTVSPYACQRRTTLNNHNQRFTDALEILAENYEFKRNDDTALEFRRAISVLKSLPFEVRSLKDTEGLPWIGDEVKGIMEEIIEVGESLEVQAVLNDEWYQSFKRFKSVFGVGVKTADKWYRMGLRTLEDVRSSKTLKLTPMQKAGLCYYEDLARGVTKAEADAISLLVQDAVATFDPDALVEIVGGFRRGKPQGHDVDLLITSPGAEKEQEDQLLQKVTNLWKKQGLLLYGRLEWSQFEDGKLPSGKADALDHHAKCFLILKLYDHKVDKSKWEMPTGSNMGEAKPWKAIRVDLVRCPYGGFAFALLGWTGSRMFRRDLRWYATDEKNMMLDNHALYDLTKKIFLKAKSEEEIFAHLGLEYLEPFERNA

SEQ ID NO: 2327 - DNA, 1587 bp, synthetic construct
  misc_feature 1..1587: note = Variant of terminal deoxynucleotidyltransferase
  source 1..1587: mol_type = other DNA
atgcaccatcatcatcatcatggcggtagcggcagccacggcattcgtaccatcgattcggacttcgggaagaaacgccagaaaaaaatggataaccacgatagttccgccatctatgaaatcaaatttcacgagtttgtgctgttcattctcgaagaaaaaatgggtgcgacgcgtcgtacttttctgacagatttagcccgcaagaaagggttccgcgtcgagaatgaactgtcagacagcgttacccacatcgtggcagaaaataattcacgctctgaagtattggcttggctgaaagaacacaagatggagaagaccaagcaattcgaactgctggatattgcgtggcttatcgaaagcatgaaagttggtaaaccggtggacaccaaggggaaataccagttggcggaatcgggtgagatgagtgcgaacccagatccgacagagggtcgtgaaaacgagctgcctcctactatgaagaccgtttctccgtatgcgtgtcaacgccgcaccaccctgaacaaccataatcaacgttttacggacgcactggaaattcttgcggaaaattacgagttcaaacgcaacgatgatactgcgctggaatttcgtcgtgctatctccgtgctgaaaagccttccgtttgaggtacgtagcctgaaagacacggaaggattgccctggatcggtgatgaagtcaaagggattatggaagaaatcatcgaggtcggtgaatcgctggaagtgcaggccgtgctcaatgatgagtggtatcaaagcttcaaacgctttaagagtgtctttggagtgggggtgaagacagcagacaagtggtaccgtatgggtctgcgcacgctcgaggatgttcgttccagcaagaccctgaagttgaccccgatgcagaaagcgggtctgtgctattatgaagatcttgctcgcggcgttacgaaagccgaagctgacgcgatttctctgctggttcaggatgcagtcgcaactttcgacccggatgcgctggtggagattgtcggtggatttcgtcgtgggaaacctcagggtcacgacgttgatctgcttatcacatctccgggagctgagaaagagcaagaagaccagctcctgcagaaagtgaccaatctgtggaagaaacaagggttgttgctgtacggtcgtctggaatggagtcagtttgaagatgggaaactcccatccggtaaggctgatgccctggaccaccacgcgaaatgctttctgatcctcaaactttatgatcataaagtggacaaaagcaaatgggaaatgccgacgggttcgaacatgggcgaggccaaaccgtggaaagcaattcgcgtagatctggttcgttgcccctacggcggttttgcgtttgcgttgttgggttggaccggaagccgcatgttccgccgtgatctgcgctggtacgccactgacgagaagaacatgatgctggacaatcatgcgctgtatgacctgaccaagaaaatctttctcaaagctaaatcggaagaggaaattttcgcacatctggggcttgaatacctggaaccgttcgaacgtaacgca

SEQ ID NO: 2328 - protein, 529 aa, synthetic construct
  REGION 1..529: note = Variant of terminal deoxynucleotidyltransferase
MHHHHHHGGSGSHGIRTIDSDFGKKRQKKMDNHDSSAIYEIKFHEFVLFILEEKMGATRRTFLTDLARKKGFRVENELSDSVTHIVAENNSRSEVLAWLKEHKMEKTKQFELLDIAWLIESMKVGKPVDTKGKYQLAESGEMSANPDPTEGRENELPPTMKTVSPYACQRRTTLNNHNQRFTDALEILAENYEFKRNDDTALEFRRAISVLKSLPFEVRSLKDTEGLPWIGDEVKGIMEEIIEVGESLEVQAVLNDEWYQSFKRFKSVFGVGVKTADKWYRMGLRTLEDVRSSKTLKLTPMQKAGLCYYEDLARGVTKAEADAISLLVQDAVATFDPDALVEIVGGFRRGKPQGHDVDLLITSPGAEKEQEDQLLQKVTNLWKKQGLLLYGRLEWSQFEDGKLPSGKADALDHHAKCFLILKLYDHKVDKSKWEMPTGSNMGEAKPWKAIRVDLVRCPYGGFAFALLGWTGSRMFRRDLRWYATDEKNMMLDNHALYDLTKKIFLKAKSEEEIFAHLGLEYLEPFERNA

SEQ ID NO: 2329 - DNA, 1587 bp, synthetic construct
  misc_feature 1..1587: note = Variant of terminal deoxynucleotidyltransferase
  source 1..1587: mol_type = other DNA
atgcaccatcatcatcatcatggcggtagcggcagccacggcattcgtaccatcgattcggacttcgggaagaaacgccagaaaaaaatggataaccacgatagttccgccatctatgaaatcaaatttcacgagtttgtgctgttcattctcgaagaaaaaatgggtgcgacgcgtcgtacttttctgacagatttagcccgcaagaaagggttccgcgtcgagaatgaactgtcagacagcgttacccacatcgtggcagaaaataattcacgctctgaagtattggcttggctgaaagaacacaagatggagaagaccaagcaattcgaactgctggatattagctggcttatcgaaagcatgaaagttggtaaaccggtggacaccaaggggaaataccagttggcggaatcgggtgagatgagtgcgaacccagatccgacagagggtcgtgaaaacgagctggttcctactatgaagaccgtttctccgtatgcgtgtcaacgccgcaccaccctgaacaaccataatcaacgttttacggacgcactggaaattcttgcggaaaattacgagttcaaacgcaacgatgatactgcgctggaatttcgtcgtgctatctccgtgctgaaaagccttccgtttgaggtacgtagcctgaaagacacggaaggattgccctggatcggtgatgaagtcaaagggattatggaagaaatcatcgaggtcggtgaatcgctggaagtgcaggccgtgctcaatgatgagtggtatcaaagcttcaaacgctttaagagtgtctttggagtgggggtgaagacagcagacaagtggtaccgtatgggtctgcgcacgctcgaggatgttcgttccagcaagaccctgaagttgaccccgatgcagaaagcgggtctgtgctattatgaagatcttgctcgcggcgttacgaaagccgaagctgacgcgatttctctgctggttcaggatgcagtcgcaactttcgacccggatgcgctggtggagattgtcggtggatttcgtcgtgggaaacctcagggtcacgacgttgatctgcttatcacatctccgggagctgagaaagagcaagaagaccagctcctgcagaaagtgaccaatctgtggaagaaacaagggttgttgctgtacggtcgtctggaatggagtcagtttgaagatgggaaactcccatccggtaaggctgatgccctggaccaccacgcgaaatgctttctgatcctcaaactttatgatcataaagtggacaaaagcaaatgggaaatgccgacgggttcgaacatgggcgaggccaaaccgtggaaagcaattcgcgtagatctggttcgttgcccctacggcggttttgcgtttgcgttgttgggttggaccggaagccgcatgttccgccgtgatctgcgctggtacgccactgacgagaagaacatgatgctggacaatcatgcgctgtatgacctgaccaagaaaatctttctcaaagctaaatcggaagaggaaattttcgcacatctggggcttgaatacctggaaccgttcgaacgtaacgca

SEQ ID NO: 2330 - protein, 529 aa, synthetic construct
  REGION 1..529: note = Variant of terminal deoxynucleotidyltransferase
MHHHHHHGGSGSHGIRTIDSDFGKKRQKKMDNHDSSAIYEIKFHEFVLFILEEKMGATRRTFLTDLARKKGFRVENELSDSVTHIVAENNSRSEVLAWLKEHKMEKTKQFELLDISWLIESMKVGKPVDTKGKYQLAESGEMSANPDPTEGRENELVPTMKTVSPYACQRRTTLNNHNQRFTDALEILAENYEFKRNDDTALEFRRAISVLKSLPFEVRSLKDTEGLPWIGDEVKGIMEEIIEVGESLEVQAVLNDEWYQSFKRFKSVFGVGVKTADKWYRMGLRTLEDVRSSKTLKLTPMQKAGLCYYEDLARGVTKAEADAISLLVQDAVATFDPDALVEIVGGFRRGKPQGHDVDLLITSPGAEKEQEDQLLQKVTNLWKKQGLLLYGRLEWSQFEDGKLPSGKADALDHHAKCFLILKLYDHKVDKSKWEMPTGSNMGEAKPWKAIRVDLVRCPYGGFAFALLGWTGSRMFRRDLRWYATDEKNMMLDNHALYDLTKKIFLKAKSEEEIFAHLGLEYLEPFERNA

SEQ ID NO: 2331 - DNA, 1587 bp, synthetic construct
  misc_feature 1..1587: note = Variant of terminal deoxynucleotidyltransferase
  source 1..1587: mol_type = other DNA
atgcaccatcatcatcatcatggcggtagcggcgttcacggcattcgtaccatcgattcggacttcgggaagaaacgccagaaaaaaatggataaccacgatagttccgccatctatgaaatcaaatttcacgagtttgtgctgttcattctcgaagaaaaaatgggtgcgacgcgtcgtacttttctgacagatttagcccgcaagaaagggttccgcgtcgagaatgaactgtcagacagcgttacccacatcgtggcagaaaataattcacgctctgaagtattggcttggctgaaagaacacaagatggagaagaccaagcaattcgaactgctggatattagctggcttatcgaaagcatgaaagttggtaaaccggtggacaccaaggggaaataccagttggcggaatcgggtgagatgagtgcgaacccagatccgacagagggtcgtgaaaacgagctgcctcctactatgaagaccgtttctccgtatgcgtgtcaacgccgcaccaccctgaacaaccataatcaacgttttacggacgcactggaaattcttgcggaaaattacgagttcaaacgcaacgatgatactgcgctggaatttcgtcgtgctatctccgtgctgaaaagccttccgtttgaggtacgtagcctgaaagacacggaaggattgccctggatcggtgatgaagtcaaagggattatggaagaaatcatcgaggtcggtgaatcgctggaagtgcaggccgtgctcaatgatgagtggtatcaaagcttcaaacgctttaagagtgtctttggagtgggggtgaagacagcagacaagtggtaccgtatgggtctgcgcacgctcgaggatgttcgttccagcaagaccctgaagttgaccccgatgcagaaagcgggtctgtgctattatgaagatcttgctcgcggcgttacgaaagccgaagctgacgcgatttctctgctggttcaggatgcagtcgcaactttcgacccggatgcgctggtggagattgtcggtggatttcgtcgtgggaaacctcagggtcacgacgttgatctgcttatcacatctccgggagctgagaaagagcaagaagaccagctcctgcagaaagtgaccaatctgtggaagaaacaagggttgttgctgtacggtcgtctggaatggagtcagtttgaagatgggaaactcccatccggtaaggctgatgccctggaccaccacgcgaaatgctttctgatcctcaaactttatgatcataaagtggacaaaagcaaatgggaaatgccgacgggttcgaacatgggcgaggccaaaccgtggaaagcaattcgcgtagatctggttcgttgcccctacggcggttttgcgtttgcgttgttgggttggaccggaagccgcatgttccgccgtgatctgcgctggtacgccactgacgagaagaacatgatgctggacaatcatgcgctgtatgacctgaccaagaaaatctttctcaaagctaaatcggaagaggaaattttcgcacatctggggcttgaatacctggaaccgttcgaacgtaacgca

SEQ ID NO: 2332 - protein, 529 aa, synthetic construct
  REGION 1..529: note = Variant of terminal deoxynucleotidyltransferase
MHHHHHHGGSGVHGIRTIDSDFGKKRQKKMDNHDSSAIYEIKFHEFVLFILEEKMGATRRTFLTDLARKKGFRVENELSDSVTHIVAENNSRSEVLAWLKEHKMEKTKQFELLDISWLIESMKVGKPVDTKGKYQLAESGEMSANPDPTEGRENELPPTMKTVSPYACQRRTTLNNHNQRFTDALEILAENYEFKRNDDTALEFRRAISVLKSLPFEVRSLKDTEGLPWIGDEVKGIMEEIIEVGESLEVQAVLNDEWYQSFKRFKSVFGVGVKTADKWYRMGLRTLEDVRSSKTLKLTPMQKAGLCYYEDLARGVTKAEADAISLLVQDAVATFDPDALVEIVGGFRRGKPQGHDVDLLITSPGAEKEQEDQLLQKVTNLWKKQGLLLYGRLEWSQFEDGKLPSGKADALDHHAKCFLILKLYDHKVDKSKWEMPTGSNMGEAKPWKAIRVDLVRCPYGGFAFALLGWTGSRMFRRDLRWYATDEKNMMLDNHALYDLTKKIFLKAKSEEEIFAHLGLEYLEPFERNA

SEQ ID NO: 2333 - DNA, 1587 bp, synthetic construct
  misc_feature 1..1587: note = Variant of terminal deoxynucleotidyltransferase
  source 1..1587: mol_type = other DNA
atgcaccatcatcatcatcatggcggtagcggcagccacggcattcgtaccatcgattcggacttcgggaagaaacgccagaaaaaaatggataaccacgatagttccgccatctatgaaatcaaatttcacgagtttgtgctgttcattctcgaagaaaaaatgggtgcgacgcgtcgtacttttctgacagatttagcccgcaagaaagggttccgcgtcgagaatgaactgtcagacagcgttacccacatcgtggcagaaaataattcacgctctgaagtattggcttggctgaaagaacacaagatggagaagaccaagcaattcgaactgctggatattagctggcttatcgaaagcatgaaagttggtaaaccggtggacaccaaggggaaataccagttggcggaatcgggtgagatgagtgcgaacccagatccgacagagggtcgtgaaaacgagctgcctcctactatgaagaccgtttctccgtatgcgtgtcaacgccgcaccaccctgaacaaccataatcaacgttttacggacgcactggaaattcttgcggaaaattacgagttcaaacgcaacgatgatactgcgctggaatttcgtcgtgctatctccgtgctgaaaagccttccgtttgaggtacgtagcctgaaagacacggaaggattgccctggatcggtgatgaagtcaaagggattatggaagaaatcatcgaggtcggtgaatcgctgagggtgcaggccgtgctcaatgatgagtggtatcaaagcttcaaacgctttaagagtgtctttggagtgggggtgaagacagcagacaagtggtaccgtatgggtctgcgcacgctcgaggatgttcgttccagcaagaccctgaagttgaccccgatgcagaaagcgggtctgtgctattatgaagatcttgctcgcggcgttacgaaagccgaagctgacgcgatttctctgctggttcaggatgcagtcgcaactttcgacccggatgcgctggtggagattgtcggtggatttcgtcgtgggaaacctcagggtcacgacgttgatctgcttatcacatctccgggagctgagaaagagcaagaagaccagctcctgcagaaagtgaccaatctgtggaagaaacaagggttgttgctgtacggtcgtctggaatggagtcagtttgaagatgggaaactcccatccggtaaggctgatgccctggaccaccacgcgaaatgctttctgatcctcaaactttatgatcataaagtggacaaaagcaaatgggaaatgccgacgggttcgaacatgggcgaggccaaaccgtggaaagcaattcgcgtagatctggttcgttgcccctacggcggttttgcgtttgcgttgttgggttggaccggaagccgcatgttccgccgtgatctgcgctggtacgccactgacgagaagaacatgatgctggacaatcatgcgctgtatgacctgaccaagaaaatctttctcaaagctaaatcggaagaggaaattttcgcacatctggggcttgaatacctggaaccgttcgaacgtaacgca

SEQ ID NO: 2334 - protein, 529 aa, synthetic construct
  REGION 1..529: note = Variant of terminal deoxynucleotidyltransferase
MHHHHHHGGSGSHGIRTIDSDFGKKRQKKMDNHDSSAIYEIKFHEFVLFILEEKMGATRRTFLTDLARKKGFRVENELSDSVTHIVAENNSRSEVLAWLKEHKMEKTKQFELLDISWLIESMKVGKPVDTKGKYQLAESGEMSANPDPTEGRENELPPTMKTVSPYACQRRTTLNNHNQRFTDALEILAENYEFKRNDDTALEFRRAISVLKSLPFEVRSLKDTEGLPWIGDEVKGIMEEIIEVGESLRVQAVLNDEWYQSFKRFKSVFGVGVKTADKWYRMGLRTLEDVRSSKTLKLTPMQKAGLCYYEDLARGVTKAEADAISLLVQDAVATFDPDALVEIVGGFRRGKPQGHDVDLLITSPGAEKEQEDQLLQKVTNLWKKQGLLLYGRLEWSQFEDGKLPSGKADALDHHAKCFLILKLYDHKVDKSKWEMPTGSNMGEAKPWKAIRVDLVRCPYGGFAFALLGWTGSRMFRRDLRWYATDEKNMMLDNHALYDLTKKIFLKAKSEEEIFAHLGLEYLEPFERNA

SEQ ID NO: 2335 - DNA, 1587 bp, synthetic construct
  misc_feature 1..1587: note = Variant of terminal deoxynucleotidyltransferase
  source 1..1587: mol_type = other DNA
atgcaccatcatcatcatcatggcggtagcggcagccacggcattcgtaccatcgattcggacttcgggaagaaacgccagaaaaaaatggataaccacgatagttccgccatctatgaaatcaaatttcacgagtttgtgctgttcattctcgaagaaaaaatgggtgcgacgcgtcgtacttttctgacagatttagcccgcaagaaagggttccgcgtcgagaatgaactgtcagacagcgttacccacatcgtggcagaaaataattcacgctctgaagtattggcttggctgaaagaacacaagatggagaagaccaagcaattcgaactgctggatattagctggcttatcgaaagcatgaaagttggtaaaccggtggacaccaaggggaaataccagttggcggaatcgggtgagatgagtgcgaacccagggccgacagagggtcgtgaaaacgagctgcctcctactatgaagaccgtttctccgtatgcgtgtcaacgccgcaccaccctgaacaaccataatcaacgttttacggacgcactggaaattcttgcggaaaattacgagttcaaacgcaacgatgatactgcgctggaatttcgtcgtgctatctccgtgctgaaaagccttccgtttgaggtacgtagcctgaaagacacggaaggattgccctggatcggtgatgaagtcaaagggattatggaagaaatcatcgaggtcggtgaatcgctggaagtgcaggccgtgctcaatgatgagtggtatcaaagcttcaaacgctttaagagtgtctttggagtgggggtgaagacagcagacaagtggtaccgtatgggtctgcgcacgctcgaggatgttcgttccagcaagaccctgaagttgaccccgatgcagaaagcgggtctgtgctattatgaagatcttgctcgcggcgttacgaaagccgaagctgacgcgatttctctgctggttcaggatgcagtcgcaactttcgacccggatgcgctggtggagattgtcggtggatttcgtcgtgggaaacctcagggtcacgacgttgatctgcttatcacatctccgggagctgagaaagagcaagaagaccagctcctgcagaaagtgaccaatctgtggaagaaacaagggttgttgctgtacggtcgtctggaatggagtcagtttgaagatgggaaactcccatccggtaaggctgatgccctggaccaccacgcgaaatgctttctgatcctcaaactttatgatcataaagtggacaaaagcaaatgggaaatgccgacgggttcgaacatgggcgaggccaaaccgtggaaagcaattcgcgtagatctggttcgttgcccctacggcggttttgcgtttgcgttgttgggttggaccggaagccgcatgttccgccgtgatctgcgctggtacgccactgacgagaagaacatgatgctggacaatcatgcgctgtatgacctgaccaagaaaatctttctcaaagctaaatcggaagaggaaattttcgcacatctggggcttgaatacctggaaccgttcgaacgtaacgca

SEQ ID NO: 2336 - protein, 529 aa, synthetic construct
  REGION 1..529: note = Variant of terminal deoxynucleotidyltransferase
MHHHHHHGGSGSHGIRTIDSDFGKKRQKKMDNHDSSAIYEIKFHEFVLFILEEKMGATRRTFLTDLARKKGFRVENELSDSVTHIVAENNSRSEVLAWLKEHKMEKTKQFELLDISWLIESMKVGKPVDTKGKYQLAESGEMSANPGPTEGRENELPPTMKTVSPYACQRRTTLNNHNQRFTDALEILAENYEFKRNDDTALEFRRAISVLKSLPFEVRSLKDTEGLPWIGDEVKGIMEEIIEVGESLEVQAVLNDEWYQSFKRFKSVFGVGVKTADKWYRMGLRTLEDVRSSKTLKLTPMQKAGLCYYEDLARGVTKAEADAISLLVQDAVATFDPDALVEIVGGFRRGKPQGHDVDLLITSPGAEKEQEDQLLQKVTNLWKKQGLLLYGRLEWSQFEDGKLPSGKADALDHHAKCFLILKLYDHKVDKSKWEMPTGSNMGEAKPWKAIRVDLVRCPYGGFAFALLGWTGSRMFRRDLRWYATDEKNMMLDNHALYDLTKKIFLKAKSEEEIFAHLGLEYLEPFERNA

SEQ ID NO: 2337 - DNA, 1587 bp, synthetic construct
  misc_feature 1..1587: note = Variant of terminal deoxynucleotidyltransferase
  source 1..1587: mol_type = other DNA
atgcaccatcatcatcatcatggcggtagcggcagccacggcattcgtaccatcgattcggacttcgggaagaaacgccagaaaaaaatggataaccacgatagttccgccatctatgaaatcaaatttcacgagtttgtgctgttcctgctcgaagaaaaaatgggtgcgacgcgtcgtacttttctgacagatttagcccgcaagaaagggttccgcgtcgagaatgaactgtcagacagcgttacccacatcgtggcagaaaataattcacgctctgaagtattggcttggctgaaagaacacaagatggagaagaccaagcaattcgaactgctggatattagctggcttatcgaaagcatgaaagttggtaaaccggtggacaccaaggggaaataccagttggcggaatcgggtgagatgagtgcgaacccagatccgacagagggtcgtgaaaacgagctgcctcctactatgaagaccgtttctccgtatgcgtgtcaacgccgcaccaccctgaacaaccataatcaacgttttacggacgcactggaaattcttgcggaaaattacgagttcaaacgcaacgatgatactgcgctggaatttcgtcgtgctatctccgtgctgaaaagccttccgtttgaggtacgtagcctgaaagacacggaaggattgccctggatcggtgatgaagtcaaagggattatggaagaaatcatcgaggtcggtgaatcgctggaagtgcaggccgtgctcaatgatgagtggtatcaaagcttcaaacgctttaagagtgtctttggagtgggggtgaagacagcagacaagtggtaccgtatgggtctgcgcacgctcgaggatgttcgttccagcaagaccctgaagttgaccccgatgcagaaagcgggtctgtgctattatgaagatcttgctcgcggcgttacgaaagccgaagctgacgcgatttctctgctggttcaggatgcagtcgcaactttcgacccggatgcgctggtggagattgtcggtggatttcgtcgtgggaaacctcagggtcacgacgttgatctgcttatcacatctccgggagctgagaaagagcaagaagaccagctcctgcagaaagtgaccaatctgtggaagaaacaagggttgttgctgtacggtcgtctggaatggagtcagtttgaagatgggaaactcccatccggtaaggctgatgccctggaccaccacgcgaaatgctttctgatcctcaaactttatgatcataaagtggacaaaagcaaatgggaaatgccgacgggttcgaacatgggcgaggccaaaccgtggaaagcaattcgcgtagatctggttcgttgcccctacggcggttttgcgtttgcgttgttgggttggaccggaagccgcatgttccgccgtgatctgcgctggtacgccactgacgagaagaacatgatgctggacaatcatgcgctgtatgacctgaccaagaaaatctttctcaaagctaaatcggaagaggaaattttcgcacatctggggcttgaatacctggaaccgttcgaacgtaacgca

SEQ ID NO: 2338 - protein, 529 aa, synthetic construct
  REGION 1..529: note = Variant of terminal deoxynucleotidyltransferase
MHHHHHHGGSGSHGIRTIDSDFGKKRQKKMDNHDSSAIYEIKFHEFVLFLLEEKMGATRRTFLTDLARKKGFRVENELSDSVTHIVAENNSRSEVLAWLKEHKMEKTKQFELLDISWLIESMKVGKPVDTKGKYQLAESGEMSANPDPTEGRENELPPTMKTVSPYACQRRTTLNNHNQRFTDALEILAENYEFKRNDDTALEFRRAISVLKSLPFEVRSLKDTEGLPWIGDEVKGIMEEIIEVGESLEVQAVLNDEWYQSFKRFKSVFGVGVKTADKWYRMGLRTLEDVRSSKTLKLTPMQKAGLCYYEDLARGVTKAEADAISLLVQDAVATFDPDALVEIVGGFRRGKPQGHDVDLLITSPGAEKEQEDQLLQKVTNLWKKQGLLLYGRLEWSQFEDGKLPSGKADALDHHAKCFLILKLYDHKVDKSKWEMPTGSNMGEAKPWKAIRVDLVRCPYGGFAFALLGWTGSRMFRRDLRWYATDEKNMMLDNHALYDLTKKIFLKAKSEEEIFAHLGLEYLEPFERNA

SEQ ID NO: 2339 - DNA, 1587 bp, synthetic construct
  misc_feature 1..1587: note = Variant of terminal deoxynucleotidyltransferase
  source 1..1587: mol_type = other DNA
atgcacgctcatcatcatcatggcggtagcggcagccacggcattcgtaccatcgattcggacttcgggaagaaacgccagaaaaaaatggataaccacgatagttccgccatctatgaaatcaaatttcacgagtttgtgctgttcattctcgaagaaaaaatgggtgcgacgcgtcgtacttttctgacagatttagcccgcaagaaagggttccgcgtcgagaatgaactgtcagacagcgttacccacatcgtggcagaaaataattcacgctctgaagtattggcttggctgaaagaacacaagatggagaagaccaagcaattcgaactgctggatattagctggcttatcgaaagcatgaaagttggtaaaccggtggacaccaaggggaaataccagttggcggaatcgggtgagatgagtgcgaacccagatccgacagagggtcgtgaaaacgagctgcctcctactatgaagaccgtttctccgtatgcgtgtcaacgccgcaccaccctgaacaaccataatcaacgttttacggacgcactggaaattcttgcggaaaattacgagttcaaacgcaacgatgatactgcgctggaatttcgtcgtgctatctccgtgctgaaaagccttccgtttgaggtacgtagcctgaaagacacggaaggattgccctggatcggtgatgaagtcaaagggattatggaagaaatcatcgaggtcggtgaatcgctggaagtgcaggccgtgctcaatgatgagtggtatcaaagcttcaaacgctttaagagtgtctttggagtgggggtgaagacagcagacaagtggtaccgtatgggtctgcgcacgctcgaggatgttcgttccagcaagaccctgaagttgaccccgatgcagaaagcgggtctgtgctattatgaagatcttgctcgcggcgttacgaaagccgaagctgacgcgatttctctgctggttcaggatgcagtcgcaactttcgacccggatgcgctggtggagattgtcggtggatttcgtcgtgggaaacctcagggtcacgacgttgatctgcttatcacatctccgggagctgagaaagagcaagaagaccagctcctgcagaaagtgaccaatctgtggaagaaacaagggttgttgctgtacggtcgtctggaatggagtcagtttgaagatgggaaactcccatccggtaaggctgatgccctggaccaccacgcgaaatgctttctgatcctcaaactttatgatcataaagtggacaaaagcaaatgggaaatgccgacgggttcgaacatgggcgaggccaaaccgtggaaagcaattcgcgtagatctggttcgttgcccctacggcggttttgcgtttgcgttgttgggttggaccggaagccgcatgttccgccgtgatctgcgctggtacgccactgacgagaagaacatgatgctggacaatcatgcgctgtatgacctgaccaagaaaatctttctcaaagctaaatcggaagaggaaattttcgcacatctggggcttgaatacctggaaccgttcgaacgtaacgca

SEQ ID NO: 2340 - protein, 529 aa, synthetic construct
  REGION 1..529: note = Variant of terminal deoxynucleotidyltransferase
MHAHHHHGGSGSHGIRTIDSDFGKKRQKKMDNHDSSAIYEIKFHEFVLFILEEKMGATRRTFLTDLARKKGFRVENELSDSVTHIVAENNSRSEVLAWLKEHKMEKTKQFELLDISWLIESMKVGKPVDTKGKYQLAESGEMSANPDPTEGRENELPPTMKTVSPYACQRRTTLNNHNQRFTDALEILAENYEFKRNDDTALEFRRAISVLKSLPFEVRSLKDTEGLPWIGDEVKGIMEEIIEVGESLEVQAVLNDEWYQSFKRFKSVFGVGVKTADKWYRMGLRTLEDVRSSKTLKLTPMQKAGLCYYEDLARGVTKAEADAISLLVQDAVATFDPDALVEIVGGFRRGKPQGHDVDLLITSPGAEKEQEDQLLQKVTNLWKKQGLLLYGRLEWSQFEDGKLPSGKADALDHHAKCFLILKLYDHKVDKSKWEMPTGSNMGEAKPWKAIRVDLVRCPYGGFAFALLGWTGSRMFRRDLRWYATDEKNMMLDNHALYDLTKKIFLKAKSEEEIFAHLGLEYLEPFERNA

SEQ ID NO: 2341 - DNA, 1587 bp, synthetic construct
  misc_feature 1..1587: note = Variant of terminal deoxynucleotidyltransferase
  source 1..1587: mol_type = other DNA
atgcaccatcatcatcatcatggcggtagcggcagccacggcattcgtaccatcgattcggacttcgggaagaaacgccagaaaaaaatggataaccacgatagttccgccatctatgaaatcaaatttcacgagtttgtgctgttcattctcgaagaaaaaatgggtgcgacgcgtcgtacttttctgacagatttagcccgcaagaaagggttccgcgtcgagaatgaactgtcagacagcgttacccacatcgtggcagaaaatttgtcacgctctgaagtattggcttggctgaaagaacacaagatggagaagaccaagcaattcgaactgctggatattagctggcttatcgaaagcatgaaagttggtaaaccggtggacaccaaggggaaataccagttggcggaatcgggtgagatgagtgcgaacccagatccgacagagggtcgtgaaaacgagctgcctcctactatgaagaccgtttctccgtatgcgtgtcaacgccgcaccaccctgaacaaccataatcaacgttttacggacgcactggaaattcttgcggaaaattacgagttcaaacgcaacgatgatactgcgctggaatttcgtcgtgctatctccgtgctgaaaagccttccgtttgaggtacgtagcctgaaagacacggaaggattgccctggatcggtgatgaagtcaaagggattatggaagaaatcatcgaggtcggtgaatcgctggaagtgcaggccgtgctcaatgatgagtggtatcaaagcttcaaacgctttaagagtgtctttggagtgggggtgaagacagcagacaagtggtaccgtatgggtctgcgcacgctcgaggatgttcgttccagcaagaccctgaagttgaccccgatgcagaaagcgggtctgtgctattatgaagatcttgctcgcggcgttacgaaagccgaagctgacgcgatttctctgctggttcaggatgcagtcgcaactttcgacccggatgcgctggtggagattgtcggtggatttcgtcgtgggaaacctcagggtcacgacgttgatctgcttatcacatctccgggagctgagaaagagcaagaagaccagctcctgcagaaagtgaccaatctgtggaagaaacaagggttgttgctgtacggtcgtctggaatggagtcagtttgaagatgggaaactcccatccggtaaggctgatgccctggaccaccacgcgaaatgctttctgatcctcaaactttatgatcataaagtggacaaaagcaaatgggaaatgccgacgggttcgaacatgggcgaggccaaaccgtggaaagcaattcgcgtagatctggttcgttgcccctacggcggttttgcgtttgcgttgttgggttggaccggaagccgcatgttccgccgtgatctgcgctggtacgccactgacgagaagaacatgatgctggacaatcatgcgctgtatgacctgaccaagaaaatctttctcaaagctaaatcggaagaggaaattttcgcacatctggggcttgaatacctggaaccgttcgaacgtaacgca

SEQ ID NO: 2342 - protein, 529 aa, synthetic construct
  REGION 1..529: note = Variant of terminal deoxynucleotidyltransferase
MHHHHHHGGSGSHGIRTIDSDFGKKRQKKMDNHDSSAIYEIKFHEFVLFILEEKMGATRRTFLTDLARKKGFRVENELSDSVTHIVAENLSRSEVLAWLKEHKMEKTKQFELLDISWLIESMKVGKPVDTKGKYQLAESGEMSANPDPTEGRENELPPTMKTVSPYACQRRTTLNNHNQRFTDALEILAENYEFKRNDDTALEFRRAISVLKSLPFEVRSLKDTEGLPWIGDEVKGIMEEIIEVGESLEVQAVLNDEWYQSFKRFKSVFGVGVKTADKWYRMGLRTLEDVRSSKTLKLTPMQKAGLCYYEDLARGVTKAEADAISLLVQDAVATFDPDALVEIVGGFRRGKPQGHDVDLLITSPGAEKEQEDQLLQKVTNLWKKQGLLLYGRLEWSQFEDGKLPSGKADALDHHAKCFLILKLYDHKVDKSKWEMPTGSNMGEAKPWKAIRVDLVRCPYGGFAFALLGWTGSRMFRRDLRWYATDEKNMMLDNHALYDLTKKIFLKAKSEEEIFAHLGLEYLEPFERNA

SEQ ID NO: 2343 - DNA, 1587 bp, synthetic construct
  misc_feature 1..1587: note = Variant of terminal deoxynucleotidyltransferase
  source 1..1587: mol_type = other DNA
atgcaccatcatcatcatcatggcggtagcggcagccacggcgctcgtaccatcgattcggacttcgggaagaaacgccagaaaaaaatggataaccacgatagttccgccatctatgaaatcaaatttcacgagtttgtgctgttcattctcgaagaaaaaatgggtgcgacgcgtcgtacttttctgacagatttagcccgcaagaaagggttccgcgtcgagaatgaactgtcagacagcgttacccacatcgtggcagaaaataattcacgctctgaagtattggcttggctgaaagaacacaagatggagaagaccaagcaattcgaactgctggatattagctggcttatcgaaagcatgaaagttggtaaaccggtggacaccaaggggaaataccagttggcggaatcgggtgagatgagtgcgaacccagatccgacagagggtcgtgaaaacgagctgcctcctactatgaagaccgtttctccgtatgcgtgtcaacgccgcaccaccctgaacaaccataatcaacgttttacggacgcactggaaattcttgcggaaaattacgagttcaaacgcaacgatgatactgcgctggaatttcgtcgtgctatctccgtgctgaaaagccttccgtttgaggtacgtagcctgaaagacacggaaggattgccctggatcggtgatgaagtcaaagggattatggaagaaatcatcgaggtcggtgaatcgctggaagtgcaggccgtgctcaatgatgagtggtatcaaagcttcaaacgctttaagagtgtctttggagtgggggtgaagacagcagacaagtggtaccgtatgggtctgcgcacgctcgaggatgttcgttccagcaagaccctgaagttgaccccgatgcagaaagcgggtctgtgctattatgaagatcttgctcgcggcgttacgaaagccgaagctgacgcgatttctctgctggttcaggatgcagtcgcaactttcgacccggatgcgctggtggagattgtcggtggatttcgtcgtgggaaacctcagggtcacgacgttgatctgcttatcacatctccgggagctgagaaagagcaagaagaccagctcctgcagaaagtgaccaatctgtggaagaaacaagggttgttgctgtacggtcgtctggaatggagtcagtttgaagatgggaaactcccatccggtaaggctgatgccctggaccaccacgcgaaatgctttctgatcctcaaactttatgatcataaagtggacaaaagcaaatgggaaatgccgacgggttcgaacatgggcgaggccaaaccgtggaaagcaattcgcgtagatctggttcgttgcccctacggcggttttgcgtttgcgttgttgggttggaccggaagccgcatgttccgccgtgatctgcgctggtacgccactgacgagaagaacatgatgctggacaatcatgcgctgtatgacctgaccaagaaaatctttctcaaagctaaatcggaagaggaaattttcgcacatctggggcttgaatacctggaaccgttcgaacgtaacgca

SEQ ID NO: 2344 - protein, 529 aa, synthetic construct
  REGION 1..529: note = Variant of terminal deoxynucleotidyltransferase
MHHHHHHGGSGSHGARTIDSDFGKKRQKKMDNHDSSAIYEIKFHEFVLFILEEKMGATRRTFLTDLARKKGFRVENELSDSVTHIVAENNSRSEVLAWLKEHKMEKTKQFELLDISWLIESMKVGKPVDTKGKYQLAESGEMSANPDPTEGRENELPPTMKTVSPYACQRRTTLNNHNQRFTDALEILAENYEFKRNDDTALEFRRAISVLKSLPFEVRSLKDTEGLPWIGDEVKGIMEEIIEVGESLEVQAVLNDEWYQSFKRFKSVFGVGVKTADKWYRMGLRTLEDVRSSKTLKLTPMQKAGLCYYEDLARGVTKAEADAISLLVQDAVATFDPDALVEIVGGFRRGKPQGHDVDLLITSPGAEKEQEDQLLQKVTNLWKKQGLLLYGRLEWSQFEDGKLPSGKADALDHHAKCFLILKLYDHKVDKSKWEMPTGSNMGEAKPWKAIRVDLVRCPYGGFAFALLGWTGSRMFRRDLRWYATDEKNMMLDNHALYDLTKKIFLKAKSEEEIFAHLGLEYLEPFERNA

SEQ ID NO: 2345 - DNA, 1587 bp, synthetic construct
  misc_feature 1..1587: note = Variant of terminal deoxynucleotidyltransferase
  source 1..1587: mol_type = other DNA
atgcaccatcatcatcatcatggcggtagcggcagccacggcattcgtaccatcgattcggacttcgggaagaaacgccagaaaaaaatggataaccacgatagttccgccatctatgaaatcaaatttcacgagtttgtgctgttcattctcgaagaaaaaatgggtgcgacgcgtcgtacttttctgacagatttagcccgcaagaaagggttccgcgtcgagaatgaactgtcagacagcgttacccacatcgtggcagaaaataattcacgctctgaagtattggcttggctgaaagaacacaagatggagaagaccaagcaattcgaactgctggatattagctggcttatcgaaagcatgaaagttggtaaaccggtggacaccaaggggaaataccagttggcggaatcgggtgagatgagtgcgaacccagatccgacagagggtcgtgaaaacgagctgcctcctactatgaagaccgtttctccgtatgcgtgtcaacgccgcaccaccctgaacaaccataatcaacgttttacggacgcactggaaattcttgcggaaaattacgagttcaaacgcaacgatgatactgcgctggaatttcgtcgtgctatctccgtgctgaaaagccttccgtttgaggtacgtagcctgaaagacacggaaggattgccctggatcggtgatgaagtcaaagggattatggaagaaatcatcgaggtcggtgaatcggttgaagtgcaggccgtgctcaatgatgagtggtatcaaagcttcaaacgctttaagagtgtctttggagtgggggtgaagacagcagacaagtggtaccgtatgggtctgcgcacgctcgaggatgttcgttccagcaagaccctgaagttgaccccgatgcagaaagcgggtctgtgctattatgaagatcttgctcgcggcgttacgaaagccgaagctgacgcgatttctctgctggttcaggatgcagtcgcaactttcgacccggatgcgctggtggagattgtcggtggatttcgtcgtgggaaacctcagggtcacgacgttgatctgcttatcacatctccgggagctgagaaagagcaagaagaccagctcctgcagaaagtgaccaatctgtggaagaaacaagggttgttgctgtacggtcgtctggaatggagtcagtttgaagatgggaaactcccatccggtaaggctgatgccctggaccaccacgcgaaatgctttctgatcctcaaactttatgatcataaagtggacaaaagcaaatgggaaatgccgacgggttcgaacatgggcgaggccaaaccgtggaaagcaattcgcgtagatctggttcgttgcccctacggcggttttgcgtttgcgttgttgggttggaccggaagccgcatgttccgccgtgatctgcgctggtacgccactgacgagaagaacatgatgctggacaatcatgcgctgtatgacctgaccaagaaaatctttctcaaagctaaatcggaagaggaaattttcgcacatctggggcttgaatacctggaaccgttcgaacgtaacgca

SEQ ID NO: 2346 - protein, 529 aa, synthetic construct
  REGION 1..529: note = Variant of terminal deoxynucleotidyltransferase
MHHHHHHGGSGSHGIRTIDSDFGKKRQKKMDNHDSSAIYEIKFHEFVLFILEEKMGATRRTFLTDLARKKGFRVENELSDSVTHIVAENNSRSEVLAWLKEHKMEKTKQFELLDISWLIESMKVGKPVDTKGKYQLAESGEMSANPDPTEGRENELPPTMKTVSPYACQRRTTLNNHNQRFTDALEILAENYEFKRNDDTALEFRRAISVLKSLPFEVRSLKDTEGLPWIGDEVKGIMEEIIEVGESVEVQAVLNDEWYQSFKRFKSVFGVGVKTADKWYRMGLRTLEDVRSSKTLKLTPMQKAGLCYYEDLARGVTKAEADAISLLVQDAVATFDPDALVEIVGGFRRGKPQGHDVDLLITSPGAEKEQEDQLLQKVTNLWKKQGLLLYGRLEWSQFEDGKLPSGKADALDHHAKCFLILKLYDHKVDKSKWEMPTGSNMGEAKPWKAIRVDLVRCPYGGFAFALLGWTGSRMFRRDLRWYATDEKNMMLDNHALYDLTKKIFLKAKSEEEIFAHLGLEYLEPFERNA

SEQ ID NO: 2347 - DNA, 1587 bp, synthetic construct
  misc_feature 1..1587: note = Variant of terminal deoxynucleotidyltransferase
  source 1..1587: mol_type = other DNA
atgcaccatcatcatcatcatggcggtagcggcagccacggcattcgtaccatcgattcggacttcgggaagaaacgccagaaaaaaatggataaccacgatagttccgccatctatgaaatcaaatttcacgagtttgtgctgttcattctcgaagaaaaaatgggtgcgacgcgtcgtacttttctgacagatttagcccgcaagaaagggttccgcgtcgagaatgaactgtcagacagcgttacccacatcgtggcagaaaataattcacgctctgaagtattggcttggctgaaagaacacaagatggagaagaccaagcaattcgaactgctggatattagctggcttatcgaaagcatgaaagttggtaaaccggtggacaccaaggggaaataccagttggcggaatcgggtgagatgagtgcgaacccagatccgacagagggtcgtgaaaacgagctgcctcctactatgaagaccgtttctccgtatgcgtgtcaacgccgcaccaccctgaacaaccataatcaacgttttacggacgcactggaaattcttgcggaaaattacgagttcaaacgcaacgatgatactgcgctggaatttcgtcgtgctatctccgtgctgaaaagccttccgtttgaggtacgtagcctgaaagacacggaaggattgccctggatcggtgatgaagtcaaagggattatggaagaaatcatcgaggtcggtgaatcgctggctgtgcaggccgtgctcaatgatgagtggtatcaaagcttcaaacgctttaagagtgtctttggagtgggggtgaagacagcagacaagtggtaccgtatgggtctgcgcacgctcgaggatgttcgttccagcaagaccctgaagttgaccccgatgcagaaagcgggtctgtgctattatgaagatcttgctcgcggcgttacgaaagccgaagctgacgcgatttctctgctggttcaggatgcagtcgcaactttcgacccggatgcgctggtggagattgtcggtggatttcgtcgtgggaaacctcagggtcacgacgttgatctgcttatcacatctccgggagctgagaaagagcaagaagaccagctcctgcagaaagtgaccaatctgtggaagaaacaagggttgttgctgtacggtcgtctggaatggagtcagtttgaagatgggaaactcccatccggtaaggctgatgccctggaccaccacgcgaaatgctttctgatcctcaaactttatgatcataaagtggacaaaagcaaatgggaaatgccgacgggttcgaacatgggcgaggccaaaccgtggaaagcaattcgcgtagatctggttcgttgcccctacggcggttttgcgtttgcgttgttgggttggaccggaagccgcatgttccgccgtgatctgcgctggtacgccactgacgagaagaacatgatgctggacaatcatgcgctgtatgacctgaccaagaaaatctttctcaaagctaaatcggaagaggaaattttcgcacatctggggcttgaatacctggaaccgttcgaacgtaacgca

SEQ ID NO: 2348 - protein, 529 aa, synthetic construct
  REGION 1..529: note = Variant of terminal deoxynucleotidyltransferase
MHHHHHHGGSGSHGIRTIDSDFGKKRQKKMDNHDSSAIYEIKFHEFVLFILEEKMGATRRTFLTDLARKKGFRVENELSDSVTHIVAENNSRSEVLAWLKEHKMEKTKQFELLDISWLIESMKVGKPVDTKGKYQLAESGEMSANPDPTEGRENELPPTMKTVSPYACQRRTTLNNHNQRFTDALEILAENYEFKRNDDTALEFRRAISVLKSLPFEVRSLKDTEGLPWIGDEVKGIMEEIIEVGESLAVQAVLNDEWYQSFKRFKSVFGVGVKTADKWYRMGLRTLEDVRSSKTLKLTPMQKAGLCYYEDLARGVTKAEADAISLLVQDAVATFDPDALVEIVGGFRRGKPQGHDVDLLITSPGAEKEQEDQLLQKVTNLWKKQGLLLYGRLEWSQFEDGKLPSGKADALDHHAKCFLILKLYDHKVDKSKWEMPTGSNMGEAKPWKAIRVDLVRCPYGGFAFALLGWTGSRMFRRDLRWYATDEKNMMLDNHALYDLTKKIFLKAKSEEEIFAHLGLEYLEPFERNA

SEQ ID NO: 2349 - DNA, 1587 bp, synthetic construct
  misc_feature 1..1587: note = Variant of terminal deoxynucleotidyltransferase
  source 1..1587: mol_type = other DNA
atgcaccatcatcatcatcatggcggtagcggcagccacggcattcgtaccatcgattcggacttcgggaagaaacgccagaaaaaaatggataaccacgatagttccgccatctatgaaatcaaatttcacgagtttgtgctgttcattctcgaagaaaaaatgggtgcgacgcgtcgtacttttctgacagatttagcccgcaagaaagggttccgcgtcgagaatgaactgtcagacagcgttacccacatcgtggcagaaaataattcacgctctgaagtattggcttggctgaaagaacacaagatggagaagaccaagcaattcgaactgctggatattagctggcttatcgaaagcatgaaagttggtaaaccggtggacaccaaggggaaataccagttggcggaatcgggtgagatgagtgcgaacccagatccgacagagggtcgtgaaaacgagctgcctcctactatgaagaccgtttctccgtatgcgtgtcaacgccgcaccaccctgaacaaccataatcaacgttttacggacgcactggaaattcttgcggaaaattacgagttcaaacgcaacgatgatactgcgctggaatttcgtcgtgctatctccgtgctgaaaagccttccgtttgaggtacgtagcctgaaagacacggaaggattgccctggatcggtgatgaagtcaaagggattatggaagaaatcatcgaggtcggtgaatcgctggaagtgcaggccgtgctcggggatgagtggtatcaaagcttcaaacgctttaagagtgtctttggagtgggggtgaagacagcagacaagtggtaccgtatgggtctgcgcacgctcgaggatgttcgttccagcaagaccctgaagttgaccccgatgcagaaagcgggtctgtgctattatgaagatcttgctcgcggcgttacgaaagccgaagctgacgcgatttctctgctggttcaggatgcagtcgcaactttcgacccggatgcgctggtggagattgtcggtggatttcgtcgtgggaaacctcagggtcacgacgttgatctgcttatcacatctccgggagctgagaaagagcaagaagaccagctcctgcagaaagtgaccaatctgtggaagaaacaagggttgttgctgtacggtcgtctggaatggagtcagtttgaagatgggaaactcccatccggtaaggctgatgccctggaccaccacgcgaaatgctttctgatcctcaaactttatgatcataaagtggacaaaagcaaatgggaaatgccgacgggttcgaacatgggcgaggccaaaccgtggaaagcaattcgcgtagatctggttcgttgcccctacggcggttttgcgtttgcgttgttgggttggaccggaagccgcatgttccgccgtgatctgcgctggtacgccactgacgagaagaacatgatgctggacaatcatgcgctgtatgacctgaccaagaaaatctttctcaaagctaaatcggaagaggaaattttcgcacatctggggcttgaatacctggaaccgttcgaacgtaacgca

SEQ ID NO: 2350 - protein, 529 aa, synthetic construct
  REGION 1..529: note = Variant of terminal deoxynucleotidyltransferase
MHHHHHHGGSGSHGIRTIDSDFGKKRQKKMDNHDSSAIYEIKFHEFVLFILEEKMGATRRTFLTDLARKKGFRVENELSDSVTHIVAENNSRSEVLAWLKEHKMEKTKQFELLDISWLIESMKVGKPVDTKGKYQLAESGEMSANPDPTEGRENELPPTMKTVSPYACQRRTTLNNHNQRFTDALEILAENYEFKRNDDTALEFRRAISVLKSLPFEVRSLKDTEGLPWIGDEVKGIMEEIIEVGESLEVQAVLGDEWYQSFKRFKSVFGVGVKTADKWYRMGLRTLEDVRSSKTLKLTPMQKAGLCYYEDLARGVTKAEADAISLLVQDAVATFDPDALVEIVGGFRRGKPQGHDVDLLITSPGAEKEQEDQLLQKVTNLWKKQGLLLYGRLEWSQFEDGKLPSGKADALDHHAKCFLILKLYDHKVDKSKWEMPTGSNMGEAKPWKAIRVDLVRCPYGGFAFALLGWTGSRMFRRDLRWYATDEKNMMLDNHALYDLTKKIFLKAKSEEEIFAHLGLEYLEPFERNA

SEQ ID NO: 2351 - DNA, 1587 bp, synthetic construct
  misc_feature 1..1587: note = Variant of terminal deoxynucleotidyltransferase
  source 1..1587: mol_type = other DNA
atgcaccatcatcatcatcatggcggtagctgtagccacggcattcgtaccatcgattcggacttcgggaagaaacgccagaaaaaaatggataaccacgatagttccgccatctatgaaatcaaatttcacgagtttgtgctgttcattctcgaagaaaaaatgggtgcgacgcgtcgtacttttctgacagatttagcccgcaagaaagggttccgcgtcgagaatgaactgtcagacagcgttacccacatcgtggcagaaaataattcacgctctgaagtattggcttggctgaaagaacacaagatggagaagaccaagcaattcgaactgctggatattagctggcttatcgaaagcatgaaagttggtaaaccggtggacaccaaggggaaataccagttggcggaatcgggtgagatgagtgcgaacccagatccgacagagggtcgtgaaaacgagctgcctcctactatgaagaccgtttctccgtatgcgtgtcaacgccgcaccaccctgaacaaccataatcaacgttttacggacgcactggaaattcttgcggaaaattacgagttcaaacgcaacgatgatactgcgctggaatttcgtcgtgctatctccgtgctgaaaagccttccgtttgaggtacgtagcctgaaagacacggaaggattgccctggatcggtgatgaagtcaaagggattatggaagaaatcatcgaggtcggtgaatcgctggaagtgcaggccgtgctcaatgatgagtggtatcaaagcttcaaacgctttaagagtgtctttggagtgggggtgaagacagcagacaagtggtaccgtatgggtctgcgcacgctcgaggatgttcgttccagcaagaccctgaagttgaccccgatgcagaaagcgggtctgtgctattatgaagatcttgctcgcggcgttacgaaagccgaagctgacgcgatttctctgctggttcaggatgcagtcgcaactttcgacccggatgcgctggtggagattgtcggtggatttcgtcgtgggaaacctcagggtcacgacgttgatctgcttatcacatctccgggagctgagaaagagcaagaagaccagctcctgcagaaagtgaccaatctgtggaagaaacaagggttgttgctgtacggtcgtctggaatggagtcagtttgaagatgggaaactcccatccggtaaggctgatgccctggaccaccacgcgaaatgctttctgatcctcaaactttatgatcataaagtggacaaaagcaaatgggaaatgccgacgggttcgaacatgggcgaggccaaaccgtggaaagcaattcgcgtagatctggttcgttgcccctacggcggttttgcgtttgcgttgttgggttggaccggaagccgcatgttccgccgtgatctgcgctggtacgccactgacgagaagaacatgatgctggacaatcatgcgctgtatgacctgaccaagaaaatctttctcaaagctaaatcggaagaggaaattttcgcacatctggggcttgaatacctggaaccgttcgaacgtaacgca

SEQ ID NO: 2352 - protein, 529 aa, synthetic construct
  REGION 1..529: note = Variant of terminal deoxynucleotidyltransferase
MHHHHHHGGSCSHGIRTIDSDFGKKRQKKMDNHDSSAIYEIKFHEFVLFILEEKMGATRRTFLTDLARKKGFRVENELSDSVTHIVAENNSRSEVLAWLKEHKMEKTKQFELLDISWLIESMKVGKPVDTKGKYQLAESGEMSANPDPTEGRENELPPTMKTVSPYACQRRTTLNNHNQRFTDALEILAENYEFKRNDDTALEFRRAISVLKSLPFEVRSLKDTEGLPWIGDEVKGIMEEIIEVGESLEVQAVLNDEWYQSFKRFKSVFGVGVKTADKWYRMGLRTLEDVRSSKTLKLTPMQKAGLCYYEDLARGVTKAEADAISLLVQDAVATFDPDALVEIVGGFRRGKPQGHDVDLLITSPGAEKEQEDQLLQKVTNLWKKQGLLLYGRLEWSQFEDGKLPSGKADALDHHAKCFLILKLYDHKVDKSKWEMPTGSNMGEAKPWKAIRVDLVRCPYGGFAFALLGWTGSRMFRRDLRWYATDEKNMMLDNHALYDLTKKIFLKAKSEEEIFAHLGLEYLEPFERNA

SEQ ID NO: 2353 - DNA, 1587 bp, synthetic construct
  misc_feature 1..1587: note = Variant of terminal deoxynucleotidyltransferase
  source 1..1587: mol_type = other DNA
atgcaccatcatcatcatcatggcggtagcggcagccacggcattcgtaccatcgattcggacttcgggaagaaacgccagaaaaaaatggataaccacgatagttccgccatctatgaaatcaaatttcacgagtttgtgctgttcattctcgaagaaaaaatgggtgcgacgcgtcgtacttttctgacagatttagcccgcaagaaagggttccgcgtcgagaatgaactgtcagacagcgttacccacatcgtggcagaaaataattcacgctctgaagtattggcttggctgaaagaacacaagatggagaagaccaagcaattcgaactgctggatattagctggcttatcgaaagcatgaaagttggtaaaccggtggacaccaaggggaaataccagttggcggaatcgggtgagatgagtgcgaacccagatccgacagagggtcgtgaaaacgagctgcctcctactatgaagaccgtttctccgtatgcgtgtcaacgccgcaccaccctgaacaaccataatcaacgttttacggacgcactggaaattcttgcggaaaattacgagttcaaacgcaacgatgatactgcgctggaatttcgtcgtgctatctccgtgctgaaaagccttccgtttgaggtacgtagcctgaaagacacggaaggattgccctggatcggtgatgaagtcaaagggattatggaagaaatcatcgaggtcggtgaatcgctgggggtgcaggccgtgctcaatgatgagtggtatcaaagcttcaaacgctttaagagtgtctttggagtgggggtgaagacagcagacaagtggtaccgtatgggtctgcgcacgctcgaggatgttcgttccagcaagaccctgaagttgaccccgatgcagaaagcgggtctgtgctattatgaagatcttgctcgcggcgttacgaaagccgaagctgacgcgatttctctgctggttcaggatgcagtcgcaactttcgacccggatgcgctggtggagattgtcggtggatttcgtcgtgggaaacctcagggtcacgacgttgatctgcttatcacatctccgggagctgagaaagagcaagaagaccagctcctgcagaaagtgaccaatctgtggaagaaacaagggttgttgctgtacggtcgtctggaatggagtcagtttgaagatgggaaactcccatccggtaaggctgatgccctggaccaccacgcgaaatgctttctgatcctcaaactttatgatcataaagtggacaaaagcaaatgggaaatgccgacgggttcgaacatgggcgaggccaaaccgtggaaagcaattcgcgtagatctggttcgttgcccctacggcggttttgcgtttgcgttgttgggttggaccggaagccgcatgttccgccgtgatctgcgctggtacgccactgacgagaagaacatgatgctggacaatcatgcgctgtatgacctgaccaagaaaatctttctcaaagctaaatcggaagaggaaattttcgcacatctggggcttgaatacctggaaccgttcgaacgtaacgca

SEQ ID NO: 2354 - protein, 529 aa, synthetic construct
  REGION 1..529: note = Variant of terminal deoxynucleotidyltransferase
MHHHHHHGGSGSHGIRTIDSDFGKKRQKKMDNHDSSAIYEIKFHEFVLFILEEKMGATRRTFLTDLARKKGFRVENELSDSVTHIVAENNSRSEVLAWLKEHKMEKTKQFELLDISWLIESMKVGKPVDTKGKYQLAESGEMSANPDPTEGRENELPPTMKTVSPYACQRRTTLNNHNQRFTDALEILAENYEFKRNDDTALEFRRAISVLKSLPFEVRSLKDTEGLPWIGDEVKGIMEEIIEVGESLGVQAVLNDEWYQSFKRFKSVFGVGVKTADKWYRMGLRTLEDVRSSKTLKLTPMQKAGLCYYEDLARGVTKAEADAISLLVQDAVATFDPDALVEIVGGFRRGKPQGHDVDLLITSPGAEKEQEDQLLQKVTNLWKKQGLLLYGRLEWSQFEDGKLPSGKADALDHHAKCFLILKLYDHKVDKSKWEMPTGSNMGEAKPWKAIRVDLVRCPYGGFAFALLGWTGSRMFRRDLRWYATDEKNMMLDNHALYDLTKKIFLKAKSEEEIFAHLGLEYLEPFERNA

SEQ ID NO: 2355 - DNA, 1587 bp, synthetic construct
  misc_feature 1..1587: note = Variant of terminal deoxynucleotidyltransferase
  source 1..1587: mol_type = other DNA
atgcaccatcatcatcatcatggcggtagcggcagccacggcattcgtaccatcgattcggacttcgggaagaaacgccagaaaaaaatggataaccacgatagttccgccatctatgaaatcaaatttcacgagtttgtgctgttcattctcgaagaaaaaatgggtgcgacgcgtcgtacttttctgacagatttagcccgcaagaaagggttccgcgtcgagaatgaactgtcagacagcgttacccacatcgtggcagaaaattcgtcacgctctgaagtattggcttggctgaaagaacacaagatggagaagaccaagcaattcgaactgctggatattagctggcttatcgaaagcatgaaagttggtaaaccggtggacaccaaggggaaataccagttggcggaatcgggtgagatgagtgcgaacccagatccgacagagggtcgtgaaaacgagctgcctcctactatgaagaccgtttctccgtatgcgtgtcaacgccgcaccaccctgaacaaccataatcaacgttttacggacgcactggaaattcttgcggaaaattacgagttcaaacgcaacgatgatactgcgctggaatttcgtcgtgctatctccgtgctgaaaagccttccgtttgaggtacgtagcctgaaagacacggaaggattgccctggatcggtgatgaagtcaaagggattatggaagaaatcatcgaggtcggtgaatcgctggaagtgcaggccgtgctcaatgatgagtggtatcaaagcttcaaacgctttaagagtgtctttggagtgggggtgaagacagcagacaagtggtaccgtatgggtctgcgcacgctcgaggatgttcgttccagcaagaccctgaagttgaccccgatgcagaaagcgggtctgtgctattatgaagatcttgctcgcggcgttacgaaagccgaagctgacgcgatttctctgctggttcaggatgcagtcgcaactttcgacccggatgcgctggtggagattgtcggtggatttcgtcgtgggaaacctcagggtcacgacgttgatctgcttatcacatctccgggagctgagaaagagcaagaagaccagctcctgcagaaagtgaccaatctgtggaagaaacaagggttgttgctgtacggtcgtctggaatggagtcagtttgaagatgggaaactcccatccggtaaggctgatgccctggaccaccacgcgaaatgctttctgatcctcaaactttatgatcataaagtggacaaaagcaaatgggaaatgccgacgggttcgaacatgggcgaggccaaaccgtggaaagcaattcgcgtagatctggttcgttgcccctacggcggttttgcgtttgcgttgttgggttggaccggaagccgcatgttccgccgtgatctgcgctggtacgccactgacgagaagaacatgatgctggacaatcatgcgctgtatgacctgaccaagaaaatctttctcaaagctaaatcggaagaggaaattttcgcacatctggggcttgaatacctggaaccgttcgaacgtaacgca

SEQ ID NO: 2356 - protein, 529 aa, synthetic construct
  REGION 1..529: note = Variant of terminal deoxynucleotidyltransferase
MHHHHHHGGSGSHGIRTIDSDFGKKRQKKMDNHDSSAIYEIKFHEFVLFILEEKMGATRRTFLTDLARKKGFRVENELSDSVTHIVAENSSRSEVLAWLKEHKMEKTKQFELLDISWLIESMKVGKPVDTKGKYQLAESGEMSANPDPTEGRENELPPTMKTVSPYACQRRTTLNNHNQRFTDALEILAENYEFKRNDDTALEFRRAISVLKSLPFEVRSLKDTEGLPWIGDEVKGIMEEIIEVGESLEVQAVLNDEWYQSFKRFKSVFGVGVKTADKWYRMGLRTLEDVRSSKTLKLTPMQKAGLCYYEDLARGVTKAEADAISLLVQDAVATFDPDALVEIVGGFRRGKPQGHDVDLLITSPGAEKEQEDQLLQKVTNLWKKQGLLLYGRLEWSQFEDGKLPSGKADALDHHAKCFLILKLYDHKVDKSKWEMPTGSNMGEAKPWKAIRVDLVRCPYGGFAFALLGWTGSRMFRRDLRWYATDEKNMMLDNHALYDLTKKIFLKAKSEEEIFAHLGLEYLEPFERNA

SEQ ID NO: 2357 - DNA, 1587 bp, synthetic construct
  misc_feature 1..1587: note = Variant of terminal deoxynucleotidyltransferase
  source 1..1587: mol_type = other DNA
atgcaccatcatcatcatcatggcggtagcggcagccacggcattcgtaccatcgattcggacttcgggaagaaacgccagaaaaaaatggataaccacgatagttccgccatcgcggaaatcaaatttcacgagtttgtgctgttcattctcgaagaaaaaatgggtgcgacgcgtcgtacttttctgacagatttagcccgcaagaaagggttccgcgtcgagaatgaactgtcagacagcgttacccacatcgtggcagaaaataattcacgctctgaagtattggcttggctgaaagaacacaagatggagaagaccaagcaattcgaactgctggatattagctggcttatcgaaagcatgaaagttggtaaaccggtggacaccaaggggaaataccagttggcggaatcgggtgagatgagtgcgaacccagatccgacagagggtcgtgaaaacgagctgcctcctactatgaagaccgtttctccgtatgcgtgtcaacgccgcaccaccctgaacaaccataatcaacgttttacggacgcactggaaattcttgcggaaaattacgagttcaaacgcaacgatgatactgcgctggaatttcgtcgtgctatctccgtgctgaaaagccttccgtttgaggtacgtagcctgaaagacacggaaggattgccctggatcggtgatgaagtcaaagggattatggaagaaatcatcgaggtcggtgaatcgctggaagtgcaggccgtgctcaatgatgagtggtatcaaagcttcaaacgctttaagagtgtctttggagtgggggtgaagacagcagacaagtggtaccgtatgggtctgcgcacgctcgaggatgttcgttccagcaagaccctgaagttgaccccgatgcagaaagcgggtctgtgctattatgaagatcttgctcgcggcgttacgaaagccgaagctgacgcgatttctctgctggttcaggatgcagtcgcaactttcgacccggatgcgctggtggagattgtcggtggatttcgtcgtgggaaacctcagggtcacgacgttgatctgcttatcacatctccgggagctgagaaagagcaagaagaccagctcctgcagaaagtgaccaatctgtggaagaaacaagggttgttgctgtacggtcgtctggaatggagtcagtttgaagatgggaaactcccatccggtaaggctgatgccctggaccaccacgcgaaatgctttctgatcctcaaactttatgatcataaagtggacaaaagcaaatgggaaatgccgacgggttcgaacatgggcgaggccaaaccgtggaaagcaattcgcgtagatctggttcgttgcccctacggcggttttgcgtttgcgttgttgggttggaccggaagccgcatgttccgccgtgatctgcgctggtacgccactgacgagaagaacatgatgctggacaatcatgcgctgtatgacctgaccaagaaaatctttctcaaagctaaatcggaagaggaaattttcgcacatctggggcttgaatacctggaaccgttcgaacgtaacgca

SEQ ID NO: 2358 - protein, 529 aa, synthetic construct
  REGION 1..529: note = Variant of terminal deoxynucleotidyltransferase
MHHHHHHGGSGSHGIRTIDSDFGKKRQKKMDNHDSSAIAEIKFHEFVLFILEEKMGATRRTFLTDLARKKGFRVENELSDSVTHIVAENNSRSEVLAWLKEHKMEKTKQFELLDISWLIESMKVGKPVDTKGKYQLAESGEMSANPDPTEGRENELPPTMKTVSPYACQRRTTLNNHNQRFTDALEILAENYEFKRNDDTALEFRRAISVLKSLPFEVRSLKDTEGLPWIGDEVKGIMEEIIEVGESLEVQAVLNDEWYQSFKRFKSVFGVGVKTADKWYRMGLRTLEDVRSSKTLKLTPMQKAGLCYYEDLARGVTKAEADAISLLVQDAVATFDPDALVEIVGGFRRGKPQGHDVDLLITSPGAEKEQEDQLLQKVTNLWKKQGLLLYGRLEWSQFEDGKLPSGKADALDHHAKCFLILKLYDHKVDKSKWEMPTGSNMGEAKPWKAIRVDLVRCPYGGFAFALLGWTGSRMFRRDLRWYATDEKNMMLDNHALYDLTKKIFLKAKSEEEIFAHLGLEYLEPFERNA

SEQ ID NO: 2359 - DNA, 1587 bp, synthetic construct
  misc_feature 1..1587: note = Variant of terminal deoxynucleotidyltransferase
  source 1..1587: mol_type = other DNA
atgcaccatcatcatcatcatggcggtagcggcagccacggcattcgtaccatcgattcggacttcgggaagaaacgccagaaaaaaatggataaccacgatagttccgccatctatgaaatcaaatttcacgagtttgtgctgttcattctcgaagaaaaaatgggtgcgacgcgtcgtacttttctgacagatttagcccgcaagaaagggttccgcgtcgagaatgaactgtcagacagcgttacccacatcgtggcagaaaatatgtcacgctctgaagtattggcttggctgaaagaacacaagatggagaagaccaagcaattcgaactgctggatattagctggcttatcgaaagcatgaaagttggtaaaccggtggacaccaaggggaaataccagttggcggaatcgggtgagatgagtgcgaacccagatccgacagagggtcgtgaaaacgagctgcctcctactatgaagaccgtttctccgtatgcgtgtcaacgccgcaccaccctgaacaaccataatcaacgttttacggacgcactggaaattcttgcggaaaattacgagttcaaacgcaacgatgatactgcgctggaatttcgtcgtgctatctccgtgctgaaaagccttccgtttgaggtacgtagcctgaaagacacggaaggattgccctggatcggtgatgaagtcaaagggattatggaagaaatcatcgaggtcggtgaatcgctggaagtgcaggccgtgctcaatgatgagtggtatcaaagcttcaaacgctttaagagtgtctttggagtgggggtgaagacagcagacaagtggtaccgtatgggtctgcgcacgctcgaggatgttcgttccagcaagaccctgaagttgaccccgatgcagaaagcgggtctgtgctattatgaagatcttgctcgcggcgttacgaaagccgaagctgacgcgatttctctgctggttcaggatgcagtcgcaactttcgacccggatgcgctggtggagattgtcggtggatttcgtcgtgggaaacctcagggtcacgacgttgatctgcttatcacatctccgggagctgagaaagagcaagaagaccagctcctgcagaaagtgaccaatctgtggaagaaacaagggttgttgctgtacggtcgtctggaatggagtcagtttgaagatgggaaactcccatccggtaaggctgatgccctggaccaccacgcgaaatgctttctgatcctcaaactttatgatcataaagtggacaaaagcaaatgggaaatgccgacgggttcgaacatgggcgaggccaaaccgtggaaagcaattcgcgtagatctggttcgttgcccctacggcggttttgcgtttgcgttgttgggttggaccggaagccgcatgttccgccgtgatctgcgctggtacgccactgacgagaagaacatgatgctggacaatcatgcgctgtatgacctgaccaagaaaatctttctcaaagctaaatcggaagaggaaattttcgcacatctggggcttgaatacctggaaccgttcgaacgtaacgca

SEQ ID NO: 2360 - protein, 529 aa, synthetic construct
  REGION 1..529: note = Variant of terminal deoxynucleotidyltransferase
MHHHHHHGGSGSHGIRTIDSDFGKKRQKKMDNHDSSAIYEIKFHEFVLFILEEKMGATRRTFLTDLARKKGFRVENELSDSVTHIVAENMSRSEVLAWLKEHKMEKTKQFELLDISWLIESMKVGKPVDTKGKYQLAESGEMSANPDPTEGRENELPPTMKTVSPYACQRRTTLNNHNQRFTDALEILAENYEFKRNDDTALEFRRAISVLKSLPFEVRSLKDTEGLPWIGDEVKGIMEEIIEVGESLEVQAVLNDEWYQSFKRFKSVFGVGVKTADKWYRMGLRTLEDVRSSKTLKLTPMQKAGLCYYEDLARGVTKAEADAISLLVQDAVATFDPDALVEIVGGFRRGKPQGHDVDLLITSPGAEKEQEDQLLQKVTNLWKKQGLLLYGRLEWSQFEDGKLPSGKADALDHHAKCFLILKLYDHKVDKSKWEMPTGSNMGEAKPWKAIRVDLVRCPYGGFAFALLGWTGSRMFRRDLRWYATDEKNMMLDNHALYDLTKKIFLKAKSEEEIFAHLGLEYLEPFERNA

SEQ ID NO: 2361 - DNA, 1587 bp, synthetic construct
  misc_feature 1..1587: note = Variant of terminal deoxynucleotidyltransferase
  source 1..1587: mol_type = other DNA
atgcaccatcatcatcatcatggcggtagcggcagccacggcctgcgtaccatcgattcggacttcgggaagaaacgccagaaaaaaatggataaccacgatagttccgccatctatgaaatcaaatttcacgagtttgtgctgttcattctcgaagaaaaaatgggtgcgacgcgtcgtacttttctgacagatttagcccgcaagaaagggttccgcgtcgagaatgaactgtcagacagcgttacccacatcgtggcagaaaataattcacgctctgaagtattggcttggctgaaagaacacaagatggagaagaccaagcaattcgaactgctggatattagctggcttatcgaaagcatgaaagttggtaaaccggtggacaccaaggggaaataccagttggcggaatcgggtgagatgagtgcgaacccagatccgacagagggtcgtgaaaacgagctgcctcctactatgaagaccgtttctccgtatgcgtgtcaacgccgcaccaccctgaacaaccataatcaacgttttacggacgcactggaaattcttgcggaaaattacgagttcaaacgcaacgatgatactgcgctggaatttcgtcgtgctatctccgtgctgaaaagccttccgtttgaggtacgtagcctgaaagacacggaaggattgccctggatcggtgatgaagtcaaagggattatggaagaaatcatcgaggtcggtgaatcgctggaagtgcaggccgtgctcaatgatgagtggtatcaaagcttcaaacgctttaagagtgtctttggagtgggggtgaagacagcagacaagtggtaccgtatgggtctgcgcacgctcgaggatgttcgttccagcaagaccctgaagttgaccccgatgcagaaagcgggtctgtgctattatgaagatcttgctcgcggcgttacgaaagccgaagctgacgcgatttctctgctggttcaggatgcagtcgcaactttcgacccggatgcgctggtggagattgtcggtggatttcgtcgtgggaaacctcagggtcacgacgttgatctgcttatcacatctccgggagctgagaaagagcaagaagaccagctcctgcagaaagtgaccaatctgtggaagaaacaagggttgttgctgtacggtcgtctggaatggagtcagtttgaagatgggaaactcccatccggtaaggctgatgccctggaccaccacgcgaaatgctttctgatcctcaaactttatgatcataaagtggacaaaagcaaatgggaaatgccgacgggttcgaacatgggcgaggccaaaccgtggaaagcaattcgcgtagatctggttcgttgcccctacggcggttttgcgtttgcgttgttgggttggaccggaagccgcatgttccgccgtgatctgcgctggtacgccactgacgagaagaacatgatgctggacaatcatgcgctgtatgacctgaccaagaaaatctttctcaaagctaaatcggaagaggaaattttcgcacatctggggcttgaatacctggaaccgttcgaacgtaacgca

SEQ ID NO: 2362 - protein, 529 aa, synthetic construct
  REGION 1..529: note = Variant of terminal deoxynucleotidyltransferase
MHHHHHHGGSGSHGLRTIDSDFGKKRQKKMDNHDSSAIYEIKFHEFVLFILEEKMGATRRTFLTDLARKKGFRVENELSDSVTHIVAENNSRSEVLAWLKEHKMEKTKQFELLDISWLIESMKVGKPVDTKGKYQLAESGEMSANPDPTEGRENELPPTMKTVSPYACQRRTTLNNHNQRFTDALEILAENYEFKRNDDTALEFRRAISVLKSLPFEVRSLKDTEGLPWIGDEVKGIMEEIIEVGESLEVQAVLNDEWYQSFKRFKSVFGVGVKTADKWYRMGLRTLEDVRSSKTLKLTPMQKAGLCYYEDLARGVTKAEADAISLLVQDAVATFDPDALVEIVGGFRRGKPQGHDVDLLITSPGAEKEQEDQLLQKVTNLWKKQGLLLYGRLEWSQFEDGKLPSGKADALDHHAKCFLILKLYDHKVDKSKWEMPTGSNMGEAKPWKAIRVDLVRCPYGGFAFALLGWTGSRMFRRDLRWYATDEKNMMLDNHALYDLTKKIFLKAKSEEEIFAHLGLEYLEPFERNA

SEQ ID NO: 2363 - DNA, 1587 bp, synthetic construct
  misc_feature 1..1587: note = Variant of terminal deoxynucleotidyltransferase
  source 1..1587: mol_type = other DNA
atgcaccatcatcatcatcatggcggtagcggcagccacggcattcgtaccatcgattcggacttcgggaagaaacgccagaaaaaaatggataaccacgatagttccgccatctatgaaatcaaatttcacgagtttgtgctgttcattctcgaagaaaaaatgggtgcgacgcgtcgtacttttctgacagatttagcccgcaaggctgggttccgcgtcgagaatgaactgtcagacagcgttacccacatcgtggcagaaaataattcacgctctgaagtattggcttggctgaaagaacacaagatggagaagaccaagcaattcgaactgctggatattagctggcttatcgaaagcatgaaagttggtaaaccggtggacaccaaggggaaataccagttggcggaatcgggtgagatgagtgcgaacccagatccgacagagggtcgtgaaaacgagctgcctcctactatgaagaccgtttctccgtatgcgtgtcaacgccgcaccaccctgaacaaccataatcaacgttttacggacgcactggaaattcttgcggaaaattacgagttcaaacgcaacgatgatactgcgctggaatttcgtcgtgctatctccgtgctgaaaagccttccgtttgaggtacgtagcctgaaagacacggaaggattgccctggatcggtgatgaagtcaaagggattatggaagaaatcatcgaggtcggtgaatcgctggaagtgcaggccgtgctcaatgatgagtggtatcaaagcttcaaacgctttaagagtgtctttggagtgggggtgaagacagcagacaagtggtaccgtatgggtctgcgcacgctcgaggatgttcgttccagcaagaccctgaagttgaccccgatgcagaaagcgggtctgtgctattatgaagatcttgctcgcggcgttacgaaagccgaagctgacgcgatttctctgctggttcaggatgcagtcgcaactttcgacccggatgcgctggtggagattgtcggtggatttcgtcgtgggaaacctcagggtcacgacgttgatctgcttatcacatctccgggagctgagaaagagcaagaagaccagctcctgcagaaagtgaccaatctgtggaagaaacaagggttgttgctgtacggtcgtctggaatggagtcagtttgaagatgggaaactcccatccggtaaggctgatgccctggaccaccacgcgaaatgctttctgatcctcaaactttatgatcataaagtggacaaaagcaaatgggaaatgccgacgggttcgaacatgggcgaggccaaaccgtggaaagcaattcgcgtagatctggttcgttgcccctacggcggttttgcgtttgcgttgttgggttggaccggaagccgcatgttccgccgtgatctgcgctggtacgccactgacgagaagaacatgatgctggacaatcatgcgctgtatgacctgaccaagaaaatctttctcaaagctaaatcggaagaggaaattttcgcacatctggggcttgaatacctggaaccgttcgaacgtaacgca

SEQ ID NO: 2364 - protein, 529 aa, synthetic construct
  REGION 1..529: note = Variant of terminal deoxynucleotidyltransferase
MHHHHHHGGSGSHGIRTIDSDFGKKRQKKMDNHDSSAIYEIKFHEFVLFILEEKMGATRRTFLTDLARKAGFRVENELSDSVTHIVAENNSRSEVLAWLKEHKMEKTKQFELLDISWLIESMKVGKPVDTKGKYQLAESGEMSANPDPTEGRENELPPTMKTVSPYACQRRTTLNNHNQRFTDALEILAENYEFKRNDDTALEFRRAISVLKSLPFEVRSLKDTEGLPWIGDEVKGIMEEIIEVGESLEVQAVLNDEWYQSFKRFKSVFGVGVKTADKWYRMGLRTLEDVRSSKTLKLTPMQKAGLCYYEDLARGVTKAEADAISLLVQDAVATFDPDALVEIVGGFRRGKPQGHDVDLLITSPGAEKEQEDQLLQKVTNLWKKQGLLLYGRLEWSQFEDGKLPSGKADALDHHAKCFLILKLYDHKVDKSKWEMPTGSNMGEAKPWKAIRVDLVRCPYGGFAFALLGWTGSRMFRRDLRWYATDEKNMMLDNHALYDLTKKIFLKAKSEEEIFAHLGLEYLEPFERNA

SEQ ID NO: 2365 - DNA, 1587 bp, synthetic construct
  misc_feature 1..1587: note = Variant of terminal deoxynucleotidyltransferase
  source 1..1587: mol_type = other DNA
atgcaccatcatcatcatcatggcggtagcggcgctcacggcattcgtaccatcgattcggacttcgggaagaaacgccagaaaaaaatggataaccacgatagttccgccatctatgaaatcaaatttcacgagtttgtgctgttcattctcgaagaaaaaatgggtgcgacgcgtcgtacttttctgacagatttagcccgcaagaaagggttccgcgtcgagaatgaactgtcagacagcgttacccacatcgtggcagaaaataattcacgctctgaagtattggcttggctgaaagaacacaagatggagaagaccaagcaattcgaactgctggatattagctggcttatcgaaagcatgaaagttggtaaaccggtggacaccaaggggaaataccagttggcggaatcgggtgagatgagtgcgaacccagatccgacagagggtcgtgaaaacgagctgcctcctactatgaagaccgtttctccgtatgcgtgtcaacgccgcaccaccctgaacaaccataatcaacgttttacggacgcactggaaattcttgcggaaaattacgagttcaaacgcaacgatgatactgcgctggaatttcgtcgtgctatctccgtgctgaaaagccttccgtttgaggtacgtagcctgaaagacacggaaggattgccctggatcggtgatgaagtcaaagggattatggaagaaatcatcgaggtcggtgaatcgctggaagtgcaggccgtgctcaatgatgagtggtatcaaagcttcaaacgctttaagagtgtctttggagtgggggtgaagacagcagacaagtggtaccgtatgggtctgcgcacgctcgaggatgttcgttccagcaagaccctgaagttgaccccgatgcagaaagcgggtctgtgctattatgaagatcttgctcgcggcgttacgaaagccgaagctgacgcgatttctctgctggttcaggatgcagtcgcaactttcgacccggatgcgctggtggagattgtcggtggatttcgtcgtgggaaacctcagggtcacgacgttgatctgcttatcacatctccgggagctgagaaagagcaagaagaccagctcctgcagaaagtgaccaatctgtggaagaaacaagggttgttgctgtacggtcgtctggaatggagtcagtttgaagatgggaaactcccatccggtaaggctgatgccctggaccaccacgcgaaatgctttctgatcctcaaactttatgatcataaagtggacaaaagcaaatgggaaatgccgacgggttcgaacatgggcgaggccaaaccgtggaaagcaattcgcgtagatctggttcgttgcccctacggcggttttgcgtttgcgttgttgggttggaccggaagccgcatgttccgccgtgatctgcgctggtacgccactgacgagaagaacatgatgctggacaatcatgcgctgtatgacctgaccaagaaaatctttctcaaagctaaatcggaagaggaaattttcgcacatctggggcttgaatacctggaaccgttcgaacgtaacgca

SEQ ID NO: 2366 - protein, 529 aa, synthetic construct
  REGION 1..529: note = Variant of terminal deoxynucleotidyltransferase
MHHHHHHGGSGAHGIRTIDSDFGKKRQKKMDNHDSSAIYEIKFHEFVLFILEEKMGATRRTFLTDLARKKGFRVENELSDSVTHIVAENNSRSEVLAWLKEHKMEKTKQFELLDISWLIESMKVGKPVDTKGKYQLAESGEMSANPDPTEGRENELPPTMKTVSPYACQRRTTLNNHNQRFTDALEILAENYEFKRNDDTALEFRRAISVLKSLPFEVRSLKDTEGLPWIGDEVKGIMEEIIEVGESLEVQAVLNDEWYQSFKRFKSVFGVGVKTADKWYRMGLRTLEDVRSSKTLKLTPMQKAGLCYYEDLARGVTKAEADAISLLVQDAVATFDPDALVEIVGGFRRGKPQGHDVDLLITSPGAEKEQEDQLLQKVTNLWKKQGLLLYGRLEWSQFEDGKLPSGKADALDHHAKCFLILKLYDHKVDKSKWEMPTGSNMGEAKPWKAIRVDLVRCPYGGFAFALLGWTGSRMFRRDLRWYATDEKNMMLDNHALYDLTKKIFLKAKSEEEIFAHLGLEYLEPFERNA

SEQ ID NO: 2367 - DNA, 1587 bp, synthetic construct
  misc_feature 1..1587: note = Variant of terminal deoxynucleotidyltransferase
  source 1..1587: mol_type = other DNA
atgcaccatcatcatcatcatggcggtagcggcagccacggcattcgtaccatcgattcggacttcgggaagaaatctcagaaaaaaatggataaccacgatagttccgccatctatgaaatcaaatttcacgagtttgtgctgttcattctcgaagaaaaaatgggtgcgacgcgtcgtacttttctgacagatttagcccgcaagaaagggttccgcgtcgagaatgaactgtcagacagcgttacccacatcgtggcagaaaataattcacgctctgaagtattggcttggctgaaagaacacaagatggagaagaccaagcaattcgaactgctggatattagctggcttatcgaaagcatgaaagttggtaaaccggtggacaccaaggggaaataccagttggcggaatcgggtgagatgagtgcgaacccagatccgacagagggtcgtgaaaacgagctgcctcctactatgaagaccgtttctccgtatgcgtgtcaacgccgcaccaccctgaacaaccataatcaacgttttacggacgcactggaaattcttgcggaaaattacgagttcaaacgcaacgatgatactgcgctggaatttcgtcgtgctatctccgtgctgaaaagccttccgtttgaggtacgtagcctgaaagacacggaaggattgccctggatcggtgatgaagtcaaagggattatggaagaaatcatcgaggtcggtgaatcgctggaagtgcaggccgtgctcaatgatgagtggtatcaaagcttcaaacgctttaagagtgtctttggagtgggggtgaagacagcagacaagtggtaccgtatgggtctgcgcacgctcgaggatgttcgttccagcaagaccctgaagttgaccccgatgcagaaagcgggtctgtgctattatgaagatcttgctcgcggcgttacgaaagccgaagctgacgcgatttctctgctggttcaggatgcagtcgcaactttcgacccggatgcgctggtggagattgtcggtggatttcgtcgtgggaaacctcagggtcacgacgttgatctgcttatcacatctccgggagctgagaaagagcaagaagaccagctcctgcagaaagtgaccaatctgtggaagaaacaagggttgttgctgtacggtcgtctggaatggagtcagtttgaagatgggaaactcccatccggtaaggctgatgccctggaccaccacgcgaaatgctttctgatcctcaaactttatgatcataaagtggacaaaagcaaatgggaaatgccgacgggttcgaacatgggcgaggccaaaccgtggaaagcaattcgcgtagatctggttcgttgcccctacggcggttttgcgtttgcgttgttgggttggaccggaagccgcatgttccgccgtgatctgcgctggtacgccactgacgagaagaacatgatgctggacaatcatgcgctgtatgacctgaccaagaaaatctttctcaaagctaaatcggaagaggaaattttcgcacatctggggcttgaatacctggaaccgttcgaacgtaacgca

SEQ ID NO: 2368 - protein, 529 aa, synthetic construct
  REGION 1..529: note = Variant of terminal deoxynucleotidyltransferase
MHHHHHHGGSGSHGIRTIDSDFGKKSQKKMDNHDSSAIYEIKFHEFVLFILEEKMGATRRTFLTDLARKKGFRVENELSDSVTHIVAENNSRSEVLAWLKEHKMEKTKQFELLDISWLIESMKVGKPVDTKGKYQLAESGEMSANPDPTEGRENELPPTMKTVSPYACQRRTTLNNHNQRFTDALEILAENYEFKRNDDTALEFRRAISVLKSLPFEVRSLKDTEGLPWIGDEVKGIMEEIIEVGESLEVQAVLNDEWYQSFKRFKSVFGVGVKTADKWYRMGLRTLEDVRSSKTLKLTPMQKAGLCYYEDLARGVTKAEADAISLLVQDAVATFDPDALVEIVGGFRRGKPQGHDVDLLITSPGAEKEQEDQLLQKVTNLWKKQGLLLYGRLEWSQFEDGKLPSGKADALDHHAKCFLILKLYDHKVDKSKWEMPTGSNMGEAKPWKAIRVDLVRCPYGGFAFALLGWTGSRMFRRDLRWYATDEKNMMLDNHALYDLTKKIFLKAKSEEEIFAHLGLEYLEPFERNA

SEQ ID NO: 2369 - DNA, 1587 bp, synthetic construct
  misc_feature 1..1587: note = Variant of terminal deoxynucleotidyltransferase
  source 1..1587: mol_type = other DNA
atgcaccatcatcatcatcatggcggtagcggcagccacggcattcgtaccatcgattcggacttcgggaagaaacgccagaaaaaaatggataaccacgatagttccgccatctatgaaatcaaatttcacgagtttgtgctgttcattctcgaagaaaaaatgggtgcgacgcgtcgtacttttctgacagatttagcccgcaagaaagggttccgcgtcgagaatgaactgtcagacgaggttacccacatcgtggcagaaaataattcacgctctgaagtattggcttggctgaaagaacacaagatggagaagaccaagcaattcgaactgctggatattagctggcttatcgaaagcatgaaagttggtaaaccggtggacaccaaggggaaataccagttggcggaatcgggtgagatgagtgcgaacccagatccgacagagggtcgtgaaaacgagctgcctcctactatgaagaccgtttctccgtatgcgtgtcaacgccgcaccaccctgaacaaccataatcaacgttttacggacgcactggaaattcttgcggaaaattacgagttcaaacgcaacgatgatactgcgctggaatttcgtcgtgctatctccgtgctgaaaagccttccgtttgaggtacgtagcctgaaagacacggaaggattgccctggatcggtgatgaagtcaaagggattatggaagaaatcatcgaggtcggtgaatcgctggaagtgcaggccgtgctcaatgatgagtggtatcaaagcttcaaacgctttaagagtgtctttggagtgggggtgaagacagcagacaagtggtaccgtatgggtctgcgcacgctcgaggatgttcgttccagcaagaccctgaagttgaccccgatgcagaaagcgggtctgtgctattatgaagatcttgctcgcggcgttacgaaagccgaagctgacgcgatttctctgctggttcaggatgcagtcgcaactttcgacccggatgcgctggtggagattgtcggtggatttcgtcgtgggaaacctcagggtcacgacgttgatctgcttatcacatctccgggagctgagaaagagcaagaagaccagctcctgcagaaagtgaccaatctgtggaagaaacaagggttgttgctgtacggtcgtctggaatggagtcagtttgaagatgggaaactcccatccggtaaggctgatgccctggaccaccacgcgaaatgctttctgatcctcaaactttatgatcataaagtggacaaaagcaaatgggaaatgccgacgggttcgaacatgggcgaggccaaaccgtggaaagcaattcgcgtagatctggttcgttgcccctacggcggttttgcgtttgcgttgttgggttggaccggaagccgcatgttccgccgtgatctgcgctggtacgccactgacgagaagaacatgatgctggacaatcatgcgctgtatgacctgaccaagaaaatctttctcaaagctaaatcggaagaggaaattttcgcacatctggggcttgaatacctggaaccgttcgaacgtaacgca

SEQ ID NO: 2370 - protein, 529 aa, synthetic construct
  REGION 1..529: note = Variant of terminal deoxynucleotidyltransferase
MHHHHHHGGSGSHGIRTIDSDFGKKRQKKMDNHDSSAIYEIKFHEFVLFILEEKMGATRRTFLTDLARKKGFRVENELSDEVTHIVAENNSRSEVLAWLKEHKMEKTKQFELLDISWLIESMKVGKPVDTKGKYQLAESGEMSANPDPTEGRENELPPTMKTVSPYACQRRTTLNNHNQRFTDALEILAENYEFKRNDDTALEFRRAISVLKSLPFEVRSLKDTEGLPWIGDEVKGIMEEIIEVGESLEVQAVLNDEWYQSFKRFKSVFGVGVKTADKWYRMGLRTLEDVRSSKTLKLTPMQKAGLCYYEDLARGVTKAEADAISLLVQDAVATFDPDALVEIVGGFRRGKPQGHDVDLLITSPGAEKEQEDQLLQKVTNLWKKQGLLLYGRLEWSQFEDGKLPSGKADALDHHAKCFLILKLYDHKVDKSKWEMPTGSNMGEAKPWKAIRVDLVRCPYGGFAFALLGWTGSRMFRRDLRWYATDEKNMMLDNHALYDLTKKIFLKAKSEEEIFAHLGLEYLEPFERNA

SEQ ID NO: 2371 - DNA, 1587 bp, synthetic construct
  misc_feature 1..1587: note = Variant of terminal deoxynucleotidyltransferase
  source 1..1587: mol_type = other DNA
atgcaccatcatcatcatcatggcggtagcggcagccacggcattcgtaccatcgattcggacttcgggaagaaacgccagaaaaaaatggataaccacgatagttccgccacgtatgaaatcaaatttcacgagtttgtgctgttcattctcgaagaaaaaatgggtgcgacgcgtcgtacttttctgacagatttagcccgcaagaaagggttccgcgtcgagaatgaactgtcagacagcgttacccacatcgtggcagaaaataattcacgctctgaagtattggcttggctgaaagaacacaagatggagaagaccaagcaattcgaactgctggatattagctggcttatcgaaagcatgaaagttggtaaaccggtggacaccaaggggaaataccagttggcggaatcgggtgagatgagtgcgaacccagatccgacagagggtcgtgaaaacgagctgcctcctactatgaagaccgtttctccgtatgcgtgtcaacgccgcaccaccctgaacaaccataatcaacgttttacggacgcactggaaattcttgcggaaaattacgagttcaaacgcaacgatgatactgcgctggaatttcgtcgtgctatctccgtgctgaaaagccttccgtttgaggtacgtagcctgaaagacacggaaggattgccctggatcggtgatgaagtcaaagggattatggaagaaatcatcgaggtcggtgaatcgctggaagtgcaggccgtgctcaatgatgagtggtatcaaagcttcaaacgctttaagagtgtctttggagtgggggtgaagacagcagacaagtggtaccgtatgggtctgcgcacgctcgaggatgttcgttccagcaagaccctgaagttgaccccgatgcagaaagcgggtctgtgctattatgaagatcttgctcgcggcgttacgaaagccgaagctgacgcgatttctctgctggttcaggatgcagtcgcaactttcgacccggatgcgctggtggagattgtcggtggatttcgtcgtgggaaacctcagggtcacgacgttgatctgcttatcacatctccgggagctgagaaagagcaagaagaccagctcctgcagaaagtgaccaatctgtggaagaaacaagggttgttgctgtacggtcgtctggaatggagtcagtttgaagatgggaaactcccatccggtaaggctgatgccctggaccaccacgcgaaatgctttctgatcctcaaactttatgatcataaagtggacaaaagcaaatgggaaatgccgacgggttcgaacatgggcgaggccaaaccgtggaaagcaattcgcgtagatctggttcgttgcccctacggcggttttgcgtttgcgttgttgggttggaccggaagccgcatgttccgccgtgatctgcgctggtacgccactgacgagaagaacatgatgctggacaatcatgcgctgtatgacctgaccaagaaaatctttctcaaagctaaatcggaagaggaaattttcgcacatctggggcttgaatacctggaaccgttcgaacgtaacgca

SEQ ID NO: 2372 - protein, 529 aa, synthetic construct
  REGION 1..529: note = Variant of terminal deoxynucleotidyltransferase
MHHHHHHGGSGSHGIRTIDSDFGKKRQKKMDNHDSSATYEIKFHEFVLFILEEKMGATRRTFLTDLARKKGFRVENELSDSVTHIVAENNSRSEVLAWLKEHKMEKTKQFELLDISWLIESMKVGKPVDTKGKYQLAESGEMSANPDPTEGRENELPPTMKTVSPYACQRRTTLNNHNQRFTDALEILAENYEFKRNDDTALEFRRAISVLKSLPFEVRSLKDTEGLPWIGDEVKGIMEEIIEVGESLEVQAVLNDEWYQSFKRFKSVFGVGVKTADKWYRMGLRTLEDVRSSKTLKLTPMQKAGLCYYEDLARGVTKAEADAISLLVQDAVATFDPDALVEIVGGFRRGKPQGHDVDLLITSPGAEKEQEDQLLQKVTNLWKKQGLLLYGRLEWSQFEDGKLPSGKADALDHHAKCFLILKLYDHKVDKSKWEMPTGSNMGEAKPWKAIRVDLVRCPYGGFAFALLGWTGSRMFRRDLRWYATDEKNMMLDNHALYDLTKKIFLKAKSEEEIFAHLGLEYLEPFERNA

SEQ ID NO: 2373 - DNA, 1587 bp, synthetic construct
  misc_feature 1..1587: note = Variant of terminal deoxynucleotidyltransferase
  source 1..1587: mol_type = other DNA
atgcaccatcatcatcatcatggcggtagcggcagccacggcattcgtaccatcgattcggacttcgggaagaaacgccagaaaaaaatggataaccacgatagttccgccatctatgaaatcaaatttcacgagtttgtgctgttcattctcgaagaaaaaatgggtgcgacgcgtcgtacttttctgacagatttagcccgcaagaaagggttccgcgtcgagaatgaactgacggacagcgttacccacatcgtggcagaaaataattcacgctctgaagtattggcttggctgaaagaacacaagatggagaagaccaagcaattcgaactgctggatattagctggcttatcgaaagcatgaaagttggtaaaccggtggacaccaaggggaaataccagttggcggaatcgggtgagatgagtgcgaacccagatccgacagagggtcgtgaaaacgagctgcctcctactatgaagaccgtttctccgtatgcgtgtcaacgccgcaccaccctgaacaaccataatcaacgttttacggacgcactggaaattcttgcggaaaattacgagttcaaacgcaacgatgatactgcgctggaatttcgtcgtgctatctccgtgctgaaaagccttccgtttgaggtacgtagcctgaaagacacggaaggattgccctggatcggtgatgaagtcaaagggattatggaagaaatcatcgaggtcggtgaatcgctggaagtgcaggccgtgctcaatgatgagtggtatcaaagcttcaaacgctttaagagtgtctttggagtgggggtgaagacagcagacaagtggtaccgtatgggtctgcgcacgctcgaggatgttcgttccagcaagaccctgaagttgaccccgatgcagaaagcgggtctgtgctattatgaagatcttgctcgcggcgttacgaaagccgaagctgacgcgatttctctgctggttcaggatgcagtcgcaactttcgacccggatgcgctggtggagattgtcggtggatttcgtcgtgggaaacctcagggtcacgacgttgatctgcttatcacatctccgggagctgagaaagagcaagaagaccagctcctgcagaaagtgaccaatctgtggaagaaacaagggttgttgctgtacggtcgtctggaatggagtcagtttgaagatgggaaactcccatccggtaaggctgatgccctggaccaccacgcgaaatgctttctgatcctcaaactttatgatcataaagtggacaaaagcaaatgggaaatgccgacgggttcgaacatgggcgaggccaaaccgtggaaagcaattcgcgtagatctggttcgttgcccctacggcggttttgcgtttgcgttgttgggttggaccggaagccgcatgttccgccgtgatctgcgctggtacgccactgacgagaagaacatgatgctggacaatcatgcgctgtatgacctgaccaagaaaatctttctcaaagctaaatcggaagaggaaattttcgcacatctggggcttgaatacctggaaccgttcgaacgtaacgca

SEQ ID NO: 2374 - protein, 529 aa, synthetic construct
  REGION 1..529: note = Variant of terminal deoxynucleotidyltransferase
MHHHHHHGGSGSHGIRTIDSDFGKKRQKKMDNHDSSAIYEIKFHEFVLFILEEKMGATRRTFLTDLARKKGFRVENELTDSVTHIVAENNSRSEVLAWLKEHKMEKTKQFELLDISWLIESMKVGKPVDTKGKYQLAESGEMSANPDPTEGRENELPPTMKTVSPYACQRRTTLNNHNQRFTDALEILAENYEFKRNDDTALEFRRAISVLKSLPFEVRSLKDTEGLPWIGDEVKGIMEEIIEVGESLEVQAVLNDEWYQSFKRFKSVFGVGVKTADKWYRMGLRTLEDVRSSKTLKLTPMQKAGLCYYEDLARGVTKAEADAISLLVQDAVATFDPDALVEIVGGFRRGKPQGHDVDLLITSPGAEKEQEDQLLQKVTNLWKKQGLLLYGRLEWSQFEDGKLPSGKADALDHHAKCFLILKLYDHKVDKSKWEMPTGSNMGEAKPWKAIRVDLVRCPYGGFAFALLGWTGSRMFRRDLRWYATDEKNMMLDNHALYDLTKKIFLKAKSEEEIFAHLGLEYLEPFERNA

SEQ ID NO: 2375 - DNA, 1587 bp, synthetic construct
  misc_feature 1..1587: note = Variant of terminal deoxynucleotidyltransferase
  source 1..1587: mol_type = other DNA
atgcaccatcatcatcatcatggcggtagcggcagccacggcatttcgaccatcgattcggacttcgggaagaaacgccagaaaaaaatggataaccacgatagttccgccatctatgaaatcaaatttcacgagtttgtgctgttcattctcgaagaaaaaatgggtgcgacgcgtcgtacttttctgacagatttagcccgcaagaaagggttccgcgtcgagaatgaactgtcagacagcgttacccacatcgtggcagaaaataattcacgctctgaagtattggcttggctgaaagaacacaagatggagaagaccaagcaattcgaactgctggatattagctggcttatcgaaagcatgaaagttggtaaaccggtggacaccaaggggaaataccagttggcggaatcgggtgagatgagtgcgaacccagatccgacagagggtcgtgaaaacgagctgcctcctactatgaagaccgtttctccgtatgcgtgtcaacgccgcaccaccctgaacaaccataatcaacgttttacggacgcactggaaattcttgcggaaaattacgagttcaaacgcaacgatgatactgcgctggaatttcgtcgtgctatctccgtgctgaaaagccttccgtttgaggtacgtagcctgaaagacacggaaggattgccctggatcggtgatgaagtcaaagggattatggaagaaatcatcgaggtcggtgaatcgctggaagtgcaggccgtgctcaatgatgagtggtatcaaagcttcaaacgctttaagagtgtctttggagtgggggtgaagacagcagacaagtggtaccgtatgggtctgcgcacgctcgaggatgttcgttccagcaagaccctgaagttgaccccgatgcagaaagcgggtctgtgctattatgaagatcttgctcgcggcgttacgaaagccgaagctgacgcgatttctctgctggttcaggatgcagtcgcaactttcgacccggatgcgctggtggagattgtcggtggatttcgtcgtgggaaacctcagggtcacgacgttgatctgcttatcacatctccgggagctgagaaagagcaagaagaccagctcctgcagaaagtgaccaatctgtggaagaaacaagggttgttgctgtacggtcgtctggaatggagtcagtttgaagatgggaaactcccatccggtaaggctgatgccctggaccaccacgcgaaatgctttctgatcctcaaactttatgatcataaagtggacaaaagcaaatgggaaatgccgacgggttcgaacatgggcgaggccaaaccgtggaaagcaattcgcgtagatctggttcgttgcccctacggcggttttgcgtttgcgttgttgggttggaccggaagccgcatgttccgccgtgatctgcgctggtacgccactgacgagaagaacatgatgctggacaatcatgcgctgtatgacctgaccaagaaaatctttctcaaagctaaatcggaagaggaaattttcgcacatctggggcttgaatacctggaaccgttcgaacgtaacgca

SEQ ID NO: 2376 - protein, 529 aa, synthetic construct
  REGION 1..529: note = Variant of terminal deoxynucleotidyltransferase
MHHHHHHGGSGSHGISTIDSDFGKKRQKKMDNHDSSAIYEIKFHEFVLFILEEKMGATRRTFLTDLARKKGFRVENELSDSVTHIVAENNSRSEVLAWLKEHKMEKTKQFELLDISWLIESMKVGKPVDTKGKYQLAESGEMSANPDPTEGRENELPPTMKTVSPYACQRRTTLNNHNQRFTDALEILAENYEFKRNDDTALEFRRAISVLKSLPFEVRSLKDTEGLPWIGDEVKGIMEEIIEVGESLEVQAVLNDEWYQSFKRFKSVFGVGVKTADKWYRMGLRTLEDVRSSKTLKLTPMQKAGLCYYEDLARGVTKAEADAISLLVQDAVATFDPDALVEIVGGFRRGKPQGHDVDLLITSPGAEKEQEDQLLQKVTNLWKKQGLLLYGRLEWSQFEDGKLPSGKADALDHHAKCFLILKLYDHKVDKSKWEMPTGSNMGEAKPWKAIRVDLVRCPYGGFAFALLGWTGSRMFRRDLRWYATDEKNMMLDNHALYDLTKKIFLKAKSEEEIFAHLGLEYLEPFERNA

SEQ ID NO: 2377 - DNA, 1587 bp, synthetic construct
  misc_feature 1..1587: note = Variant of terminal deoxynucleotidyltransferase
  source 1..1587: mol_type = other DNA
atgcaccatcatcatcatcatggcggtagcggcagccacggcattcgtaccatcgattcggacttcgggaagaaacgccagaaaaaaatggataaccacgatagttccgccctgtatgaaatcaaatttcacgagtttgtgctgttcattctcgaagaaaaaatgggtgcgacgcgtcgtacttttctgacagatttagcccgcaagaaagggttccgcgtcgagaatgaactgtcagacagcgttacccacatcgtggcagaaaataattcacgctctgaagtattggcttggctgaaagaacacaagatggagaagaccaagcaattcgaactgctggatattagctggcttatcgaaagcatgaaagttggtaaaccggtggacaccaaggggaaataccagttggcggaatcgggtgagatgagtgcgaacccagatccgacagagggtcgtgaaaacgagctgcctcctactatgaagaccgtttctccgtatgcgtgtcaacgccgcaccaccctgaacaaccataatcaacgttttacggacgcactggaaattcttgcggaaaattacgagttcaaacgcaacgatgatactgcgctggaatttcgtcgtgctatctccgtgctgaaaagccttccgtttgaggtacgtagcctgaaagacacggaaggattgccctggatcggtgatgaagtcaaagggattatggaagaaatcatcgaggtcggtgaatcgctggaagtgcaggccgtgctcaatgatgagtggtatcaaagcttcaaacgctttaagagtgtctttggagtgggggtgaagacagcagacaagtggtaccgtatgggtctgcgcacgctcgaggatgttcgttccagcaagaccctgaagttgaccccgatgcagaaagcgggtctgtgctattatgaagatcttgctcgcggcgttacgaaagccgaagctgacgcgatttctctgctggttcaggatgcagtcgcaactttcgacccggatgcgctggtggagattgtcggtggatttcgtcgtgggaaacctcagggtcacgacgttgatctgcttatcacatctccgggagctgagaaagagcaagaagaccagctcctgcagaaagtgaccaatctgtggaagaaacaagggttgttgctgtacggtcgtctggaatggagtcagtttgaagatgggaaactcccatccggtaaggctgatgccctggaccaccacgcgaaatgctttctgatcctcaaactttatgatcataaagtggacaaaagcaaatgggaaatgccgacgggttcgaacatgggcgaggccaaaccgtggaaagcaattcgcgtagatctggttcgttgcccctacggcggttttgcgtttgcgttgttgggttggaccggaagccgcatgttccgccgtgatctgcgctggtacgccactgacgagaagaacatgatgctggacaatcatgcgctgtatgacctgaccaagaaaatctttctcaaagctaaatcggaagaggaaattttcgcacatctggggcttgaatacctggaaccgttcgaacgtaacgca

SEQ ID NO: 2378 - protein, 529 aa, synthetic construct
  REGION 1..529: note = Variant of terminal deoxynucleotidyltransferase
MHHHHHHGGSGSHGIRTIDSDFGKKRQKKMDNHDSSALYEIKFHEFVLFILEEKMGATRRTFLTDLARKKGFRVENELSDSVTHIVAENNSRSEVLAWLKEHKMEKTKQFELLDISWLIESMKVGKPVDTKGKYQLAESGEMSANPDPTEGRENELPPTMKTVSPYACQRRTTLNNHNQRFTDALEILAENYEFKRNDDTALEFRRAISVLKSLPFEVRSLKDTEGLPWIGDEVKGIMEEIIEVGESLEVQAVLNDEWYQSFKRFKSVFGVGVKTADKWYRMGLRTLEDVRSSKTLKLTPMQKAGLCYYEDLARGVTKAEADAISLLVQDAVATFDPDALVEIVGGFRRGKPQGHDVDLLITSPGAEKEQEDQLLQKVTNLWKKQGLLLYGRLEWSQFEDGKLPSGKADALDHHAKCFLILKLYDHKVDKSKWEMPTGSNMGEAKPWKAIRVDLVRCPYGGFAFALLGWTGSRMFRRDLRWYATDEKNMMLDNHALYDLTKKIFLKAKSEEEIFAHLGLEYLEPFERNA

SEQ ID NO: 2379 - DNA, 1587 bp, synthetic construct
  misc_feature 1..1587: note = Variant of terminal deoxynucleotidyltransferase
  source 1..1587: mol_type = other DNA
atgcaccatcatcatcatcatggcactagcggcagccacggcattcgtaccatcgattcggacttcgggaagaaacgccagaaaaaaatggataaccacgatagttccgccatctatgaaatcaaatttcacgagtttgtgctgttcattctcgaagaaaaaatgggtgcgacgcgtcgtacttttctgacagatttagcccgcaagaaagggttccgcgtcgagaatgaactgtcagacagcgttacccacatcgtggcagaaaataattcacgctctgaagtattggcttggctgaaagaacacaagatggagaagaccaagcaattcgaactgctggatattagctggcttatcgaaagcatgaaagttggtaaaccggtggacaccaaggggaaataccagttggcggaatcgggtgagatgagtgcgaacccagatccgacagagggtcgtgaaaacgagctgcctcctactatgaagaccgtttctccgtatgcgtgtcaacgccgcaccaccctgaacaaccataatcaacgttttacggacgcactggaaattcttgcggaaaattacgagttcaaacgcaacgatgatactgcgctggaatttcgtcgtgctatctccgtgctgaaaagccttccgtttgaggtacgtagcctgaaagacacggaaggattgccctggatcggtgatgaagtcaaagggattatggaagaaatcatcgaggtcggtgaatcgctggaagtgcaggccgtgctcaatgatgagtggtatcaaagcttcaaacgctttaagagtgtctttggagtgggggtgaagacagcagacaagtggtaccgtatgggtctgcgcacgctcgaggatgttcgttccagcaagaccctgaagttgaccccgatgcagaaagcgggtctgtgctattatgaagatcttgctcgcggcgttacgaaagccgaagctgacgcgatttctctgctggttcaggatgcagtcgcaactttcgacccggatgcgctggtggagattgtcggtggatttcgtcgtgggaaacctcagggtcacgacgttgatctgcttatcacatctccgggagctgagaaagagcaagaagaccagctcctgcagaaagtgaccaatctgtggaagaaacaagggttgttgctgtacggtcgtctggaatggagtcagtttgaagatgggaaactcccatccggtaaggctgatgccctggaccaccacgcgaaatgctttctgatcctcaaactttatgatcataaagtggacaaaagcaaatgggaaatgccgacgggttcgaacatgggcgaggccaaaccgtggaaagcaattcgcgtagatctggttcgttgcccctacggcggttttgcgtttgcgttgttgggttggaccggaagccgcatgttccgccgtgatctgcgctggtacgccactgacgagaagaacatgatgctggacaatcatgcgctgtatgacctgaccaagaaaatctttctcaaagctaaatcggaagaggaaattttcgcacatctggggcttgaatacctggaaccgttcgaacgtaacgca

SEQ ID NO: 2380 - protein, 529 aa, synthetic construct
  REGION 1..529: note = Variant of terminal deoxynucleotidyltransferase
MHHHHHHGTSGSHGIRTIDSDFGKKRQKKMDNHDSSAIYEIKFHEFVLFILEEKMGATRRTFLTDLARKKGFRVENELSDSVTHIVAENNSRSEVLAWLKEHKMEKTKQFELLDISWLIESMKVGKPVDTKGKYQLAESGEMSANPDPTEGRENELPPTMKTVSPYACQRRTTLNNHNQRFTDALEILAENYEFKRNDDTALEFRRAISVLKSLPFEVRSLKDTEGLPWIGDEVKGIMEEIIEVGESLEVQAVLNDEWYQSFKRFKSVFGVGVKTADKWYRMGLRTLEDVRSSKTLKLTPMQKAGLCYYEDLARGVTKAEADAISLLVQDAVATFDPDALVEIVGGFRRGKPQGHDVDLLITSPGAEKEQEDQLLQKVTNLWKKQGLLLYGRLEWSQFEDGKLPSGKADALDHHAKCFLILKLYDHKVDKSKWEMPTGSNMGEAKPWKAIRVDLVRCPYGGFAFALLGWTGSRMFRRDLRWYATDEKNMMLDNHALYDLTKKIFLKAKSEEEIFAHLGLEYLEPFERNA

SEQ ID NO: 2381 - DNA, 1587 bp, synthetic construct
  misc_feature 1..1587: note = Variant of terminal deoxynucleotidyltransferase
  source 1..1587: mol_type = other DNA
atgcaccatcatcatcatcatggcggtagcggccagcacggcattcgtaccatcgattcggacttcgggaagaaacgccagaaaaaaatggataaccacgatagttccgccatctatgaaatcaaatttcacgagtttgtgctgttcattctcgaagaaaaaatgggtgcgacgcgtcgtacttttctgacagatttagcccgcaagaaagggttccgcgtcgagaatgaactgtcagacagcgttacccacatcgtggcagaaaataattcacgctctgaagtattggcttggctgaaagaacacaagatggagaagaccaagcaattcgaactgctggatattagctggcttatcgaaagcatgaaagttggtaaaccggtggacaccaaggggaaataccagttggcggaatcgggtgagatgagtgcgaacccagatccgacagagggtcgtgaaaacgagctgcctcctactatgaagaccgtttctccgtatgcgtgtcaacgccgcaccaccctgaacaaccataatcaacgttttacggacgcactggaaattcttgcggaaaattacgagttcaaacgcaacgatgatactgcgctggaatttcgtcgtgctatctccgtgctgaaaagccttccgtttgaggtacgtagcctgaaagacacggaaggattgccctggatcggtgatgaagtcaaagggattatggaagaaatcatcgaggtcggtgaatcgctggaagtgcaggccgtgctcaatgatgagtggtatcaaagcttcaaacgctttaagagtgtctttggagtgggggtgaagacagcagacaagtggtaccgtatgggtctgcgcacgctcgaggatgttcgttccagcaagaccctgaagttgaccccgatgcagaaagcgggtctgtgctattatgaagatcttgctcgtggcgttacgaaagccgaagctgacgcgatttctctgctggttcaggatgcagtcgcaactttcgacccggatgcgctggtggagattgtcggtggatttcgtcgtgggaaacctcagggtcacgacgttgatctgcttatcacatctccgggagctgagaaagagcaagaagaccagctcctgcagaaagtgaccaatctgtggaagaaacaagggttgttgctgtacggtcgtctggaatggagtcagtttgaagatgggaaactcccatccggtaaggctgatgccctggaccaccacgcgaaatgctttctgatcctcaaactttatgatcataaagtggacaaaagcaaatgggaaatgccgacgggttcgaacatgggcgaggccaaaccgtggaaagcaattcgcgtagatctggttcgttgcccctacggcggttttgcgtttgcgttgttgggttggaccggaagccgcatgttccgccgtgatctgcgctggtacgccactgacgagaagaacatgatgctggacaatcatgcgctgtatgacctgaccaagaaaatctttctcaaagctaaatcggaagaggaaattttcgcacatctggggcttgaatacctggaaccgttcgaacgtaacgca

SEQ ID NO: 2382 - protein, 529 aa, synthetic construct
  REGION 1..529: note = Variant of terminal deoxynucleotidyltransferase
MHHHHHHGGSGQHGIRTIDSDFGKKRQKKMDNHDSSAIYEIKFHEFVLFILEEKMGATRRTFLTDLARKKGFRVENELSDSVTHIVAENNSRSEVLAWLKEHKMEKTKQFELLDISWLIESMKVGKPVDTKGKYQLAESGEMSANPDPTEGRENELPPTMKTVSPYACQRRTTLNNHNQRFTDALEILAENYEFKRNDDTALEFRRAISVLKSLPFEVRSLKDTEGLPWIGDEVKGIMEEIIEVGESLEVQAVLNDEWYQSFKRFKSVFGVGVKTADKWYRMGLRTLEDVRSSKTLKLTPMQKAGLCYYEDLARGVTKAEADAISLLVQDAVATFDPDALVEIVGGFRRGKPQGHDVDLLITSPGAEKEQEDQLLQKVTNLWKKQGLLLYGRLEWSQFEDGKLPSGKADALDHHAKCFLILKLYDHKVDKSKWEMPTGSNMGEAKPWKAIRVDLVRCPYGGFAFALLGWTGSRMFRRDLRWYATDEKNMMLDNHALYDLTKKIFLKAKSEEEIFAHLGLEYLEPFERNA

SEQ ID NO: 2383 - DNA, 1587 bp, synthetic construct
  misc_feature 1..1587: note = Variant of terminal deoxynucleotidyltransferase
  source 1..1587: mol_type = other DNA
atgcaccatcatcatcatcatggcggtagcagtagccacggcattcgtaccatcgattcggacttcgggaagaaacgccagaaaaaaatggataaccacgatagttccgccatctatgaaatcaaatttcacgagtttgtgctgttcattctcgaagaaaaaatgggtgcgacgcgtcgtacttttctgacagatttagcccgcaagaaagggttccgcgtcgagaatgaactgtcagacagcgttacccacatcgtggcagaaaataattcacgctctgaagtattggcttggctgaaagaacacaagatggagaagaccaagcaattcgaactgctggatattagctggcttatcgaaagcatgaaagttggtaaaccggtggacaccaaggggaaataccagttggcggaatcgggtgagatgagtgcgaacccagatccgacagagggtcgtgaaaacgagctgcctcctactatgaagaccgtttctccgtatgcgtgtcaacgccgcaccaccctgaacaaccataatcaacgttttacggacgcactggaaattcttgcggaaaattacgagttcaaacgcaacgatgatactgcgctggaatttcgtcgtgctatctccgtgctgaaaagccttccgtttgaggtacgtagcctgaaagacacggaaggattgccctggatcggtgatgaagtcaaagggattatggaagaaatcatcgaggtcggtgaatcgctggaagtgcaggccgtgctcaatgatgagtggtatcaaagcttcaaacgctttaagagtgtctttggagtgggggtgaagacagcagacaagtggtaccgtatgggtctgcgcacgctcgaggatgttcgttccagcaagaccctgaagttgaccccgatgcagaaagcgggtctgtgctattatgaagatcttgctcgcggcgttacgaaagccgaagctgacgcgatttctctgctggttcaggatgcagtcgcaactttcgacccggatgcgctggtggagattgtcggtggatttcgtcgtgggaaacctcagggtcacgacgttgatctgcttatcacatctccgggagctgagaaagagcaagaagaccagctcctgcagaaagtgaccaatctgtggaagaaacaagggttgttgctgtacggtcgtctggaatggagtcagtttgaagatgggaaactcccatccggtaaggctgatgccctggaccaccacgcgaaatgctttctgatcctcaaactttatgatcataaagtggacaaaagcaaatgggaaatgccgacgggttcgaacatgggcgaggccaaaccgtggaaagcaattcgcgtagatctggttcgttgcccctacggcggttttgcgtttgcgttgttgggttggaccggaagccgcatgttccgccgtgatctgcgctggtacgccactgacgagaagaacatgatgctggacaatcatgcgctgtatgacctgaccaagaaaatctttctcaaagctaaatcggaagaggaaattttcgcacatctggggcttgaatacctggaaccgttcgaacgtaacgca

SEQ ID NO: 2384 - protein, 529 aa, synthetic construct
  REGION 1..529: note = Variant of terminal deoxynucleotidyltransferase
MHHHHHHGGSSSHGIRTIDSDFGKKRQKKMDNHDSSAIYEIKFHEFVLFILEEKMGATRRTFLTDLARKKGFRVENELSDSVTHIVAENNSRSEVLAWLKEHKMEKTKQFELLDISWLIESMKVGKPVDTKGKYQLAESGEMSANPDPTEGRENELPPTMKTVSPYACQRRTTLNNHNQRFTDALEILAENYEFKRNDDTALEFRRAISVLKSLPFEVRSLKDTEGLPWIGDEVKGIMEEIIEVGESLEVQAVLNDEWYQSFKRFKSVFGVGVKTADKWYRMGLRTLEDVRSSKTLKLTPMQKAGLCYYEDLARGVTKAEADAISLLVQDAVATFDPDALVEIVGGFRRGKPQGHDVDLLITSPGAEKEQEDQLLQKVTNLWKKQGLLLYGRLEWSQFEDGKLPSGKADALDHHAKCFLILKLYDHKVDKSKWEMPTGSNMGEAKPWKAIRVDLVRCPYGGFAFALLGWTGSRMFRRDLRWYATDEKNMMLDNHALYDLTKKIFLKAKSEEEIFAHLGLEYLEPFERNA

SEQ ID NO: 2385 - DNA, 1587 bp, synthetic construct
  misc_feature 1..1587: note = Variant of terminal deoxynucleotidyltransferase
  source 1..1587: mol_type = other DNA
atgcaccatcatcatcatcatggcggtagcggcagccacggcattcgtaccatcgattcggacttcgggaagaaacgccagaaaaaaatggataaccacgatagttccgccatctatgaaatcaaatttcacgagtttgtgctgttcattctcgaagaaaaaatgggtgcgacgcgtcgtacttttctgacagatttagcccgcaagaaagggttccgcgtcgagaatgaactgtcagacagcgttacccacatcgtggcagaaaataattcacgctctgaagtattggcttggctgaaagaacacaagatggagaagaccaagcaattcgaactgctggatattagctggcttatcgaaagcatgaaagttggtaaaccggtggacaccaaggggaaataccagttggcggaatcgggtgagatgagtgcgaacccagatccgacagagggtcgtgaaaacgagctgcttcctactatgaagaccgtttctccgtatgcgtgtcaacgccgcaccaccctgaacaaccataatcaacgttttacggacgcactggaaattcttgcggaaaattacgagttcaaacgcaacgatgatactgcgctggaatttcgtcgtgctatctccgtgctgaaaagccttccgtttgaggtacgtagcctgaaagacacggaaggattgccctggatcggtgatgaagtcaaagggattatggaagaaatcatcgaggtcggtgaatcgctggaagtgcaggccgtgctcaatgatgagtggtatcaaagcttcaaacgctttaagagtgtctttggagtgggggtgaagacagcagacaagtggtaccgtatgggtctgcgcacgctcgaggatgttcgttccagcaagaccctgaagttgaccccgatgcagaaagcgggtctgtgctattatgaagatcttgctcgcggcgttacgaaagccgaagctgacgcgatttctctgctggttcaggatgcagtcgcaactttcgacccggatgcgctggtggagattgtcggtggatttcgtcgtgggaaacctcagggtcacgacgttgatctgcttatcacatctccgggagctgagaaagagcaagaagaccagctcctgcagaaagtgaccaatctgtggaagaaacaagggttgttgctgtacggtcgtctggaatggagtcagtttgaagatgggaaactcccatccggtaaggctgatgccctggaccaccacgcgaaatgctttctgatcctcaaactttatgatcataaagtggacaaaagcaaatgggaaatgccgacgggttcgaacatgggcgaggccaaaccgtggaaagcaattcgcgtagatctggttcgttgcccctacggcggttttgcgtttgcgttgttgggttggaccggaagccgcatgttccgccgtgatctgcgctggtacgccactgacgagaagaacatgatgctggacaatcatgcgctgtatgacctgaccaagaaaatctttctcaaagctaaatcggaagaggaaattttcgcacatctggggcttgaatacctggaaccgttcgaacgtaacgca

SEQ ID NO: 2386 - protein, 529 aa, synthetic construct
  REGION 1..529: note = Variant of terminal deoxynucleotidyltransferase
MHHHHHHGGSGSHGIRTIDSDFGKKRQKKMDNHDSSAIYEIKFHEFVLFILEEKMGATRRTFLTDLARKKGFRVENELSDSVTHIVAENNSRSEVLAWLKEHKMEKTKQFELLDISWLIESMKVGKPVDTKGKYQLAESGEMSANPDPTEGRENELLPTMKTVSPYACQRRTTLNNHNQRFTDALEILAENYEFKRNDDTALEFRRAISVLKSLPFEVRSLKDTEGLPWIGDEVKGIMEEIIEVGESLEVQAVLNDEWYQSFKRFKSVFGVGVKTADKWYRMGLRTLEDVRSSKTLKLTPMQKAGLCYYEDLARGVTKAEADAISLLVQDAVATFDPDALVEIVGGFRRGKPQGHDVDLLITSPGAEKEQEDQLLQKVTNLWKKQGLLLYGRLEWSQFEDGKLPSGKADALDHHAKCFLILKLYDHKVDKSKWEMPTGSNMGEAKPWKAIRVDLVRCPYGGFAFALLGWTGSRMFRRDLRWYATDEKNMMLDNHALYDLTKKIFLKAKSEEEIFAHLGLEYLEPFERNA

SEQ ID NO: 2387 - DNA, 1587 bp, synthetic construct
  misc_feature 1..1587: note = Variant of terminal deoxynucleotidyltransferase
  source 1..1587: mol_type = other DNA
atgcaccatcatcatcatcatggcggtagcggcagccacggccagcgtaccatcgattcggacttcgggaagaaacgccagaaaaaaatggataaccacgatagttccgccatctatgaaatcaaatttcacgagtttgtgctgttcattctcgaagaaaaaatgggtgcgacgcgtcgtacttttctgacagatttagcccgcaagaaagggttccgcgtcgagaatgaactgtcagacagcgttacccacatcgtggcagaaaataattcacgctctgaagtattggcttggctgaaagaacacaagatggagaagaccaagcaattcgaactgctggatattagctggcttatcgaaagcatgaaagttggtaaaccggtggacaccaaggggaaataccagttggcggaatcgggtgagatgagtgcgaacccagatccgacagagggtcgtgaaaacgagctgcctcctactatgaagaccgtttctccgtatgcgtgtcaacgccgcaccaccctgaacaaccataatcaacgttttacggacgcactggaaattcttgcggaaaattacgagttcaaacgcaacgatgatactgcgctggaatttcgtcgtgctatctccgtgctgaaaagccttccgtttgaggtacgtagcctgaaagacacggaaggattgccctggatcggtgatgaagtcaaagggattatggaagaaatcatcgaggtcggtgaatcgctggaagtgcaggccgtgctcaatgatgagtggtatcaaagcttcaaacgctttaagagtgtctttggagtgggggtgaagacagcagacaagtggtaccgtatgggtctgcgcacgctcgaggatgttcgttccagcaagaccctgaagttgaccccgatgcagaaagcgggtctgtgctattatgaagatcttgctcgcggcgttacgaaagccgaagctgacgcgatttctctgctggttcaggatgcagtcgcaactttcgacccggatgcgctggtggagattgtcggtggatttcgtcgtgggaaacctcagggtcacgacgttgatctgcttatcacatctccgggagctgagaaagagcaagaagaccagctcctgcagaaagtgaccaatctgtggaagaaacaagggttgttgctgtacggtcgtctggaatggagtcagtttgaagatgggaaactcccatccggtaaggctgatgccctggaccaccacgcgaaatgctttctgatcctcaaactttatgatcataaagtggacaaaagcaaatgggaaatgccgacgggttcgaacatgggcgaggccaaaccgtggaaagcaattcgcgtagatctggttcgttgcccctacggcggttttgcgtttgcgttgttgggttggaccggaagccgcatgttccgccgtgatctgcgctggtacgccactgacgagaagaacatgatgctggacaatcatgcgctgtatgacctgaccaagaaaatctttctcaaagctaaatcggaagaggaaattttcgcacatctggggcttgaatacctggaaccgttcgaacgtaacgca

SEQ ID NO: 2388 - protein, 529 aa, synthetic construct
  REGION 1..529: note = Variant of terminal deoxynucleotidyltransferase
MHHHHHHGGSGSHGQRTIDSDFGKKRQKKMDNHDSSAIYEIKFHEFVLFILEEKMGATRRTFLTDLARKKGFRVENELSDSVTHIVAENNSRSEVLAWLKEHKMEKTKQFELLDISWLIESMKVGKPVDTKGKYQLAESGEMSANPDPTEGRENELPPTMKTVSPYACQRRTTLNNHNQRFTDALEILAENYEFKRNDDTALEFRRAISVLKSLPFEVRSLKDTEGLPWIGDEVKGIMEEIIEVGESLEVQAVLNDEWYQSFKRFKSVFGVGVKTADKWYRMGLRTLEDVRSSKTLKLTPMQKAGLCYYEDLARGVTKAEADAISLLVQDAVATFDPDALVEIVGGFRRGKPQGHDVDLLITSPGAEKEQEDQLLQKVTNLWKKQGLLLYGRLEWSQFEDGKLPSGKADALDHHAKCFLILKLYDHKVDKSKWEMPTGSNMGEAKPWKAIRVDLVRCPYGGFAFALLGWTGSRMFRRDLRWYATDEKNMMLDNHALYDLTKKIFLKAKSEEEIFAHLGLEYLEPFERNA

SEQ ID NO: 2389 - DNA, 1587 bp, synthetic construct
  misc_feature 1..1587: note = Variant of terminal deoxynucleotidyltransferase
  source 1..1587: mol_type = other DNA
atgcaccatcatcatcatcatggcgctagcggcagccacggcattcgtaccatcgattcggacttcgggaagaaacgccagaaaaaaatggataaccacgatagttccgccatctatgaaatcaaatttcacgagtttgtgctgttcattctcgaagaaaaaatgggtgcgacgcgtcgtacttttctgacagatttagcccgcaagaaagggttccgcgtcgagaatgaactgtcagacagcgttacccacatcgtggcagaaaataattcacgctctgaagtattggcttggctgaaagaacacaagatggagaagaccaagcaattcgaactgctggatattagctggcttatcgaaagcatgaaagttggtaaaccggtggacaccaaggggaaataccagttggcggaatcgggtgagatgagtgcgaacccagatccgacagagggtcgtgaaaacgagctgcctcctactatgaagaccgtttctccgtatgcgtgtcaacgccgcaccaccctgaacaaccataatcaacgttttacggacgcactggaaattcttgcggaaaattacgagttcaaacgcaacgatgatactgcgctggaatttcgtcgtgctatctccgtgctgaaaagccttccgtttgaggtacgtagcctgaaagacacggaaggattgccctggatcggtgatgaagtcaaagggattatggaagaaatcatcgaggtcggtgaatcgctggaagtgcaggccgtgctcaatgatgagtggtatcaaagcttcaaacgctttaagagtgtctttggagtgggggtgaagacagcagacaagtggtaccgtatgggtctgcgcacgctcgaggatgttcgttccagcaagaccctgaagttgaccccgatgcagaaagcgggtctgtgctattatgaagatcttgctcgcggcgttacgaaagccgaagctgacgcgatttctctgctggttcaggatgcagtcgcaactttcgacccggatgcgctggtggagattgtcggtggatttcgtcgtgggaaacctcagggtcacgacgttgatctgcttatcacatctccgggagctgagaaagagcaagaagaccagctcctgcagaaagtgaccaatctgtggaagaaacaagggttgttgctgtacggtcgtctggaatggagtcagtttgaagatgggaaactcccatccggtaaggctgatgccctggaccaccacgcgaaatgctttctgatcctcaaactttatgatcataaagtggacaaaagcaaatgggaaatgccgacgggttcgaacatgggcgaggccaaaccgtggaaagcaattcgcgtagatctggttcgttgcccctacggcggttttgcgtttgcgttgttgggttggaccggaagccgcatgttccgccgtgatctgcgctggtacgccactgacgagaagaacatgatgctggacaatcatgcgctgtatgacctgaccaagaaaatctttctcaaagctaaatcggaagaggaaattttcgcacatctggggcttgaatacctggaaccgttcgaacgtaacgca

SEQ ID NO: 2390 - protein, 529 aa, synthetic construct
  REGION 1..529: note = Variant of terminal deoxynucleotidyltransferase
MHHHHHHGASGSHGIRTIDSDFGKKRQKKMDNHDSSAIYEIKFHEFVLFILEEKMGATRRTFLTDLARKKGFRVENELSDSVTHIVAENNSRSEVLAWLKEHKMEKTKQFELLDISWLIESMKVGKPVDTKGKYQLAESGEMSANPDPTEGRENELPPTMKTVSPYACQRRTTLNNHNQRFTDALEILAENYEFKRNDDTALEFRRAISVLKSLPFEVRSLKDTEGLPWIGDEVKGIMEEIIEVGESLEVQAVLNDEWYQSFKRFKSVFGVGVKTADKWYRMGLRTLEDVRSSKTLKLTPMQKAGLCYYEDLARGVTKAEADAISLLVQDAVATFDPDALVEIVGGFRRGKPQGHDVDLLITSPGAEKEQEDQLLQKVTNLWKKQGLLLYGRLEWSQFEDGKLPSGKADALDHHAKCFLILKLYDHKVDKSKWEMPTGSNMGEAKPWKAIRVDLVRCPYGGFAFALLGWTGSRMFRRDLRWYATDEKNMMLDNHALYDLTKKIFLKAKSEEEIFAHLGLEYLEPFERNA

SEQ ID NO: 2391 - DNA, 1587 bp, synthetic construct
  misc_feature 1..1587: note = Variant of terminal deoxynucleotidyltransferase
  source 1..1587: mol_type = other DNA
atgcaccatcatcatcatcatggcggtagcggcagccacggcattcgtaccatcgattcggacttcgggaagaaatggcagaaaaaaatggataaccacgatagttccgccatctatgaaatcaaatttcacgagtttgtgctgttcattctcgaagaaaaaatgggtgcgacgcgtcgtacttttctgacagatttagcccgcaagaaagggttccgcgtcgagaatgaactgtcagacagcgttacccacatcgtggcagaaaataattcacgctctgaagtattggcttggctgaaagaacacaagatggagaagaccaagcaattcgaactgctggatattagctggcttatcgaaagcatgaaagttggtaaaccggtggacaccaaggggaaataccagttggcggaatcgggtgagatgagtgcgaacccagatccgacagagggtcgtgaaaacgagctgcctcctactatgaagaccgtttctccgtatgcgtgtcaacgccgcaccaccctgaacaaccataatcaacgttttacggacgcactggaaattcttgcggaaaattacgagttcaaacgcaacgatgatactgcgctggaatttcgtcgtgctatctccgtgctgaaaagccttccgtttgaggtacgtagcctgaaagacacggaaggattgccctggatcggtgatgaagtcaaagggattatggaagaaatcatcgaggtcggtgaatcgctggaagtgcaggccgtgctcaatgatgagtggtatcaaagcttcaaacgctttaagagtgtctttggagtgggggtgaagacagcagacaagtggtaccgtatgggtctgcgcacgctcgaggatgttcgttccagcaagaccctgaagttgaccccgatgcagaaagcgggtctgtgctattatgaagatcttgctcgcggcgttacgaaagccgaagctgacgcgatttctctgctggttcaggatgcagtcgcaactttcgacccggatgcgctggtggagattgtcggtggatttcgtcgtgggaaacctcagggtcacgacgttgatctgcttatcacatctccgggagctgagaaagagcaagaagaccagctcctgcagaaagtgaccaatctgtggaagaaacaagggttgttgctgtacggtcgtctggaatggagtcagtttgaagatgggaaactcccatccggtaaggctgatgccctggaccaccacgcgaaatgctttctgatcctcaaactttatgatcataaagtggacaaaagcaaatgggaaatgccgacgggttcgaacatgggcgaggccaaaccgtggaaagcaattcgcgtagatctggttcgttgcccctacggcggttttgcgtttgcgttgttgggttggaccggaagccgcatgttccgccgtgatctgcgctggtacgccactgacgagaagaacatgatgctggacaatcatgcgctgtatgacctgaccaagaaaatctttctcaaagctaaatcggaagaggaaattttcgcacatctggggcttgaatacctggaaccgttcgaacgtaacgca

SEQ ID NO: 2392 - protein, 529 aa, synthetic construct
  REGION 1..529: note = Variant of terminal deoxynucleotidyltransferase
MHHHHHHGGSGSHGIRTIDSDFGKKWQKKMDNHDSSAIYEIKFHEFVLFILEEKMGATRRTFLTDLARKKGFRVENELSDSVTHIVAENNSRSEVLAWLKEHKMEKTKQFELLDISWLIESMKVGKPVDTKGKYQLAESGEMSANPDPTEGRENELPPTMKTVSPYACQRRTTLNNHNQRFTDALEILAENYEFKRNDDTALEFRRAISVLKSLPFEVRSLKDTEGLPWIGDEVKGIMEEIIEVGESLEVQAVLNDEWYQSFKRFKSVFGVGVKTADKWYRMGLRTLEDVRSSKTLKLTPMQKAGLCYYEDLARGVTKAEADAISLLVQDAVATFDPDALVEIVGGFRRGKPQGHDVDLLITSPGAEKEQEDQLLQKVTNLWKKQGLLLYGRLEWSQFEDGKLPSGKADALDHHAKCFLILKLYDHKVDKSKWEMPTGSNMGEAKPWKAIRVDLVRCPYGGFAFALLGWTGSRMFRRDLRWYATDEKNMMLDNHALYDLTKKIFLKAKSEEEIFAHLGLEYLEPFERNA

SEQ ID NO: 2393 - DNA, 1587 bp, synthetic construct
  misc_feature 1..1587: note = Variant of terminal deoxynucleotidyltransferase
  source 1..1587: mol_type = other DNA
atgcaccatcatcatcatcatggcggtagcggcaatcacggcattcgtaccatcgattcggacttcgggaagaaacgccagaaaaaaatggataaccacgatagttccgccatctatgaaatcaaatttcacgagtttgtgctgttcattctcgaagaaaaaatgggtgcgacgcgtcgtacttttctgacagatttagcccgcaagaaagggttccgcgtcgagaatgaactgtcagacagcgttacccacatcgtggcagaaaataattcacgctctgaagtattggcttggctgaaagaacacaagatggagaagaccaagcaattcgaactgctggatattagctggcttatcgaaagcatgaaagttggtaaaccggtggacaccaaggggaaataccagttggcggaatcgggtgagatgagtgcgaacccagatccgacagagggtcgtgaaaacgagctgcctcctactatgaagaccgtttctccgtatgcgtgtcaacgccgcaccaccctgaacaaccataatcaacgttttacggacgcactggaaattcttgcggaaaattacgagttcaaacgcaacgatgatactgcgctggaatttcgtcgtgctatctccgtgctgaaaagccttccgtttgaggtacgtagcctgaaagacacggaaggattgccctggatcggtgatgaagtcaaagggattatggaagaaatcatcgaggtcggtgaatcgctggaagtgcaggccgtgctcaatgatgagtggtatcaaagcttcaaacgctttaagagtgtctttggagtgggggtgaagacagcagacaagtggtaccgtatgggtctgcgcacgctcgaggatgttcgttccagcaagaccctgaagttgaccccgatgcagaaagcgggtctgtgctattatgaagatcttgctcgcggcgttacgaaagccgaagctgacgcgatttctctgctggttcaggatgcagtcgcaactttcgacccggatgcgctggtggagattgtcggtggatttcgtcgtgggaaacctcagggtcacgacgttgatctgcttatcacatctccgggagctgagaaagagcaagaagaccagctcctgcagaaagtgaccaatctgtggaagaaacaagggttgttgctgtacggtcgtctggaatggagtcagtttgaagatgggaaactcccatccggtaaggctgatgccctggaccaccacgcgaaatgctttctgatcctcaaactttatgatcataaagtggacaaaagcaaatgggaaatgccgacgggttcgaacatgggcgaggccaaaccgtggaaagcaattcgcgtagatctggttcgttgcccctacggcggttttgcgtttgcgttgttgggttggaccggaagccgcatgttccgccgtgatctgcgctggtacgccactgacgagaagaacatgatgctggacaatcatgcgctgtatgacctgaccaagaaaatctttctcaaagctaaatcggaagaggaaattttcgcacatctggggcttgaatacctggaaccgttcgaacgtaacgca

SEQ ID NO: 2394 - protein, 529 aa, synthetic construct
  REGION 1..529: note = Variant of terminal deoxynucleotidyltransferase
MHHHHHHGGSGNHGIRTIDSDFGKKRQKKMDNHDSSAIYEIKFHEFVLFILEEKMGATRRTFLTDLARKKGFRVENELSDSVTHIVAENNSRSEVLAWLKEHKMEKTKQFELLDISWLIESMKVGKPVDTKGKYQLAESGEMSANPDPTEGRENELPPTMKTVSPYACQRRTTLNNHNQRFTDALEILAENYEFKRNDDTALEFRRAISVLKSLPFEVRSLKDTEGLPWIGDEVKGIMEEIIEVGESLEVQAVLNDEWYQSFKRFKSVFGVGVKTADKWYRMGLRTLEDVRSSKTLKLTPMQKAGLCYYEDLARGVTKAEADAISLLVQDAVATFDPDALVEIVGGFRRGKPQGHDVDLLITSPGAEKEQEDQLLQKVTNLWKKQGLLLYGRLEWSQFEDGKLPSGKADALDHHAKCFLILKLYDHKVDKSKWEMPTGSNMGEAKPWKAIRVDLVRCPYGGFAFALLGWTGSRMFRRDLRWYATDEKNMMLDNHALYDLTKKIFLKAKSEEEIFAHLGLEYLEPFERNA

SEQ ID NO: 2395 - DNA, 1587 bp, synthetic construct
  misc_feature 1..1587: note = Variant of terminal deoxynucleotidyltransferase
  source 1..1587: mol_type = other DNA
atgcaccatcatcatcatcatggcggtagcggcagccacggcattcgtaccatcgattcggacttcgggaagaaacgccagaaaaaaatggataaccacgatagttccgccatctatgaaatcaaatttcacgagtttgtgctgttcattctcgaagaaaaaatgggtgcggcgcgtcgtacttttctgacagatttagcccgcaagaaagggttccgcgtcgagaatgaactgtcagacagcgttacccacatcgtggcagaaaataattcacgctctgaagtattggcttggctgaaagaacacaagatggagaagaccaagcaattcgaactgctggatattagctggcttatcgaaagcatgaaagttggtaaaccggtggacaccaaggggaaataccagttggcggaatcgggtgagatgagtgcgaacccagatccgacagagggtcgtgaaaacgagctgcctcctactatgaagaccgtttctccgtatgcgtgtcaacgccgcaccaccctgaacaaccataatcaacgttttacggacgcactggaaattcttgcggaaaattacgagttcaaacgcaacgatgatactgcgctggaatttcgtcgtgctatctccgtgctgaaaagccttccgtttgaggtacgtagcctgaaagacacggaaggattgccctggatcggtgatgaagtcaaagggattatggaagaaatcatcgaggtcggtgaatcgctggaagtgcaggccgtgctcaatgatgagtggtatcaaagcttcaaacgctttaagagtgtctttggagtgggggtgaagacagcagacaagtggtaccgtatgggtctgcgcacgctcgaggatgttcgttccagcaagaccctgaagttgaccccgatgcagaaagcgggtctgtgctattatgaagatcttgctcgcggcgttacgaaagccgaagctgacgcgatttctctgctggttcaggatgcagtcgcaactttcgacccggatgcgctggtggagattgtcggtggatttcgtcgtgggaaacctcagggtcacgacgttgatctgcttatcacatctccgggagctgagaaagagcaagaagaccagctcctgcagaaagtgaccaatctgtggaagaaacaagggttgttgctgtacggtcgtctggaatggagtcagtttgaagatgggaaactcccatccggtaaggctgatgccctggaccaccacgcgaaatgctttctgatcctcaaactttatgatcataaagtggacaaaagcaaatgggaaatgccgacgggttcgaacatgggcgaggccaaaccgtggaaagcaattcgcgtagatctggttcgttgcccctacggcggttttgcgtttgcgttgttgggttggaccggaagccgcatgttccgccgtgatctgcgctggtacgccactgacgagaagaacatgatgctggacaatcatgcgctgtatgacctgaccaagaaaatctttctcaaagctaaatcggaagaggaaattttcgcacatctggggcttgaatacctggaaccgttcgaacgtaacgca

SEQ ID NO: 2396 - protein, 529 aa, synthetic construct
  REGION 1..529: note = Variant of terminal deoxynucleotidyltransferase
MHHHHHHGGSGSHGIRTIDSDFGKKRQKKMDNHDSSAIYEIKFHEFVLFILEEKMGAARRTFLTDLARKKGFRVENELSDSVTHIVAENNSRSEVLAWLKEHKMEKTKQFELLDISWLIESMKVGKPVDTKGKYQLAESGEMSANPDPTEGRENELPPTMKTVSPYACQRRTTLNNHNQRFTDALEILAENYEFKRNDDTALEFRRAISVLKSLPFEVRSLKDTEGLPWIGDEVKGIMEEIIEVGESLEVQAVLNDEWYQSFKRFKSVFGVGVKTADKWYRMGLRTLEDVRSSKTLKLTPMQKAGLCYYEDLARGVTKAEADAISLLVQDAVATFDPDALVEIVGGFRRGKPQGHDVDLLITSPGAEKEQEDQLLQKVTNLWKKQGLLLYGRLEWSQFEDGKLPSGKADALDHHAKCFLILKLYDHKVDKSKWEMPTGSNMGEAKPWKAIRVDLVRCPYGGFAFALLGWTGSRMFRRDLRWYATDEKNMMLDNHALYDLTKKIFLKAKSEEEIFAHLGLEYLEPFERNA

SEQ ID NO: 2397 - DNA, 1587 bp, synthetic construct
  misc_feature 1..1587: note = Variant of terminal deoxynucleotidyltransferase
  source 1..1587: mol_type = other DNA
atgcaccatcatcatcatcatggcggtagcggcagccacggcattcgtaccatcgattcggacttcgggaagaaacgccagaaaaaaatggataaccacgatagttccgccatctatgaaatcaaatttcacgagtttgtgctgttcattctcgaagaaaaaatgggtgcgacgcgtcgtacttttctgacagatttagcccgcaagaaagggttccgcgtcgagaatgaactgtcagacagcgttacccacatcgtggcagaaaataattcacgctctgaagtattggcttggctgaaagaacacaagatggagaagaccaagcaattcgaactgctggatattagctggcttatcgaaagcatgaaagttggtaaaccggtggacaccaaggggaaataccagttggcggaatcgggtgagatgagtgcgaacccagatccgacagagggtcgtgaaaacgagctgcctcctactatgaagaccgtttctccgtatgcgtgtcaacgccgcaccaccctgaacaaccataatcaacgttttacggacgcactggaaattcttgcggaaaattacgagttcaaacgcaacgatgatactgcgctggaatttcgtcgtgctatctccgtgctgaaaagccttccgtttgaggtacgtagcctgaaagacacggaaggattgccctggatcggtgatgaagtcaaagggattatggaagaaatcatcgaggtcggtgaatcgctgactgtgcaggccgtgctcaatgatgagtggtatcaaagcttcaaacgctttaagagtgtctttggagtgggggtgaagacagcagacaagtggtaccgtatgggtctgcgcacgctcgaggatgttcgttccagcaagaccctgaagttgaccccgatgcagaaagcgggtctgtgctattatgaagatcttgctcgcggcgttacgaaagccgaagctgacgcgatttctctgctggttcaggatgcagtcgcaactttcgacccggatgcgctggtggagattgtcggtggatttcgtcgtgggaaacctcagggtcacgacgttgatctgcttatcacatctccgggagctgagaaagagcaagaagaccagctcctgcagaaagtgaccaatctgtggaagaaacaagggttgttgctgtacggtcgtctggaatggagtcagtttgaagatgggaaactcccatccggtaaggctgatgccctggaccaccacgcgaaatgctttctgatcctcaaactttatgatcataaagtggacaaaagcaaatgggaaatgccgacgggttcgaacatgggcgaggccaaaccgtggaaagcaattcgcgtagatctggttcgttgcccctacggcggttttgcgtttgcgttgttgggttggaccggaagccgcatgttccgccgtgatctgcgctggtacgccactgacgagaagaacatgatgctggacaatcatgcgctgtatgacctgaccaagaaaatctttctcaaagctaaatcggaagaggaaattttcgcacatctggggcttgaatacctggaaccgttcgaacgtaacgca

SEQ ID NO: 2398 - protein, 529 aa, synthetic construct
  REGION 1..529: note = Variant of terminal deoxynucleotidyltransferase
MHHHHHHGGSGSHGIRTIDSDFGKKRQKKMDNHDSSAIYEIKFHEFVLFILEEKMGATRRTFLTDLARKKGFRVENELSDSVTHIVAENNSRSEVLAWLKEHKMEKTKQFELLDISWLIESMKVGKPVDTKGKYQLAESGEMSANPDPTEGRENELPPTMKTVSPYACQRRTTLNNHNQRFTDALEILAENYEFKRNDDTALEFRRAISVLKSLPFEVRSLKDTEGLPWIGDEVKGIMEEIIEVGESLTVQAVLNDEWYQSFKRFKSVFGVGVKTADKWYRMGLRTLEDVRSSKTLKLTPMQKAGLCYYEDLARGVTKAEADAISLLVQDAVATFDPDALVEIVGGFRRGKPQGHDVDLLITSPGAEKEQEDQLLQKVTNLWKKQGLLLYGRLEWSQFEDGKLPSGKADALDHHAKCFLILKLYDHKVDKSKWEMPTGSNMGEAKPWKAIRVDLVRCPYGGFAFALLGWTGSRMFRRDLRWYATDEKNMMLDNHALYDLTKKIFLKAKSEEEIFAHLGLEYLEPFERNA

SEQ ID NO: 2399 - DNA, 1587 bp, synthetic construct
  misc_feature 1..1587: note = Variant of terminal deoxynucleotidyltransferase
  source 1..1587: mol_type = other DNA
atgcaccatcatcatcatcatggcggtagcggcagccacggcattcgtaccatcgattcggacttcgggaagaaacgccagaaaaaaatggataaccacgatagttccgccatcggggaaatcaaatttcacgagtttgtgctgttcattctcgaagaaaaaatgggtgcgacgcgtcgtacttttctgacagatttagcccgcaagaaagggttccgcgtcgagaatgaactgtcagacagcgttacccacatcgtggcagaaaataattcacgctctgaagtattggcttggctgaaagaacacaagatggagaagaccaagcaattcgaactgctggatattagctggcttatcgaaagcatgaaagttggtaaaccggtggacaccaaggggaaataccagttggcggaatcgggtgagatgagtgcgaacccagatccgacagagggtcgtgaaaacgagctgcctcctactatgaagaccgtttctccgtatgcgtgtcaacgccgcaccaccctgaacaaccataatcaacgttttacggacgcactggaaattcttgcggaaaattacgagttcaaacgcaacgatgatactgcgctggaatttcgtcgtgctatctccgtgctgaaaagccttccgtttgaggtacgtagcctgaaagacacggaaggattgccctggatcggtgatgaagtcaaagggattatggaagaaatcatcgaggtcggtgaatcgctggaagtgcaggccgtgctcaatgatgagtggtatcaaagcttcaaacgctttaagagtgtctttggagtgggggtgaagacagcagacaagtggtaccgtatgggtctgcgcacgctcgaggatgttcgttccagcaagaccctgaagttgaccccgatgcagaaagcgggtctgtgctattatgaagatcttgctcgcggcgttacgaaagccgaagctgacgcgatttctctgctggttcaggatgcagtcgcaactttcgacccggatgcgctggtggagattgtcggtggatttcgtcgtgggaaacctcagggtcacgacgttgatctgcttatcacatctccgggagctgagaaagagcaagaagaccagctcctgcagaaagtgaccaatctgtggaagaaacaagggttgttgctgtacggtcgtctggaatggagtcagtttgaagatgggaaactcccatccggtaaggctgatgccctggaccaccacgcgaaatgctttctgatcctcaaactttatgatcataaagtggacaaaagcaaatgggaaatgccgacgggttcgaacatgggcgaggccaaaccgtggaaagcaattcgcgtagatctggttcgttgcccctacggcggttttgcgtttgcgttgttgggttggaccggaagccgcatgttccgccgtgatctgcgctggtacgccactgacgagaagaacatgatgctggacaatcatgcgctgtatgacctgaccaagaaaatctttctcaaagctaaatcggaagaggaaattttcgcacatctggggcttgaatacctggaaccgttcgaacgtaacgca

SEQ ID NO: 2400 - protein, 529 aa, synthetic construct
  REGION 1..529: note = Variant of terminal deoxynucleotidyltransferase
MHHHHHHGGSGSHGIRTIDSDFGKKRQKKMDNHDSSAIGEIKFHEFVLFILEEKMGATRRTFLTDLARKKGFRVENELSDSVTHIVAENNSRSEVLAWLKEHKMEKTKQFELLDISWLIESMKVGKPVDTKGKYQLAESGEMSANPDPTEGRENELPPTMKTVSPYACQRRTTLNNHNQRFTDALEILAENYEFKRNDDTALEFRRAISVLKSLPFEVRSLKDTEGLPWIGDEVKGIMEEIIEVGESLEVQAVLNDEWYQSFKRFKSVFGVGVKTADKWYRMGLRTLEDVRSSKTLKLTPMQKAGLCYYEDLARGVTKAEADAISLLVQDAVATFDPDALVEIVGGFRRGKPQGHDVDLLITSPGAEKEQEDQLLQKVTNLWKKQGLLLYGRLEWSQFEDGKLPSGKADALDHHAKCFLILKLYDHKVDKSKWEMPTGSNMGEAKPWKAIRVDLVRCPYGGFAFALLGWTGSRMFRRDLRWYATDEKNMMLDNHALYDLTKKIFLKAKSEEEIFAHLGLEYLEPFERNA

SEQ ID NO: 2401 - DNA, 1587 bp, synthetic construct
  misc_feature 1..1587: note = Variant of terminal deoxynucleotidyltransferase
  source 1..1587: mol_type = other DNA
atgcaccatcatcatcatcatggcggtagcggcagccacggcattcgtaccatcgattcggacttcgggaagaaacgccagaaaaaaatggataaccacgatagttccgccatctatgaaatcaaatttcacgagtttgtgctgttcattctcgaagaaaaaatgggtgcgacgcgtcgtacttttctgacagatttagcccgcaagaaagggttccgcgtcgagaatgaactgtcagacagcgttacccacatcgtggcagaaaataattcacgctctgaagtattggcttggctgaaagaacacaagatggagaagaccaagcaattcgaactgctggatattagctggcttatcgaaagcatgaaagttggtaaaccggtggacaccaaggggaaataccagttggcggaatcgggtgagatgagtgcgaacccagatccgacagagggtcgtgaaaacgagctgcctgcgactatgaagaccgtttctccgtatgcgtgtcaacgccgcaccaccctgaacaaccataatcaacgttttacggacgcactggaaattcttgcggaaaattacgagttcaaacgcaacgatgatactgcgctggaatttcgtcgtgctatctccgtgctgaaaagccttccgtttgaggtacgtagcctgaaagacacggaaggattgccctggatcggtgatgaagtcaaagggattatggaagaaatcatcgaggtcggtgaatcgctggaagtgcaggccgtgctcaatgatgagtggtatcaaagcttcaaacgctttaagagtgtctttggagtgggggtgaagacagcagacaagtggtaccgtatgggtctgcgcacgctcgaggatgttcgttccagcaagaccctgaagttgaccccgatgcagaaagcgggtctgtgctattatgaagatcttgctcgcggcgttacgaaagccgaagctgacgcgatttctctgctggttcaggatgcagtcgcaactttcgacccggatgcgctggtggagattgtcggtggatttcgtcgtgggaaacctcagggtcacgacgttgatctgcttatcacatctccgggagctgagaaagagcaagaagaccagctcctgcagaaagtgaccaatctgtggaagaaacaagggttgttgctgtacggtcgtctggaatggagtcagtttgaagatgggaaactcccatccggtaaggctgatgccctggaccaccacgcgaaatgctttctgatcctcaaactttatgatcataaagtggacaaaagcaaatgggaaatgccgacgggttcgaacatgggcgaggccaaaccgtggaaagcaattcgcgtagatctggttcgttgcccctacggcggttttgcgtttgcgttgttgggttggaccggaagccgcatgttccgccgtgatctgcgctggtacgccactgacgagaagaacatgatgctggacaatcatgcgctgtatgacctgaccaagaaaatctttctcaaagctaaatcggaagaggaaattttcgcacatctggggcttgaatacctggaaccgttcgaacgtaacgca

SEQ ID NO: 2402 - protein, 529 aa, synthetic construct
  REGION 1..529: note = Variant of terminal deoxynucleotidyltransferase
MHHHHHHGGSGSHGIRTIDSDFGKKRQKKMDNHDSSAIYEIKFHEFVLFILEEKMGATRRTFLTDLARKKGFRVENELSDSVTHIVAENNSRSEVLAWLKEHKMEKTKQFELLDISWLIESMKVGKPVDTKGKYQLAESGEMSANPDPTEGRENELPATMKTVSPYACQRRTTLNNHNQRFTDALEILAENYEFKRNDDTALEFRRAISVLKSLPFEVRSLKDTEGLPWIGDEVKGIMEEIIEVGESLEVQAVLNDEWYQSFKRFKSVFGVGVKTADKWYRMGLRTLEDVRSSKTLKLTPMQKAGLCYYEDLARGVTKAEADAISLLVQDAVATFDPDALVEIVGGFRRGKPQGHDVDLLITSPGAEKEQEDQLLQKVTNLWKKQGLLLYGRLEWSQFEDGKLPSGKADALDHHAKCFLILKLYDHKVDKSKWEMPTGSNMGEAKPWKAIRVDLVRCPYGGFAFALLGWTGSRMFRRDLRWYATDEKNMMLDNHALYDLTKKIFLKAKSEEEIFAHLGLEYLEPFERNA

SEQ ID NO: 2403 - DNA, 1587 bp, synthetic construct
  misc_feature 1..1587: note = Variant of terminal deoxynucleotidyltransferase
  source 1..1587: mol_type = other DNA
atgcaccatcatcatcatcatggcggtagcggcagccacggcattcgtaccatcgattcggacttcgggaagaaacgccagaaaaaaatggataaccacgatagttccgccatctatgaaatcaaatttcacgagtttgtgctgttcattctcgaagaaaaaatgggtgcgacgcgtcgtacttttctgacagatttagcccgcaagaaagggttccgcgtcgagaatgaactgtcagacagcgttacccacatcgtggcagaaaataattcacgctctgaagtattggcttggctgaaagaacacaagatggagaagaccaagcaattcgaactgctggatattagctggcttatcgaaagcatgaaagttggtaaaccggtggacaccaaggggaaataccagttggcggaatcgggtgagatgagtgcgaacccagatccgacagagattcgtgaaaacgagctgcctcctactatgaagaccgtttctccgtatgcgtgtcaacgccgcaccaccctgaacaaccataatcaacgttttacggacgcactggaaattcttgcggaaaattacgagttcaaacgcaacgatgatactgcgctggaatttcgtcgtgctatctccgtgctgaaaagccttccgtttgaggtacgtagcctgaaagacacggaaggattgccctggatcggtgatgaagtcaaagggattatggaagaaatcatcgaggtcggtgaatcgctggaagtgcaggccgtgctcaatgatgagtggtatcaaagcttcaaacgctttaagagtgtctttggagtgggggtgaagacagcagacaagtggtaccgtatgggtctgcgcacgctcgaggatgttcgttccagcaagaccctgaagttgaccccgatgcagaaagcgggtctgtgctattatgaagatcttgctcgcggcgttacgaaagccgaagctgacgcgatttctctgctggttcaggatgcagtcgcaactttcgacccggatgcgctggtggagattgtcggtggatttcgtcgtgggaaacctcagggtcacgacgttgatctgcttatcacatctccgggagctgagaaagagcaagaagaccagctcctgcagaaagtgaccaatctgtggaagaaacaagggttgttgctgtacggtcgtctggaatggagtcagtttgaagatgggaaactcccatccggtaaggctgatgccctggaccaccacgcgaaatgctttctgatcctcaaactttatgatcataaagtggacaaaagcaaatgggaaatgccgacgggttcgaacatgggcgaggccaaaccgtggaaagcaattcgcgtagatctggttcgttgcccctacggcggttttgcgtttgcgttgttgggttggaccggaagccgcatgttccgccgtgatctgcgctggtacgccactgacgagaagaacatgatgctggacaatcatgcgctgtatgacctgaccaagaaaatctttctcaaagctaaatcggaagaggaaattttcgcacatctggggcttgaatacctggaaccgttcgaacgtaacgca

SEQ ID NO: 2404 - protein, 529 aa, synthetic construct
  REGION 1..529: note = Variant of terminal deoxynucleotidyltransferase
MHHHHHHGGSGSHGIRTIDSDFGKKRQKKMDNHDSSAIYEIKFHEFVLFILEEKMGATRRTFLTDLARKKGFRVENELSDSVTHIVAENNSRSEVLAWLKEHKMEKTKQFELLDISWLIESMKVGKPVDTKGKYQLAESGEMSANPDPTEIRENELPPTMKTVSPYACQRRTTLNNHNQRFTDALEILAENYEFKRNDDTALEFRRAISVLKSLPFEVRSLKDTEGLPWIGDEVKGIMEEIIEVGESLEVQAVLNDEWYQSFKRFKSVFGVGVKTADKWYRMGLRTLEDVRSSKTLKLTPMQKAGLCYYEDLARGVTKAEADAISLLVQDAVATFDPDALVEIVGGFRRGKPQGHDVDLLITSPGAEKEQEDQLLQKVTNLWKKQGLLLYGRLEWSQFEDGKLPSGKADALDHHAKCFLILKLYDHKVDKSKWEMPTGSNMGEAKPWKAIRVDLVRCPYGGFAFALLGWTGSRMFRRDLRWYATDEKNMMLDNHALYDLTKKIFLKAKSEEEIFAHLGLEYLEPFERNA

SEQ ID NO: 2405 - DNA, 1587 bp, synthetic construct
  misc_feature 1..1587: note = Variant of terminal deoxynucleotidyltransferase
  source 1..1587: mol_type = other DNA
atgcaccatcatcatcatcatggcggtagcggcagccacggcattcgtaccatcgattcggacttcgggaagaaacgccagaaaaaaatggataaccacgatagttccgccatctatgaaatcaaatttcacgagtttgtgctgttcattctcgaagaaaaaatgggtgcgacgcgtcgtacttttctgacagatttagcccgcaagaaagggttccgcgtcgagaatgaactgtcagacagcgttacccacatcgtggcagaaaataattcacgctctgaagtattggcttggctgaaagaacacaagatggagaagaccaagcaattcgaactgctggatattagctggcttatcgaaagcatgaaagttggtaaaccggtggacaccaaggggaaataccagttggcggaatcgggtgagatgagtgcgaacccagatccgacagagggtcgtgaaaacgagctgcctcctactatgaagaccgtttctccgtatgcgtgtcaacgccgcaccaccctgaacaaccataatcaacgttttacggacgcactggaaattcttgcggaaaattacgagttcaaacgcaacgatgatactgcgctggaatttcgtcgtgctatctccgtgctgaaaagccttccgtttgaggtacgtagcctgaaagacacggaaggattgccctggatcggtgatgaagtcaaagggattatggaagaaatcatcgaggtcggtgaatcgctggaagtgcaggccgtgctcaatgatgagtggtatcaaagcttcaaacgctttaagagtgtctttggagtgggggtgaagacagcagacaagtggtaccgtatgggtctgcgcacgctcgaggatgttcgttccagcaagaccctgaagttgaccccgatgcagaaagcgggtctgtgctattatgaagatcttgctcgcggcgttacgaaagccgaagctgacgcgatttctctgctggttcaggatgcagtcgcaactttcgacccggatgcgctggtggagattgtcggtggatttcgtcgtgggaaacctcagggtcacgacgttgatctgcttatcacatctccgggagctgagaaagagcaagaagaccagctcctgcagaaagtgaccaatctgtggaagaaacaagggttgttgctgtacggtcgtctggaatggagtcagtttgaagatgggaaactcccatccggtaaggctgatgccctggaccaccacgcgaaatgctttctgatcctcaaactttatgatcataaagtggacaaaagcaaatgggaaatgccgacgggttcgaacatgggcgaggccaaaccgtggaaagcaattcgcgtagatctggttcgttgcccctacggcggttttgcgtttgcgttgttgggttggaccggaagctcgatgttccgccgtgatctgcgctggtacgccactgacgagaagaacatgatgctggacaatcatgcgctgtatgacctgaccaagaaaatctttctcaaagctaaatcggaagaggaaattttcgcacatctggggcttgaatacctggaaccgttcgaacgtaacgca

SEQ ID NO: 2406 - protein, 529 aa, synthetic construct
  REGION 1..529: note = Variant of terminal deoxynucleotidyltransferase
MHHHHHHGGSGSHGIRTIDSDFGKKRQKKMDNHDSSAIYEIKFHEFVLFILEEKMGATRRTFLTDLARKKGFRVENELSDSVTHIVAENNSRSEVLAWLKEHKMEKTKQFELLDISWLIESMKVGKPVDTKGKYQLAESGEMSANPDPTEGRENELPPTMKTVSPYACQRRTTLNNHNQRFTDALEILAENYEFKRNDDTALEFRRAISVLKSLPFEVRSLKDTEGLPWIGDEVKGIMEEIIEVGESLEVQAVLNDEWYQSFKRFKSVFGVGVKTADKWYRMGLRTLEDVRSSKTLKLTPMQKAGLCYYEDLARGVTKAEADAISLLVQDAVATFDPDALVEIVGGFRRGKPQGHDVDLLITSPGAEKEQEDQLLQKVTNLWKKQGLLLYGRLEWSQFEDGKLPSGKADALDHHAKCFLILKLYDHKVDKSKWEMPTGSNMGEAKPWKAIRVDLVRCPYGGFAFALLGWTGSSMFRRDLRWYATDEKNMMLDNHALYDLTKKIFLKAKSEEEIFAHLGLEYLEPFERNA

SEQ ID NO: 2407 - DNA, 1587 bp, synthetic construct
  misc_feature 1..1587: note = Variant of terminal deoxynucleotidyltransferase
  source 1..1587: mol_type = other DNA
atgcaccatcatcatcatcatggcggtagcggcagccacggcattcgtaccatcgattcggacttcgggaagaaacgccagaaaaaaatggataaccacgatagttccgccatctatgaaatcaaatttcacgagtttgtgctgttcattctcgaagaaaaaatgggtgcgacgcgtcgtacttttctgacagatttagcccgcaagaaagggttccgcgtcgagaatgaactgtcagacagcgttacccacatcgtggcagaaaataattcacgctctgaagtattggcttggctgaaagaacacaagatggagaagaccaagcaattcgaactgctggatattagctggcttatcgaaagcatgaaagttggtaaaccggtggacaccaaggggaaataccagttggcggaatcgggtgagatgagtgcgaacccagatccgacagagggtcgtgaaaacgagctgcctcctactatgaagaccgtttctccgtatgcgtgtcaacgccgcaccaccctgaacaaccataatcaacgttttacggacgcactggaaattcttgcggaaaattacgagttcaaacgcaacgatgatactgcgctggaatttcgtcgtgctatctccgtgctgaaaagccttccgtttgaggtacgtagcctgaaagacacggaaggattgccctggatcggtgatgaagtcaaagggattatggaagaaatcatcgaggtcggtgaatcgctggaagtgcaggccgtgctcaatgatgagtggtatcaaagcttcaaacgctttaagagtgtctttggagtgggggtgaagacagcagacaagtggtaccgtatgggtctgcgcacgctcgaggatgttcgttccagcaagaccctgaagttgaccccgatgcagaaagcgggtctgtgctattatgaagatcttgctcgcggcgttacgaaagccgaagctgacgcgatttctctgctggttcaggatgcagtcgcaactttcgacccggatgcgctggtggagattgtcggtggatttcgtcgtgggaaacctcagggtcacgacgttgatctgcttatcacatctccgggagctgagaaagagcaagaagaccagctcctgcagaaagtgaccaatctgtggaagaaacaagggttgttgctgtacggtcgtctggaatggagtcagtttgaagatgggaaactcccatccggtaaggctgatgccctggaccaccacgcgaaatgctttctgatcctcaaactttatgatcataaagtggacaaaagcaaatgggaaatgccgacgggttcgaacatgggcgaggccaaaccgtggaaagcaattcgcgtagatctggttcgttgcccctacggcggttttgcgtttgcgttgttgggttggaccggaagcggtatgttccgccgtgatctgcgctggtacgccactgacgagaagaacatgatgctggacaatcatgcgctgtatgacctgaccaagaaaatctttctcaaagctaaatcggaagaggaaattttcgcacatctggggcttgaatacctggaaccgttcgaacgtaacgca

SEQ ID NO: 2408 - protein, 529 aa, synthetic construct
  REGION 1..529: note = Variant of terminal deoxynucleotidyltransferase
MHHHHHHGGSGSHGIRTIDSDFGKKRQKKMDNHDSSAIYEIKFHEFVLFILEEKMGATRRTFLTDLARKKGFRVENELSDSVTHIVAENNSRSEVLAWLKEHKMEKTKQFELLDISWLIESMKVGKPVDTKGKYQLAESGEMSANPDPTEGRENELPPTMKTVSPYACQRRTTLNNHNQRFTDALEILAENYEFKRNDDTALEFRRAISVLKSLPFEVRSLKDTEGLPWIGDEVKGIMEEIIEVGESLEVQAVLNDEWYQSFKRFKSVFGVGVKTADKWYRMGLRTLEDVRSSKTLKLTPMQKAGLCYYEDLARGVTKAEADAISLLVQDAVATFDPDALVEIVGGFRRGKPQGHDVDLLITSPGAEKEQEDQLLQKVTNLWKKQGLLLYGRLEWSQFEDGKLPSGKADALDHHAKCFLILKLYDHKVDKSKWEMPTGSNMGEAKPWKAIRVDLVRCPYGGFAFALLGWTGSGMFRRDLRWYATDEKNMMLDNHALYDLTKKIFLKAKSEEEIFAHLGLEYLEPFERNA

SEQ ID NO: 2409 - DNA, 1587 bp, synthetic construct
  misc_feature 1..1587: note = Variant of terminal deoxynucleotidyltransferase
  source 1..1587: mol_type = other DNA
atgcaccatcatcatcatcatggcggtagcggcagccacggcattcgtaccatcgattcggacttcgggaagaaacgccagaaaaaaatggataaccacgatagttccgccatctatgaaatcaaatttcacgagtttgtgctgttcattctcgaagaaaaaatgggtgcgacgcgtcgtacttttctgacagatttagcccgcaagaaagggttccgcgtcgagaatgaactgtcagacagcgttacccacatcgtggcagaaaataattcacgctctgaagtattggcttggctgaaagaacacaagatggagaagaccaagcaattcgaactgctggatattagctggcttatcgaaagcatgaaagttggtaaaccggtggacaccaaggggaaataccagttggcggaatcgggtgagatgagtgcgaacccagatccgacagagggtcgtgaaaacgagctgcctcctactatgaagaccgtttctccgtatgcgtgtcaacgccgcaccaccctgaacaaccataatcaacgttttacggacgcactggaaattcttgcggaaaattacgagttcaaacgcaacgatgatactgcgctggaatttcgtcgtgctatctccgtgctgaaaagccttccgtttgaggtacgtagcctgaaagacacggaaggattgccctggatcggtgatgaagtcaaagggattatggaagaaatcatcgaggtcggtgaatcgctggaagtgcaggccgtgctcaatgatgagtggtatcaaagcttcaaacgctttaagagtgtctttggagtgggggtgaagacagcagacaagtggtaccgtatgggtctgcgcacgctcgaggatgttcgttccagcaagaccctgaagttgaccccgatgcagaaagcgggtctgtgctattatgaagatcttgctcgcggcgttacgaaagccgaagctgacgcgatttctctgctggttcaggatgcagtcgcaactttcgacccggatgcgctggtggagattgtcggtggatttcgtcgtgggaaacctcagggtcacgacgttgatctgcttatcacatctccgggagctgagaaagagcaagaagaccagctcctgcagaaagtgaccaatctgtggaagaaacaagggttgttgctgtacggtcgtctggaatggagtcagtttgaagatgggaaactcccatccggtaaggctgatgccctggaccaccacgcgaaatgctttctgatcctcaaactttatgatcataaagtggacaaaagcaaatgggaaatgccgacgggttcgaacatgggcgaggccaaaccgtggaaagcaattcgcgtagatctggttcgttgcccctacggcggttttgcgtttgcgttgttgggttggaccggaagcgcgatgttccgccgtgatctgcgctggtacgccactgacgagaagaacatgatgctggacaatcatgcgctgtatgacctgaccaagaaaatctttctcaaagctaaatcggaagaggaaattttcgcacatctggggcttgaatacctggaaccgttcgaacgtaacgca

SEQ ID NO: 2410 - protein, 529 aa, synthetic construct
  REGION 1..529: note = Variant of terminal deoxynucleotidyltransferase
MHHHHHHGGSGSHGIRTIDSDFGKKRQKKMDNHDSSAIYEIKFHEFVLFILEEKMGATRRTFLTDLARKKGFRVENELSDSVTHIVAENNSRSEVLAWLKEHKMEKTKQFELLDISWLIESMKVGKPVDTKGKYQLAESGEMSANPDPTEGRENELPPTMKTVSPYACQRRTTLNNHNQRFTDALEILAENYEFKRNDDTALEFRRAISVLKSLPFEVRSLKDTEGLPWIGDEVKGIMEEIIEVGESLEVQAVLNDEWYQSFKRFKSVFGVGVKTADKWYRMGLRTLEDVRSSKTLKLTPMQKAGLCYYEDLARGVTKAEADAISLLVQDAVATFDPDALVEIVGGFRRGKPQGHDVDLLITSPGAEKEQEDQLLQKVTNLWKKQGLLLYGRLEWSQFEDGKLPSGKADALDHHAKCFLILKLYDHKVDKSKWEMPTGSNMGEAKPWKAIRVDLVRCPYGGFAFALLGWTGSAMFRRDLRWYATDEKNMMLDNHALYDLTKKIFLKAKSEEEIFAHLGLEYLEPFERNA

SEQ ID NO: 2411 - DNA, 1587 bp, synthetic construct
  misc_feature 1..1587: note = Variant of terminal deoxynucleotidyltransferase
  source 1..1587: mol_type = other DNA
atgcaccatcatcatcatcatggcggtagcggcagccacggcattcgtaccatcgattcggacttcgggaagaaacgccagaaaaaaatggataaccacgatagttccgccatctatgaaatcaaatttcacgagtttgtgctgttcattctcgaagaaaaaatgggtgcgacgcgtcgtacttttctgacagatttagcccgcaagaaagggttccgcgtcgagaatgaactgtcagacagcgttacccacatcgtggcagaaaataattcacgctctgaagtattggcttggctgaaagaacacaagatggagaagaccaagcaattcgaactgctggatattagctggcttatcgaaagcatgaaagttggtaaaccggtggacaccaaggggaaataccagttggcggaatcgggtgagatgagtgcgaacccagatccgacagagggtcgtgaaaacgagctgcctcctactatgaagaccgtttctccgtatgcgtgtcaacgccgcaccaccctgaacaaccataatcaacgttttacggacgcactggaaattcttcgggaaaattacgagttcaaacgcaacgatgatactgcgctggaatttcgtcgtgctatctccgtgctgaaaagccttccgtttgaggtacgtagcctgaaagacacggaaggattgccctggatcggtgatgaagtcaaagggattatggaagaaatcatcgaggtcggtgaatcgctggaagtgcaggccgtgctcaatgatgagtggtatcaaagcttcaaacgctttaagagtgtctttggagtgggggtgaagacagcagacaagtggtaccgtatgggtctgcgcacgctcgaggatgttcgttccagcaagaccctgaagttgaccccgatgcagaaagcgggtctgtgctattatgaagatcttgctcgcggcgttacgaaagccgaagctgacgcgatttctctgctggttcaggatgcagtcgcaactttcgacccggatgcgctggtggagattgtcggtggatttcgtcgtgggaaacctcagggtcacgacgttgatctgcttatcacatctccgggagctgagaaagagcaagaagaccagctcctgcagaaagtgaccaatctgtggaagaaacaagggttgttgctgtacggtcgtctggaatggagtcagtttgaagatgggaaactcccatccggtaaggctgatgccctggaccaccacgcgaaatgctttctgatcctcaaactttatgatcataaagtggacaaaagcaaatgggaaatgccgacgggttcgaacatgggcgaggccaaaccgtggaaagcaattcgcgtagatctggttcgttgcccctacggcggttttgcgtttgcgttgttgggttggaccggaagccgcatgttccgccgtgatctgcgctggtacgccactgacgagaagaacatgatgctggacaatcatgcgctgtatgacctgaccaagaaaatctttctcaaagctaaatcggaagaggaaattttcgcacatctggggcttgaatacctggaaccgttcgaacgtaacgca

SEQ ID NO: 2412 - protein, 529 aa, synthetic construct
  REGION 1..529: note = Variant of terminal deoxynucleotidyltransferase
MHHHHHHGGSGSHGIRTIDSDFGKKRQKKMDNHDSSAIYEIKFHEFVLFILEEKMGATRRTFLTDLARKKGFRVENELSDSVTHIVAENNSRSEVLAWLKEHKMEKTKQFELLDISWLIESMKVGKPVDTKGKYQLAESGEMSANPDPTEGRENELPPTMKTVSPYACQRRTTLNNHNQRFTDALEILRENYEFKRNDDTALEFRRAISVLKSLPFEVRSLKDTEGLPWIGDEVKGIMEEIIEVGESLEVQAVLNDEWYQSFKRFKSVFGVGVKTADKWYRMGLRTLEDVRSSKTLKLTPMQKAGLCYYEDLARGVTKAEADAISLLVQDAVATFDPDALVEIVGGFRRGKPQGHDVDLLITSPGAEKEQEDQLLQKVTNLWKKQGLLLYGRLEWSQFEDGKLPSGKADALDHHAKCFLILKLYDHKVDKSKWEMPTGSNMGEAKPWKAIRVDLVRCPYGGFAFALLGWTGSRMFRRDLRWYATDEKNMMLDNHALYDLTKKIFLKAKSEEEIFAHLGLEYLEPFERNA

SEQ ID NO: 2413 - DNA, 1587 bp, synthetic construct
  misc_feature 1..1587: note = Variant of terminal deoxynucleotidyltransferase
  source 1..1587: mol_type = other DNA
atgcaccatcatcatcatcatggcggtagcggcagccacggcattcgtaccatcgattcggacttcgggaagaaacgccagaaaaaaatggataaccacgatagttccgccatctatgaaatcaaatttcacgagtttgtgctgttcattctcgaagaaaaaatgggtgcgacgcgtcgtacttttctgacagatttagcccgcaagaaagggttccgcgtcgagaatgaactgtcagacagcgttacccacatcgtggcagaaaataattcacgctctgaagtattggcttggctgaaagaacacaagatggagaagaccaagcaattcgaactgctggatattagctggcttatcgaaagcatgaaagttggtaaaccggtggacaccaaggggaaataccagttggcggaatcgggtgagatgagtgcgaacccagatccgacagagggtcgtgaaaacgagctgcctcctactatgaagaccgtttctccgtatgcgtgtcaacgccgcaccaccctgaacaaccataatcaacgttttacggacgcactggaaattcttgcggaaaattacgagttcaaacgcaacgatgatactgcgctggaatttcgtcgtgctatctccgtgctgaaaagccttccgtttgaggtacgtagcctgaaagacacggaaggattgccctggatcggtgatgaagtcaaagggattatggaagaaatcatcgaggtcggtgaatcgctggaagtgcaggccgtgctcaatgatgagtggtatcaaagcttcaaacgctttaagagtgtctttggagtgggggtgaagacagcagacaagtggtaccgtatgggtctgcgcacgctcgaggatgttcgttccagcaagaccctgaagttgaccccgatgcagaaagcgggtctgtgctattatgaagatcttgctcgcggcgttacgaaagccgaagctgacgcgatttctctgctggttcaggatgcagtcgcaactttcgacccggatgcgctggtggagattgtcggtggatttcgtcgtgggaaacctcagggtcacgacgttgatctgcttatcacatctccgggagctgagaaagagcaagaagaccagctcctgcagaaagtgaccaatctgtggaagaaacaagggttgttgctgtacggtcgtctggaatggagtcagtttgaagatgggaaactcccatccggtaaggctgatgccctggaccaccacgcgaaatgctttctgatcctcaaactttatgatcataaagtggacaaaagcaaatgggaaatgccgacgggttcgaacatgggcgaggccaaaccgtggaaagcaattcgcgtagatctggttcgttgcccctacggcggttttgcgtttgcgttgttgggttggaccggaagccgcatgttccgccgtgatctgcgctggtacgccactgacgagaagaacatgatgctggacgagcatgcgctgtatgacctgaccaagaaaatctttctcaaagctaaatcggaagaggaaattttcgcacatctggggcttgaatacctggaaccgttcgaacgtaacgca

SEQ ID NO: 2414 - protein, 529 aa, synthetic construct
  REGION 1..529: note = Variant of terminal deoxynucleotidyltransferase
MHHHHHHGGSGSHGIRTIDSDFGKKRQKKMDNHDSSAIYEIKFHEFVLFILEEKMGATRRTFLTDLARKKGFRVENELSDSVTHIVAENNSRSEVLAWLKEHKMEKTKQFELLDISWLIESMKVGKPVDTKGKYQLAESGEMSANPDPTEGRENELPPTMKTVSPYACQRRTTLNNHNQRFTDALEILAENYEFKRNDDTALEFRRAISVLKSLPFEVRSLKDTEGLPWIGDEVKGIMEEIIEVGESLEVQAVLNDEWYQSFKRFKSVFGVGVKTADKWYRMGLRTLEDVRSSKTLKLTPMQKAGLCYYEDLARGVTKAEADAISLLVQDAVATFDPDALVEIVGGFRRGKPQGHDVDLLITSPGAEKEQEDQLLQKVTNLWKKQGLLLYGRLEWSQFEDGKLPSGKADALDHHAKCFLILKLYDHKVDKSKWEMPTGSNMGEAKPWKAIRVDLVRCPYGGFAFALLGWTGSRMFRRDLRWYATDEKNMMLDEHALYDLTKKIFLKAKSEEEIFAHLGLEYLEPFERNA

SEQ ID NO: 2415 - DNA, 1587 bp, synthetic construct
  misc_feature 1..1587: note = Variant of terminal deoxynucleotidyltransferase
  source 1..1587: mol_type = other DNA
atgcaccatcatcatcatcatggcggtagcggcagccacggcattcgtaccatcgattcggacttcgggaagaaacgccagaaaaaaatggataaccacgatagttccgccatctatgaaatcaaatttcacgagtttgtgctgttcattctcgaagaaaaaatgggtgcgacgcgtcgtacttttctgacagatttagcccgcaagaaagggttccgcgtcgagaatgaactgtcagacagcgttacccacatcgtggcagaaaataattcacgctctgaagtattggcttggctgaaagaacacaagatggagaagaccaagcaattcgaactgctggatattagctggcttatcgaaagcatgaaagttggtaaaccggtggacaccaaggggaaataccagttggcggaatcgggtgagatgagtgcgaacccagatccgacagagggtcgtgaaaacgagctgcctcctactatgaagaccgtttctccgtatgcgtgtcaacgccgcaccaccctgaacaaccataatcaacgttttacggacgcactggaaattcttgcggaaaattacgagttcaaacgcaacgatgatactgcgctggaatttcgtcgtgctatctccgtgctgaaaagccttccgtttgaggtacgtagcctgaaagacacggaaggattgccctggatcggtgatgaagtcaaagggattatggaagaaatcatcgaggtcggtgaatcgctggaagtgcaggccgtgctcaatgatgagtggtatcaaagcttcaaacgctttaagagtgtctttggagtgggggtgaagacagcagacaagtggtaccgtatgggtctgcgcacgctcgaggatgttcgttccagcaagaccctgaagttgaccccgatgcagaaagcgggtctgtgctattatgaagatcttgctcgcggcgttacgaaagccgaagctgacgcgatttctctgctggttcaggatgcagtcgcaactttcgacccggatgcgctggtggagattgtcggtggatttcgtcgtgggaaacctcagggtcacgacgttgatctgcttatcacatctccgggagctgagaaagagcaagaagaccagctcctgcagaaagtgaccaatctgtggaagaaacaagggttgttgctgtacggtcgtctggaatggagtcagtttgaagatgggaaactcccatccggtaaggctgatgccctggaccaccacgcgaaatgctttctgatcctcaaactttatgatcataaagtggacaaaagcaaatgggaaatgccgacgggttcgaacatgggcgaggccaaaccgtggaaagcaattcgcgtagatctggttcgttgcccctacggcggttttgcgtttgcgttgttgggttggaccggaagccgcatgttccgccgtgatctggagtggtacgccactgacgagaagaacatgatgctggacaatcatgcgctgtatgacctgaccaagaaaatctttctcaaagctaaatcggaagaggaaattttcgcacatctggggcttgaatacctggaaccgttcgaacgtaacgca

SEQ ID NO: 2416 - protein, 529 aa, synthetic construct
  REGION 1..529: note = Variant of terminal deoxynucleotidyltransferase
MHHHHHHGGSGSHGIRTIDSDFGKKRQKKMDNHDSSAIYEIKFHEFVLFILEEKMGATRRTFLTDLARKKGFRVENELSDSVTHIVAENNSRSEVLAWLKEHKMEKTKQFELLDISWLIESMKVGKPVDTKGKYQLAESGEMSANPDPTEGRENELPPTMKTVSPYACQRRTTLNNHNQRFTDALEILAENYEFKRNDDTALEFRRAISVLKSLPFEVRSLKDTEGLPWIGDEVKGIMEEIIEVGESLEVQAVLNDEWYQSFKRFKSVFGVGVKTADKWYRMGLRTLEDVRSSKTLKLTPMQKAGLCYYEDLARGVTKAEADAISLLVQDAVATFDPDALVEIVGGFRRGKPQGHDVDLLITSPGAEKEQEDQLLQKVTNLWKKQGLLLYGRLEWSQFEDGKLPSGKADALDHHAKCFLILKLYDHKVDKSKWEMPTGSNMGEAKPWKAIRVDLVRCPYGGFAFALLGWTGSRMFRRDLEWYATDEKNMMLDNHALYDLTKKIFLKAKSEEEIFAHLGLEYLEPFERNA

SEQ ID NO: 2417 - DNA, 1587 bp, synthetic construct
  misc_feature 1..1587: note = Variant of terminal deoxynucleotidyltransferase
  source 1..1587: mol_type = other DNA
atgcaccatcatcatcatcatggcggtagcggcagccacggcattcgtaccatcgattcggacttcgggaagaaacgccagaaaaaaatggataaccacgatagttccgccatctatgaaatcaaatttcacgagtttgtgctgttcattctcgaagaaaaaatgggtgcgacgcgtcgtacttttctgacagatttagcccgcaagaaagggttccgcgtcgagaatgaactgtcagacagcgttacccacatcgtggcagaaaataattcacgctctgaagtattggcttggctgaaagaacacaagatggagaagaccaagcaattcgaactgctggatattagctggcttatcgaaagcatgaaagttggtaaaccggtggacaccaaggggaaataccagttggcggaatcgggtgagatgagtgcgaacccagatccgacagagggtcgtgaaaacgagctgcctcctactatgaagaccgtttctccgtatgcgtgtcaacgccgcaccaccctgaacaaccataatcaacgttttacggacgcactggaaattcttgcggaaaattacgagttcaaacgcaacgatgatactgcgctggaatttcgtcgtgctatctccgtgctgaaaagccttccgtttgaggtacgtagcctgaaagacacggaaggattgccctggatcggtgatgaagtcaaagggattatggaagaaatcatcgaggtcggtgaatcgctggaagtgcaggccgtgctcaatgatgagtggtatcaaagcttcaaacgctttaagagtgtctttggagtgggggtgaagacagcagacaagtggtaccgtatgggtctgcgcacgctcgaggatgttcgttccagcaagaccctgaagttgaccccgatgcagaaagcgggtctgtgctattatgaagatcttgctcgcggcgttacgaaagccgaagctgacgcgatttctctgctggttcaggatgcagtcgcaactttcgacccggatgcgctggtggagattgtcggtggatttcgtcgtgggaaacctcagggtcacgacgttgatctgcttatcacatctccgggagctgagaaagagcaagaagaccagctcctgcagaaagtgaccaatctgtggaagaaacaagggttgttgctgtacggtcgtctggaatggagtcagtttgaagatgggaaactcccatccggtaaggctgatgccctggacgagcacgcgaaatgctttctgatcctcaaactttatgatcataaagtggacaaaagcaaatgggaaatgccgacgggttcgaacatgggcgaggccaaaccgtggaaagcaattcgcgtagatctggttcgttgcccctacggcggttttgcgtttgcgttgttgggttggaccggaagccgcatgttccgccgtgatctgcgctggtacgccactgacgagaagaacatgatgctggacaatcatgcgctgtatgacctgaccaagaaaatctttctcaaagctaaatcggaagaggaaattttcgcacatctggggcttgaatacctggaaccgttcgaacgtaacgca

SEQ ID NO: 2418 - protein, 529 aa, synthetic construct
  REGION 1..529: note = Variant of terminal deoxynucleotidyltransferase
MHHHHHHGGSGSHGIRTIDSDFGKKRQKKMDNHDSSAIYEIKFHEFVLFILEEKMGATRRTFLTDLARKKGFRVENELSDSVTHIVAENNSRSEVLAWLKEHKMEKTKQFELLDISWLIESMKVGKPVDTKGKYQLAESGEMSANPDPTEGRENELPPTMKTVSPYACQRRTTLNNHNQRFTDALEILAENYEFKRNDDTALEFRRAISVLKSLPFEVRSLKDTEGLPWIGDEVKGIMEEIIEVGESLEVQAVLNDEWYQSFKRFKSVFGVGVKTADKWYRMGLRTLEDVRSSKTLKLTPMQKAGLCYYEDLARGVTKAEADAISLLVQDAVATFDPDALVEIVGGFRRGKPQGHDVDLLITSPGAEKEQEDQLLQKVTNLWKKQGLLLYGRLEWSQFEDGKLPSGKADALDEHAKCFLILKLYDHKVDKSKWEMPTGSNMGEAKPWKAIRVDLVRCPYGGFAFALLGWTGSRMFRRDLRWYATDEKNMMLDNHALYDLTKKIFLKAKSEEEIFAHLGLEYLEPFERNA

SEQ ID NO: 2419 - DNA, 1587 bp, synthetic construct
  misc_feature 1..1587: note = Variant of terminal deoxynucleotidyltransferase
  source 1..1587: mol_type = other DNA
atgcaccatcatcatcatcatggcggtagcggcagccacggcattcgtaccatcgattcggacttcgggaagaaacgccagaaaaaaatggataaccacgatagttccgccatctatgaaatcaaatttcacgagtttgtgctgttcattctcgaagaaaaaatgggtgcgacgcgtcgtacttttctgacagatttagcccgcaagaaagggttccgcgtcgagaatgaactgtcagacagcgttacccacatcgtggcagaaaataattcacgctctgaagtattggcttggctgaaagaacacaagatggagaagaccaagcaattcgaactgctggatattagctggcttatcgaaagcatgaaagttggtaaaccggtggacaccaaggggaaataccagttggcggaatcgggtgagatgagtgcgaacccagatccgacagagggtcgtgaaaacgagctgcctcctactatgaagaccgtttctccgtatgcgtgtcaacgccgcaccaccctgaacaaccataatcaacgttttacggacgcactggaaattcttgcggaaaattacgagttcaaacgcaacgatgatactgcgctggaatttcgtcgtgctatctccgtgctgaaaagccttccgtttgaggtacgtagcctgaaagacacggaaggattgccctggatcggtgatgaagtcaaagggattatggaagaaatcatcgaggtcggtgaatcgctggaagtgcaggccgtgctcaatgatgagtggtatcaaagcttcaaacgctttaagagtgtctttggagtgggggtgaagacagcagacaagtggtaccgtatgggtctgcgcacgctcgaggatgttcgttccagcaagaccctgaagttgaccccgatgcagaaagcgggtctgtgctattatgaagatcttgctcgcggcgttacgaaagccgaagctgacgcgatttctctgctggttcaggatgcagtcgcaactttcgacccggatgcgctggtggagattgtcggtggatttcgtcgtgggaaacctcagggtcacgacgttgatctgcttatcacatctccgggagctgagaaagagcaagaagaccagctcctgcagaaagtgaccaatctgtggaagaaacaagggttgttgctgtacggtcgtctggaatggagtcagtttgaagatgggaaactcccatccggtaaggctgatgccctggacgggcacgcgaaatgctttctgatcctcaaactttatgatcataaagtggacaaaagcaaatgggaaatgccgacgggttcgaacatgggcgaggccaaaccgtggaaagcaattcgcgtagatctggttcgttgcccctacggcggttttgcgtttgcgttgttgggttggaccggaagccgcatgttccgccgtgatctgcgctggtacgccactgacgagaagaacatgatgctggacaatcatgcgctgtatgacctgaccaagaaaatctttctcaaagctaaatcggaagaggaaattttcgcacatctggggcttgaatacctggaaccgttcgaacgtaacgca

SEQ ID NO: 2420 - protein, 529 aa, synthetic construct
  REGION 1..529: note = Variant of terminal deoxynucleotidyltransferase
MHHHHHHGGSGSHGIRTIDSDFGKKRQKKMDNHDSSAIYEIKFHEFVLFILEEKMGATRRTFLTDLARKKGFRVENELSDSVTHIVAENNSRSEVLAWLKEHKMEKTKQFELLDISWLIESMKVGKPVDTKGKYQLAESGEMSANPDPTEGRENELPPTMKTVSPYACQRRTTLNNHNQRFTDALEILAENYEFKRNDDTALEFRRAISVLKSLPFEVRSLKDTEGLPWIGDEVKGIMEEIIEVGESLEVQAVLNDEWYQSFKRFKSVFGVGVKTADKWYRMGLRTLEDVRSSKTLKLTPMQKAGLCYYEDLARGVTKAEADAISLLVQDAVATFDPDALVEIVGGFRRGKPQGHDVDLLITSPGAEKEQEDQLLQKVTNLWKKQGLLLYGRLEWSQFEDGKLPSGKADALDGHAKCFLILKLYDHKVDKSKWEMPTGSNMGEAKPWKAIRVDLVRCPYGGFAFALLGWTGSRMFRRDLRWYATDEKNMMLDNHALYDLTKKIFLKAKSEEEIFAHLGLEYLEPFERNA

SEQ ID NO: 2421 - DNA, 1587 bp, synthetic construct
  misc_feature 1..1587: note = Variant of terminal deoxynucleotidyltransferase
  source 1..1587: mol_type = other DNA
atgcaccatcatcatcatcatggcggtagcggcagccacggcattcgtaccatcgattcggacttcgggaagaaacgccagaaaaaaatggataaccacgatagttccgccatctatgaaatcaaatttcacgagtttgtgctgttcattctcgaagaaaaaatgggtgcgacgcgtcgtacttttctgacagatttagcccgcaagaaagggttccgcgtcgagaatgaactgtcagacagcgttacccacatcgtggcagaaaataattcacgctctgaagtattggcttggctgaaagaacacaagatggagaagaccaagcaattcgaactgctggatattagctggcttatcgaaagcatgaaagttggtaaaccggtggacaccaaggggaaataccagttggcggaatcgggtgagatgagtgcgaacccagatccgacagagggtcgtgaaaacgagctgcctcctactatgaagaccgtttctccgtatgcgtgtcaacgccgcaccaccctgaacaaccataatcaacgttttacggacgcactggaaattcttgcggaaaattacgagttcaaacgcaacgatgatactgcgctggaatttcgtcgtgctatctccgtgctgaaaagccttccgtttgaggtacgtagcctgaaagacacggaaggattgccctggatcggtgatgaagtcaaagggattatggaagaaatcatcgaggtcggtgaatcgctggaagtgcaggccgtgctcaatgatgagtggtatcaaagcttcaaacgctttaagagtgtctttggagtgggggtgaagacagcagacaagtggtaccgtatgggtctgcgcacgctcgaggatgttcgttccagcaagaccctgaagttgaccccgatgcagaaagcgggtctgtgctattatgaagatcttgctcgcggcgttacgaaagccgaagctgacgcgatttctctgctggttcaggatgcagtcgcaactttcgacccggatgcgctggtggagattgtcggtggatttcgtcgtgggaaacctcagggtcacgacgttgatctgcttatcacatctccgggagctgagaaagagcaagaagaccagctcctgcagaaagtgaccaatctgtggaagaaacaagggttgttgctgtacggtcgtctggaatggagtcagtttgaagatgggaaactcccatccggtaaggctgatgccctggaccaccacgcgaaatgctttctgatcctcaaactttatgatcataaagtggacaaaagcaaatgggaaatgccgacgggttcgaacatgggcgaggccaaaccgtggaaagcaattcgcgtagatctggttcgttgcccctacggcggttttgcgtttgcgttgttgggttggaccggaagccagatgttccgccgtgatctgcgctggtacgccactgacgagaagaacatgatgctggacaatcatgcgctgtatgacctgaccaagaaaatctttctcaaagctaaatcggaagaggaaattttcgcacatctggggcttgaatacctggaaccgttcgaacgtaacgca

SEQ ID NO: 2422 - protein, 529 aa, synthetic construct
  REGION 1..529: note = Variant of terminal deoxynucleotidyltransferase
MHHHHHHGGSGSHGIRTIDSDFGKKRQKKMDNHDSSAIYEIKFHEFVLFILEEKMGATRRTFLTDLARKKGFRVENELSDSVTHIVAENNSRSEVLAWLKEHKMEKTKQFELLDISWLIESMKVGKPVDTKGKYQLAESGEMSANPDPTEGRENELPPTMKTVSPYACQRRTTLNNHNQRFTDALEILAENYEFKRNDDTALEFRRAISVLKSLPFEVRSLKDTEGLPWIGDEVKGIMEEIIEVGESLEVQAVLNDEWYQSFKRFKSVFGVGVKTADKWYRMGLRTLEDVRSSKTLKLTPMQKAGLCYYEDLARGVTKAEADAISLLVQDAVATFDPDALVEIVGGFRRGKPQGHDVDLLITSPGAEKEQEDQLLQKVTNLWKKQGLLLYGRLEWSQFEDGKLPSGKADALDHHAKCFLILKLYDHKVDKSKWEMPTGSNMGEAKPWKAIRVDLVRCPYGGFAFALLGWTGSQMFRRDLRWYATDEKNMMLDNHALYDLTKKIFLKAKSEEEIFAHLGLEYLEPFERNA

SEQ ID NO: 2423 - DNA, 1587 bp, synthetic construct
  misc_feature 1..1587: note = Variant of terminal deoxynucleotidyltransferase
  source 1..1587: mol_type = other DNA
atgcaccatcatcatcatcatggcggtagcggcagccacggcattcgtaccatcgattcggacttcgggaagaaacgccagaaaaaaatggataaccacgatagttccgccatctatgaaatcaaatttcacgagtttgtgctgttcattctcgaagaaaaaatgggtgcgacgcgtcgtacttttctgacagatttagcccgcaagaaagggttccgcgtcgagaatgaactgtcagacagcgttacccacatcgtggcagaaaataattcacgctctgaagtattggcttggctgaaagaacacaagatggagaagaccaagcaattcgaactgctggatattagctggcttatcgaaagcatgaaagttggtaaaccggtggacaccaaggggaaataccagttggcggaatcgggtgagatgagtgcgaacccagatccgacagagggtcgtgaaaacgagctgcctcctactatgaagaccgtttctccgtatgcgtgtcaacgccgcaccaccctgaacaaccataatcaacgttttacggacgcactggaaattcttcaggaaaattacgagttcaaacgcaacgatgatactgcgctggaatttcgtcgtgctatctccgtgctgaaaagccttccgtttgaggtacgtagcctgaaagacacggaaggattgccctggatcggtgatgaagtcaaagggattatggaagaaatcatcgaggtcggtgaatcgctggaagtgcaggccgtgctcaatgatgagtggtatcaaagcttcaaacgctttaagagtgtctttggagtgggggtgaagacagcagacaagtggtaccgtatgggtctgcgcacgctcgaggatgttcgttccagcaagaccctgaagttgaccccgatgcagaaagcgggtctgtgctattatgaagatcttgctcgcggcgttacgaaagccgaagctgacgcgatttctctgctggttcaggatgcagtcgcaactttcgacccggatgcgctggtggagattgtcggtggatttcgtcgtgggaaacctcagggtcacgacgttgatctgcttatcacatctccgggagctgagaaagagcaagaagaccagctcctgcagaaagtgaccaatctgtggaagaaacaagggttgttgctgtacggtcgtctggaatggagtcagtttgaagatgggaaactcccatccggtaaggctgatgccctggaccaccacgcgaaatgctttctgatcctcaaactttatgatcataaagtggacaaaagcaaatgggaaatgccgacgggttcgaacatgggcgaggccaaaccgtggaaagcaattcgcgtagatctggttcgttgcccctacggcggttttgcgtttgcgttgttgggttggaccggaagccgcatgttccgccgtgatctgcgctggtacgccactgacgagaagaacatgatgctggacaatcatgcgctgtatgacctgaccaagaaaatctttctcaaagctaaatcggaagaggaaattttcgcacatctggggcttgaatacctggaaccgttcgaacgtaacgca

SEQ ID NO: 2424 - protein, 529 aa, synthetic construct
  REGION 1..529: note = Variant of terminal deoxynucleotidyltransferase
MHHHHHHGGSGSHGIRTIDSDFGKKRQKKMDNHDSSAIYEIKFHEFVLFILEEKMGATRRTFLTDLARKKGFRVENELSDSVTHIVAENNSRSEVLAWLKEHKMEKTKQFELLDISWLIESMKVGKPVDTKGKYQLAESGEMSANPDPTEGRENELPPTMKTVSPYACQRRTTLNNHNQRFTDALEILQENYEFKRNDDTALEFRRAISVLKSLPFEVRSLKDTEGLPWIGDEVKGIMEEIIEVGESLEVQAVLNDEWYQSFKRFKSVFGVGVKTADKWYRMGLRTLEDVRSSKTLKLTPMQKAGLCYYEDLARGVTKAEADAISLLVQDAVATFDPDALVEIVGGFRRGKPQGHDVDLLITSPGAEKEQEDQLLQKVTNLWKKQGLLLYGRLEWSQFEDGKLPSGKADALDHHAKCFLILKLYDHKVDKSKWEMPTGSNMGEAKPWKAIRVDLVRCPYGGFAFALLGWTGSRMFRRDLRWYATDEKNMMLDNHALYDLTKKIFLKAKSEEEIFAHLGLEYLEPFERNA

SEQ ID NO: 2425 - DNA, 1587 bp, synthetic construct
  misc_feature 1..1587: note = Variant of terminal deoxynucleotidyltransferase
  source 1..1587: mol_type = other DNA
atgcaccatcatcatcatcatggcggtagcggcagccacggcattcgtaccatcgattcggacttcgggaagaaacgccagaaaaaaatggataaccacgatagttccgccatctatgaaatcaaatttcacgagtttgtgctgttcattctcgaagaaaaaatgggtgcgacgcgtcgtacttttctgacagatttagcccgcaagaaagggttccgcgtcgagaatgaactgtcagacagcgttacccacatcgtggcagaaaataattcacgctctgaagtattggcttggctgaaagaacacaagatggagaagaccaagcaattcgaactgctggatattagctggcttatcgaaagcatgaaagttggtaaaccggtggacaccaaggggaaataccagttggcggaatcgggtgagatgagtgcgaacccagatccgacagagggtcgtgaaaacgagctgcctcctactatgaagaccgtttctccgtatgcgtgtcaacgccgcaccaccctgaacaaccataatcaacgttttacggacgcactggaaattcttgcggaaaattacgagttcaaacgcaacgatgatactgcgctggaatttcgtcgtgctatctccgtgctgaaaagccttccgtttgaggtacgtagcctgaaagacacggaaggattgccctggatcggtgatgaagtcaaagggattatggaagaaatcatcgaggtcggtgaatcgctggaagtgcaggccgtgctcaatgatgagtggtatcaaagcttcaaacgctttaagagtgtctttggagtgggggtgaagacagcagacaagtggtaccgtatgggtctgcgcacgctcgaggatgttcgttccagcaagaccctgaagttgaccccgatgcagaaagcgggtctgtgctattatgaagatcttgctcgcggcgttacgaaagccgaagctgacgcgatttctctgctggttcaggatgcagtcgcaactttcgacccggatgcgctggtggagattgtcggtggatttcgtcgtgggaaacctcagggtcacgacgttgatctgcttatcacatctccgggagctgagaaagagcaagaagaccagctcctgcagaaagtgaccaatctgtggaagaaacaagggttgttgctgtacggtcgtctggaatggagtcagtttgaagatgggaaactcccatccggtaaggctgatgccctggactctcacgcgaaatgctttctgatcctcaaactttatgatcataaagtggacaaaagcaaatgggaaatgccgacgggttcgaacatgggcgaggccaaaccgtggaaagcaattcgcgtagatctggttcgttgcccctacggcggttttgcgtttgcgttgttgggttggaccggaagccgcatgttccgccgtgatctgcgctggtacgccactgacgagaagaacatgatgctggacaatcatgcgctgtatgacctgaccaagaaaatctttctcaaagctaaatcggaagaggaaattttcgcacatctggggcttgaatacctggaaccgttcgaacgtaacgca

SEQ ID NO: 2426 - protein, 529 aa, synthetic construct
  REGION 1..529: note = Variant of terminal deoxynucleotidyltransferase
MHHHHHHGGSGSHGIRTIDSDFGKKRQKKMDNHDSSAIYEIKFHEFVLFILEEKMGATRRTFLTDLARKKGFRVENELSDSVTHIVAENNSRSEVLAWLKEHKMEKTKQFELLDISWLIESMKVGKPVDTKGKYQLAESGEMSANPDPTEGRENELPPTMKTVSPYACQRRTTLNNHNQRFTDALEILAENYEFKRNDDTALEFRRAISVLKSLPFEVRSLKDTEGLPWIGDEVKGIMEEIIEVGESLEVQAVLNDEWYQSFKRFKSVFGVGVKTADKWYRMGLRTLEDVRSSKTLKLTPMQKAGLCYYEDLARGVTKAEADAISLLVQDAVATFDPDALVEIVGGFRRGKPQGHDVDLLITSPGAEKEQEDQLLQKVTNLWKKQGLLLYGRLEWSQFEDGKLPSGKADALDSHAKCFLILKLYDHKVDKSKWEMPTGSNMGEAKPWKAIRVDLVRCPYGGFAFALLGWTGSRMFRRDLRWYATDEKNMMLDNHALYDLTKKIFLKAKSEEEIFAHLGLEYLEPFERNA

SEQ ID NO: 2427 - DNA, 1587 bp, synthetic construct
  misc_feature 1..1587: note = Variant of terminal deoxynucleotidyltransferase
  source 1..1587: mol_type = other DNA
atgcaccatcatcatcatcatggcggtagcggcagccacggcattcgtaccatcgattcggacttcgggaagaaacgccagaaaaaaatggataaccacgatagttccgccatctatgaaatcaaatttcacgagtttgtgctgttcattctcgaagaaaaaatgggtgcgacgcgtcgtacttttctgacagatttagcccgcaagaaagggttccgcgtcgagaatgaactgtcagacagcgttacccacatcgtggcagaaaataattcacgctctgaagtattggcttggctgaaagaacacaagatggagaagaccaagcaattcgaactgctggatattagctggcttatcgaaagcatgaaagttggtaaaccggtggacaccaaggggaaataccagttggcggaatcgggtgagatgagtgcgaacccagatccgacagagggtcgtgaaaacgagctgcctcctactatgaagaccgtttctccgtatgcgtgtcaacgccgcaccaccctgaacaaccataatcaacgttttacggacgcactggaaattcttgcggaaaattacgagttcaaacgcaacgatgatactgcgctggaatttcgtcgtgctatctccgtgctgaaaagccttccgtttgaggtacgtagcctgaaagacacggaaggattgccctggatcggtgatgaagtcaaagggattatggaagaaatcatcgaggtcggtgaatcgctggaagtgcaggccgtgctcaatgatgagtggtatcaaagcttcaaacgctttaagagtgtctttggagtgggggtgaagacagcagacaagtggtaccgtatgggtctgcgcacgctcgaggatgttcgttccagcaagaccctgaagttgaccccgatgcagaaagcgggtctgtgctattatgaagatcttgctcgcggcgttacgaaagccgaagctgacgcgatttctctgctggttcaggatgcagtcgcaactttcgacccggatgcgctggtggagattgtcggtggatttcgtcgtgggaaacctcggggtcacgacgttgatctgcttatcacatctccgggagctgagaaagagcaagaagaccagctcctgcagaaagtgaccaatctgtggaagaaacaagggttgttgctgtacggtcgtctggaatggagtcagtttgaagatgggaaactcccatccggtaaggctgatgccctggaccaccacgcgaaatgctttctgatcctcaaactttatgatcataaagtggacaaaagcaaatgggaaatgccgacgggttcgaacatgggcgaggccaaaccgtggaaagcaattcgcgtagatctggttcgttgcccctacggcggttttgcgtttgcgttgttgggttggaccggaagccgcatgttccgccgtgatctgcgctggtacgccactgacgagaagaacatgatgctggacaatcatgcgctgtatgacctgaccaagaaaatctttctcaaagctaaatcggaagaggaaattttcgcacatctggggcttgaatacctggaaccgttcgaacgtaacgca

SEQ ID NO: 2428 - protein, 529 aa, synthetic construct
  REGION 1..529: note = Variant of terminal deoxynucleotidyltransferase
MHHHHHHGGSGSHGIRTIDSDFGKKRQKKMDNHDSSAIYEIKFHEFVLFILEEKMGATRRTFLTDLARKKGFRVENELSDSVTHIVAENNSRSEVLAWLKEHKMEKTKQFELLDISWLIESMKVGKPVDTKGKYQLAESGEMSANPDPTEGRENELPPTMKTVSPYACQRRTTLNNHNQRFTDALEILAENYEFKRNDDTALEFRRAISVLKSLPFEVRSLKDTEGLPWIGDEVKGIMEEIIEVGESLEVQAVLNDEWYQSFKRFKSVFGVGVKTADKWYRMGLRTLEDVRSSKTLKLTPMQKAGLCYYEDLARGVTKAEADAISLLVQDAVATFDPDALVEIVGGFRRGKPRGHDVDLLITSPGAEKEQEDQLLQKVTNLWKKQGLLLYGRLEWSQFEDGKLPSGKADALDHHAKCFLILKLYDHKVDKSKWEMPTGSNMGEAKPWKAIRVDLVRCPYGGFAFALLGWTGSRMFRRDLRWYATDEKNMMLDNHALYDLTKKIFLKAKSEEEIFAHLGLEYLEPFERNA

SEQ ID NO: 2429 - DNA, 1587 bp, synthetic construct
  misc_feature 1..1587: note = Variant of terminal deoxynucleotidyltransferase
  source 1..1587: mol_type = other DNA
atgcaccatcatcatcatcatggcggtagcggcagccacggcattcgtaccatcgattcggacttcgggaagaaacgccagaaaaaaatggataaccacgatagttccgccatctatgaaatcaaatttcacgagtttgtgctgttcattctcgaagaaaaaatgggtgcgacgcgtcgtacttttctgacagatttagcccgcaagaaagggttccgcgtcgagaatgaactgtcagacagcgttacccacatcgtggcagaaaataattcacgctctgaagtattggcttggctgaaagaacacaagatggagaagaccaagcaattcgaactgctggatattagctggcttatcgaaagcatgaaagttggtaaaccggtggacaccaaggggaaataccagttggcggaatcgggtgagatgagtgcgaacccagatccgacagagggtcgtgaaaacgagctgcctcctactatgaagaccgtttctccgtatgcgtgtcaacgccgcaccaccctgaacaaccataatcaacgttttacggacgcactggaaattcttgcggaaaattacgagttcaaaactaacgatgatactgcgctggaatttcgtcgtgctatctccgtgctgaaaagccttccgtttgaggtacgtagcctgaaagacacggaaggattgccctggatcggtgatgaagtcaaagggattatggaagaaatcatcgaggtcggtgaatcgctggaagtgcaggccgtgctcaatgatgagtggtatcaaagcttcaaacgctttaagagtgtctttggagtgggggtgaagacagcagacaagtggtaccgtatgggtctgcgcacgctcgaggatgttcgttccagcaagaccctgaagttgaccccgatgcagaaagcgggtctgtgctattatgaagatcttgctcgcggcgttacgaaagccgaagctgacgcgatttctctgctggttcaggatgcagtcgcaactttcgacccggatgcgctggtggagattgtcggtggatttcgtcgtgggaaacctcagggtcacgacgttgatctgcttatcacatctccgggagctgagaaagagcaagaagaccagctcctgcagaaagtgaccaatctgtggaagaaacaagggttgttgctgtacggtcgtctggaatggagtcagtttgaagatgggaaactcccatccggtaaggctgatgccctggaccaccacgcgaaatgctttctgatcctcaaactttatgatcataaagtggacaaaagcaaatgggaaatgccgacgggttcgaacatgggcgaggccaaaccgtggaaagcaattcgcgtagatctggttcgttgcccctacggcggttttgcgtttgcgttgttgggttggaccggaagccgcatgttccgccgtgatctgcgctggtacgccactgacgagaagaacatgatgctggacaatcatgcgctgtatgacctgaccaagaaaatctttctcaaagctaaatcggaagaggaaattttcgcacatctggggcttgaatacctggaaccgttcgaacgtaacgca

SEQ ID NO: 2430 - protein, 529 aa, synthetic construct
  REGION 1..529: note = Variant of terminal deoxynucleotidyltransferase
MHHHHHHGGSGSHGIRTIDSDFGKKRQKKMDNHDSSAIYEIKFHEFVLFILEEKMGATRRTFLTDLARKKGFRVENELSDSVTHIVAENNSRSEVLAWLKEHKMEKTKQFELLDISWLIESMKVGKPVDTKGKYQLAESGEMSANPDPTEGRENELPPTMKTVSPYACQRRTTLNNHNQRFTDALEILAENYEFKTNDDTALEFRRAISVLKSLPFEVRSLKDTEGLPWIGDEVKGIMEEIIEVGESLEVQAVLNDEWYQSFKRFKSVFGVGVKTADKWYRMGLRTLEDVRSSKTLKLTPMQKAGLCYYEDLARGVTKAEADAISLLVQDAVATFDPDALVEIVGGFRRGKPQGHDVDLLITSPGAEKEQEDQLLQKVTNLWKKQGLLLYGRLEWSQFEDGKLPSGKADALDHHAKCFLILKLYDHKVDKSKWEMPTGSNMGEAKPWKAIRVDLVRCPYGGFAFALLGWTGSRMFRRDLRWYATDEKNMMLDNHALYDLTKKIFLKAKSEEEIFAHLGLEYLEPFERNA

SEQ ID NO: 2431 - DNA, 1587 bp, synthetic construct
  misc_feature 1..1587: note = Variant of terminal deoxynucleotidyltransferase
  source 1..1587: mol_type = other DNA
atgcaccatcatcatcatcatggcggtagcggcagccacggcattcgtaccatcgattcggacttcgggaagaaacgccagaaaaaaatggataaccacgatagttccgccatctatgaaatcaaatttcacgagtttgtgctgttcattctcgaagaaaaaatgggtgcgacgcgtcgtacttttctgacagatttagcccgcaagaaagggttccgcgtcgagaatgaactgtcagacagcgttacccacatcgtggcagaaaataattcacgctctgaagtattggcttggctgaaagaacacaagatggagaagaccaagcaattcgaactgctggatattagctggcttatcgaaagcatgaaagttggtaaaccggtggacaccaaggggaaataccagttggcggaatcgggtgagatgagtgcgaacccagatccgacagagggtcgtgaaaacgagctgcctcctactatgaagaccgtttctccgtatgcgtgtcaacgccgcaccaccctgaacaaccataatcaacgttttacggacgcactggaaattcttgcggaaaattacgagttcaaacgcaacgatgatactgcgctggaatttcgtcgtgctatctccgtgctgaaaagccttccgtttgaggtacgtagcctgaaagacacggaaggattgccctggatcggtgatgaagtcaaagggattatggaagaaatcatcgaggtcggtgaatcgctggaagtgcaggccgtgctcaatgatgagtggtatcaaagcttcaaacgctttaagagtgtctttggagtgggggtgaagacagcagacaagtggtaccgtatgggtctgcgcacgctcgaggatgttcgttccagcaagaccctgaagttgaccccgatgcagaaagcgggtctgtgctattatgaagatcttgctcgcggcgttacgaaagccgaagctgacgcgatttctctgctggttcaggatgcagtcgcaactttcgacccggatgcgctggtggagattgtcggtggatttcgtcgtgggaaacctcagggtcacgacgttgatctgcttatcacatctccgggagctgagaaagagcaagaagaccagctcctgcagaaagtgaccaatctgtggaagaaacaagggttgttgctgtacggtcgtctggaatggagtcagtttgaagatgggaaactcccatccggtaaggctgatgccctggaccaccacgcgaaatgctttctgatcctcaaactttatgatcataaagtggacaaaagcaaatgggaaatgccgacgggttcgaacatgggcgaggccaaaccgtggaaagcaattcgcgtagatctggttcgttgcccctacggcggttttgcgtttgcgttgttgggttggaccggaagccgcatgttccgccgtgatctgtcttggtacgccactgacgagaagaacatgatgctggacaatcatgcgctgtatgacctgaccaagaaaatctttctcaaagctaaatcggaagaggaaattttcgcacatctggggcttgaatacctggaaccgttcgaacgtaacgca

SEQ ID NO: 2432 - protein, 529 aa, synthetic construct
  REGION 1..529: note = Variant of terminal deoxynucleotidyltransferase
MHHHHHHGGSGSHGIRTIDSDFGKKRQKKMDNHDSSAIYEIKFHEFVLFILEEKMGATRRTFLTDLARKKGFRVENELSDSVTHIVAENNSRSEVLAWLKEHKMEKTKQFELLDISWLIESMKVGKPVDTKGKYQLAESGEMSANPDPTEGRENELPPTMKTVSPYACQRRTTLNNHNQRFTDALEILAENYEFKRNDDTALEFRRAISVLKSLPFEVRSLKDTEGLPWIGDEVKGIMEEIIEVGESLEVQAVLNDEWYQSFKRFKSVFGVGVKTADKWYRMGLRTLEDVRSSKTLKLTPMQKAGLCYYEDLARGVTKAEADAISLLVQDAVATFDPDALVEIVGGFRRGKPQGHDVDLLITSPGAEKEQEDQLLQKVTNLWKKQGLLLYGRLEWSQFEDGKLPSGKADALDHHAKCFLILKLYDHKVDKSKWEMPTGSNMGEAKPWKAIRVDLVRCPYGGFAFALLGWTGSRMFRRDLSWYATDEKNMMLDNHALYDLTKKIFLKAKSEEEIFAHLGLEYLEPFERNA

SEQ ID NO: 2433 - DNA, 1587 bp, synthetic construct
  misc_feature 1..1587: note = Variant of terminal deoxynucleotidyltransferase
  source 1..1587: mol_type = other DNA
atgcaccatcatcatcatcatggcggtagcggcagccacggcattcgtaccatcgattcggacttcgggaagaaacgccagaaaaaaatggataaccacgatagttccgccatctatgaaatcaaatttcacgagtttgtgctgttcattctcgaagaaaaaatgggtgcgacgcgtcgtacttttctgacagatttagcccgcaagaaagggttccgcgtcgagaatgaactgtcagacagcgttacccacatcgtggcagaaaataattcacgctctgaagtattggcttggctgaaagaacacaagatggagaagaccaagcaattcgaactgctggatattagctggcttatcgaaagcatgaaagttggtaaaccggtggacaccaaggggaaataccagttggcggaatcgggtgagatgagtgcgaacccagatccgacagagggtcgtgaaaacgagctgcctcctactatgaagaccgtttctccgtatgcgtgtcaacgccgcaccaccctgaacaaccataatcaacgttttacggacgcactggaaattcttgcggaaaattacgagttcaaacgcaacgatgatactgcgctggaatttcgtcgtgctatctccgtgctgaaaagccttccgtttgaggtacgtagcctgaaagacacggaaggattgccctggatcggtgatgaagtcaaagggattatggaagaaatcatcgaggtcggtgaatcgctggaagtgcaggccgtgctcaatgatgagtggtatcaaagcttcaaacgctttaagagtgtctttggagtgggggtgaagacagcagacaagtggtaccgtatgggtctgcgcacgctcgaggatgttcgttccagcaagaccctgaagttgaccccgatgcagaaagcgggtctgtgctattatgaagatcttgctcgcggcgttacgaaagccgaagctgacgcgatttctctgctggttcaggatgcagtcgcaactttcgacccggatgcgctggtggagattgtcggtggatttcgtcgtgggaaacctcagggtcacgacgttgatctgcttatcacatctccgggagctgagaaagagcaagaagaccagctcctgcagaaagtgaccaatctgtggaagaaacaagggttgttgctgtacggtcgtctggaatggagtcagtttgaagatgggaaactcccatccggtaaggctgatgccctggaccaccacgcgaaatgctttctgatcctcaaactttatgatcataaagtggacaaaagcaaatgggaaatgccgacgggttcgaacatgggcgaggccaaaccgtggaaagcaattcgcgtagatctggttcgttgcccctacggcggttttgcgtttgcgttgttgggttggaccggaagccgcatgttccgccgtgatctgggttggtacgccactgacgagaagaacatgatgctggacaatcatgcgctgtatgacctgaccaagaaaatctttctcaaagctaaatcggaagaggaaattttcgcacatctggggcttgaatacctggaaccgttcgaacgtaacgca

SEQ ID NO: 2434 - protein, 529 aa, synthetic construct
  REGION 1..529: note = Variant of terminal deoxynucleotidyltransferase
MHHHHHHGGSGSHGIRTIDSDFGKKRQKKMDNHDSSAIYEIKFHEFVLFILEEKMGATRRTFLTDLARKKGFRVENELSDSVTHIVAENNSRSEVLAWLKEHKMEKTKQFELLDISWLIESMKVGKPVDTKGKYQLAESGEMSANPDPTEGRENELPPTMKTVSPYACQRRTTLNNHNQRFTDALEILAENYEFKRNDDTALEFRRAISVLKSLPFEVRSLKDTEGLPWIGDEVKGIMEEIIEVGESLEVQAVLNDEWYQSFKRFKSVFGVGVKTADKWYRMGLRTLEDVRSSKTLKLTPMQKAGLCYYEDLARGVTKAEADAISLLVQDAVATFDPDALVEIVGGFRRGKPQGHDVDLLITSPGAEKEQEDQLLQKVTNLWKKQGLLLYGRLEWSQFEDGKLPSGKADALDHHAKCFLILKLYDHKVDKSKWEMPTGSNMGEAKPWKAIRVDLVRCPYGGFAFALLGWTGSRMFRRDLGWYATDEKNMMLDNHALYDLTKKIFLKAKSEEEIFAHLGLEYLEPFERNA

SEQ ID NO: 2435 - DNA, 1587 bp, synthetic construct
  misc_feature 1..1587: note = Variant of terminal deoxynucleotidyltransferase
  source 1..1587: mol_type = other DNA
atgcaccatcatcatcatcatggcggtagcggcagccacggcattcgtaccatcgattcggacttcgggaagaaacgccagaaaaaaatggataaccacgatagttccgccatctatgaaatcaaatttcacgagtttgtgctgttcattctcgaagaaaaaatgggtgcgacgcgtcgtacttttctgacagatttagcccgcaagaaagggttccgcgtcgagaatgaactgtcagacagcgttacccacatcgtggcagaaaataattcacgctctgaagtattggcttggctgaaagaacacaagatggagaagaccaagcaattcgaactgctggatattagctggcttatcgaaagcatgaaagttggtaaaccggtggacaccaaggggaaataccagttggcggaatcgggtgagatgagtgcgaacccagatccgacagagggtcgtgaaaacgagctgcctcctactatgaagaccgtttctccgtatgcgtgtcaacgccgcaccaccctgaacaaccataatcaacgttttacggacgcactggaaattcttgcggaaaattacgagttcaaacgcaacgatgatactgcgctggaatttcgtcgtgctatctccgtgctgaaaagccttccgtttgaggtacgtagcctgaaagacacggaaggattgccctggatcggtgatgaagtcaaagggattatggaagaaatcatcgaggtcggtgaatcgctggaagtgcaggccgtgctcaatgatgagtggtatcaaagcttcaaacgctttaagagtgtctttggagtgggggtgaagacagcagacaagtggtaccgtatgggtctgcgcacgctcgaggatgttcgttccagcaagaccctgaagttgaccccgatgcagaaagcgggtctgtgctattatgaagatcttgctcgcggcgttacgaaagccgaagctgacgcgatttctctgctggttcaggatgcagtcgcaactttcgacccggatgcgctggtggagattgtcggtggatttcgtcgtgggaaacctcagggtcacgacgttgatctgcttatcacatctccgggagctgagaaagagcaagaagaccagctcctgcagaaagtgaccaatctgtggaagaaacaagggttgttgctgtacggtcgtctggaatggagtcagtttgaagatgggaaactcccatccggtaaggctgatgccctggaccaccacgcgaaatgctttctgatcctcaaactttatgatcataaagtggacaaaagcaaatgggaaatgccgacgggttcgaacatgggcgaggccaaaccgtggaaagcaattcgcgtagatctggttcgttgcccctacggcggttttgcgtttgcgttgttgggttggaccggaagccctatgttccgccgtgatctgcgctggtacgccactgacgagaagaacatgatgctggacaatcatgcgctgtatgacctgaccaagaaaatctttctcaaagctaaatcggaagaggaaattttcgcacatctggggcttgaatacctggaaccgttcgaacgtaacgca

SEQ ID NO: 2436 - protein, 529 aa, synthetic construct
  REGION 1..529: note = Variant of terminal deoxynucleotidyltransferase
MHHHHHHGGSGSHGIRTIDSDFGKKRQKKMDNHDSSAIYEIKFHEFVLFILEEKMGATRRTFLTDLARKKGFRVENELSDSVTHIVAENNSRSEVLAWLKEHKMEKTKQFELLDISWLIESMKVGKPVDTKGKYQLAESGEMSANPDPTEGRENELPPTMKTVSPYACQRRTTLNNHNQRFTDALEILAENYEFKRNDDTALEFRRAISVLKSLPFEVRSLKDTEGLPWIGDEVKGIMEEIIEVGESLEVQAVLNDEWYQSFKRFKSVFGVGVKTADKWYRMGLRTLEDVRSSKTLKLTPMQKAGLCYYEDLARGVTKAEADAISLLVQDAVATFDPDALVEIVGGFRRGKPQGHDVDLLITSPGAEKEQEDQLLQKVTNLWKKQGLLLYGRLEWSQFEDGKLPSGKADALDHHAKCFLILKLYDHKVDKSKWEMPTGSNMGEAKPWKAIRVDLVRCPYGGFAFALLGWTGSPMFRRDLRWYATDEKNMMLDNHALYDLTKKIFLKAKSEEEIFAHLGLEYLEPFERNA

SEQ ID NO: 2437 - DNA, 1587 bp, synthetic construct
  misc_feature 1..1587: note = Variant of terminal deoxynucleotidyltransferase
  source 1..1587: mol_type = other DNA
atgcaccatcatcatcatcatggcggtagcggcagccacggcattcgtaccatcgattcggacttcgggaagaaacgccagaaaaaaatggataaccacgatagttccgccatctatgaaatcaaatttcacgagtttgtgctgttcattctcgaagaaaaaatgggtgcgacgcgtcgtacttttctgacagatttagcccgcaagaaagggttccgcgtcgagaatgaactgtcagacagcgttacccacatcgtggcagaaaataattcacgctctgaagtattggcttggctgaaagaacacaagatggagaagaccaagcaattcgaactgctggatattagctggcttatcgaaagcatgaaagttggtaaaccggtggacaccaaggggaaataccagttggcggaatcgggtgagatgagtgcgaacccagatccgacagagggtcgtgaaaacgagctgcctcctactatgaagaccgtttctccgtatgcgtgtcaacgccgcaccaccctgaacaaccataatcaacgttttacggacgcactggaaattcttgcggaaaattacgagttcaaacgcaacgatgatactgcgctggaatttcgtcgtgctatctccgtgctgaaaagccttccgtttgaggtacgtagcctgaaagacacggaaggattgccctggatcggtgatgaagtcaaagggattatggaagaaatcatcgaggtcggtgaatcgctggaagtgcaggccgtgctcaatgatgagtggtatcaaagcttcaaacgctttaagagtgtctttggagtgggggtgaagacagcagacaagtggtaccgtatgggtctgcgcacgctcgaggatgttcgttccagcaagaccctgaagttgaccccgatgcagaaagcgggtctgtgctattatgaagatcttgctcgcggcgttacgaaagccgaagctgacgcgatttctctgctggttcaggatgcagtcgcaactttcgacccggatgcgctggtggagattgtcggtggatttcgtcgtgggaaacctcagggtcacgacgttgatctgcttatcacatctccgggagctgagaaagagcaagaagaccagctcctgcagaaagtgaccaatctgtggaagaaacaagggttgttgctgtacggtcgtctggaatggagtcagtttgaagatgggaaactcccatccggtaaggctgatgccctggaccaccacgcgaaatgctttctgatcctcaaactttatgatcataaagtggacaaaagcaaatgggaaatgccgacgggttcgaacatgggcgaggccaaaccgtggaaagcaattcgcgtagatctggttcgttgcccctacggcggttttgcgtttgcgttgttgggttggaccggaagccgcatgttccgccgtgatctggcttggtacgccactgacgagaagaacatgatgctggacaatcatgcgctgtatgacctgaccaagaaaatctttctcaaagctaaatcggaagaggaaattttcgcacatctggggcttgaatacctggaaccgttcgaacgtaacgca

SEQ ID NO: 2438 - protein, 529 aa, synthetic construct
  REGION 1..529: note = Variant of terminal deoxynucleotidyltransferase
MHHHHHHGGSGSHGIRTIDSDFGKKRQKKMDNHDSSAIYEIKFHEFVLFILEEKMGATRRTFLTDLARKKGFRVENELSDSVTHIVAENNSRSEVLAWLKEHKMEKTKQFELLDISWLIESMKVGKPVDTKGKYQLAESGEMSANPDPTEGRENELPPTMKTVSPYACQRRTTLNNHNQRFTDALEILAENYEFKRNDDTALEFRRAISVLKSLPFEVRSLKDTEGLPWIGDEVKGIMEEIIEVGESLEVQAVLNDEWYQSFKRFKSVFGVGVKTADKWYRMGLRTLEDVRSSKTLKLTPMQKAGLCYYEDLARGVTKAEADAISLLVQDAVATFDPDALVEIVGGFRRGKPQGHDVDLLITSPGAEKEQEDQLLQKVTNLWKKQGLLLYGRLEWSQFEDGKLPSGKADALDHHAKCFLILKLYDHKVDKSKWEMPTGSNMGEAKPWKAIRVDLVRCPYGGFAFALLGWTGSRMFRRDLAWYATDEKNMMLDNHALYDLTKKIFLKAKSEEEIFAHLGLEYLEPFERNA

SEQ ID NO: 2439 - DNA, 1587 bp, synthetic construct
  misc_feature 1..1587: note = Variant of terminal deoxynucleotidyltransferase
  source 1..1587: mol_type = other DNA
atgcaccatcatcatcatcatggcggtagcggcagccacggcattcgtaccatcgattcggacttcgggaagaaacgccagaaaaaaatggataaccacgatagttccgccatctatgaaatcaaatttcacgagtttgtgctgttcattctcgaagaaaaaatgggtgcgacgcgtcgtacttttctgacagatttagcccgcaagaaagggttccgcgtcgagaatgaactgtcagacagcgttacccacatcgtggcagaaaataattcacgctctgaagtattggcttggctgaaagaacacaagatggagaagaccaagcaattcgaactgctggatattagctggcttatcgaaagcatgaaagttggtaaaccggtggacaccaaggggaaataccagttggcggaatcgggtgagatgagtgcgaacccagatccgacagagggtcgtgaaaacgagctgcctcctactatgaagaccgtttctccgtatgcgtgtcaacgccgcaccaccctgaacaaccataatcaacgttttacggacgcactggaaattcttgcggaaaattacgagttcaaacgcaacgatgatactgcgctggaatttcgtcgtgctatctccgtgctgaaaagccttccgtttgaggtacgtagcctgaaagacacggaaggattgccctggatcggtgatgaagtcaaagggattatggaagaaatcatcgaggtcggtgaatcgctggaagtgcaggccgtgctcaatgatgagtggtatcaaagcttcaaacgctttaagagtgtctttggagtgggggtgaagacagcagacaagtggtaccgtatgggtctgcgcacgctcgaggatgttcgttccagcaagaccctgaagttgaccccgatgcagaaagcgggtctgtgctattatgaagatcttgctcgcggcgttacgaaagccgaagctgacgcgatttctctgctggttcaggatgcagtcgcaactttcgacccggatgcgctggtggagattgtcggtggatttcgtcgtgggaaacctcagggtcacgacgttgatctgcttatcacatctccgggagctgagaaagagcaagaagaccagctcctgcagaaagtgaccaatctgtggaagaaacaagggttgttgctgtacggtcgtctggaatggagtcagtttgaagatgggaaactcccatccggtaaggctgatgagctggaccaccacgcgaaatgctttctgatcctcaaactttatgatcataaagtggacaaaagcaaatgggaaatgccgacgggttcgaacatgggcgaggccaaaccgtggaaagcaattcgcgtagatctggttcgttgcccctacggcggttttgcgtttgcgttgttgggttggaccggaagccgcatgttccgccgtgatctgcgctggtacgccactgacgagaagaacatgatgctggacaatcatgcgctgtatgacctgaccaagaaaatctttctcaaagctaaatcggaagaggaaattttcgcacatctggggcttgaatacctggaaccgttcgaacgtaacgca

SEQ ID NO: 2440 - protein, 529 aa, synthetic construct
  REGION 1..529: note = Variant of terminal deoxynucleotidyltransferase
MHHHHHHGGSGSHGIRTIDSDFGKKRQKKMDNHDSSAIYEIKFHEFVLFILEEKMGATRRTFLTDLARKKGFRVENELSDSVTHIVAENNSRSEVLAWLKEHKMEKTKQFELLDISWLIESMKVGKPVDTKGKYQLAESGEMSANPDPTEGRENELPPTMKTVSPYACQRRTTLNNHNQRFTDALEILAENYEFKRNDDTALEFRRAISVLKSLPFEVRSLKDTEGLPWIGDEVKGIMEEIIEVGESLEVQAVLNDEWYQSFKRFKSVFGVGVKTADKWYRMGLRTLEDVRSSKTLKLTPMQKAGLCYYEDLARGVTKAEADAISLLVQDAVATFDPDALVEIVGGFRRGKPQGHDVDLLITSPGAEKEQEDQLLQKVTNLWKKQGLLLYGRLEWSQFEDGKLPSGKADELDHHAKCFLILKLYDHKVDKSKWEMPTGSNMGEAKPWKAIRVDLVRCPYGGFAFALLGWTGSRMFRRDLRWYATDEKNMMLDNHALYDLTKKIFLKAKSEEEIFAHLGLEYLEPFERNA

SEQ ID NO: 2441 - DNA, 1587 bp, synthetic construct
  misc_feature 1..1587: note = Variant of terminal deoxynucleotidyltransferase
  source 1..1587: mol_type = other DNA
atgcaccatcatcatcatcatggcggtagcggcagccacggcattcgtaccatcgattcggacttcgggaagaaacgccagaaaaaaatggataaccacgatagttccgccatctatgaaatcaaatttcacgagtttgtgctgttcattctcgaagaaaaaatgggtgcgacgcgtcgtacttttctgacagatttagcccgcaagaaagggttccgcgtcgagaatgaactgtcagacagcgttacccacatcgtggcagaaaataattcacgctctgaagtattggcttggctgaaagaacacaagatggagaagaccaagcaattcgaactgctggatattagctggcttatcgaaagcatgaaagttggtaaaccggtggacaccaaggggaaataccagttggcggaatcgggtgagatgagtgcgaacccagatccgacagagggtcgtgaaaacgagctgcctcctactatgaagaccgtttctccgtatgcgtgtcaacgccgcaccaccctgaacaaccataatcaacgttttacggacgcactggaaattcttgcggaaaattacgagttcaaacgcaacgatgatactgcgctggaatttcgtaatgctatctccgtgctgaaaagccttccgtttgaggtacgtagcctgaaagacacggaaggattgccctggatcggtgatgaagtcaaagggattatggaagaaatcatcgaggtcggtgaatcgctggaagtgcaggccgtgctcaatgatgagtggtatcaaagcttcaaacgctttaagagtgtctttggagtgggggtgaagacagcagacaagtggtaccgtatgggtctgcgcacgctcgaggatgttcgttccagcaagaccctgaagttgaccccgatgcagaaagcgggtctgtgctattatgaagatcttgctcgcggcgttacgaaagccgaagctgacgcgatttctctgctggttcaggatgcagtcgcaactttcgacccggatgcgctggtggagattgtcggtggatttcgtcgtgggaaacctcagggtcacgacgttgatctgcttatcacatctccgggagctgagaaagagcaagaagaccagctcctgcagaaagtgaccaatctgtggaagaaacaagggttgttgctgtacggtcgtctggaatggagtcagtttgaagatgggaaactcccatccggtaaggctgatgccctggaccaccacgcgaaatgctttctgatcctcaaactttatgatcataaagtggacaaaagcaaatgggaaatgccgacgggttcgaacatgggcgaggccaaaccgtggaaagcaattcgcgtagatctggttcgttgcccctacggcggttttgcgtttgcgttgttgggttggaccggaagccgcatgttccgccgtgatctgcgctggtacgccactgacgagaagaacatgatgctggacaatcatgcgctgtatgacctgaccaagaaaatctttctcaaagctaaatcggaagaggaaattttcgcacatctggggcttgaatacctggaaccgttcgaacgtaacgca

SEQ ID NO: 2442 - protein, 529 aa, synthetic construct
  REGION 1..529: note = Variant of terminal deoxynucleotidyltransferase
MHHHHHHGGSGSHGIRTIDSDFGKKRQKKMDNHDSSAIYEIKFHEFVLFILEEKMGATRRTFLTDLARKKGFRVENELSDSVTHIVAENNSRSEVLAWLKEHKMEKTKQFELLDISWLIESMKVGKPVDTKGKYQLAESGEMSANPDPTEGRENELPPTMKTVSPYACQRRTTLNNHNQRFTDALEILAENYEFKRNDDTALEFRNAISVLKSLPFEVRSLKDTEGLPWIGDEVKGIMEEIIEVGESLEVQAVLNDEWYQSFKRFKSVFGVGVKTADKWYRMGLRTLEDVRSSKTLKLTPMQKAGLCYYEDLARGVTKAEADAISLLVQDAVATFDPDALVEIVGGFRRGKPQGHDVDLLITSPGAEKEQEDQLLQKVTNLWKKQGLLLYGRLEWSQFEDGKLPSGKADALDHHAKCFLILKLYDHKVDKSKWEMPTGSNMGEAKPWKAIRVDLVRCPYGGFAFALLGWTGSRMFRRDLRWYATDEKNMMLDNHALYDLTKKIFLKAKSEEEIFAHLGLEYLEPFERNA

SEQ ID NO: 2443 - DNA, 1587 bp, synthetic construct
  misc_feature 1..1587: note = Variant of terminal deoxynucleotidyltransferase
  source 1..1587: mol_type = other DNA
atgcaccatcatcatcatcatggcggtagcggcagccacggcattcgtaccatcgattcggacttcgggaagaaacgccagaaaaaaatggataaccacgatagttccgccatctatgaaatcaaatttcacgagtttgtgctgttcattctcgaagaaaaaatgggtgcgacgcgtcgtacttttctgacagatttagcccgcaagaaagggttccgcgtcgagaatgaactgtcagacagcgttacccacatcgtggcagaaaataattcacgctctgaagtattggcttggctgaaagaacacaagatggagaagaccaagcaattcgaactgctggatattagctggcttatcgaaagcatgaaagttggtaaaccggtggacaccaaggggaaataccagttggcggaatcgggtgagatgagtgcgaacccagatccgacagagggtcgtgaaaacgagctgcctcctactatgaagaccgtttctccgtatgcgtgtcaacgccgcaccaccctgaacaaccataatcaacgttttacggacgcactggaaattcttgcggaaaattacgagttcaaacgcaacgatgatactgcgctggaatttcgtcgtgctatctccgtgctgaaaagccttccgtttgaggtacgtagcctgaaagacacggaaggattgccctggatcggtgatgaagtcaaagggattatggaagaaatcatcgaggtcggtgaatcgctggaagtgcaggccgtgctcaatgatgagtggtatcaaagcttcaaacgctttaagagtgtctttggagtgggggtgaagacagcagacaagtggtaccgtatgggtctgcgcacgctcgaggatgttcgttccagcaagaccctgaagttgaccccgatgcagaaagcgggtctgtcgtattatgaagatcttgctcgcggcgttacgaaagccgaagctgacgcgatttctctgctggttcaggatgcagtcgcaactttcgacccggatgcgctggtggagattgtcggtggatttcgtcgtgggaaacctcagggtcacgacgttgatctgcttatcacatctccgggagctgagaaagagcaagaagaccagctcctgcagaaagtgaccaatctgtggaagaaacaagggttgttgctgtacggtcgtctggaatggagtcagtttgaagatgggaaactcccatccggtaaggctgatgccctggaccaccacgcgaaatgctttctgatcctcaaactttatgatcataaagtggacaaaagcaaatgggaaatgccgacgggttcgaacatgggcgaggccaaaccgtggaaagcaattcgcgtagatctggttcgttgcccctacggcggttttgcgtttgcgttgttgggttggaccggaagccgcatgttccgccgtgatctgcgctggtacgccactgacgagaagaacatgatgctggacaatcatgcgctgtatgacctgaccaagaaaatctttctcaaagctaaatcggaagaggaaattttcgcacatctggggcttgaatacctggaaccgttcgaacgtaacgca

SEQ ID NO: 2444 - protein, 529 aa, synthetic construct
  REGION 1..529: note = Variant of terminal deoxynucleotidyltransferase
MHHHHHHGGSGSHGIRTIDSDFGKKRQKKMDNHDSSAIYEIKFHEFVLFILEEKMGATRRTFLTDLARKKGFRVENELSDSVTHIVAENNSRSEVLAWLKEHKMEKTKQFELLDISWLIESMKVGKPVDTKGKYQLAESGEMSANPDPTEGRENELPPTMKTVSPYACQRRTTLNNHNQRFTDALEILAENYEFKRNDDTALEFRRAISVLKSLPFEVRSLKDTEGLPWIGDEVKGIMEEIIEVGESLEVQAVLNDEWYQSFKRFKSVFGVGVKTADKWYRMGLRTLEDVRSSKTLKLTPMQKAGLSYYEDLARGVTKAEADAISLLVQDAVATFDPDALVEIVGGFRRGKPQGHDVDLLITSPGAEKEQEDQLLQKVTNLWKKQGLLLYGRLEWSQFEDGKLPSGKADALDHHAKCFLILKLYDHKVDKSKWEMPTGSNMGEAKPWKAIRVDLVRCPYGGFAFALLGWTGSRMFRRDLRWYATDEKNMMLDNHALYDLTKKIFLKAKSEEEIFAHLGLEYLEPFERNA

SEQ ID NO: 2445 - DNA, 1587 bp, synthetic construct
  misc_feature 1..1587: note = Variant of terminal deoxynucleotidyltransferase
  source 1..1587: mol_type = other DNA
atgcaccatcatcatcatcatggcggtagcggcagccacggcattcgtaccatcgattcggacttcgggaagaaacgccagaaaaaaatggataaccacgatagttccgccatctatgaaatcaaatttcacgagtttgtgctgttcattctcgaagaaaaaatgggtgcgacgcgtcgtacttttctgacagatttagcccgcaagaaagggttccgcgtcgagaatgaactgtcagacagcgttacccacatcgtggcagaaaataattcacgctctgaagtattggcttggctgaaagaacacaagatggagaagaccaagcaattcgaactgctggatattagctggcttatcgaaagcatgaaagttggtaaaccggtggacaccaaggggaaataccagttggcggaatcgggtgagatgagtgcgaacccagatccgacagagggtcgtgaaaacgagctgcctcctactatgaagaccgtttctccgtatgcgtgtcaacgccgcaccaccctgaacaaccataatcaacgttttacggacgcactggaaattcttgcggaaaattacgagttcaaaagtaacgatgatactgcgctggaatttcgtcgtgctatctccgtgctgaaaagccttccgtttgaggtacgtagcctgaaagacacggaaggattgccctggatcggtgatgaagtcaaagggattatggaagaaatcatcgaggtcggtgaatcgctggaagtgcaggccgtgctcaatgatgagtggtatcaaagcttcaaacgctttaagagtgtctttggagtgggggtgaagacagcagacaagtggtaccgtatgggtctgcgcacgctcgaggatgttcgttccagcaagaccctgaagttgaccccgatgcagaaagcgggtctgtgctattatgaagatcttgctcgcggcgttacgaaagccgaagctgacgcgatttctctgctggttcaggatgcagtcgcaactttcgacccggatgcgctggtggagattgtcggtggatttcgtcgtgggaaacctcagggtcacgacgttgatctgcttatcacatctccgggagctgagaaagagcaagaagaccagctcctgcagaaagtgaccaatctgtggaagaaacaagggttgttgctgtacggtcgtctggaatggagtcagtttgaagatgggaaactcccatccggtaaggctgatgccctggaccaccacgcgaaatgctttctgatcctcaaactttatgatcataaagtggacaaaagcaaatgggaaatgccgacgggttcgaacatgggcgaggccaaaccgtggaaagcaattcgcgtagatctggttcgttgcccctacggcggttttgcgtttgcgttgttgggttggaccggaagccgcatgttccgccgtgatctgcgctggtacgccactgacgagaagaacatgatgctggacaatcatgcgctgtatgacctgaccaagaaaatctttctcaaagctaaatcggaagaggaaattttcgcacatctggggcttgaatacctggaaccgttcgaacgtaacgca

SEQ ID NO: 2446 - protein, 529 aa, synthetic construct
  REGION 1..529: note = Variant of terminal deoxynucleotidyltransferase
MHHHHHHGGSGSHGIRTIDSDFGKKRQKKMDNHDSSAIYEIKFHEFVLFILEEKMGATRRTFLTDLARKKGFRVENELSDSVTHIVAENNSRSEVLAWLKEHKMEKTKQFELLDISWLIESMKVGKPVDTKGKYQLAESGEMSANPDPTEGRENELPPTMKTVSPYACQRRTTLNNHNQRFTDALEILAENYEFKSNDDTALEFRRAISVLKSLPFEVRSLKDTEGLPWIGDEVKGIMEEIIEVGESLEVQAVLNDEWYQSFKRFKSVFGVGVKTADKWYRMGLRTLEDVRSSKTLKLTPMQKAGLCYYEDLARGVTKAEADAISLLVQDAVATFDPDALVEIVGGFRRGKPQGHDVDLLITSPGAEKEQEDQLLQKVTNLWKKQGLLLYGRLEWSQFEDGKLPSGKADALDHHAKCFLILKLYDHKVDKSKWEMPTGSNMGEAKPWKAIRVDLVRCPYGGFAFALLGWTGSRMFRRDLRWYATDEKNMMLDNHALYDLTKKIFLKAKSEEEIFAHLGLEYLEPFERNA

SEQ ID NO: 2447 - DNA, 1587 bp, synthetic construct
  misc_feature 1..1587: note = Variant of terminal deoxynucleotidyltransferase
  source 1..1587: mol_type = other DNA
atgcaccatcatcatcatcatggcggtagcggcagccacggcattcgtaccatcgattcggacttcgggaagaaacgccagaaaaaaatggataaccacgatagttccgccatctatgaaatcaaatttcacgagtttgtgctgttcattctcgaagaaaaaatgggtgcgacgcgtcgtacttttctgacagatttagcccgcaagaaagggttccgcgtcgagaatgaactgtcagacagcgttacccacatcgtggcagaaaataattcacgctctgaagtattggcttggctgaaagaacacaagatggagaagaccaagcaattcgaactgctggatattagctggcttatcgaaagcatgaaagttggtaaaccggtggacaccaaggggaaataccagttggcggaatcgggtgagatgagtgcgaacccagatccgacagagggtcgtgaaaacgagctgcctcctactatgaagaccgtttctccgtatgcgtgtcaacgccgcaccaccctgaacaaccataatcaacgttttacggacgcactggaaattcttgcggaaaattacgagttcaaacgcaacgatgatactgcgctggaatttcgtcgtgctatctccgtgctgaaaagccttccgtttgaggtacgtagcctgaaagacacggaaggattgccctggatcggtgatgaagtcaaagggattatggaagaaatcatcgaggtcggtgaatcgctggaagtgcaggccgtgctcaatgatgagtggtatcaaagcttcaaacgctttaagagtgtctttggagtgggggtgaagacagcagacaagtggtaccgtatgggtctgcgcacgctcgaggatgttcgttccagcaagaccctgaagttgaccccgatgcagaaagcgggtctgcattattatgaagatcttgctcgcggcgttacgaaagccgaagctgacgcgatttctctgctggttcaggatgcagtcgcaactttcgacccggatgcgctggtggagattgtcggtggatttcgtcgtgggaaacctcagggtcacgacgttgatctgcttatcacatctccgggagctgagaaagagcaagaagaccagctcctgcagaaagtgaccaatctgtggaagaaacaagggttgttgctgtacggtcgtctggaatggagtcagtttgaagatgggaaactcccatccggtaaggctgatgccctggaccaccacgcgaaatgctttctgatcctcaaactttatgatcataaagtggacaaaagcaaatgggaaatgccgacgggttcgaacatgggcgaggccaaaccgtggaaagcaattcgcgtagatctggttcgttgcccctacggcggttttgcgtttgcgttgttgggttggaccggaagccgcatgttccgccgtgatctgcgctggtacgccactgacgagaagaacatgatgctggacaatcatgcgctgtatgacctgaccaagaaaatctttctcaaagctaaatcggaagaggaaattttcgcacatctggggcttgaatacctggaaccgttcgaacgtaacgca

SEQ ID NO: 2448 - protein, 529 aa, synthetic construct
  REGION 1..529: note = Variant of terminal deoxynucleotidyltransferase
MHHHHHHGGSGSHGIRTIDSDFGKKRQKKMDNHDSSAIYEIKFHEFVLFILEEKMGATRRTFLTDLARKKGFRVENELSDSVTHIVAENNSRSEVLAWLKEHKMEKTKQFELLDISWLIESMKVGKPVDTKGKYQLAESGEMSANPDPTEGRENELPPTMKTVSPYACQRRTTLNNHNQRFTDALEILAENYEFKRNDDTALEFRRAISVLKSLPFEVRSLKDTEGLPWIGDEVKGIMEEIIEVGESLEVQAVLNDEWYQSFKRFKSVFGVGVKTADKWYRMGLRTLEDVRSSKTLKLTPMQKAGLHYYEDLARGVTKAEADAISLLVQDAVATFDPDALVEIVGGFRRGKPQGHDVDLLITSPGAEKEQEDQLLQKVTNLWKKQGLLLYGRLEWSQFEDGKLPSGKADALDHHAKCFLILKLYDHKVDKSKWEMPTGSNMGEAKPWKAIRVDLVRCPYGGFAFALLGWTGSRMFRRDLRWYATDEKNMMLDNHALYDLTKKIFLKAKSEEEIFAHLGLEYLEPFERNA

SEQ ID NO: 2449 - DNA, 1587 bp, synthetic construct
  misc_feature 1..1587: note = Variant of terminal deoxynucleotidyltransferase
  source 1..1587: mol_type = other DNA
atgcaccatcatcatcatcatggcggtagcggcagccacggcattcgtaccatcgattcggacttcgggaagaaacgccagaaaaaaatggataaccacgatagttccgccatctatgaaatcaaatttcacgagtttgtgctgttcattctcgaagaaaaaatgggtgcgacgcgtcgtacttttctgacagatttagcccgcaagaaagggttccgcgtcgagaatgaactgtcagacagcgttacccacatcgtggcagaaaataattcacgctctgaagtattggcttggctgaaagaacacaagatggagaagaccaagcaattcgaactgctggatattagctggcttatcgaaagcatgaaagttggtaaaccggtggacaccaaggggaaataccagttggcggaatcgggtgagatgagtgcgaacccagatccgacagagggtcgtgaaaacgagctgcctcctactatgaagaccgtttctccgtatgcgtgtcaacgccgcaccaccctgaacaaccataatcaacgttttacggacgcactggaaattcttgcggaaaattacgagttcaaacgcaacgatgatactgcgctggaatttcgtcgtgctatctccgtgctgaaaagccttccgtttgaggtacgtagcctgaaagacacggaaggattgccctggatcggtgatgaagtcaaagggattatggaagaaatcatcgaggtcggtgaatcgctggaagtgcaggccgtgctcaatgatgagtggtatcaaagcttcaaacgctttaagagtgtctttggagtgggggtgaagacagcagacaagtggtaccgtatgggtctgcgcacgctcgaggatgttcgttccagcaagaccctgaagttgaccccgatgcagaaagcgggtctgtgctattatgaagatcttgctcgcggcgttacgaaagccgaagctgacgcgatttctctgctggttcaggatgcagtcgcaactttcgacccggatgcgctggtggagattgtcggtggatttcgtcgtgggaaacctcagggtcacgacgttgatctgcttatcacatctccgggagctgagaaagagcaagaagaccagctcctgcagaaagtgaccaatctgtggaagaaacaagggttgttgctgtacggtcgtctggaatggagtcagtttgaagatgggaaactcccatccggtaaggctgatgccctggaccaccacgcgaaatgctttctgatcctcaaactttatgatcataaagtggacaaaagcaaatgggaaatgccgacgggttcgaacatgggcgaggccaaaccgtggaaagcaattcgcgtagatctggttcgttgcccctacggcggttttgcgtttgcgttgttgggttggaccggaagcgatatgttccgccgtgatctgcgctggtacgccactgacgagaagaacatgatgctggacaatcatgcgctgtatgacctgaccaagaaaatctttctcaaagctaaatcggaagaggaaattttcgcacatctggggcttgaatacctggaaccgttcgaacgtaacgca

SEQ ID NO: 2450 - protein, 529 aa, synthetic construct
  REGION 1..529: note = Variant of terminal deoxynucleotidyltransferase
MHHHHHHGGSGSHGIRTIDSDFGKKRQKKMDNHDSSAIYEIKFHEFVLFILEEKMGATRRTFLTDLARKKGFRVENELSDSVTHIVAENNSRSEVLAWLKEHKMEKTKQFELLDISWLIESMKVGKPVDTKGKYQLAESGEMSANPDPTEGRENELPPTMKTVSPYACQRRTTLNNHNQRFTDALEILAENYEFKRNDDTALEFRRAISVLKSLPFEVRSLKDTEGLPWIGDEVKGIMEEIIEVGESLEVQAVLNDEWYQSFKRFKSVFGVGVKTADKWYRMGLRTLEDVRSSKTLKLTPMQKAGLCYYEDLARGVTKAEADAISLLVQDAVATFDPDALVEIVGGFRRGKPQGHDVDLLITSPGAEKEQEDQLLQKVTNLWKKQGLLLYGRLEWSQFEDGKLPSGKADALDHHAKCFLILKLYDHKVDKSKWEMPTGSNMGEAKPWKAIRVDLVRCPYGGFAFALLGWTGSDMFRRDLRWYATDEKNMMLDNHALYDLTKKIFLKAKSEEEIFAHLGLEYLEPFERNA

SEQ ID NO: 2451 - DNA, 1587 bp, synthetic construct
  misc_feature 1..1587: note = Variant of terminal deoxynucleotidyltransferase
  source 1..1587: mol_type = other DNA
atgcaccatcatcatcatcatggcggtagcggcagccacggcattcgtaccatcgattcggacttcgggaagaaacgccagaaaaaaatggataaccacgatagttccgccatctatgaaatcaaatttcacgagtttgtgctgttcattctcgaagaaaaaatgggtgcgacgcgtcgtacttttctgacagatttagcccgcaagaaagggttccgcgtcgagaatgaactgtcagacagcgttacccacatcgtggcagaaaataattcacgctctgaagtattggcttggctgaaagaacacaagatggagaagaccaagcaattcgaactgctggatattagctggcttatcgaaagcatgaaagttggtaaaccggtggacaccaaggggaaataccagttggcggaatcgggtgagatgagtgcgaacccagatccgacagagggtcgtgaaaacgagctgcctcctactatgaagaccgtttctccgtatgcgtgtcaacgccgcaccaccctgaacaaccataatcaacgttttacggacgcactggaaattcttgcggaaaattacgagttcaaacgcaacgatgatactgcgctggaatttcgtcgtgctatctccgtgctgaaaagccttccgtttgaggtacgtagcctgaaagacacggaaggattgccctggatcggtgatgaagtcaaagggattatggaagaaatcatcgaggtcggtgaatcgctggaagtgcaggccgtgctcaatgatgagtggtatcaaagcttcaaacgctttaagagtgtctttggagtgggggtgaagacagcagacaagtggtaccgtatgggtctgcgcacgctcgaggatgttcgttccagcaagaccctgaagttgaccccgatgcagaaagcgggtctgtgctattatgaagatcttgctcgcggcgttacgaaagccgaagctgacgcgatttctctgctggttcaggatgcagtcgcaactttcgacccggatgcgctggtggagattgtcggtggatttcgtcgtgggaaacctcagggtcacgacgttgatctgcttatcacatctccgggagctgagaaagagcaagaagaccagctcctgcagaaagtgaccaatctgtggaagaaacaagggttgttgctgtacggtcgtctggaatggagtcagtttgaagatgggaaactcccatccggtaaggaggatgccctggaccaccacgcgaaatgctttctgatcctcaaactttatgatcataaagtggacaaaagcaaatgggaaatgccgacgggttcgaacatgggcgaggccaaaccgtggaaagcaattcgcgtagatctggttcgttgcccctacggcggttttgcgtttgcgttgttgggttggaccggaagccgcatgttccgccgtgatctgcgctggtacgccactgacgagaagaacatgatgctggacaatcatgcgctgtatgacctgaccaagaaaatctttctcaaagctaaatcggaagaggaaattttcgcacatctggggcttgaatacctggaaccgttcgaacgtaacgca

SEQ ID NO: 2452 - protein, 529 aa, synthetic construct
  REGION 1..529: note = Variant of terminal deoxynucleotidyltransferase
MHHHHHHGGSGSHGIRTIDSDFGKKRQKKMDNHDSSAIYEIKFHEFVLFILEEKMGATRRTFLTDLARKKGFRVENELSDSVTHIVAENNSRSEVLAWLKEHKMEKTKQFELLDISWLIESMKVGKPVDTKGKYQLAESGEMSANPDPTEGRENELPPTMKTVSPYACQRRTTLNNHNQRFTDALEILAENYEFKRNDDTALEFRRAISVLKSLPFEVRSLKDTEGLPWIGDEVKGIMEEIIEVGESLEVQAVLNDEWYQSFKRFKSVFGVGVKTADKWYRMGLRTLEDVRSSKTLKLTPMQKAGLCYYEDLARGVTKAEADAISLLVQDAVATFDPDALVEIVGGFRRGKPQGHDVDLLITSPGAEKEQEDQLLQKVTNLWKKQGLLLYGRLEWSQFEDGKLPSGKEDALDHHAKCFLILKLYDHKVDKSKWEMPTGSNMGEAKPWKAIRVDLVRCPYGGFAFALLGWTGSRMFRRDLRWYATDEKNMMLDNHALYDLTKKIFLKAKSEEEIFAHLGLEYLEPFERNA

SEQ ID NO: 2453 - DNA, 1587 bp, synthetic construct
  misc_feature 1..1587: note = Variant of terminal deoxynucleotidyltransferase
  source 1..1587: mol_type = other DNA
atgcaccatcatcatcatcatggcggtagcggcagccacggcattcgtaccatcgattcggacttcgggaagaaacgccagaaaaaaatggataaccacgatagttccgccatctatgaaatcaaatttcacgagtttgtgctgttcattctcgaagaaaaaatgggtgcgacgcgtcgtacttttctgacagatttagcccgcaagaaagggttccgcgtcgagaatgaactgtcagacagcgttacccacatcgtggcagaaaataattcacgctctgaagtattggcttggctgaaagaacacaagatggagaagaccaagcaattcgaactgctggatattagctggcttatcgaaagcatgaaagttggtaaaccggtggacaccaaggggaaataccagttggcggaatcgggtgagatgagtgcgaacccagatccgacagagggtcgtgaaaacgagctgcctcctactatgaagaccgtttctccgtatgcgtgtcaacgccgcaccaccctgaacaaccataatcaacgttttacggacgcactggaaattcttgcggaaaattacgagttcaaacgcaacgatgatactgcgctggaatttcgtcgtgctatctccgtgctgaaaagccttccgtttgaggtacgtagcctgaaagacacggaaggattgccctggatcggtgatgaagtcaaagggattatggaagaaatcatcgaggtcggtgaatcgctggaagtgcaggccgtgctcaatgatgagtggtatcaaagcttcaaacgctttaagagtgtctttggagtgggggtgaagacagcagacaagtggtaccgtatgggtctgcgcacgctcgaggatgttcgttccagcaagaccctgaagttgaccccgatgcagaaagcgggtctggagtattatgaagatcttgctcgcggcgttacgaaagccgaagctgacgcgatttctctgctggttcaggatgcagtcgcaactttcgacccggatgcgctggtggagattgtcggtggatttcgtcgtgggaaacctcagggtcacgacgttgatctgcttatcacatctccgggagctgagaaagagcaagaagaccagctcctgcagaaagtgaccaatctgtggaagaaacaagggttgttgctgtacggtcgtctggaatggagtcagtttgaagatgggaaactcccatccggtaaggctgatgccctggaccaccacgcgaaatgctttctgatcctcaaactttatgatcataaagtggacaaaagcaaatgggaaatgccgacgggttcgaacatgggcgaggccaaaccgtggaaagcaattcgcgtagatctggttcgttgcccctacggcggttttgcgtttgcgttgttgggttggaccggaagccgcatgttccgccgtgatctgcgctggtacgccactgacgagaagaacatgatgctggacaatcatgcgctgtatgacctgaccaagaaaatctttctcaaagctaaatcggaagaggaaattttcgcacatctggggcttgaatacctggaaccgttcgaacgtaacgca

SEQ ID NO: 2454 - protein, 529 aa, synthetic construct
  REGION 1..529: note = Variant of terminal deoxynucleotidyltransferase
MHHHHHHGGSGSHGIRTIDSDFGKKRQKKMDNHDSSAIYEIKFHEFVLFILEEKMGATRRTFLTDLARKKGFRVENELSDSVTHIVAENNSRSEVLAWLKEHKMEKTKQFELLDISWLIESMKVGKPVDTKGKYQLAESGEMSANPDPTEGRENELPPTMKTVSPYACQRRTTLNNHNQRFTDALEILAENYEFKRNDDTALEFRRAISVLKSLPFEVRSLKDTEGLPWIGDEVKGIMEEIIEVGESLEVQAVLNDEWYQSFKRFKSVFGVGVKTADKWYRMGLRTLEDVRSSKTLKLTPMQKAGLEYYEDLARGVTKAEADAISLLVQDAVATFDPDALVEIVGGFRRGKPQGHDVDLLITSPGAEKEQEDQLLQKVTNLWKKQGLLLYGRLEWSQFEDGKLPSGKADALDHHAKCFLILKLYDHKVDKSKWEMPTGSNMGEAKPWKAIRVDLVRCPYGGFAFALLGWTGSRMFRRDLRWYATDEKNMMLDNHALYDLTKKIFLKAKSEEEIFAHLGLEYLEPFERNA

SEQ ID NO: 2455 - DNA, 1587 bp, synthetic construct
  misc_feature 1..1587: note = Variant of terminal deoxynucleotidyltransferase
  source 1..1587: mol_type = other DNA
atgcaccatcatcatcatcatggcggtagcggcagccacggcattcgtaccatcgattcggacttcgggaagaaacgccagaaaaaaatggataaccacgatagttccgccatctatgaaatcaaatttcacgagtttgtgctgttcattctcgaagaaaaaatgggtgcgacgcgtcgtacttttctgacagatttagcccgcaagaaagggttccgcgtcgagaatgaactgtcagacagcgttacccacatcgtggcagaaaataattcacgctctgaagtattggcttggctgaaagaacacaagatggagaagaccaagcaattcgaactgctggatattagctggcttatcgaaagcatgaaagttggtaaaccggtggacaccaaggggaaataccagttggcggaatcgggtgagatgagtgcgaacccagatccgacagagggtcgtgaaaacgagctgcctcctactatgaagaccgtttctccgtatgcgtgtcaacgccgcaccaccctgaacaaccataatcaacgttttacggacgcactggaaattcttgcggaaaattacgagttcaaacgcaacgatgatactgcgctggaatttcgtcgtgctatctccgtgctgaaaagccttccgtttgaggtacgtagcctgaaagacacggaaggattgccctggatcggtgatgaagtcaaagggattatggaagaaatcatcgaggtcggtgaatcgctggaagtgcaggccgtgctcaatgatgagtggtatcaaagcttcaaacgctttaagagtgtctttggagtgggggtgaagacagcagacaagtggtaccgtatgggtctgcgcacgctcgaggatgttcgttccagcaagaccctgaagttgaccccgatgcagaaagcgggtctgtgctattatgaagatcttgctcgcggcgttacgaaagccgaagctgacgcgatttctctgctggttcaggatgcagtcgcaactttcgacccggatgcgctggtggagattgtcggtggatttcgtcgtgggaaacctcagggtcacgacgttgatctgcttatcacatctccgggagctgagaaagagcaagaagaccagctcctgcagaaagtgaccaatctgtggaagaaacaagggttgttgctgtacggtcgtctggaatggagtgcgtttgaagatgggaaactcccatccggtaaggctgatgccctggaccaccacgcgaaatgctttctgatcctcaaactttatgatcataaagtggacaaaagcaaatgggaaatgccgacgggttcgaacatgggcgaggccaaaccgtggaaagcaattcgcgtagatctggttcgttgcccctacggcggttttgcgtttgcgttgttgggttggaccggaagccgcatgttccgccgtgatctgcgctggtacgccactgacgagaagaacatgatgctggacaatcatgcgctgtatgacctgaccaagaaaatctttctcaaagctaaatcggaagaggaaattttcgcacatctggggcttgaatacctggaaccgttcgaacgtaacgca

SEQ ID NO: 2456 - protein, 529 aa, synthetic construct
  REGION 1..529: note = Variant of terminal deoxynucleotidyltransferase
MHHHHHHGGSGSHGIRTIDSDFGKKRQKKMDNHDSSAIYEIKFHEFVLFILEEKMGATRRTFLTDLARKKGFRVENELSDSVTHIVAENNSRSEVLAWLKEHKMEKTKQFELLDISWLIESMKVGKPVDTKGKYQLAESGEMSANPDPTEGRENELPPTMKTVSPYACQRRTTLNNHNQRFTDALEILAENYEFKRNDDTALEFRRAISVLKSLPFEVRSLKDTEGLPWIGDEVKGIMEEIIEVGESLEVQAVLNDEWYQSFKRFKSVFGVGVKTADKWYRMGLRTLEDVRSSKTLKLTPMQKAGLCYYEDLARGVTKAEADAISLLVQDAVATFDPDALVEIVGGFRRGKPQGHDVDLLITSPGAEKEQEDQLLQKVTNLWKKQGLLLYGRLEWSAFEDGKLPSGKADALDHHAKCFLILKLYDHKVDKSKWEMPTGSNMGEAKPWKAIRVDLVRCPYGGFAFALLGWTGSRMFRRDLRWYATDEKNMMLDNHALYDLTKKIFLKAKSEEEIFAHLGLEYLEPFERNA

SEQ ID NO: 2457 - DNA, 1587 bp, synthetic construct
  misc_feature 1..1587: note = Variant of terminal deoxynucleotidyltransferase
  source 1..1587: mol_type = other DNA
atgcaccatcatcatcatcatggcggtagcggcagccacggcattcgtaccatcgattcggacttcgggaagaaacgccagaaaaaaatggataaccacgatagttccgccatctatgaaatcaaatttcacgagtttgtgctgttcattctcgaagaaaaaatgggtgcgacgcgtcgtacttttctgacagatttagcccgcaagaaagggttccgcgtcgagaatgaactgtcagacagcgttacccacatcgtggcagaaaataattcacgctctgaagtattggcttggctgaaagaacacaagatggagaagaccaagcaattcgaactgctggatattagctggcttatcgaaagcatgaaagttggtaaaccggtggacaccaaggggaaataccagttggcggaatcgggtgagatgagtgcgaacccagatccgacagagggtcgtgaaaacgagctgcctcctactatgaagaccgtttctccgtatgcgtgtcaacgccgcaccaccctgaacaaccataatcaacgttttacggacgcactggaaattcttgcggaaaattacgagttcaaacgcaacgatgatactgcgctggaatttcgtcgtgctatctccgtgctgaaaagccttccgtttgaggtacgtagcctgaaagacacggaaggattgccctggatcggtgatgaagtcaaagggattatggaagaaatcatcgaggtcggtgaatcgctggaagtgcaggccgtgctcaatgatgagtggtatcaaagcttcaaacgctttaagagtgtctttggagtgggggtgaagacagcagacaagtggtaccgtatgggtctgcgcacgctcgaggatgttcgttccagcaagaccctgaagttgaccccgatgcagaaagcgggtctgtgctattatgaagatcttgctcgcggcgttacgaaagccgaagctgacgcgatttctctgctggttcaggatgcagtcgcaactttcgacccggatgcgctggtggagattgtcggtggatttcgtcgtgggaaacctcagggtcacgacgttgatctgcttatcacatctccgggagctgagaaagagcaagaagaccagctcctgcagaaagtgaccaatctgtggaagaaacaagggttgttgctgtacggtcgtctggaatggagtcagtttgaagatgggaaactcccatccggtaaggctgatgccctggacttgcacgcgaaatgctttctgatcctcaaactttatgatcataaagtggacaaaagcaaatgggaaatgccgacgggttcgaacatgggcgaggccaaaccgtggaaagcaattcgcgtagatctggttcgttgcccctacggcggttttgcgtttgcgttgttgggttggaccggaagccgcatgttccgccgtgatctgcgctggtacgccactgacgagaagaacatgatgctggacaatcatgcgctgtatgacctgaccaagaaaatctttctcaaagctaaatcggaagaggaaattttcgcacatctggggcttgaatacctggaaccgttcgaacgtaacgca

SEQ ID NO: 2458 - protein, 529 aa, synthetic construct
  REGION 1..529: note = Variant of terminal deoxynucleotidyltransferase
MHHHHHHGGSGSHGIRTIDSDFGKKRQKKMDNHDSSAIYEIKFHEFVLFILEEKMGATRRTFLTDLARKKGFRVENELSDSVTHIVAENNSRSEVLAWLKEHKMEKTKQFELLDISWLIESMKVGKPVDTKGKYQLAESGEMSANPDPTEGRENELPPTMKTVSPYACQRRTTLNNHNQRFTDALEILAENYEFKRNDDTALEFRRAISVLKSLPFEVRSLKDTEGLPWIGDEVKGIMEEIIEVGESLEVQAVLNDEWYQSFKRFKSVFGVGVKTADKWYRMGLRTLEDVRSSKTLKLTPMQKAGLCYYEDLARGVTKAEADAISLLVQDAVATFDPDALVEIVGGFRRGKPQGHDVDLLITSPGAEKEQEDQLLQKVTNLWKKQGLLLYGRLEWSQFEDGKLPSGKADALDLHAKCFLILKLYDHKVDKSKWEMPTGSNMGEAKPWKAIRVDLVRCPYGGFAFALLGWTGSRMFRRDLRWYATDEKNMMLDNHALYDLTKKIFLKAKSEEEIFAHLGLEYLEPFERNA

SEQ ID NO: 2459 - DNA, 1587 bp, synthetic construct
  misc_feature 1..1587: note = Variant of terminal deoxynucleotidyltransferase
  source 1..1587: mol_type = other DNA
atgcaccatcatcatcatcatggcggtagcggcagccacggcattcgtaccatcgattcggacttcgggaagaaacgccagaaaaaaatggataaccacgatagttccgccatctatgaaatcaaatttcacgagtttgtgctgttcattctcgaagaaaaaatgggtgcgacgcgtcgtacttttctgacagatttagcccgcaagaaagggttccgcgtcgagaatgaactgtcagacagcgttacccacatcgtggcagaaaataattcacgctctgaagtattggcttggctgaaagaacacaagatggagaagaccaagcaattcgaactgctggatattagctggcttatcgaaagcatgaaagttggtaaaccggtggacaccaaggggaaataccagttggcggaatcgggtgagatgagtgcgaacccagatccgacagagggtcgtgaaaacgagctgcctcctactatgaagaccgtttctccgtatgcgtgtcaacgccgcaccaccctgaacaaccataatcaacgttttacggacgcactggaaattcttgcggaaaattacgagttcaaacgcaacgatgatactgcgctggaatttcgtcgtgctatctccgtgctgaaaagccttccgtttgaggtacgtagcctgaaagacacggaaggattgccctggatcggtgatgaagtcaaagggattatggaagaaatcatcgaggtcggtgaatcgctggaagtgcaggccgtgctcaatgatgagtggtatcaaagcttcaaacgctttaagagtgtctttggagtgggggtgaagacagcagacaagtggtaccgtatgggtctgcgcacgctcgaggatgttcgttccagcaagaccctgaagttgaccccgatgcagaaagcgggtctgtgctattatgaagatcttgctcgcggcgttacgcgggccgaagctgacgcgatttctctgctggttcaggatgcagtcgcaactttcgacccggatgcgctggtggagattgtcggtggatttcgtcgtgggaaacctcagggtcacgacgttgatctgcttatcacatctccgggagctgagaaagagcaagaagaccagctcctgcagaaagtgaccaatctgtggaagaaacaagggttgttgctgtacggtcgtctggaatggagtcagtttgaagatgggaaactcccatccggtaaggctgatgccctggaccaccacgcgaaatgctttctgatcctcaaactttatgatcataaagtggacaaaagcaaatgggaaatgccgacgggttcgaacatgggcgaggccaaaccgtggaaagcaattcgcgtagatctggttcgttgcccctacggcggttttgcgtttgcgttgttgggttggaccggaagccgcatgttccgccgtgatctgcgctggtacgccactgacgagaagaacatgatgctggacaatcatgcgctgtatgacctgaccaagaaaatctttctcaaagctaaatcggaagaggaaattttcgcacatctggggcttgaatacctggaaccgttcgaacgtaacgca

SEQ ID NO: 2460 - protein, 529 aa, synthetic construct
  REGION 1..529: note = Variant of terminal deoxynucleotidyltransferase
MHHHHHHGGSGSHGIRTIDSDFGKKRQKKMDNHDSSAIYEIKFHEFVLFILEEKMGATRRTFLTDLARKKGFRVENELSDSVTHIVAENNSRSEVLAWLKEHKMEKTKQFELLDISWLIESMKVGKPVDTKGKYQLAESGEMSANPDPTEGRENELPPTMKTVSPYACQRRTTLNNHNQRFTDALEILAENYEFKRNDDTALEFRRAISVLKSLPFEVRSLKDTEGLPWIGDEVKGIMEEIIEVGESLEVQAVLNDEWYQSFKRFKSVFGVGVKTADKWYRMGLRTLEDVRSSKTLKLTPMQKAGLCYYEDLARGVTRAEADAISLLVQDAVATFDPDALVEIVGGFRRGKPQGHDVDLLITSPGAEKEQEDQLLQKVTNLWKKQGLLLYGRLEWSQFEDGKLPSGKADALDHHAKCFLILKLYDHKVDKSKWEMPTGSNMGEAKPWKAIRVDLVRCPYGGFAFALLGWTGSRMFRRDLRWYATDEKNMMLDNHALYDLTKKIFLKAKSEEEIFAHLGLEYLEPFERNA

SEQ ID NO: 2461 - DNA, 1587 bp, synthetic construct
  misc_feature 1..1587: note = Variant of terminal deoxynucleotidyltransferase
  source 1..1587: mol_type = other DNA
atgcaccatcatcatcatcatggcggtagcggcagccacggcattcgtaccatcgattcggacttcgggaagaaacgccagaaaaaaatggataaccacgatagttccgccatctatgaaatcaaatttcacgagtttgtgctgttcattctcgaagaaaaaatgggtgcgacgcgtcgtacttttctgacagatttagcccgcaagaaagggttccgcgtcgagaatgaactgtcagacagcgttacccacatcgtggcagaaaataattcacgctctgaagtattggcttggctgaaagaacacaagatggagaagaccaagcaattcgaactgctggatattagctggcttatcgaaagcatgaaagttggtaaaccggtggacaccaaggggaaataccagttggcggaatcgggtgagatgagtgcgaacccagatccgacagagggtcgtgaaaacgagctgcctcctactatgaagaccgtttctccgtatgcgtgtcaacgccgcaccaccctgaacaaccataatcaacgttttacggacgcactggaaattcttgcggaaaattacgagttcaaacgcaacgatgatactgcgctggaatttcgtcgtgctatctccgtgctgaaaagccttccgtttgaggtacgtagcctgaaagacacggaaggattgccctggatcggtgatgaagtcaaagggattatggaagaaatcatcgaggtcggtgaatcgctggaagtgcaggccgtgctcaatgatgagtggtatcaaagcttcaaacgctttaagagtgtctttggagtgggggtgaagacagcagacaagtggtaccgtatgggtctgcgcacgctcgaggatgttcgttccagcaagaccctgaagttgaccccgatgcagaaagcgggtctgtgctattatgaagatcttgctcgcggcgttacgaaagccgaagctgacgcggtgtctctgctggttcaggatgcagtcgcaactttcgacccggatgcgctggtggagattgtcggtggatttcgtcgtgggaaacctcagggtcacgacgttgatctgcttatcacatctccgggagctgagaaagagcaagaagaccagctcctgcagaaagtgaccaatctgtggaagaaacaagggttgttgctgtacggtcgtctggaatggagtcagtttgaagatgggaaactcccatccggtaaggctgatgccctggaccaccacgcgaaatgctttctgatcctcaaactttatgatcataaagtggacaaaagcaaatgggaaatgccgacgggttcgaacatgggcgaggccaaaccgtggaaagcaattcgcgtagatctggttcgttgcccctacggcggttttgcgtttgcgttgttgggttggaccggaagccgcatgttccgccgtgatctgcgctggtacgccactgacgagaagaacatgatgctggacaatcatgcgctgtatgacctgaccaagaaaatctttctcaaagctaaatcggaagaggaaattttcgcacatctggggcttgaatacctggaaccgttcgaacgtaacgca

SEQ ID NO: 2462 - protein, 529 aa, synthetic construct
  REGION 1..529: note = Variant of terminal deoxynucleotidyltransferase
MHHHHHHGGSGSHGIRTIDSDFGKKRQKKMDNHDSSAIYEIKFHEFVLFILEEKMGATRRTFLTDLARKKGFRVENELSDSVTHIVAENNSRSEVLAWLKEHKMEKTKQFELLDISWLIESMKVGKPVDTKGKYQLAESGEMSANPDPTEGRENELPPTMKTVSPYACQRRTTLNNHNQRFTDALEILAENYEFKRNDDTALEFRRAISVLKSLPFEVRSLKDTEGLPWIGDEVKGIMEEIIEVGESLEVQAVLNDEWYQSFKRFKSVFGVGVKTADKWYRMGLRTLEDVRSSKTLKLTPMQKAGLCYYEDLARGVTKAEADAVSLLVQDAVATFDPDALVEIVGGFRRGKPQGHDVDLLITSPGAEKEQEDQLLQKVTNLWKKQGLLLYGRLEWSQFEDGKLPSGKADALDHHAKCFLILKLYDHKVDKSKWEMPTGSNMGEAKPWKAIRVDLVRCPYGGFAFALLGWTGSRMFRRDLRWYATDEKNMMLDNHALYDLTKKIFLKAKSEEEIFAHLGLEYLEPFERNA

SEQ ID NO: 2463 - DNA, 1587 bp, synthetic construct
  misc_feature 1..1587: note = Variant of terminal deoxynucleotidyltransferase
  source 1..1587: mol_type = other DNA
atgcaccatcatcatcatcatggcggtagcggcagccacggcattcgtaccatcgattcggacttcgggaagaaacgccagaaaaaaatggataaccacgatagttccgccatctatgaaatcaaatttcacgagtttgtgctgttcattctcgaagaaaaaatgggtgcgacgcgtcgtacttttctgacagatttagcccgcaagaaagggttccgcgtcgagaatgaactgtcagacagcgttacccacatcgtggcagaaaataattcacgctctgaagtattggcttggctgaaagaacacaagatggagaagaccaagcaattcgaactgctggatattagctggcttatcgaaagcatgaaagttggtaaaccggtggacaccaaggggaaataccagttggcggaatcgggtgagatgagtgcgaacccagatccgacagagggtcgtgaaaacgagctgcctcctactatgaagaccgtttctccgtatgcgtgtcaacgccgcaccaccctgaacaaccataatcaacgttttacggacgcactggaaattcttgcggaaaattacgagttcaaacgcaacgatgatactgcgctggaatttcgtcgtgctatctccgtgctgaaaagccttccgtttgaggtacgtagcctgaaagacacggaaggattgccctggatcggtgatgaagtcaaagggattatggaagaaatcatcgaggtcggtgaatcgctggaagtgcaggccgtgctcaatgatgagtggtatcaaagcttcaaacgctttaagagtgtctttggagtgggggtgaagacagcagacaagtggtaccgtatgggtctgcgcacgctcgaggatgttcgttccagcaagaccctgaagttgaccccgatgcagaaagcgggtctgtgctattatgaagatcttgctcgcggcgttacgaaagccgaagctgacgcgatttctctgctggttcaggatgcagtcgcaactttcgacccggatgcgctggtggagattgtcggtggatttcgtcgtgggaaacctcagggtcacgacgttgatctgcttatcacatctccgggagctgagaaagagcaagaagaccagctcctgcagaaagtgaccaatctgtggaagaaacaagggttgttgctgtacggtcgtctggaatggagtcagtttgaagatgggaaactcccatccggtaaggctgatgccctggaccaccacgcgaaatgctttctgatcctcaaactttatgatcataaagtggacaaaagcaaatgggaaatgccgacgggttcgaacatgggcgaggccaaaccgtggaaagcaattcgcgtagatctggttcgttgcccctacggcggttttgcgtttgcgttgttgggttggaccggaagccgcatgttccgccgtgatctgcgcgtgtacgccactgacgagaagaacatgatgctggacaatcatgcgctgtatgacctgaccaagaaaatctttctcaaagctaaatcggaagaggaaattttcgcacatctggggcttgaatacctggaaccgttcgaacgtaacgca

SEQ ID NO: 2464 - protein, 529 aa, synthetic construct
  REGION 1..529: note = Variant of terminal deoxynucleotidyltransferase
MHHHHHHGGSGSHGIRTIDSDFGKKRQKKMDNHDSSAIYEIKFHEFVLFILEEKMGATRRTFLTDLARKKGFRVENELSDSVTHIVAENNSRSEVLAWLKEHKMEKTKQFELLDISWLIESMKVGKPVDTKGKYQLAESGEMSANPDPTEGRENELPPTMKTVSPYACQRRTTLNNHNQRFTDALEILAENYEFKRNDDTALEFRRAISVLKSLPFEVRSLKDTEGLPWIGDEVKGIMEEIIEVGESLEVQAVLNDEWYQSFKRFKSVFGVGVKTADKWYRMGLRTLEDVRSSKTLKLTPMQKAGLCYYEDLARGVTKAEADAISLLVQDAVATFDPDALVEIVGGFRRGKPQGHDVDLLITSPGAEKEQEDQLLQKVTNLWKKQGLLLYGRLEWSQFEDGKLPSGKADALDHHAKCFLILKLYDHKVDKSKWEMPTGSNMGEAKPWKAIRVDLVRCPYGGFAFALLGWTGSRMFRRDLRVYATDEKNMMLDNHALYDLTKKIFLKAKSEEEIFAHLGLEYLEPFERNA

SEQ ID NO: 2465 - DNA, 1587 bp, synthetic construct
  misc_feature 1..1587: note = Variant of terminal deoxynucleotidyltransferase
  source 1..1587: mol_type = other DNA
atgcaccatcatcatcatcatggcggtagcggcagccacggcattcgtaccatcgattcggacttcgggaagaaacgccagaaaaaaatggataaccacgatagttccgccatctatgaaatcaaatttcacgagtttgtgctgttcattctcgaagaaaaaatgggtgcgacgcgtcgtacttttctgacagatttagcccgcaagaaagggttccgcgtcgagaatgaactgtcagacagcgttacccacatcgtggcagaaaataattcacgctctgaagtattggcttggctgaaagaacacaagatggagaagaccaagcaattcgaactgctggatattagctggcttatcgaaagcatgaaagttggtaaaccggtggacaccaaggggaaataccagttggcggaatcgggtgagatgagtgcgaacccagatccgacagagggtcgtgaaaacgagctgcctcctactatgaagaccgtttctccgtatgcgtgtcaacgccgcaccaccctgaacaaccataatcaacgttttacggacgcactggaaattcttgcggaaaattacgagttcaaacgcaacgatgatactgcgctggaatttcgtcgtgctatctccgtgctgaaaagccttccgtttgaggtacgtagcctgaaagacacggaaggattgccctggatcggtgatgaagtcaaagggattatggaagaaatcatcgaggtcggtgaatcgctggaagtgcaggccgtgctcaatgatgagtggtatcaaagcttcaaacgctttaagagtgtctttggagtgggggtgaagacagcagacaagtggtaccgtatgggtctgcgcacgctcgaggatgttcgttccagcaagaccctgaagttgaccccgatgcagaaagcgggtctgtgctattatgaagatcttgctcgcggcgttacgaaagccgaagctgacgcgatttctctgctggttcaggatgcagtcgcaactttcgacccggatgcgctggtggagattgtcggtggatttcgtcgtgggaaacctcagggtcacgacgttgatctgcttatcacatctccgggagctgagaaagagcaagaagaccagctcctgcagaaagtgaccaatctgtggaagaaacaagggttgttgctgtacggtcgtctggaatggagtcagtttgaagatgggaaactcccatccggtaaggctgatgccctggaccaccacgcgaaatgctttctgatcctcaaactttatgatcataaagtggacaaaagcaaatgggaaatgccgacgggttcgaacatgggcgaggccaaaccgtggaaagcaattcgcgtagatctggttcgttgcccctacggcggttttgcgtttgcgttgttgggttataccggaagccgcatgttccgccgtgatctgcgctggtacgccactgacgagaagaacatgatgctggacaatcatgcgctgtatgacctgaccaagaaaatctttctcaaagctaaatcggaagaggaaattttcgcacatctggggcttgaatacctggaaccgttcgaacgtaacgca

SEQ ID NO: 2466 - protein, 529 aa, synthetic construct
  REGION 1..529: note = Variant of terminal deoxynucleotidyltransferase
MHHHHHHGGSGSHGIRTIDSDFGKKRQKKMDNHDSSAIYEIKFHEFVLFILEEKMGATRRTFLTDLARKKGFRVENELSDSVTHIVAENNSRSEVLAWLKEHKMEKTKQFELLDISWLIESMKVGKPVDTKGKYQLAESGEMSANPDPTEGRENELPPTMKTVSPYACQRRTTLNNHNQRFTDALEILAENYEFKRNDDTALEFRRAISVLKSLPFEVRSLKDTEGLPWIGDEVKGIMEEIIEVGESLEVQAVLNDEWYQSFKRFKSVFGVGVKTADKWYRMGLRTLEDVRSSKTLKLTPMQKAGLCYYEDLARGVTKAEADAISLLVQDAVATFDPDALVEIVGGFRRGKPQGHDVDLLITSPGAEKEQEDQLLQKVTNLWKKQGLLLYGRLEWSQFEDGKLPSGKADALDHHAKCFLILKLYDHKVDKSKWEMPTGSNMGEAKPWKAIRVDLVRCPYGGFAFALLGYTGSRMFRRDLRWYATDEKNMMLDNHALYDLTKKIFLKAKSEEEIFAHLGLEYLEPFERNA

SEQ ID NO: 2467 - DNA, 1587 bp, synthetic construct
  misc_feature 1..1587: note = Variant of terminal deoxynucleotidyltransferase
  source 1..1587: mol_type = other DNA
atgcaccatcatcatcatcatggcggtagcggcagccacggcattcgtaccatcgattcggacttcgggaagaaacgccagaaaaaaatggataaccacgatagttccgccatctatgaaatcaaatttcacgagtttgtgctgttcattctcgaagaaaaaatgggtgcgacgcgtcgtacttttctgacagatttagcccgcaagaaagggttccgcgtcgagaatgaactgtcagacagcgttacccacatcgtggcagaaaataattcacgctctgaagtattggcttggctgaaagaacacaagatggagaagaccaagcaattcgaactgctggatattagctggcttatcgaaagcatgaaagttggtaaaccggtggacaccaaggggaaataccagttggcggaatcgggtgagatgagtgcgaacccagatccgacagagggtcgtgaaaacgagctgcctcctactatgaagaccgtttctccgtatgcgtgtcaacgccgcaccaccctgaacaaccataatcaacgttttacggacgcactggaaattcttgcggaaaattacgagttcaaagcgaacgatgatactgcgctggaatttcgtcgtgctatctccgtgctgaaaagccttccgtttgaggtacgtagcctgaaagacacggaaggattgccctggatcggtgatgaagtcaaagggattatggaagaaatcatcgaggtcggtgaatcgctggaagtgcaggccgtgctcaatgatgagtggtatcaaagcttcaaacgctttaagagtgtctttggagtgggggtgaagacagcagacaagtggtaccgtatgggtctgcgcacgctcgaggatgttcgttccagcaagaccctgaagttgaccccgatgcagaaagcgggtctgtgctattatgaagatcttgctcgcggcgttacgaaagccgaagctgacgcgatttctctgctggttcaggatgcagtcgcaactttcgacccggatgcgctggtggagattgtcggtggatttcgtcgtgggaaacctcagggtcacgacgttgatctgcttatcacatctccgggagctgagaaagagcaagaagaccagctcctgcagaaagtgaccaatctgtggaagaaacaagggttgttgctgtacggtcgtctggaatggagtcagtttgaagatgggaaactcccatccggtaaggctgatgccctggaccaccacgcgaaatgctttctgatcctcaaactttatgatcataaagtggacaaaagcaaatgggaaatgccgacgggttcgaacatgggcgaggccaaaccgtggaaagcaattcgcgtagatctggttcgttgcccctacggcggttttgcgtttgcgttgttgggttggaccggaagccgcatgttccgccgtgatctgcgctggtacgccactgacgagaagaacatgatgctggacaatcatgcgctgtatgacctgaccaagaaaatctttctcaaagctaaatcggaagaggaaattttcgcacatctggggcttgaatacctggaaccgttcgaacgtaacgca

SEQ ID NO: 2468 - protein, 529 aa, synthetic construct
  REGION 1..529: note = Variant of terminal deoxynucleotidyltransferase
MHHHHHHGGSGSHGIRTIDSDFGKKRQKKMDNHDSSAIYEIKFHEFVLFILEEKMGATRRTFLTDLARKKGFRVENELSDSVTHIVAENNSRSEVLAWLKEHKMEKTKQFELLDISWLIESMKVGKPVDTKGKYQLAESGEMSANPDPTEGRENELPPTMKTVSPYACQRRTTLNNHNQRFTDALEILAENYEFKANDDTALEFRRAISVLKSLPFEVRSLKDTEGLPWIGDEVKGIMEEIIEVGESLEVQAVLNDEWYQSFKRFKSVFGVGVKTADKWYRMGLRTLEDVRSSKTLKLTPMQKAGLCYYEDLARGVTKAEADAISLLVQDAVATFDPDALVEIVGGFRRGKPQGHDVDLLITSPGAEKEQEDQLLQKVTNLWKKQGLLLYGRLEWSQFEDGKLPSGKADALDHHAKCFLILKLYDHKVDKSKWEMPTGSNMGEAKPWKAIRVDLVRCPYGGFAFALLGWTGSRMFRRDLRWYATDEKNMMLDNHALYDLTKKIFLKAKSEEEIFAHLGLEYLEPFERNA

SEQ ID NO: 2469 - DNA, 1587 bp, synthetic construct
  misc_feature 1..1587: note = Variant of terminal deoxynucleotidyltransferase
  source 1..1587: mol_type = other DNA
atgcaccatcatcatcatcatggcggtagcggcagccacggcattcgtaccatcgattcggacttcgggaagaaacgccagaaaaaaatggataaccacgatagttccgccatctatgaaatcaaatttcacgagtttgtgctgttcattctcgaagaaaaaatgggtgcgacgcgtcgtacttttctgacagatttagcccgcaagaaagggttccgcgtcgagaatgaactgtcagacagcgttacccacatcgtggcagaaaataattcacgctctgaagtattggcttggctgaaagaacacaagatggagaagaccaagcaattcgaactgctggatattagctggcttatcgaaagcatgaaagttggtaaaccggtggacaccaaggggaaataccagttggcggaatcgggtgagatgagtgcgaacccagatccgacagagggtcgtgaaaacgagctgcctcctactatgaagaccgtttctccgtatgcgtgtcaacgccgcaccaccctgaacaaccataatcaacgttttacggacgcactggaaattcttgcggaaaattacgagttcaaacgcaacgatgatactgcgctggaatttcgtcgtgctatctccgtgctgaaaagccttccgtttgaggtacgtagcctgaaagacacggaaggattgccctggatcggtgatgaagtcaaagggattatggaagaaatcatcgaggtcggtgaatcgctggaagtgcaggccgtgctcaatgatgagtggtatcaaagcttcaaacgctttaagagtgtctttggagtgggggtgaagacagcagacaagtggtaccgtatgggtctgcgcacgctcgaggatgttcgttccagcaagaccctgaagttgaccccgatgcagaaagcgggtctgtgctattatgaagatcttgctcgcggcgttacgaaagccgaagctgacgcgatttctctgctggttcaggatgcagtcgcaactttcgacccggatgcgctggtggagattgtcggtggatttcgtcgtgggaaacctcagggtcacgacgttgatctgcttatcacatctccgggagctgagaaagagcaagaagaccagctcctgcagaaagtgaccaatctgtggaagaaacaagggttgttgctgtacggtcgtctggaatggagtcagtttgaagatgggaaactcccatccggtaaggctgatgccctggacatgcacgcgaaatgctttctgatcctcaaactttatgatcataaagtggacaaaagcaaatgggaaatgccgacgggttcgaacatgggcgaggccaaaccgtggaaagcaattcgcgtagatctggttcgttgcccctacggcggttttgcgtttgcgttgttgggttggaccggaagccgcatgttccgccgtgatctgcgctggtacgccactgacgagaagaacatgatgctggacaatcatgcgctgtatgacctgaccaagaaaatctttctcaaagctaaatcggaagaggaaattttcgcacatctggggcttgaatacctggaaccgttcgaacgtaacgca

SEQ ID NO: 2470 - protein, 529 aa, synthetic construct
  REGION 1..529: note = Variant of terminal deoxynucleotidyltransferase
MHHHHHHGGSGSHGIRTIDSDFGKKRQKKMDNHDSSAIYEIKFHEFVLFILEEKMGATRRTFLTDLARKKGFRVENELSDSVTHIVAENNSRSEVLAWLKEHKMEKTKQFELLDISWLIESMKVGKPVDTKGKYQLAESGEMSANPDPTEGRENELPPTMKTVSPYACQRRTTLNNHNQRFTDALEILAENYEFKRNDDTALEFRRAISVLKSLPFEVRSLKDTEGLPWIGDEVKGIMEEIIEVGESLEVQAVLNDEWYQSFKRFKSVFGVGVKTADKWYRMGLRTLEDVRSSKTLKLTPMQKAGLCYYEDLARGVTKAEADAISLLVQDAVATFDPDALVEIVGGFRRGKPQGHDVDLLITSPGAEKEQEDQLLQKVTNLWKKQGLLLYGRLEWSQFEDGKLPSGKADALDMHAKCFLILKLYDHKVDKSKWEMPTGSNMGEAKPWKAIRVDLVRCPYGGFAFALLGWTGSRMFRRDLRWYATDEKNMMLDNHALYDLTKKIFLKAKSEEEIFAHLGLEYLEPFERNA

SEQ ID NO: 2471 - DNA, 1587 bp, synthetic construct
  misc_feature 1..1587: note = Variant of terminal deoxynucleotidyltransferase
  source 1..1587: mol_type = other DNA
atgcaccatcatcatcatcatggcggtagcggcagccacggcattcgtaccatcgattcggacttcgggaagaaacgccagaaaaaaatggataaccacgatagttccgccatctatgaaatcaaatttcacgagtttgtgctgttcattctcgaagaaaaaatgggtgcgacgcgtcgtacttttctgacagatttagcccgcaagaaagggttccgcgtcgagaatgaactgtcagacagcgttacccacatcgtggcagaaaataattcacgctctgaagtattggcttggctgaaagaacacaagatggagaagaccaagcaattcgaactgctggatattagctggcttatcgaaagcatgaaagttggtaaaccggtggacaccaaggggaaataccagttggcggaatcgggtgagatgagtgcgaacccagatccgacagagggtcgtgaaaacgagctgcctcctactatgaagaccgtttctccgtatgcgtgtcaacgccgcaccaccctgaacaaccataatcaacgttttacggacgcactggaaattcttgcggaaaattacgagttcaaacgcaacgatgatactgcgctggaatttcgtcgtgctatctccgtgctgaaaagccttccgtttgaggtacgtagcctgaaagacacggaaggattgccctggatcggtgatgaagtcaaagggattatggaagaaatcatcgaggtcggtgaatcgctggaagtgcaggccgtgctcaatgatgagtggtatcaaagcttcaaacgctttaagagtgtctttggagtgggggtgaagacagcagacaagtggtaccgtatgggtctgcgcacgctcgaggatgttcgttccagcaagaccctgaagttgaccccgatgcagaaagcgggtctgctttattatgaagatcttgctcgcggcgttacgaaagccgaagctgacgcgatttctctgctggttcaggatgcagtcgcaactttcgacccggatgcgctggtggagattgtcggtggatttcgtcgtgggaaacctcagggtcacgacgttgatctgcttatcacatctccgggagctgagaaagagcaagaagaccagctcctgcagaaagtgaccaatctgtggaagaaacaagggttgttgctgtacggtcgtctggaatggagtcagtttgaagatgggaaactcccatccggtaaggctgatgccctggaccaccacgcgaaatgctttctgatcctcaaactttatgatcataaagtggacaaaagcaaatgggaaatgccgacgggttcgaacatgggcgaggccaaaccgtggaaagcaattcgcgtagatctggttcgttgcccctacggcggttttgcgtttgcgttgttgggttggaccggaagccgcatgttccgccgtgatctgcgctggtacgccactgacgagaagaacatgatgctggacaatcatgcgctgtatgacctgaccaagaaaatctttctcaaagctaaatcggaagaggaaattttcgcacatctggggcttgaatacctggaaccgttcgaacgtaacgca

SEQ ID NO: 2472 - protein, 529 aa, synthetic construct
  REGION 1..529: note = Variant of terminal deoxynucleotidyltransferase
MHHHHHHGGSGSHGIRTIDSDFGKKRQKKMDNHDSSAIYEIKFHEFVLFILEEKMGATRRTFLTDLARKKGFRVENELSDSVTHIVAENNSRSEVLAWLKEHKMEKTKQFELLDISWLIESMKVGKPVDTKGKYQLAESGEMSANPDPTEGRENELPPTMKTVSPYACQRRTTLNNHNQRFTDALEILAENYEFKRNDDTALEFRRAISVLKSLPFEVRSLKDTEGLPWIGDEVKGIMEEIIEVGESLEVQAVLNDEWYQSFKRFKSVFGVGVKTADKWYRMGLRTLEDVRSSKTLKLTPMQKAGLLYYEDLARGVTKAEADAISLLVQDAVATFDPDALVEIVGGFRRGKPQGHDVDLLITSPGAEKEQEDQLLQKVTNLWKKQGLLLYGRLEWSQFEDGKLPSGKADALDHHAKCFLILKLYDHKVDKSKWEMPTGSNMGEAKPWKAIRVDLVRCPYGGFAFALLGWTGSRMFRRDLRWYATDEKNMMLDNHALYDLTKKIFLKAKSEEEIFAHLGLEYLEPFERNA

SEQ ID NO: 2473 - DNA, 1587 bp, synthetic construct
  misc_feature 1..1587: note = Variant of terminal deoxynucleotidyltransferase
  source 1..1587: mol_type = other DNA
atgcaccatcatcatcatcatggcggtagcggcagccacggcattcgtaccatcgattcggacttcgggaagaaacgccagaaaaaaatggataaccacgatagttccgccatctatgaaatcaaatttcacgagtttgtgctgttcattctcgaagaaaaaatgggtgcgacgcgtcgtacttttctgacagatttagcccgcaagaaagggttccgcgtcgagaatgaactgtcagacagcgttacccacatcgtggcagaaaataattcacgctctgaagtattggcttggctgaaagaacacaagatggagaagaccaagcaattcgaactgctggatattagctggcttatcgaaagcatgaaagttggtaaaccggtggacaccaaggggaaataccagttggcggaatcgggtgagatgagtgcgaacccagatccgacagagggtcgtgaaaacgagctgcctcctactatgaagaccgtttctccgtatgcgtgtcaacgccgcaccaccctgaacaaccataatcaacgttttacggacgcactggaaattcttgcggaaaattacgagttcaaacgcaacgatgatactgcgctggaatttcgtcgtgctatctccgtgctgaaaagccttccgtttgaggtacgtagcctgaaagacacggaaggattgccctggatcggtgatgaagtcaaagggattatggaagaaatcatcgaggtcggtgaatcgctggaagtgcaggccgtgctcaatgatgagtggtatcaaagcttcaaacgctttaagagtgtctttggagtgggggtgaagacagcagacaagtggtaccgtatgggtctgcgcacgctcgaggatgttcgttccagcaagaccctgaagttgaccccgatgcagaaagcgggtctgtgctattatgaagatcttgctcgcggcgttacgaaagccgaagctgacgcgatttctctgctggttcaggatgcagtcgcaactttcgacccggatgcgctggtggagattgtcggtggatttcgtcgtgggaaacctcagggtcacgacgttgatctgcttatcacatctccgggagctgagaaagagcaagaagaccagctcctgcagaaagtgaccaatctgtggaagaaacaagggttgttgctgtacggtcgtctggaatggagtcagtttgaagatgggaaactcccatccggtaagtgggatgccctggaccaccacgcgaaatgctttctgatcctcaaactttatgatcataaagtggacaaaagcaaatgggaaatgccgacgggttcgaacatgggcgaggccaaaccgtggaaagcaattcgcgtagatctggttcgttgcccctacggcggttttgcgtttgcgttgttgggttggaccggaagccgcatgttccgccgtgatctgcgctggtacgccactgacgagaagaacatgatgctggacaatcatgcgctgtatgacctgaccaagaaaatctttctcaaagctaaatcggaagaggaaattttcgcacatctggggcttgaatacctggaaccgttcgaacgtaacgca

SEQ ID NO: 2474 - protein, 529 aa, synthetic construct
  REGION 1..529: note = Variant of terminal deoxynucleotidyltransferase
MHHHHHHGGSGSHGIRTIDSDFGKKRQKKMDNHDSSAIYEIKFHEFVLFILEEKMGATRRTFLTDLARKKGFRVENELSDSVTHIVAENNSRSEVLAWLKEHKMEKTKQFELLDISWLIESMKVGKPVDTKGKYQLAESGEMSANPDPTEGRENELPPTMKTVSPYACQRRTTLNNHNQRFTDALEILAENYEFKRNDDTALEFRRAISVLKSLPFEVRSLKDTEGLPWIGDEVKGIMEEIIEVGESLEVQAVLNDEWYQSFKRFKSVFGVGVKTADKWYRMGLRTLEDVRSSKTLKLTPMQKAGLCYYEDLARGVTKAEADAISLLVQDAVATFDPDALVEIVGGFRRGKPQGHDVDLLITSPGAEKEQEDQLLQKVTNLWKKQGLLLYGRLEWSQFEDGKLPSGKWDALDHHAKCFLILKLYDHKVDKSKWEMPTGSNMGEAKPWKAIRVDLVRCPYGGFAFALLGWTGSRMFRRDLRWYATDEKNMMLDNHALYDLTKKIFLKAKSEEEIFAHLGLEYLEPFERNA

SEQ ID NO: 2475 - DNA, 1587 bp, synthetic construct
  misc_feature 1..1587: note = Variant of terminal deoxynucleotidyltransferase
  source 1..1587: mol_type = other DNA
atgcaccatcatcatcatcatggcggtagcggcagccacggcattcgtaccatcgattcggacttcgggaagaaacgccagaaaaaaatggataaccacgatagttccgccatctatgaaatcaaatttcacgagtttgtgctgttcattctcgaagaaaaaatgggtgcgacgcgtcgtacttttctgacagatttagcccgcaagaaagggttccgcgtcgagaatgaactgtcagacagcgttacccacatcgtggcagaaaataattcacgctctgaagtattggcttggctgaaagaacacaagatggagaagaccaagcaattcgaactgctggatattagctggcttatcgaaagcatgaaagttggtaaaccggtggacaccaaggggaaataccagttggcggaatcgggtgagatgagtgcgaacccagatccgacagagggtcgtgaaaacgagctgcctcctactatgaagaccgtttctccgtatgcgtgtcaacgccgcaccaccctgaacaaccataatcaacgttttacggacgcactggaaattcttgcggaaaattacgagttcaaacgcaacgatgatactgcgctggaatttcgtcgtgctatctccgtgctgaaaagccttccgtttgaggtacgtagcctgaaagacacggaaggattgccctggatcggtgatgaagtcaaagggattatggaagaaatcatcgaggtcggtgaatcgctggaagtgcaggccgtgctcaatgatgagtggtatcaaagcttcaaacgctttaagagtgtctttggagtgggggtgaagacagcagacaagtggtaccgtatgggtctgcgcacgctcgaggatgttcgttccagcaagaccctgaagttgaccccgatgcagaaagcgggtctgtgctattatgaagatcttgctcgcggcgttacgaaagccgaagctgacgcgatttctctgctggttcaggatgcagtcgcaactttcgacccggatgcgctggtggagattgtcggtggatttcgtcgtgggaaacctcagggtcacgacgttgatctgcttatcacatctccgggagctgagaaagagcaagaagaccagctcctgcagaaagtgaccaatctgtggaagaaacaagggttgttgctgtacggtcgtctggaatggagtcagtttgaagatgggaaactcccatccggtaaggctgatgccctggaccaccacgcgaaatgctttctgatcctcaaactttatgatcataaagtggacaaaagcaaatgggaaatgccgacgggttcgaacatgggcgaggccaaaccgtggaaagcaattcgcgtagatctggttcgttgcccctacggcggttttgcgtttgcgttgttgggttggaccggaagccgcatgttccgccgtgatctgcgctggtacgccactgacgagaagaacatgatgctggaccagcatgcgctgtatgacctgaccaagaaaatctttctcaaagctaaatcggaagaggaaattttcgcacatctggggcttgaatacctggaaccgttcgaacgtaacgca

SEQ ID NO: 2476 - protein, 529 aa, synthetic construct
  REGION 1..529: note = Variant of terminal deoxynucleotidyltransferase
MHHHHHHGGSGSHGIRTIDSDFGKKRQKKMDNHDSSAIYEIKFHEFVLFILEEKMGATRRTFLTDLARKKGFRVENELSDSVTHIVAENNSRSEVLAWLKEHKMEKTKQFELLDISWLIESMKVGKPVDTKGKYQLAESGEMSANPDPTEGRENELPPTMKTVSPYACQRRTTLNNHNQRFTDALEILAENYEFKRNDDTALEFRRAISVLKSLPFEVRSLKDTEGLPWIGDEVKGIMEEIIEVGESLEVQAVLNDEWYQSFKRFKSVFGVGVKTADKWYRMGLRTLEDVRSSKTLKLTPMQKAGLCYYEDLARGVTKAEADAISLLVQDAVATFDPDALVEIVGGFRRGKPQGHDVDLLITSPGAEKEQEDQLLQKVTNLWKKQGLLLYGRLEWSQFEDGKLPSGKADALDHHAKCFLILKLYDHKVDKSKWEMPTGSNMGEAKPWKAIRVDLVRCPYGGFAFALLGWTGSRMFRRDLRWYATDEKNMMLDQHALYDLTKKIFLKAKSEEEIFAHLGLEYLEPFERNA

SEQ ID NO: 2477 - DNA, 1587 bp, synthetic construct
  misc_feature 1..1587: note = Variant of terminal deoxynucleotidyltransferase
  source 1..1587: mol_type = other DNA
atgcaccatcatcatcatcatggcggtagcggcagccacggcattcgtaccatcgattcggacttcgggaagaaacgccagaaaaaaatggataaccacgatagttccgccatctatgaaatcaaatttcacgagtttgtgctgttcattctcgaagaaaaaatgggtgcgacgcgtcgtacttttctgacagatttagcccgcaagaaagggttccgcgtcgagaatgaactgtcagacagcgttacccacatcgtggcagaaaataattcacgctctgaagtattggcttggctgaaagaacacaagatggagaagaccaagcaattcgaactgctggatattagctggcttatcgaaagcatgaaagttggtaaaccggtggacaccaaggggaaataccagttggcggaatcgggtgagatgagtgcgaacccagatccgacagagggtcgtgaaaacgagctgcctcctactatgaagaccgtttctccgtatgcgtgtcaacgccgcaccaccctgaacaaccataatcaacgttttacggacgcactggaaattcttgcggaaaattacgagttcaaacgcaacgatgatactgcgctggaatttcgtcgtgctatctccgtgctgaaaagccttccgtttgaggtacgtagcctgaaagacacggaaggattgccctggatcggtgatgaagtcaaagggattatggaagaaatcatcgaggtcggtgaatcgctggaagtgcaggccgtgctcaatgatgagtggtatcaaagcttcaaacgctttaagagtgtctttggagtgggggtgaagacagcagacaagtggtaccgtatgggtctgcgcacgctcgaggatgttcgttccagcaagaccctgaagttgaccccgatgcagaaagcgggtctgtgctattatgaagatcttgctcgcggcgttacgaaagccgaagctgacgcgatttctctgctggttcaggatgcagtcgcaactttcgacccggatgcgctggtggagattgtcggtggatttcgtcgtgggaaacctcagggtcacgacgttgatctgcttatcacatctccgggagctgagaaagagcaagaagaccagctcctgcagaaagtgaccaatctgtggaagaaacaagggttgttgctgtacggtcgtctggaatggagtcagtttgaagatgggaaactcccatccggtaaggctgatgccctggaccaccacgcgaaatgctttctgatcctcaaactttatgatcataaagtggacaaaagcaaatgggaaatgccgacgggttcgaacatgggcgaggccaaaccgtggaaagcaattcgcgtagatctggttcgttgcccctacggcggttttgcgtttgcgttgttgggttggaccggaagccgcatgttccgccgtgatctgcgcagttacgccactgacgagaagaacatgatgctggacaatcatgcgctgtatgacctgaccaagaaaatctttctcaaagctaaatcggaagaggaaattttcgcacatctggggcttgaatacctggaaccgttcgaacgtaacgca

SEQ ID NO: 2478 - protein, 529 aa, synthetic construct
  REGION 1..529: note = Variant of terminal deoxynucleotidyltransferase
MHHHHHHGGSGSHGIRTIDSDFGKKRQKKMDNHDSSAIYEIKFHEFVLFILEEKMGATRRTFLTDLARKKGFRVENELSDSVTHIVAENNSRSEVLAWLKEHKMEKTKQFELLDISWLIESMKVGKPVDTKGKYQLAESGEMSANPDPTEGRENELPPTMKTVSPYACQRRTTLNNHNQRFTDALEILAENYEFKRNDDTALEFRRAISVLKSLPFEVRSLKDTEGLPWIGDEVKGIMEEIIEVGESLEVQAVLNDEWYQSFKRFKSVFGVGVKTADKWYRMGLRTLEDVRSSKTLKLTPMQKAGLCYYEDLARGVTKAEADAISLLVQDAVATFDPDALVEIVGGFRRGKPQGHDVDLLITSPGAEKEQEDQLLQKVTNLWKKQGLLLYGRLEWSQFEDGKLPSGKADALDHHAKCFLILKLYDHKVDKSKWEMPTGSNMGEAKPWKAIRVDLVRCPYGGFAFALLGWTGSRMFRRDLRSYATDEKNMMLDNHALYDLTKKIFLKAKSEEEIFAHLGLEYLEPFERNA

SEQ ID NO: 2479 - DNA, 1587 bp, synthetic construct
  misc_feature 1..1587: note = Variant of terminal deoxynucleotidyltransferase
  source 1..1587: mol_type = other DNA
atgcaccatcatcatcatcatggcggtagcggcagccacggcattcgtaccatcgattcggacttcgggaagaaacgccagaaaaaaatggataaccacgatagttccgccatctatgaaatcaaatttcacgagtttgtgctgttcattctcgaagaaaaaatgggtgcgacgcgtcgtacttttctgacagatttagcccgcaagaaagggttccgcgtcgagaatgaactgtcagacagcgttacccacatcgtggcagaaaataattcacgctctgaagtattggcttggctgaaagaacacaagatggagaagaccaagcaattcgaactgctggatattagctggcttatcgaaagcatgaaagttggtaaaccggtggacaccaaggggaaataccagttggcggaatcgggtgagatgagtgcgaacccagatccgacagagggtcgtgaaaacgagctgcctcctactatgaagaccgtttctccgtatgcgtgtcaacgccgcaccaccctgaacaaccataatcaacgttttacggacgcactggaaattcttgcggaaaattacgagttcaaacgcaacgatgatactgcgctggaatttcgtcgtgctatctccgtgctgaaaagccttccgtttgaggtacgtagcctgaaagacacggaaggattgccctggatcggtgatgaagtcaaagggattatggaagaaatcatcgaggtcggtgaatcgctggaagtgcaggccgtgctcaatgatgagtggtatcaaagcttcaaacgctttaagagtgtctttggagtgggggtgaagacagcagacaagtggtaccgtatgggtctgcgcacgctcgaggatgttcgttccagcaagaccctgaagttgaccccgatgcagaaagcgggtctgtgctattatgaagatcttgctcgcggcgttacgaaagccgaagctgacgcgatttctctgctggttcaggatgcagtcgcaactttcgacccggatgcgctggtggagattgtcggtggatttcgtcgtgggaaacctcagggtcacgacgttgatctgcttatcacatctccgggagctgagaaagagcaagaagaccagctcctgcagaaagtgaccaatctgtggaagaaacaagggttgttgctgtacggtcgtctggaatggagtcagtttgaagatgggaaactcccatccggtaaggctgatgccctggaccaccacgcgaaatgctttctgatcctcaaactttatgatcataaagtggacaaaagcaaatgggaaatgccgacgggttcgaacatgggcgaggccaaaccgtggaaagcaattcgcgtagatctggttcgttgcccctacggcggttttgcgtttgcgttgttgggttttaccggaagccgcatgttccgccgtgatctgcgctggtacgccactgacgagaagaacatgatgctggacaatcatgcgctgtatgacctgaccaagaaaatctttctcaaagctaaatcggaagaggaaattttcgcacatctggggctcgaatacctggaaccgttcgaacgtaacgca

SEQ ID NO: 2480 - protein, 529 aa, synthetic construct
  REGION 1..529: note = Variant of terminal deoxynucleotidyltransferase
MHHHHHHGGSGSHGIRTIDSDFGKKRQKKMDNHDSSAIYEIKFHEFVLFILEEKMGATRRTFLTDLARKKGFRVENELSDSVTHIVAENNSRSEVLAWLKEHKMEKTKQFELLDISWLIESMKVGKPVDTKGKYQLAESGEMSANPDPTEGRENELPPTMKTVSPYACQRRTTLNNHNQRFTDALEILAENYEFKRNDDTALEFRRAISVLKSLPFEVRSLKDTEGLPWIGDEVKGIMEEIIEVGESLEVQAVLNDEWYQSFKRFKSVFGVGVKTADKWYRMGLRTLEDVRSSKTLKLTPMQKAGLCYYEDLARGVTKAEADAISLLVQDAVATFDPDALVEIVGGFRRGKPQGHDVDLLITSPGAEKEQEDQLLQKVTNLWKKQGLLLYGRLEWSQFEDGKLPSGKADALDHHAKCFLILKLYDHKVDKSKWEMPTGSNMGEAKPWKAIRVDLVRCPYGGFAFALLGFTGSRMFRRDLRWYATDEKNMMLDNHALYDLTKKIFLKAKSEEEIFAHLGLEYLEPFERNA

SEQ ID NO: 2481 - DNA, 1587 bp, synthetic construct
  misc_feature 1..1587: note = Variant of terminal deoxynucleotidyltransferase
  source 1..1587: mol_type = other DNA
atgcaccatcatcatcatcatggcggtagcggcagccacggcattcgtaccatcgattcggacttcgggaagaaacgccagaaaaaaatggataaccacgatagttccgccatctatgaaatcaaatttcacgagtttgtgctgttcattctcgaagaaaaaatgggtgcgacgcgtcgtacttttctgacagatttagcccgcaagaaagggttccgcgtcgagaatgaactgtcagacagcgttacccacatcgtggcagaaaataattcacgctctgaagtattggcttggctgaaagaacacaagatggagaagaccaagcaattcgaactgctggatattagctggcttatcgaaagcatgaaagttggtaaaccggtggacaccaaggggaaataccagttggcggaatcgggtgagatgagtgcgaacccagatccgacagagggtcgtgaaaacgagctgcctcctactatgaagaccgtttctccgtatgcgtgtcaacgccgcaccaccctgaacaaccataatcaacgttttacggacgcactggaaattcttgcggaaaattacgagttcaaatataacgatgatactgcgctggaatttcgtcgtgctatctccgtgctgaaaagccttccgtttgaggtacgtagcctgaaagacacggaaggattgccctggatcggtgatgaagtcaaagggattatggaagaaatcatcgaggtcggtgaatcgctggaagtgcaggccgtgctcaatgatgagtggtatcaaagcttcaaacgctttaagagtgtctttggagtgggggtgaagacagcagacaagtggtaccgtatgggtctgcgcacgctcgaggatgttcgttccagcaagaccctgaagttgaccccgatgcagaaagcgggtctgtgctattatgaagatcttgctcgcggcgttacgaaagccgaagctgacgcgatttctctgctggttcaggatgcagtcgcaactttcgacccggatgcgctggtggagattgtcggtggatttcgtcgtgggaaacctcagggtcacgacgttgatctgcttatcacatctccgggagctgagaaagagcaagaagaccagctcctgcagaaagtgaccaatctgtggaagaaacaagggttgttgctgtacggtcgtctggaatggagtcagtttgaagatgggaaactcccatccggtaaggctgatgccctggaccaccacgcgaaatgctttctgatcctcaaactttatgatcataaagtggacaaaagcaaatgggaaatgccgacgggttcgaacatgggcgaggccaaaccgtggaaagcaattcgcgtagatctggttcgttgcccctacggcggttttgcgtttgcgttgttgggttggaccggaagccgcatgttccgccgtgatctgcgctggtacgccactgacgagaagaacatgatgctggacaatcatgcgctgtatgacctgaccaagaaaatctttctcaaagctaaatcggaagaggaaattttcgcacatctggggcttgaatacctggaaccgttcgaacgtaacgca

SEQ ID NO: 2482 - protein, 529 aa, synthetic construct
  REGION 1..529: note = Variant of terminal deoxynucleotidyltransferase
MHHHHHHGGSGSHGIRTIDSDFGKKRQKKMDNHDSSAIYEIKFHEFVLFILEEKMGATRRTFLTDLARKKGFRVENELSDSVTHIVAENNSRSEVLAWLKEHKMEKTKQFELLDISWLIESMKVGKPVDTKGKYQLAESGEMSANPDPTEGRENELPPTMKTVSPYACQRRTTLNNHNQRFTDALEILAENYEFKYNDDTALEFRRAISVLKSLPFEVRSLKDTEGLPWIGDEVKGIMEEIIEVGESLEVQAVLNDEWYQSFKRFKSVFGVGVKTADKWYRMGLRTLEDVRSSKTLKLTPMQKAGLCYYEDLARGVTKAEADAISLLVQDAVATFDPDALVEIVGGFRRGKPQGHDVDLLITSPGAEKEQEDQLLQKVTNLWKKQGLLLYGRLEWSQFEDGKLPSGKADALDHHAKCFLILKLYDHKVDKSKWEMPTGSNMGEAKPWKAIRVDLVRCPYGGFAFALLGWTGSRMFRRDLRWYATDEKNMMLDNHALYDLTKKIFLKAKSEEEIFAHLGLEYLEPFERNA

SEQ ID NO: 2483 - DNA, 1587 bp, synthetic construct
  misc_feature 1..1587: note = Variant of terminal deoxynucleotidyltransferase
  source 1..1587: mol_type = other DNA
atgcaccatcatcatcatcatggcggtagcggcagccacggcattcgtaccatcgattcggacttcgggaagaaacgccagaaaaaaatggataaccacgatagttccgccatctatgaaatcaaatttcacgagtttgtgctgttcattctcgaagaaaaaatgggtgcgacgcgtcgtacttttctgacagatttagcccgcaagaaagggttccgcgtcgagaatgaactgtcagacagcgttacccacatcgtggcagaaaataattcacgctctgaagtattggcttggctgaaagaacacaagatggagaagaccaagcaattcgaactgctggatattagctggcttatcgaaagcatgaaagttggtaaaccggtggacaccaaggggaaataccagttggcggaatcgggtgagatgagtgcgaacccagatccgacagagggtcgtgaaaacgagctgcctcctactatgaagaccgtttctccgtatgcgtgtcaacgccgcaccaccctgaacaaccataatcaacgttttacggacgcactggaaattcttgcggaaaattacgagttcaaacgcaacgatgatactgcgctggaatttcgtcgtgctatctccgtgctgaaaagccttccgtttgaggtacgtagcctgaaagacacggaaggattgccctggatcggtgatgaagtcaaagggattatggaagaaatcatcgaggtcggtgaatcgctggaagtgcaggccgtgctcaatgatgagtggtatcaaagcttcaaacgctttaagagtgtctttggagtgggggtgaagacagcagacaagtggtaccgtatgggtctgcgcacgctcgaggatgttcgttccagcaagaccctgaagttgaccccgatgcagaaagcgggtctgtgctattatgaagatcttgctatgggcgttacgaaagccgaagctgacgcgatttctctgctggttcaggatgcagtcgcaactttcgacccggatgcgctggtggagattgtcggtggatttcgtcgtgggaaacctcagggtcacgacgttgatctgcttatcacatctccgggagctgagaaagagcaagaagaccagctcctgcagaaagtgaccaatctgtggaagaaacaagggttgttgctgtacggtcgtctggaatggagtcagtttgaagatgggaaactcccatccggtaaggctgatgccctggaccaccacgcgaaatgctttctgatcctcaaactttatgatcataaagtggacaaaagcaaatgggaaatgccgacgggttcgaacatgggcgaggccaaaccgtggaaagcaattcgcgtagatctggttcgttgcccctacggcggttttgcgtttgcgttgttgggttggaccggaagccgcatgttccgccgtgatctgcgctggtacgccactgacgagaagaacatgatgctggacaatcatgcgctgtatgacctgaccaagaaaatctttctcaaagctaaatcggaagaggaaattttcgcacatctggggcttgaatacctggaaccgttcgaacgtaacgca

SEQ ID NO: 2484 - protein, 529 aa, synthetic construct
  REGION 1..529: note = Variant of terminal deoxynucleotidyltransferase
MHHHHHHGGSGSHGIRTIDSDFGKKRQKKMDNHDSSAIYEIKFHEFVLFILEEKMGATRRTFLTDLARKKGFRVENELSDSVTHIVAENNSRSEVLAWLKEHKMEKTKQFELLDISWLIESMKVGKPVDTKGKYQLAESGEMSANPDPTEGRENELPPTMKTVSPYACQRRTTLNNHNQRFTDALEILAENYEFKRNDDTALEFRRAISVLKSLPFEVRSLKDTEGLPWIGDEVKGIMEEIIEVGESLEVQAVLNDEWYQSFKRFKSVFGVGVKTADKWYRMGLRTLEDVRSSKTLKLTPMQKAGLCYYEDLAMGVTKAEADAISLLVQDAVATFDPDALVEIVGGFRRGKPQGHDVDLLITSPGAEKEQEDQLLQKVTNLWKKQGLLLYGRLEWSQFEDGKLPSGKADALDHHAKCFLILKLYDHKVDKSKWEMPTGSNMGEAKPWKAIRVDLVRCPYGGFAFALLGWTGSRMFRRDLRWYATDEKNMMLDNHALYDLTKKIFLKAKSEEEIFAHLGLEYLEPFERNA

SEQ ID NO: 2485 - DNA, 1587 bp, synthetic construct
  misc_feature 1..1587: note = Variant of terminal deoxynucleotidyltransferase
  source 1..1587: mol_type = other DNA
atgcaccatcatcatcatcatggcggtagcggcagccacggcattcgtaccatcgattcggacttcgggaagaaacgccagaaaaaaatggataaccacgatagttccgccatctatgaaatcaaatttcacgagtttgtgctgttcattctcgaagaaaaaatgggtgcgacgcgtcgtacttttctgacagatttagcccgcaagaaagggttccgcgtcgagaatgaactgtcagacagcgttacccacatcgtggcagaaaataattcacgctctgaagtattggcttggctgaaagaacacaagatggagaagaccaagcaattcgaactgctggatattagctggcttatcgaaagcatgaaagttggtaaaccggtggacaccaaggggaaataccagttggcggaatcgggtgagatgagtgcgaacccagatccgacagagggtcgtgaaaacgagctgcctcctactatgaagaccgtttctccgtatgcgtgtcaacgccgcaccaccctgaacaaccataatcaacgttttacggacgcactggaaattcttgcggaaaattacgagttcaaacgcaacgatgatactgcgctggaatttcgtcgtgctatctccgtgctgaaaagccttccgtttgaggtacgtagcctgaaagacacggaaggattgccctggatcggtgatgaagtcaaagggattatggaagaaatcatcgaggtcggtgaatcgctggaagtgcaggccgtgctcaatgatgagtggtatcaaagcttcaaacgctttaagagtgtctttggagtgggggtgaagacagcagacaagtggtaccgtatgggtctgcgcacgctcgaggatgttcgttccagcaagaccctgaagttgaccccgatgcagaaagcgggtctgtgctattatgaagatcttgctgctggcgttacgaaagccgaagctgacgcgatttctctgctggttcaggatgcagtcgcaactttcgacccggatgcgctggtggagattgtcggtggatttcgtcgtgggaaacctcagggtcacgacgttgatctgcttatcacatctccgggagctgagaaagagcaagaagaccagctcctgcagaaagtgaccaatctgtggaagaaacaagggttgttgctgtacggtcgtctggaatggagtcagtttgaagatgggaaactcccatccggtaaggctgatgccctggaccaccacgcgaaatgctttctgatcctcaaactttatgatcataaagtggacaaaagcaaatgggaaatgccgacgggttcgaacatgggcgaggccaaaccgtggaaagcaattcgcgtagatctggttcgttgcccctacggcggttttgcgtttgcgttgttgggttggaccggaagccgcatgttccgccgtgatctgcgctggtacgccactgacgagaagaacatgatgctggacaatcatgcgctgtatgacctgaccaagaaaatctttctcaaagctaaatcggaagaggaaattttcgcacatctggggcttgaatacctggaaccgttcgaacgtaacgca

SEQ ID NO: 2486 - protein, 529 aa, synthetic construct
  REGION 1..529: note = Variant of terminal deoxynucleotidyltransferase
MHHHHHHGGSGSHGIRTIDSDFGKKRQKKMDNHDSSAIYEIKFHEFVLFILEEKMGATRRTFLTDLARKKGFRVENELSDSVTHIVAENNSRSEVLAWLKEHKMEKTKQFELLDISWLIESMKVGKPVDTKGKYQLAESGEMSANPDPTEGRENELPPTMKTVSPYACQRRTTLNNHNQRFTDALEILAENYEFKRNDDTALEFRRAISVLKSLPFEVRSLKDTEGLPWIGDEVKGIMEEIIEVGESLEVQAVLNDEWYQSFKRFKSVFGVGVKTADKWYRMGLRTLEDVRSSKTLKLTPMQKAGLCYYEDLAAGVTKAEADAISLLVQDAVATFDPDALVEIVGGFRRGKPQGHDVDLLITSPGAEKEQEDQLLQKVTNLWKKQGLLLYGRLEWSQFEDGKLPSGKADALDHHAKCFLILKLYDHKVDKSKWEMPTGSNMGEAKPWKAIRVDLVRCPYGGFAFALLGWTGSRMFRRDLRWYATDEKNMMLDNHALYDLTKKIFLKAKSEEEIFAHLGLEYLEPFERNA

SEQ ID NO: 2487 - DNA, 1587 bp, synthetic construct
  misc_feature 1..1587: note = Variant of terminal deoxynucleotidyltransferase
  source 1..1587: mol_type = other DNA
atgcaccatcatcatcatcatggcggtagcggcagccacggcattcgtaccatcgattcggacttcgggaagaaacgccagaaaaaaatggataaccacgatagttccgccatctatgaaatcaaatttcacgagtttgtgctgttcattctcgaagaaaaaatgggtgcgacgcgtcgtacttttctgacagatttagcccgcaagaaagggttccgcgtcgagaatgaactgtcagacagcgttacccacatcgtggcagaaaataattcacgctctgaagtattggcttggctgaaagaacacaagatggagaagaccaagcaattcgaactgctggatattagctggcttatcgaaagcatgaaagttggtaaaccggtggacaccaaggggaaataccagttggcggaatcgggtgagatgagtgcgaacccagatccgacagagggtcgtgaaaacgagctgcctcctactatgaagaccgtttctccgtatgcgtgtcaacgccgcaccaccctgaacaaccataatcaacgttttacggacgcactggaaattcttgcggaaaattacgagttcaaacgcaacgatgatactgcgctggaatttcgtcgtgctatctccgtgctgaaaagccttccgtttgaggtacgtagcctgaaagacacggaaggattgccctggatcggtgatgaagtcaaagggattatggaagaaatcatcgaggtcggtgaatcgctggaagtgcaggccgtgctcaatgatgagtggtatcaaagcttcaaacgctttaagagtgtctttggagtgggggtgaagacagcagacaagtggtaccgtatgggtctgcgcacgctcgaggatgttcgttccagcaagaccctgaagttgaccccgatgcagaaagcgggtctgtgctattatgaagatcttgctcgcggcgttacgaaagccgaagctgacgcgatttctctgctggttcaggatgcagtcgcaactttcgacccggatgcgctggtggagattgtcggtggatttcgtcgtgggaaacctcagggtcacgacgttgatctgcttatcacatctccgggagctgagaaagagcaagaagaccagctcctgcagaaagtgaccaatctgtggaagaaacaagggttgttgctgtacggtcgtctggaatggagtcagtttgaagatgggaaactcccatccggtaagttggatgccctggaccaccacgcgaaatgctttctgatcctcaaactttatgatcataaagtggacaaaagcaaatgggaaatgccgacgggttcgaacatgggcgaggccaaaccgtggaaagcaattcgcgtagatctggttcgttgcccctacggcggttttgcgtttgcgttgttgggttggaccggaagccgcatgttccgccgtgatctgcgctggtacgccactgacgagaagaacatgatgctggacaatcatgcgctgtatgacctgaccaagaaaatctttctcaaagctaaatcggaagaggaaattttcgcacatctggggcttgaatacctggaaccgttcgaacgtaacgca

SEQ ID NO: 2488 - protein, 529 aa, synthetic construct
  REGION 1..529: note = Variant of terminal deoxynucleotidyltransferase
MHHHHHHGGSGSHGIRTIDSDFGKKRQKKMDNHDSSAIYEIKFHEFVLFILEEKMGATRRTFLTDLARKKGFRVENELSDSVTHIVAENNSRSEVLAWLKEHKMEKTKQFELLDISWLIESMKVGKPVDTKGKYQLAESGEMSANPDPTEGRENELPPTMKTVSPYACQRRTTLNNHNQRFTDALEILAENYEFKRNDDTALEFRRAISVLKSLPFEVRSLKDTEGLPWIGDEVKGIMEEIIEVGESLEVQAVLNDEWYQSFKRFKSVFGVGVKTADKWYRMGLRTLEDVRSSKTLKLTPMQKAGLCYYEDLARGVTKAEADAISLLVQDAVATFDPDALVEIVGGFRRGKPQGHDVDLLITSPGAEKEQEDQLLQKVTNLWKKQGLLLYGRLEWSQFEDGKLPSGKLDALDHHAKCFLILKLYDHKVDKSKWEMPTGSNMGEAKPWKAIRVDLVRCPYGGFAFALLGWTGSRMFRRDLRWYATDEKNMMLDNHALYDLTKKIFLKAKSEEEIFAHLGLEYLEPFERNA

SEQ ID NO: 2489 - DNA, 1587 bp, synthetic construct
  misc_feature 1..1587: note = Variant of terminal deoxynucleotidyltransferase
  source 1..1587: mol_type = other DNA
atgcaccatcatcatcatcatggcggtagcggcagccacggcattcgtaccatcgattcggacttcgggaagaaacgccagaaaaaaatggataaccacgatagttccgccatctatgaaatcaaatttcacgagtttgtgctgttcattctcgaagaaaaaatgggtgcgacgcgtcgtacttttctgacagatttagcccgcaagaaagggttccgcgtcgagaatgaactgtcagacagcgttacccacatcgtggcagaaaataattcacgctctgaagtattggcttggctgaaagaacacaagatggagaagaccaagcaattcgaactgctggatattagctggcttatcgaaagcatgaaagttggtaaaccggtggacaccaaggggaaataccagttggcggaatcgggtgagatgagtgcgaacccagatccgacagagggtcgtgaaaacgagctgcctcctactatgaagaccgtttctccgtatgcgtgtcaacgccgcaccaccctgaacaaccataatcaacgttttacggacgcactggaaattcttgcggaaaattacgagttcaaacgcaacgatgatactgcgctggaatttcgtcgtgctatctccgtgctgaaaagccttccgtttgaggtacgtagcctgaaagacacggaaggattgccctggatcggtgatgaagtcaaagggattatggaagaaatcatcgaggtcggtgaatcgctggaagtgcaggccgtgctcaatgatgagtggtatcaaagcgtgaaacgctttaagagtgtctttggagtgggggtgaagacagcagacaagtggtaccgtatgggtctgcgcacgctcgaggatgttcgttccagcaagaccctgaagttgaccccgatgcagaaagcgggtctgtgctattatgaagatcttgctcgcggcgttacgaaagccgaagctgacgcgatttctctgctggttcaggatgcagtcgcaactttcgacccggatgcgctggtggagattgtcggtggatttcgtcgtgggaaacctcagggtcacgacgttgatctgcttatcacatctccgggagctgagaaagagcaagaagaccagctcctgcagaaagtgaccaatctgtggaagaaacaagggttgttgctgtacggtcgtctggaatggagtcagtttgaagatgggaaactcccatccggtaaggctgatgccctggaccaccacgcgaaatgctttctgatcctcaaactttatgatcataaagtggacaaaagcaaatgggaaatgccgacgggttcgaacatgggcgaggccaaaccgtggaaagcaattcgcgtagatctggttcgttgcccctacggcggttttgcgtttgcgttgttgggttggaccggaagccgcatgttccgccgtgatctgcgctggtacgccactgacgagaagaacatgatgctggacaatcatgcgctgtatgacctgaccaagaaaatctttctcaaagctaaatcggaagaggaaattttcgcacatctggggcttgaatacctggaaccgttcgaacgtaacgca

SEQ ID NO: 2490 - protein, 529 aa, synthetic construct
  REGION 1..529: note = Variant of terminal deoxynucleotidyltransferase
MHHHHHHGGSGSHGIRTIDSDFGKKRQKKMDNHDSSAIYEIKFHEFVLFILEEKMGATRRTFLTDLARKKGFRVENELSDSVTHIVAENNSRSEVLAWLKEHKMEKTKQFELLDISWLIESMKVGKPVDTKGKYQLAESGEMSANPDPTEGRENELPPTMKTVSPYACQRRTTLNNHNQRFTDALEILAENYEFKRNDDTALEFRRAISVLKSLPFEVRSLKDTEGLPWIGDEVKGIMEEIIEVGESLEVQAVLNDEWYQSVKRFKSVFGVGVKTADKWYRMGLRTLEDVRSSKTLKLTPMQKAGLCYYEDLARGVTKAEADAISLLVQDAVATFDPDALVEIVGGFRRGKPQGHDVDLLITSPGAEKEQEDQLLQKVTNLWKKQGLLLYGRLEWSQFEDGKLPSGKADALDHHAKCFLILKLYDHKVDKSKWEMPTGSNMGEAKPWKAIRVDLVRCPYGGFAFALLGWTGSRMFRRDLRWYATDEKNMMLDNHALYDLTKKIFLKAKSEEEIFAHLGLEYLEPFERNA

SEQ ID NO: 2491 - DNA, 1587 bp, synthetic construct
  misc_feature 1..1587: note = Variant of terminal deoxynucleotidyltransferase
  source 1..1587: mol_type = other DNA
atgcaccatcatcatcatcatggcggtagcggcagccacggcattcgtaccatcgattcggacttcgggaagaaacgccagaaaaaaatggataaccacgatagttccgccatctatgaaatcaaatttcacgagtttgtgctgttcattctcgaagaaaaaatgggtgcgacgcgtcgtacttttctgacagatttagcccgcaagaaagggttccgcgtcgagaatgaactgtcagacagcgttacccacatcgtggcagaaaataattcacgctctgaagtattggcttggctgaaagaacacaagatggagaagaccaagcaattcgaactgctggatattagctggcttatcgaaagcatgaaagttggtaaaccggtggacaccaaggggaaataccagttggcggaatcgggtgagatgagtgcgaacccagatccgacagagggtcgtgaaaacgagctgcctcctactatgaagaccgtttctccgtatgcgtgtcaacgccgcaccaccctgaacaaccataatcaacgttttacggacgcactggaaattcttgaggaaaattacgagttcaaacgcaacgatgatactgcgctggaatttcgtcgtgctatctccgtgctgaaaagccttccgtttgaggtacgtagcctgaaagacacggaaggattgccctggatcggtgatgaagtcaaagggattatggaagaaatcatcgaggtcggtgaatcgctggaagtgcaggccgtgctcaatgatgagtggtatcaaagcttcaaacgctttaagagtgtctttggagtgggggtgaagacagcagacaagtggtaccgtatgggtctgcgcacgctcgaggatgttcgttccagcaagaccctgaagttgaccccgatgcagaaagcgggtctgtgctattatgaagatcttgctcgcggcgttacgaaagccgaagctgacgcgatttctctgctggttcaggatgcagtcgcaactttcgacccggatgcgctggtggagattgtcggtggatttcgtcgtgggaaacctcagggtcacgacgttgatctgcttatcacatctccgggagctgagaaagagcaagaagaccagctcctgcagaaagtgaccaatctgtggaagaaacaagggttgttgctgtacggtcgtctggaatggagtcagtttgaagatgggaaactcccatccggtaaggctgatgccctggaccaccacgcgaaatgctttctgatcctcaaactttatgatcataaagtggacaaaagcaaatgggaaatgccgacgggttcgaacatgggcgaggccaaaccgtggaaagcaattcgcgtagatctggttcgttgcccctacggcggttttgcgtttgcgttgttgggttggaccggaagccgcatgttccgccgtgatctgcgctggtacgccactgacgagaagaacatgatgctggacaatcatgcgctgtatgacctgaccaagaaaatctttctcaaagctaaatcggaagaggaaattttcgcacatctggggcttgaatacctggaaccgttcgaacgtaacgca

SEQ ID NO: 2492 - protein, 529 aa, synthetic construct
  REGION 1..529: note = Variant of terminal deoxynucleotidyltransferase
MHHHHHHGGSGSHGIRTIDSDFGKKRQKKMDNHDSSAIYEIKFHEFVLFILEEKMGATRRTFLTDLARKKGFRVENELSDSVTHIVAENNSRSEVLAWLKEHKMEKTKQFELLDISWLIESMKVGKPVDTKGKYQLAESGEMSANPDPTEGRENELPPTMKTVSPYACQRRTTLNNHNQRFTDALEILEENYEFKRNDDTALEFRRAISVLKSLPFEVRSLKDTEGLPWIGDEVKGIMEEIIEVGESLEVQAVLNDEWYQSFKRFKSVFGVGVKTADKWYRMGLRTLEDVRSSKTLKLTPMQKAGLCYYEDLARGVTKAEADAISLLVQDAVATFDPDALVEIVGGFRRGKPQGHDVDLLITSPGAEKEQEDQLLQKVTNLWKKQGLLLYGRLEWSQFEDGKLPSGKADALDHHAKCFLILKLYDHKVDKSKWEMPTGSNMGEAKPWKAIRVDLVRCPYGGFAFALLGWTGSRMFRRDLRWYATDEKNMMLDNHALYDLTKKIFLKAKSEEEIFAHLGLEYLEPFERNA

SEQ ID NO: 2493 - DNA, 1587 bp, synthetic construct
  misc_feature 1..1587: note = Variant of terminal deoxynucleotidyltransferase
  source 1..1587: mol_type = other DNA
atgcaccatcatcatcatcatggcggtagcggcagccacggcattcgtaccatcgattcggacttcgggaagaaacgccagaaaaaaatggataaccacgatagttccgccatctatgaaatcaaatttcacgagtttgtgctgttcattctcgaagaaaaaatgggtgcgacgcgtcgtacttttctgacagatttagcccgcaagaaagggttccgcgtcgagaatgaactgtcagacagcgttacccacatcgtggcagaaaataattcacgctctgaagtattggcttggctgaaagaacacaagatggagaagaccaagcaattcgaactgctggatattagctggcttatcgaaagcatgaaagttggtaaaccggtggacaccaaggggaaataccagttggcggaatcgggtgagatgagtgcgaacccagatccgacagagggtcgtgaaaacgagctgcctcctactatgaagaccgtttctccgtatgcgtgtcaacgccgcaccaccctgaacaaccataatcaacgttttacggacgcactggaaattcttgcggaaaattacgagttcaaacgcaacgatgatactgcgctggaatttcgtcgtgctatctccgtgctgaaaagccttccgtttgaggtacgtagcctgaaagacacggaaggattgccctggatcggtgatgaagtcaaagggattatggaagaaatcatcgaggtcggtgaatcgctggaagtgcaggccgtgctcaatgatgagtggtatcaaagcttcaaacgctttaagagtgtctttggagtgggggtgaagacagcagacaagtggtaccgtatgggtctgcgcacgctcgaggatgttcgttccagcaagaccctgaagttgaccccgatgcagaaagcgggtctgtgctattatgaagatcttgctcgcggcgttacgaaagccgaagctgacgcgatttctctgctggttcaggatgcagtcgcaactttcgacccggatgcgctggtggagattgtcggtggatttcgtcgtgggaaacctcagggtcacgacgttgatctgcttatcacatctccgggagctgagaaagagcaagaagaccagctcctgcagaaagtgaccaatctgtggaagaaacaagggttgttgctgtacggtcgtctggaatggagtcagtttgaagatgggaaactcccatccggtaaggctgatgccctggaccaccacgcgaaatgctttctgatcctcaaactttatgatcataaagtggacaaaagcaaatgggaaatgccgacgggttcgaacatgggcgaggccaaaccgtggaaagcaattcgcgtagatctggttcgttgcccctacggcggttttgcgtttgcgttgttgggttggaccggaagccgcatgttccgccgtgatctgcgcctgtacgccactgacgagaagaacatgatgctggacaatcatgcgctgtatgacctgaccaagaaaatctttctcaaagctaaatcggaagaggaaattttcgcacatctggggcttgaatacctggaaccgttcgaacgtaacgca

SEQ ID NO: 2494 - protein, 529 aa, synthetic construct
  REGION 1..529: note = Variant of terminal deoxynucleotidyltransferase
MHHHHHHGGSGSHGIRTIDSDFGKKRQKKMDNHDSSAIYEIKFHEFVLFILEEKMGATRRTFLTDLARKKGFRVENELSDSVTHIVAENNSRSEVLAWLKEHKMEKTKQFELLDISWLIESMKVGKPVDTKGKYQLAESGEMSANPDPTEGRENELPPTMKTVSPYACQRRTTLNNHNQRFTDALEILAENYEFKRNDDTALEFRRAISVLKSLPFEVRSLKDTEGLPWIGDEVKGIMEEIIEVGESLEVQAVLNDEWYQSFKRFKSVFGVGVKTADKWYRMGLRTLEDVRSSKTLKLTPMQKAGLCYYEDLARGVTKAEADAISLLVQDAVATFDPDALVEIVGGFRRGKPQGHDVDLLITSPGAEKEQEDQLLQKVTNLWKKQGLLLYGRLEWSQFEDGKLPSGKADALDHHAKCFLILKLYDHKVDKSKWEMPTGSNMGEAKPWKAIRVDLVRCPYGGFAFALLGWTGSRMFRRDLRLYATDEKNMMLDNHALYDLTKKIFLKAKSEEEIFAHLGLEYLEPFERNA

SEQ ID NO: 2495 - DNA, 1587 bp, synthetic construct
  misc_feature 1..1587: note = Variant of terminal deoxynucleotidyltransferase
  source 1..1587: mol_type = other DNA
atgcaccatcatcatcatcatggcggtagcggcagccacggcattcgtaccatcgattcggacttcgggaagaaacgccagaaaaaaatggataaccacgatagttccgccatctatgaaatcaaatttcacgagtttgtgctgttcattctcgaagaaaaaatgggtgcgacgcgtcgtacttttctgacagatttagcccgcaagaaagggttccgcgtcgagaatgaactgtcagacagcgttacccacatcgtggcagaaaataattcacgctctgaagtattggcttggctgaaagaacacaagatggagaagaccaagcaattcgaactgctggatattagctggcttatcgaaagcatgaaagttggtaaaccggtggacaccaaggggaaataccagttggcggaatcgggtgagatgagtgcgaacccagatccgacagagggtcgtgaaaacgagctgcctcctactatgaagaccgtttctccgtatgcgtgtcaacgccgcaccaccctgaacaaccataatcaacgttttacggacgcactggaaattcttgcggaaaattacgagttcaaacgcaacgatgatactgcgctggaatttgagcgtgctatctccgtgctgaaaagccttccgtttgaggtacgtagcctgaaagacacggaaggattgccctggatcggtgatgaagtcaaagggattatggaagaaatcatcgaggtcggtgaatcgctggaagtgcaggccgtgctcaatgatgagtggtatcaaagcttcaaacgctttaagagtgtctttggagtgggggtgaagacagcagacaagtggtaccgtatgggtctgcgcacgctcgaggatgttcgttccagcaagaccctgaagttgaccccgatgcagaaagcgggtctgtgctattatgaagatcttgctcgcggcgttacgaaagccgaagctgacgcgatttctctgctggttcaggatgcagtcgcaactttcgacccggatgcgctggtggagattgtcggtggatttcgtcgtgggaaacctcagggtcacgacgttgatctgcttatcacatctccgggagctgagaaagagcaagaagaccagctcctgcagaaagtgaccaatctgtggaagaaacaagggttgttgctgtacggtcgtctggaatggagtcagtttgaagatgggaaactcccatccggtaaggctgatgccctggaccaccacgcgaaatgctttctgatcctcaaactttatgatcataaagtggacaaaagcaaatgggaaatgccgacgggttcgaacatgggcgaggccaaaccgtggaaagcaattcgcgtagatctggttcgttgcccctacggcggttttgcgtttgcgttgttgggttggaccggaagccgcatgttccgccgtgatctgcgctggtacgccactgacgagaagaacatgatgctggacaatcatgcgctgtatgacctgaccaagaaaatctttctcaaagctaaatcggaagaggaaattttcgcacatctggggcttgaatacctggaaccgttcgaacgtaacgca

SEQ ID NO: 2496 - protein, 529 aa, synthetic construct
  REGION 1..529: note = Variant of terminal deoxynucleotidyltransferase
MHHHHHHGGSGSHGIRTIDSDFGKKRQKKMDNHDSSAIYEIKFHEFVLFILEEKMGATRRTFLTDLARKKGFRVENELSDSVTHIVAENNSRSEVLAWLKEHKMEKTKQFELLDISWLIESMKVGKPVDTKGKYQLAESGEMSANPDPTEGRENELPPTMKTVSPYACQRRTTLNNHNQRFTDALEILAENYEFKRNDDTALEFERAISVLKSLPFEVRSLKDTEGLPWIGDEVKGIMEEIIEVGESLEVQAVLNDEWYQSFKRFKSVFGVGVKTADKWYRMGLRTLEDVRSSKTLKLTPMQKAGLCYYEDLARGVTKAEADAISLLVQDAVATFDPDALVEIVGGFRRGKPQGHDVDLLITSPGAEKEQEDQLLQKVTNLWKKQGLLLYGRLEWSQFEDGKLPSGKADALDHHAKCFLILKLYDHKVDKSKWEMPTGSNMGEAKPWKAIRVDLVRCPYGGFAFALLGWTGSRMFRRDLRWYATDEKNMMLDNHALYDLTKKIFLKAKSEEEIFAHLGLEYLEPFERNA

SEQ ID NO: 2497 - DNA, 1587 bp, synthetic construct
  misc_feature 1..1587: note = Variant of terminal deoxynucleotidyltransferase
  source 1..1587: mol_type = other DNA
atgcaccatcatcatcatcatggcggtagcggcagccacggcattcgtaccatcgattcggacttcgggaagaaacgccagaaaaaaatggataaccacgatagttccgccatctatgaaatcaaatttcacgagtttgtgctgttcattctcgaagaaaaaatgggtgcgacgcgtcgtacttttctgacagatttagcccgcaagaaagggttccgcgtcgagaatgaactgtcagacagcgttacccacatcgtggcagaaaataattcacgctctgaagtattggcttggctgaaagaacacaagatggagaagaccaagcaattcgaactgctggatattagctggcttatcgaaagcatgaaagttggtaaaccggtggacaccaaggggaaataccagttggcggaatcgggtgagatgagtgcgaacccagatccgacagagggtcgtgaaaacgagctgcctcctactatgaagaccgtttctccgtatgcgtgtcaacgccgcaccaccctgaacaaccataatcaacgttttacggacgcactggaaattcttgcggaaaattacgagttcaaacgcaacgatgatactgcgctggaatttcgtcgtgctatctccgtgctgaaaagccttccgtttgaggtacgtagcctgaaagacacggaaggattgccctggatcggtgatgaagtcaaagggattatggaagaaatcatcgaggtcggtgaatcgctggaagtgcaggccgtgctcaatgatgagtggtatcaaagcttcaaacgctttaagagtgtctttggagtgggggtgaagacagcagacaagtggtaccgtatgggtctgcgcacgctcgaggatgttcgttccagcaagaccctgaagttgaccccgatgcagaaagcgggtctgtgctattatgaagatcttgctcagggcgttacgaaagccgaagctgacgcgatttctctgctggttcaggatgcagtcgcaactttcgacccggatgcgctggtggagattgtcggtggatttcgtcgtgggaaacctcagggtcacgacgttgatctgcttatcacatctccgggagctgagaaagagcaagaagaccagctcctgcagaaagtgaccaatctgtggaagaaacaagggttgttgctgtacggtcgtctggaatggagtcagtttgaagatgggaaactcccatccggtaaggctgatgccctggaccaccacgcgaaatgctttctgatcctcaaactttatgatcataaagtggacaaaagcaaatgggaaatgccgacgggttcgaacatgggcgaggccaaaccgtggaaagcaattcgcgtagatctggttcgttgcccctacggcggttttgcgtttgcgttgttgggttggaccggaagccgcatgttccgccgtgatctgcgctggtacgccactgacgagaagaacatgatgctggacaatcatgcgctgtatgacctgaccaagaaaatctttctcaaagctaaatcggaagaggaaattttcgcacatctggggcttgaatacctggaaccgttcgaacgtaacgca

SEQ ID NO: 2498 - protein, 529 aa, synthetic construct
  REGION 1..529: note = Variant of terminal deoxynucleotidyltransferase
MHHHHHHGGSGSHGIRTIDSDFGKKRQKKMDNHDSSAIYEIKFHEFVLFILEEKMGATRRTFLTDLARKKGFRVENELSDSVTHIVAENNSRSEVLAWLKEHKMEKTKQFELLDISWLIESMKVGKPVDTKGKYQLAESGEMSANPDPTEGRENELPPTMKTVSPYACQRRTTLNNHNQRFTDALEILAENYEFKRNDDTALEFRRAISVLKSLPFEVRSLKDTEGLPWIGDEVKGIMEEIIEVGESLEVQAVLNDEWYQSFKRFKSVFGVGVKTADKWYRMGLRTLEDVRSSKTLKLTPMQKAGLCYYEDLAQGVTKAEADAISLLVQDAVATFDPDALVEIVGGFRRGKPQGHDVDLLITSPGAEKEQEDQLLQKVTNLWKKQGLLLYGRLEWSQFEDGKLPSGKADALDHHAKCFLILKLYDHKVDKSKWEMPTGSNMGEAKPWKAIRVDLVRCPYGGFAFALLGWTGSRMFRRDLRWYATDEKNMMLDNHALYDLTKKIFLKAKSEEEIFAHLGLEYLEPFERNA

SEQ ID NO: 2499 - DNA, 1587 bp, synthetic construct
  misc_feature 1..1587: note = Variant of terminal deoxynucleotidyltransferase
  source 1..1587: mol_type = other DNA
atgcaccatcatcatcatcatggcggtagcggcagccacggcattcgtaccatcgattcggacttcgggaagaaacgccagaaaaaaatggataaccacgatagttccgccatctatgaaatcaaatttcacgagtttgtgctgttcattctcgaagaaaaaatgggtgcgacgcgtcgtacttttctgacagatttagcccgcaagaaagggttccgcgtcgagaatgaactgtcagacagcgttacccacatcgtggcagaaaataattcacgctctgaagtattggcttggctgaaagaacacaagatggagaagaccaagcaattcgaactgctggatattagctggcttatcgaaagcatgaaagttggtaaaccggtggacaccaaggggaaataccagttggcggaatcgggtgagatgagtgcgaacccagatccgacagagggtcgtgaaaacgagctgcctcctactatgaagaccgtttctccgtatgcgtgtcaacgccgcaccaccctgaacaaccataatcaacgttttacggacgcactggaaattcttgcggaaaattacgagttcaaacgcaacgatgatactgcgctggaatttcgtcgtgctatctccgtgctgaaaagccttccgtttgaggtacgtagcctgaaagacacggaaggattgccctggatcggtgatgaagtcaaagggattatggaagaaatcatcgaggtcggtgaatcgctggaagtgcaggccgtgctcaatgatgagtggtatcaaagcttcaaacgctttaagagtgtctttggagtgggggtgaagacagcagacaagtggtaccgtatgggtctgcgcacgctcgaggatgttcgttccagcaagaccctgaagttgaccccgatgcagaaagcgggtctgtgctattatgaagatcttgctcgcggcgttacgaaagccgaagctgacgcgatttctctgctggttcaggatgcagtcgcaactttcgacccggatgcgctggtggagattgtcggtggatttcgtcgtgggaaacctcagggtcacgacgttgatctgcttatcacatctccgggagctgagaaagagcaagaagaccagctcctgcagaaagtgaccaatctgtggaagaaacaagggttgttgctgtacggtcgtctggaatggagtcagtttgaagatgggaaactcccatccggtaaggctgatgccctggaccaccacgcgaaatgctttctgatcctcaaactttatgatcataaagtggacaaaagcaaatgggaaatgccgacgggttcgaacatgggcgaggccaaaccgtggaaagcaattcgcgtagatctggttcgttgcccctacggcggttttgcgtttgcgttgttgggttggaccggaagccgcatgttccgccgtgatctgcgcgcgtacgccactgacgagaagaacatgatgctggacaatcatgcgctgtatgacctgaccaagaaaatctttctcaaagctaaatcggaagaggaaattttcgcacatctggggcttgaatacctggaaccgttcgaacgtaacgca

SEQ ID NO: 2500 - protein, 529 aa, synthetic construct
  REGION 1..529: note = Variant of terminal deoxynucleotidyltransferase
MHHHHHHGGSGSHGIRTIDSDFGKKRQKKMDNHDSSAIYEIKFHEFVLFILEEKMGATRRTFLTDLARKKGFRVENELSDSVTHIVAENNSRSEVLAWLKEHKMEKTKQFELLDISWLIESMKVGKPVDTKGKYQLAESGEMSANPDPTEGRENELPPTMKTVSPYACQRRTTLNNHNQRFTDALEILAENYEFKRNDDTALEFRRAISVLKSLPFEVRSLKDTEGLPWIGDEVKGIMEEIIEVGESLEVQAVLNDEWYQSFKRFKSVFGVGVKTADKWYRMGLRTLEDVRSSKTLKLTPMQKAGLCYYEDLARGVTKAEADAISLLVQDAVATFDPDALVEIVGGFRRGKPQGHDVDLLITSPGAEKEQEDQLLQKVTNLWKKQGLLLYGRLEWSQFEDGKLPSGKADALDHHAKCFLILKLYDHKVDKSKWEMPTGSNMGEAKPWKAIRVDLVRCPYGGFAFALLGWTGSRMFRRDLRAYATDEKNMMLDNHALYDLTKKIFLKAKSEEEIFAHLGLEYLEPFERNA

SEQ ID NO: 2501 - DNA, 1587 bp, synthetic construct
  misc_feature 1..1587: note = Variant of terminal deoxynucleotidyltransferase
  source 1..1587: mol_type = other DNA
atgcaccatcatcatcatcatggcggtagcggcagccacggcattcgtaccatcgattcggacttcgggaagaaacgccagaaaaaaatggataaccacgatagttccgccatctatgaaatcaaatttcacgagtttgtgctgttcattctcgaagaaaaaatgggtgcgacgcgtcgtacttttctgacagatttagcccgcaagaaagggttccgcgtcgagaatgaactgtcagacagcgttacccacatcgtggcagaaaataattcacgctctgaagtattggcttggctgaaagaacacaagatggagaagaccaagcaattcgaactgctggatattagctggcttatcgaaagcatgaaagttggtaaaccggtggacaccaaggggaaataccagttggcggaatcgggtgagatgagtgcgaacccagatccgacagagggtcgtgaaaacgagctgcctcctactatgaagaccgtttctccgtatgcgtgtcaacgccgcaccaccctgaacaaccataatcaacgttttacggacgcactggaaattcttgcggaaaattacgagttcaaacgcaacgatgatactgcgctggaatttcgtcgtgctatctccgtgctgaaaagccttccgtttgaggtacgtagcctgaaagacacggaaggattgccctggatcggtgatgaagtcaaagggattatggaagaaatcatcgaggtcggtgaatcgctggaagtgcaggccgtgctcaatgatgagtggtatcaaagcttcaaacgctttaagagtgtctttggagtgggggtgaagacagcagacaagtggtaccgtatgggtctgcgcacgctcgaggatgttcgttccagcaagaccctgaagttgaccccgatgcagaaagcgggtctgtgctattatgaagatcttgctcgcggcgttacgaaagccgaagctgacgcgatttctctgctggttcaggatgcagtcgcaactttcgacccggatgcgctggtggagattgtcggtggatttcgtcgtgggaaacctcagggtcacgacgttgatctgcttatcacatctccgggagctgagaaagagcaagaagaccagctcctgcagaaagtgaccaatctgtggaagaaacaagggttgttgctgtacggtcgtctggaatggagtcagtttgaagatgggaaactcccatccggtaaggctgatgccctggaccaccacgcgaaatgctttctgatcctcaaactttatgatcataaagtggacaaaagcaaatgggaaatgccgacgggttcgaacatgggcgaggccaaaccgtggaaagcaattcgcgtagatctggttcgttgcccctacggcggttttgcgtttgcgttgttgggttggaccggaagccgcatgttccgccgtgatctgcgctggtacgccactgacgagaagaacatgatgatggacaatcatgcgctgtatgacctgaccaagaaaatctttctcaaagctaaatcggaagaggaaattttcgcacatctggggcttgaatacctggaaccgttcgaacgtaacgca

SEQ ID NO: 2502 - protein, 529 aa, synthetic construct
  REGION 1..529: note = Variant of terminal deoxynucleotidyltransferase
MHHHHHHGGSGSHGIRTIDSDFGKKRQKKMDNHDSSAIYEIKFHEFVLFILEEKMGATRRTFLTDLARKKGFRVENELSDSVTHIVAENNSRSEVLAWLKEHKMEKTKQFELLDISWLIESMKVGKPVDTKGKYQLAESGEMSANPDPTEGRENELPPTMKTVSPYACQRRTTLNNHNQRFTDALEILAENYEFKRNDDTALEFRRAISVLKSLPFEVRSLKDTEGLPWIGDEVKGIMEEIIEVGESLEVQAVLNDEWYQSFKRFKSVFGVGVKTADKWYRMGLRTLEDVRSSKTLKLTPMQKAGLCYYEDLARGVTKAEADAISLLVQDAVATFDPDALVEIVGGFRRGKPQGHDVDLLITSPGAEKEQEDQLLQKVTNLWKKQGLLLYGRLEWSQFEDGKLPSGKADALDHHAKCFLILKLYDHKVDKSKWEMPTGSNMGEAKPWKAIRVDLVRCPYGGFAFALLGWTGSRMFRRDLRWYATDEKNMMMDNHALYDLTKKIFLKAKSEEEIFAHLGLEYLEPFERNA

SEQ ID NO: 2503 - DNA, 1587 bp, synthetic construct
  misc_feature 1..1587: note = Variant of terminal deoxynucleotidyltransferase
  source 1..1587: mol_type = other DNA
atgcaccatcatcatcatcatggcggtagcggcagccacggcattcgtaccatcgattcggacttcgggaagaaacgccagaaaaaaatggataaccacgatagttccgccatctatgaaatcaaatttcacgagtttgtgctgttcattctcgaagaaaaaatgggtgcgacgcgtcgtacttttctgacagatttagcccgcaagaaagggttccgcgtcgagaatgaactgtcagacagcgttacccacatcgtggcagaaaataattcacgctctgaagtattggcttggctgaaagaacacaagatggagaagaccaagcaattcgaactgctggatattagctggcttatcgaaagcatgaaagttggtaaaccggtggacaccaaggggaaataccagttggcggaatcgggtgagatgagtgcgaacccagatccgacagagggtcgtgaaaacgagctgcctcctactatgaagaccgtttctccgtatgcgtgtcaacgccgcaccaccctgaacaaccataatcaacgttttacggacgcactggaaattcttgcggaaaattacgagttcaaacgcaacgatgatactgcgctggaatttcgtcgtgctatctccgtgctgaaaagccttccgtttgaggtacgtagcctgaaagacacggaaggattgccctggatcggtgatgaagtcaaagggattatggaagaaatcatcgaggtcggtgaatcgctggaagtgcaggccgtgctcaatgatgagtggtatcaaagcttcaaacgctttaagagtgtctttggagtgggggtgaagacagcagacaagtggtaccgtatgggtctgcgcacgctcgaggatgttcgttccagcaagaccctgaagttgaccccgatgcagaaagcgggtctgtgctattatgaagatcttgctcgcggcgttacgaaagccgaagctgacgcgatttctctgctggttcaggatgcagtcgcaactttcgacccggatgcgctggtggagattgtcggtggatttcgtcgtgggaaacctcagggtcacgacgttgatctgcttatcacatctccgggagctgagaaagagcaagaagaccagctcctgcagaaagtgaccaatctgtggaagaaacaagggttgttgctgtacggtcgtctggaatggagtcagtttgaagatgggaaactcccatccggtaaggctgatgccctggaccaccacgcgaaatgctttctgatcctcaaactttatgatcataaagtggacaaaagcaaatgggaaatgccgacgggttcgaacatgggcgaggccaaaccgtggaaagcaattcgcgtagatctggttcgttgcccctacggcggttttgcgtttgcgttgttgggttggaccggaagccgcatgttccgccgtgatctgtggtggtacgccactgacgagaagaacatgatgctggacaatcatgcgctgtatgacctgaccaagaaaatctttctcaaagctaaatcggaagaggaaattttcgcacatctggggcttgaatacctggaaccgttcgaacgtaacgca

SEQ ID NO: 2504 - protein, 529 aa, synthetic construct
  REGION 1..529: note = Variant of terminal deoxynucleotidyltransferase
MHHHHHHGGSGSHGIRTIDSDFGKKRQKKMDNHDSSAIYEIKFHEFVLFILEEKMGATRRTFLTDLARKKGFRVENELSDSVTHIVAENNSRSEVLAWLKEHKMEKTKQFELLDISWLIESMKVGKPVDTKGKYQLAESGEMSANPDPTEGRENELPPTMKTVSPYACQRRTTLNNHNQRFTDALEILAENYEFKRNDDTALEFRRAISVLKSLPFEVRSLKDTEGLPWIGDEVKGIMEEIIEVGESLEVQAVLNDEWYQSFKRFKSVFGVGVKTADKWYRMGLRTLEDVRSSKTLKLTPMQKAGLCYYEDLARGVTKAEADAISLLVQDAVATFDPDALVEIVGGFRRGKPQGHDVDLLITSPGAEKEQEDQLLQKVTNLWKKQGLLLYGRLEWSQFEDGKLPSGKADALDHHAKCFLILKLYDHKVDKSKWEMPTGSNMGEAKPWKAIRVDLVRCPYGGFAFALLGWTGSRMFRRDLWWYATDEKNMMLDNHALYDLTKKIFLKAKSEEEIFAHLGLEYLEPFERNA

SEQ ID NO: 2505 - DNA, 1587 bp, synthetic construct
  misc_feature 1..1587: note = Variant of terminal deoxynucleotidyltransferase
  source 1..1587: mol_type = other DNA
atgcaccatcatcatcatcatggcggtagcggcagccacggcattcgtaccatcgattcggacttcgggaagaaacgccagaaaaaaatggataaccacgatagttccgccatctatgaaatcaaatttcacgagtttgtgctgttcattctcgaagaaaaaatgggtgcgacgcgtcgtacttttctgacagatttagcccgcaagaaagggttccgcgtcgagaatgaactgtcagacagcgttacccacatcgtggcagaaaataattcacgctctgaagtattggcttggctgaaagaacacaagatggagaagaccaagcaattcgaactgctggatattagctggcttatcgaaagcatgaaagttggtaaaccggtggacaccaaggggaaataccagttggcggaatcgggtgagatgagtgcgaacccagatccgacagagggtcgtgaaaacgagctgcctcctactatgaagaccgtttctccgtatgcgtgtcaacgccgcaccaccctgaacaaccataatcaacgttttacggacgcactggaaattcttgcggaaaattacgagttcaaacgcaacgatgatactgcgctggaatttcgtcgtgctatctccgtgctgaaaagccttccgtttgaggtacgtagcctgaaagacacggaaggattgccctggatcggtgatgaagtcaaagggattatggaagaaatcatcgaggtcggtgaatcgctggaagtgcaggccgtgctcaatgatgagtggtatcaaagcttcaaacgctttaagagtgtctttggagtgggggtgaagacagcagacaagtggtaccgtatgggtctgcgcacgctcgaggatgttcgttccagcaagaccctgaagttgaccccgatgcagaaagcgggtctgtgctattatgaagatcttgctcgcggcgttacgaaagccgaagctgacgcgatttctctgctggttcaggatgcagtcgcaactttcgacccggatgcgctggtggagattgtcggtggatttcgtcgtgggaaacctcagggtcacgacgttgatctgcttatcacatctccgggagctgagaaagagcaagaagaccagctcctgcagaaagtgaccaatctgtggaagaaacaagggttgttgctgtacggtcgtctggaatggagtcagtttgaagatgggaaactcccatccggtaaggctgatgccctggaccaccacgcgaaatgctttctgatcctcaaactttatgatcataaagtggacaaaagcaaatgggaaatgccgacgggttcgaacatgggcgaggccaaaccgtggaaagcaattcgcgtagatctggttcgttgcccctacggcggttttgcgtttgcgttgttgggttggaccggaagccgcatgttccgccgtgatctgctgtggtacgccactgacgagaagaacatgatgctggacaatcatgcgctgtatgacctgaccaagaaaatctttctcaaagctaaatcggaagaggaaattttcgcacatctggggcttgaatacctggaaccgttcgaacgtaacgca

SEQ ID NO: 2506 - protein, 529 aa, synthetic construct
  REGION 1..529: note = Variant of terminal deoxynucleotidyltransferase
MHHHHHHGGSGSHGIRTIDSDFGKKRQKKMDNHDSSAIYEIKFHEFVLFILEEKMGATRRTFLTDLARKKGFRVENELSDSVTHIVAENNSRSEVLAWLKEHKMEKTKQFELLDISWLIESMKVGKPVDTKGKYQLAESGEMSANPDPTEGRENELPPTMKTVSPYACQRRTTLNNHNQRFTDALEILAENYEFKRNDDTALEFRRAISVLKSLPFEVRSLKDTEGLPWIGDEVKGIMEEIIEVGESLEVQAVLNDEWYQSFKRFKSVFGVGVKTADKWYRMGLRTLEDVRSSKTLKLTPMQKAGLCYYEDLARGVTKAEADAISLLVQDAVATFDPDALVEIVGGFRRGKPQGHDVDLLITSPGAEKEQEDQLLQKVTNLWKKQGLLLYGRLEWSQFEDGKLPSGKADALDHHAKCFLILKLYDHKVDKSKWEMPTGSNMGEAKPWKAIRVDLVRCPYGGFAFALLGWTGSRMFRRDLLWYATDEKNMMLDNHALYDLTKKIFLKAKSEEEIFAHLGLEYLEPFERNA

SEQ ID NO: 2507 - DNA, 1587 bp, synthetic construct
  misc_feature 1..1587: note = Variant of terminal deoxynucleotidyltransferase
  source 1..1587: mol_type = other DNA
atgcaccatcatcatcatcatggcggtagcggcagccacggcattcgtaccatcgattcggacttcgggaagaaacgccagaaaaaaatggataaccacgatagttccgccatctatgaaatcaaatttcacgagtttgtgctgttcattctcgaagaaaaaatgggtgcgacgcgtcgtacttttctgacagatttagcccgcaagaaagggttccgcgtcgagaatgaactgtcagacagcgttacccacatcgtggcagaaaataattcacgctctgaagtattggcttggctgaaagaacacaagatggagaagaccaagcaattcgaactgctggatattagctggcttatcgaaagcatgaaagttggtaaaccggtggacaccaaggggaaataccagttggcggaatcgggtgagatgagtgcgaacccagatccgacagagggtcgtgaaaacgagctgcctcctactatgaagaccgtttctccgtatgcgtgtcaacgccgcaccaccctgaacaaccataatcaacgttttacggacgcactggaaattcttgcggaaaattacgagttcaaacgcaacgatgatactgcgctggaatttcgtcgtgctatctccgtgctgaaaagccttccgtttgaggtacgtagcctgaaagacacggaaggattgccctggatcggtgatgaagtcaaagggattatggaagaaatcatcgaggtcggggaatcgctggaagtgcaggccgtgctcaatgatgagtggtatcaaagcttccaccgctttaagagtgtctttggagtgggggtgaagacagcagacaagtggtaccgtatgggtctgcgcaccctcgaggatgttcgttccagcaagaccctgaagttgaccccgatgcagaaagcgggtctgtgctattatgaagatcttgctcgcggcgttacgaaagccgaagctgacgcgatttctctgctggttcaggatgcagtcgcaactttcgacccggatgcgctggtggagattgtcggtggatttcgtcgtgggaaacctcagggtcacgacgttgatctgcttatcacatctccgggagctgagaaagagcaagaagaccagctcctgcagaaagtgaccaatctgtggaagaaacaagggttgttgctgtacggtcgtctggaatggagtcagtgggaagatgggaaactcccatccggtaaggctgatgccggtgacgcgggtgcgaaatgctttctgatcctcaaactttatgatcataaagtggacaaaagcaaatgggaaatgccgacgggttcgaacatgggcgaggccaaaccgtggaaagcaattcgcgtagatctggttcgttgcccctacggcggttttgcgtttgcgatgttgcagtggaccggaagccgcatgttccgccgtgatctgcgctggtacgccactgacgagaagaacatgatgctggacaatcatgcgctgtatgacctgaccaagaaaatctttctcaaagctaaatcggaagaggaaattttcgcacatctggggcttgaatacctggaaccgttcgaacgtaacgca

SEQ ID NO: 2508 - protein, 529 aa, synthetic construct
  REGION 1..529: note = Variant of terminal deoxynucleotidyltransferase
MHHHHHHGGSGSHGIRTIDSDFGKKRQKKMDNHDSSAIYEIKFHEFVLFILEEKMGATRRTFLTDLARKKGFRVENELSDSVTHIVAENNSRSEVLAWLKEHKMEKTKQFELLDISWLIESMKVGKPVDTKGKYQLAESGEMSANPDPTEGRENELPPTMKTVSPYACQRRTTLNNHNQRFTDALEILAENYEFKRNDDTALEFRRAISVLKSLPFEVRSLKDTEGLPWIGDEVKGIMEEIIEVGESLEVQAVLNDEWYQSFHRFKSVFGVGVKTADKWYRMGLRTLEDVRSSKTLKLTPMQKAGLCYYEDLARGVTKAEADAISLLVQDAVATFDPDALVEIVGGFRRGKPQGHDVDLLITSPGAEKEQEDQLLQKVTNLWKKQGLLLYGRLEWSQWEDGKLPSGKADAGDAGAKCFLILKLYDHKVDKSKWEMPTGSNMGEAKPWKAIRVDLVRCPYGGFAFAMLQWTGSRMFRRDLRWYATDEKNMMLDNHALYDLTKKIFLKAKSEEEIFAHLGLEYLEPFERNA

SEQ ID NO: 2509 - DNA, 1587 bp, synthetic construct
  misc_feature 1..1587: note = Variant of terminal deoxynucleotidyltransferase
  source 1..1587: mol_type = other DNA
atgcaccatcatcatcatcatggcggtagcggcagccacggcattcgtaccatcgattcggacttcgggaagaaacgccagaaaaaaatggataaccacgatagttccgccatctatgaaatcaaatttcacgagtttgtgctgttcattctcgaagaaaaaatgggtgcgacgcgtcgtacttttctgacagatttagcccgcaagaaagggttccgcgtcgagaatgaactgtcagacagcgttacccacatcgtggcagaaaataattcacgctctgaagtattggcttggctgaaagaacacaagatggagaagaccaagcaattcgaactgctggatattagctggcttatcgaaagcatgaaagttggtaaaccggtggacaccaaggggaaataccagttggcggaatcgggtgagatgagtgcgaacccagatccgacagagggtcgtgaaaacgagctgcctcctactatgaagaccgtttctccgtatgcgtgtcaacgccgcaccaccctgaacaaccataatcaacgttttacggacgcactggaaattcttgcggaaaattacgagttcaaacgcaacgatgatactgcgctggaatttcgtcgtgctatctccgtgctgaaaagccttccgtttgaggtacgtagcctgaaagacacggaaggattgccctggatcggtgatgaagtcaaagggattatggaagaaatcatcgaggtcggtgaatcgctggaagtgcaggccgtgctcaatgatgagtggtatcaaagcttccaccgctttaagagtgtctttggagtgggggtgaagacagcagacaagtggtaccgtatgggtctgcgcaccctcgaggatgttcgttccagcaagaccctgaagttgaccccgatgcagaaagcgggtctgtgctattatgaagatcttgctcgcggcgttacgaaagccgaagctgacgcgatttctctgctggttcaggatgcagtcgcaactttcgacccggatgcgctggtggagattgtcggtggatttcgtcgtgggaaacctcagggtcacgacgttgatctgcttatcacatctccgggagctgagaaagagcaagaagaccagctcctgcagaaagtgaccaatctgtggaagaaacaagggttgttgctgtacggtcgtctggaatggagtcagtttgatgatgggaaactcccatccggtaaggctgatgcccaagacgcgggtgcgcaatgctttctgatcctcaaactttatgatcataaagtggacaaaagcaaatgggaaatgccgacgggttcgaacatgggcgaggccaaaccgtggaaagcaattcgcgtagatctggttcgttgcccctacggcggttttgcgtttgcgttgttgcagtggaccggaagccgcatgttccgccgtgatctgcgctggtacgccactgacgagaagaacatgatgctggacaatcatgcgctgtatgacctgaccaagaaaatctttctcaaagctaaatcggaagaggaaattttcgcacatctggggcttgaatacctggaaccgttcgaacgtaacgca

SEQ ID NO: 2510 - protein, 529 aa, synthetic construct
  REGION 1..529: note = Variant of terminal deoxynucleotidyltransferase
MHHHHHHGGSGSHGIRTIDSDFGKKRQKKMDNHDSSAIYEIKFHEFVLFILEEKMGATRRTFLTDLARKKGFRVENELSDSVTHIVAENNSRSEVLAWLKEHKMEKTKQFELLDISWLIESMKVGKPVDTKGKYQLAESGEMSANPDPTEGRENELPPTMKTVSPYACQRRTTLNNHNQRFTDALEILAENYEFKRNDDTALEFRRAISVLKSLPFEVRSLKDTEGLPWIGDEVKGIMEEIIEVGESLEVQAVLNDEWYQSFHRFKSVFGVGVKTADKWYRMGLRTLEDVRSSKTLKLTPMQKAGLCYYEDLARGVTKAEADAISLLVQDAVATFDPDALVEIVGGFRRGKPQGHDVDLLITSPGAEKEQEDQLLQKVTNLWKKQGLLLYGRLEWSQFDDGKLPSGKADAQDAGAQCFLILKLYDHKVDKSKWEMPTGSNMGEAKPWKAIRVDLVRCPYGGFAFALLQWTGSRMFRRDLRWYATDEKNMMLDNHALYDLTKKIFLKAKSEEEIFAHLGLEYLEPFERNA

SEQ ID NO: 2511 - DNA, 1587 bp, synthetic construct
  misc_feature 1..1587: note = Variant of terminal deoxynucleotidyltransferase
  source 1..1587: mol_type = other DNA
atgcaccatcatcatcatcatggcggtagcggcagccacggcattcgtaccatcgattcggacttcgggaagaaacgccagaaaaaaatggataaccacgatagttccgccatctatgaaatcaaatttcacgagtttgtgctgttcattctcgaagaaaaaatgggtgcgacgcgtcgtacttttctgacagatttagcccgcaagaaagggttccgcgtcgagaatgaactgtcagacagcgttacccacatcgtggcagaaaataattcacgctctgaagtattggcttggctgaaagaacacaagatggagaagaccaagcaattcgaactgctggatattagctggcttatcgaaagcatgaaagttggtaaaccggtggacaccaaggggaaataccagttggcggaatcgggtgagatgagtgcgaacccagatccgacagagggtcgtgaaaacgagctgcctcctactatgaagaccgtttctccgtatgcgtgtcaacgccgcaccaccctgaacaaccataatcaacgttttacggacgcactggaaattcttgcggaaaattacgagttcaaacgcaatgatgatactgcgctggaatttcgtcgtgctatctccgtgctgaaaagccttccgtttgaggtacgtagcctgaaagacacggaaggattgccctggatcggtgatgaagtcaaagggattatggaagaaatcatcgaggtcggtgaatcgctggaagtgcaggccgtgctcaatgatgagtggtatcaaagcttccaccgctttaagagtgtctttggagtgggggtgaagacagcagacaagtggtaccgtatgggtctgcgcaccctcgaggatgttcgttccagcaagaccctgaagttgaccccgatgcagaaagcgggtctgtgctattatgaagatcttgctcgcggcgttacgaaagccgaagctgacgcgatttctctgctggttcaggatgcagtcgcaactttcgacccggatgcgctggtggagattgtcggtggatttcgtcgtgggaaacctcagggtcacgacgttgatctgcttatcagttctccgggagctgagaaagagcaagaagaccagctcctgcagaaagtgaccaatctgtggaagaaacaagggttgttgctgtacggtcgtctggaatggagtcagtttgaagatgggaaactcccatcgggtagtgctgatgccggtgacgcgggtgcgaaatgctttctgatcctcaaactttatgatcataaagtggacaaaagcaaatgggaaatgccgacgggttcgaacatgggcgaggccaaaccgtggaaagcaattcgcgtagatctgctgcgttgcccctacggcggttttgcgtttgcgttgttgcagtggaccggaagccgcatgttccgccgtgatctgcgctggtacgccactgacgagaagaacatgatgctggacaatcatgcgctgtatgacctgaccaagaaaatctttctcaaagctaaatcggaagaggaaattttcgcacatctggggcttgaatacctggaaccgttcgaacgtaacgca

SEQ ID NO: 2512 - protein, 529 aa, synthetic construct
  REGION 1..529: note = Variant of terminal deoxynucleotidyltransferase
MHHHHHHGGSGSHGIRTIDSDFGKKRQKKMDNHDSSAIYEIKFHEFVLFILEEKMGATRRTFLTDLARKKGFRVENELSDSVTHIVAENNSRSEVLAWLKEHKMEKTKQFELLDISWLIESMKVGKPVDTKGKYQLAESGEMSANPDPTEGRENELPPTMKTVSPYACQRRTTLNNHNQRFTDALEILAENYEFKRNDDTALEFRRAISVLKSLPFEVRSLKDTEGLPWIGDEVKGIMEEIIEVGESLEVQAVLNDEWYQSFHRFKSVFGVGVKTADKWYRMGLRTLEDVRSSKTLKLTPMQKAGLCYYEDLARGVTKAEADAISLLVQDAVATFDPDALVEIVGGFRRGKPQGHDVDLLISSPGAEKEQEDQLLQKVTNLWKKQGLLLYGRLEWSQFEDGKLPSGSADAGDAGAKCFLILKLYDHKVDKSKWEMPTGSNMGEAKPWKAIRVDLLRCPYGGFAFALLQWTGSRMFRRDLRWYATDEKNMMLDNHALYDLTKKIFLKAKSEEEIFAHLGLEYLEPFERNA

SEQ ID NO: 2513 - DNA, 1587 bp, synthetic construct
  misc_feature 1..1587: note = Variant of terminal deoxynucleotidyltransferase
  source 1..1587: mol_type = other DNA
atgcaccatcatcatcatcatggcggtagcggcagccacggcattcgtaccatcgattcggacttcgggaagaaacgccagaaaaaaatggataaccacgatagttccgccatctatgaaatcaaatttcacgagtttgtgctgttcattctcgaagaaaaaatgggtgcgacgcgtcgtacttttctgacagatttagcccgcaagaaagggttccgcgtcgagaatgaactgtcagacagcgttacccacatcgtggcagaaaataattcacgctctgaagtattggcttggctgaaagaacacaagatggagaagaccaagcaattcgaactgctggatattagctggcttatcgaaagcatgaaagttggtaaaccggtggacaccaaggggaaataccagttggcggaatcgggtgagatgagtgcgaacccagatccgacagagggtcgtgaaaacgagctgcctcctactatgaagaccgtttctccgtatgcgtgtcaacgccgcaccaccctgaacaaccataatcaacgttttacggacgcactggaaattcttgcggaaaattacgagttcaaacgcaacgatgatactgcgctggaatttcgtcgtgctatctccgtgctgaaaagccttccgtttgaggtacgtagcctgaaagacacggaaggattgccctggatcggtgatgaagtcaaagggattatggaagaaatcatcgaggtcggggaatcgctggaagtgcaggccgtgctcaatgatgagtggtatcaaagcttccaccgctttaagagtgtctttggagtgggggtgaagacagcagacaagtggtaccgtatgggtctgcgcaccctcgaggatgttcgttccagcaagaccctgaagttgaccccgatgcagaaagcgggtctgtgctattatgaagatcttgctcgcggcgttacgaaagccgaagctgacgcgatttctctgctggttcaggatgcagtcgcaactttcgacccggatgcgctggtggagattgtcggtggatttcgtcgtgggaaacctcagggtcacgacgttgatctgcttatcacatctccgggagctgagaaagagcaagaagaccagctcctgcagaaagtgaccaatctgtggaagaaacaagggttgttgctgtacggtcgtctggaatggacccagtgggaagatgggaaactcccatccggtaaggctgacgtaggtgacgcgggtgcgaaatgctttctgatcctcaaactttatgatcataaagtggacaaaagcaaatgggaaatgccgacgggttcgaacatgggcgaggccaaaccgtggaaagcaattcgcgtagatctggttcgttgcccctacggcggttttgcgtttgcgatgttgcagtggaccggaagccgcatgttccgccgtgatctgcgctggtacgccactgacgagaagaacatgatgctggacaatcatgcgctgtatgacctgaccaagaaaatctttctcaaagctaaatcggaagaggaaattttcgcacatctggggcttgaatacctggaaccgttcgaacgtaacgca

SEQ ID NO: 2514 - protein, 529 aa, synthetic construct
  REGION 1..529: note = Variant of terminal deoxynucleotidyltransferase
MHHHHHHGGSGSHGIRTIDSDFGKKRQKKMDNHDSSAIYEIKFHEFVLFILEEKMGATRRTFLTDLARKKGFRVENELSDSVTHIVAENNSRSEVLAWLKEHKMEKTKQFELLDISWLIESMKVGKPVDTKGKYQLAESGEMSANPDPTEGRENELPPTMKTVSPYACQRRTTLNNHNQRFTDALEILAENYEFKRNDDTALEFRRAISVLKSLPFEVRSLKDTEGLPWIGDEVKGIMEEIIEVGESLEVQAVLNDEWYQSFHRFKSVFGVGVKTADKWYRMGLRTLEDVRSSKTLKLTPMQKAGLCYYEDLARGVTKAEADAISLLVQDAVATFDPDALVEIVGGFRRGKPQGHDVDLLITSPGAEKEQEDQLLQKVTNLWKKQGLLLYGRLEWTQWEDGKLPSGKADVGDAGAKCFLILKLYDHKVDKSKWEMPTGSNMGEAKPWKAIRVDLVRCPYGGFAFAMLQWTGSRMFRRDLRWYATDEKNMMLDNHALYDLTKKIFLKAKSEEEIFAHLGLEYLEPFERNA

SEQ ID NO: 2515 - DNA, 1587 bp, synthetic construct
  misc_feature 1..1587: note = Variant of terminal deoxynucleotidyltransferase
  source 1..1587: mol_type = other DNA
atgcaccatcatcatcatcatggcggtagcggcagccacggcattcgtaccatcgattcggacttcgggaagaaacgccagaaaaaaatggataaccacgatagttccgccatctatgaaatcaaatttcacgagtttgtgctgttcattctcgaagaaaaaatgggtgcgacgcgtcgtacttttctgacagatttagcccgcaagaaagggttccgcgtcgagaatgaactgtcagacagcgttacccacatcgtggcagaaaataattcacgctctgaagtattggcttggctgaaagaacacaagatggagaagaccaagcaattcgaactgctggatattagctggcttatcgaaagcatgaaagttggtaaaccggtggacaccaaggggaaataccagttggcggaatcgggtgagatgagtgcgaacccagatccgacagagggtcgtgaaaacgagctgcctcctactatgaagaccgtttctccgtatgcgtgtcaacgccgcaccaccctgaacaaccataatcaacgttttacggacgcactggaaattcttgcggaaaattacgagttcaaacgcaacgatgatactgcgctggaatttcgtcgtgctatctccgtgctgaaaagccttccgtttgaggtacgtagcctgaaagacacggaaggattgccctggatcggtgatgaagtcaaagggattatggaagaaatcatcgaggtcggtgaatcgctggaagtgcaggccgtgctcaatgatgagtggtatcaaagcttccaccgctttaagagtgtctttggagtgggggtgaagacagcagacaagtggtaccgtatgggtatgcgcaccctcgaggatgttcgttccagcaagaccctgaagttgaccccgatgcagaaagcgggtctgtgctattatgaagatcttgctcgcggcgttacgaaagccgaagctgacgcgatttctctgctggttcaggatgcagtcgcaactttcgacccggatgcgctggtggagattgtcggtggatttcgtcgtgggaaacctcagggtcacgacgttgatctgcttatcacatctccgggagctgagaaagagcaagaagaccagctcctgcagaaagtgaccaatctgtggaagaaacaagggttgttgctgtacggtcgtctggaatggagtcagtgggaagatgggaaactcccatccggtaaggctgatgccggtgacgcgggtgcgaaatgctttctgatcctcaaactttatgatcataaagtggacaaaagcaaatgggaaatgccgacgggttcgaacatgggcgaggccaaaccgtggaaagcaattcgcgtagatctggttcgttgcccctacggcggttttgcgtttgcgatgttgcagtggaccggaagccgcatgttccgccgtgatctgcgctggtacgccactgacgagaagaacatgatgctggacaatcatgcgctgtatgacctgaccaagaaaatctttctcaaagctaaatcggaagaggaaattttcgcacatctggggcttgaatacctggaaccgttcgaacgtaacgca

SEQ ID NO: 2516 - protein, 529 aa, synthetic construct
  REGION 1..529: note = Variant of terminal deoxynucleotidyltransferase
MHHHHHHGGSGSHGIRTIDSDFGKKRQKKMDNHDSSAIYEIKFHEFVLFILEEKMGATRRTFLTDLARKKGFRVENELSDSVTHIVAENNSRSEVLAWLKEHKMEKTKQFELLDISWLIESMKVGKPVDTKGKYQLAESGEMSANPDPTEGRENELPPTMKTVSPYACQRRTTLNNHNQRFTDALEILAENYEFKRNDDTALEFRRAISVLKSLPFEVRSLKDTEGLPWIGDEVKGIMEEIIEVGESLEVQAVLNDEWYQSFHRFKSVFGVGVKTADKWYRMGMRTLEDVRSSKTLKLTPMQKAGLCYYEDLARGVTKAEADAISLLVQDAVATFDPDALVEIVGGFRRGKPQGHDVDLLITSPGAEKEQEDQLLQKVTNLWKKQGLLLYGRLEWSQWEDGKLPSGKADAGDAGAKCFLILKLYDHKVDKSKWEMPTGSNMGEAKPWKAIRVDLVRCPYGGFAFAMLQWTGSRMFRRDLRWYATDEKNMMLDNHALYDLTKKIFLKAKSEEEIFAHLGLEYLEPFERNA

SEQ ID NO: 2517 - DNA, 1587 bp, synthetic construct
  misc_feature 1..1587: note = Variant of terminal deoxynucleotidyltransferase
  source 1..1587: mol_type = other DNA
atgcaccatcatcatcatcatggcggtagcggcagccacggcattcgtaccatcgattcggacttcgggaagaaacgccagaaaaaaatggataaccacgatagttccgccatctatgaaatcaaatttcacgagtttgtgctgttcattctcgaagaaaaaatgggtgcgacgcgtcgtacttttctgacagatttagcccgcaagaaagggttccgcgtcgagaatgaactgtcagacagcgttacccacatcgtggcagaaaataattcacgctctgaagtattggcttggctgaaagaacacaagatggagaagaccaagcaattcgaactgctggatattagctggcttatcgaaagcatgaaagttggtaaaccggtggacaccaaggggaaataccagttggcggaatcgggtgagatgagtgcgaacccagatccgacagagggtcgtgaaaacgagctgcctcctactatgaagaccgtttctccgtatgcgtgtcaacgccgcaccaccctgaacaaccataatcaacgttttacggacgcactggaaattcttgcggaaaattacgagttcaaacgccgtgatgatactgcgctggaatttcgtcgtgctatctccgtgctgaaaagccttccgtttgaggtacgtagcctgaaagacacggaaggattgccctggatcggtgatgaagtcaaagggattatggaagaaatcatcgaggtcggtgaatcgctggaagtgcaggccgtgctcaatgatgagtggtatcaaagcttccaccgctttaagagtgtctttggagtgggggtgaaaacagcagacaagtggtaccgtatgggtctgcgcaccctcgaggatgttcgttccagcaagaccctgaagttgaccccgatgcagaaagcgggtctgtgctattatgaagatcttgctcgcggcgttacgaaagccgaagctgacgcgatttctctgctggttcaggatgcagtcgcaactttcgacccggatgcgctggtggagattgtcggtggatttcgtcgtgggaaacctcagggtcacgacgttgatctgcttatcacctctccgggagctgagaaagagcaagaagaccagctcctgcagaaagtgaccaatctgtggaagaaacaagggttgttgctgtacggtcgtctggaatggagtcagtttgaagatgggaaactcccatccggtaaggctgatgccggtgacgcgggtgcgaaatgctttctgatcctcaaactttatgatcataaagtggacaaaagcaaatgggaaatgccgacgggttcgaacatgggcgaggccaaaccgtggaaagcaattcgcgtagatctgctgcgttgcccctacggcggttttgcgtttgcgttgttgcagtggaccggaagccgcatgttccgccgtgatctgcgctggtacgccactgacgagaagaacatgatgctggacaatcatgcgctgtatgacctgaccaagaaaatctttctcaaagctaaatcggaagaggaaattttcgcacatctggggcttgaatacctggaaccgttcgaacgtaacgca

SEQ ID NO: 2518 - protein, 529 aa, synthetic construct
  REGION 1..529: note = Variant of terminal deoxynucleotidyltransferase
MHHHHHHGGSGSHGIRTIDSDFGKKRQKKMDNHDSSAIYEIKFHEFVLFILEEKMGATRRTFLTDLARKKGFRVENELSDSVTHIVAENNSRSEVLAWLKEHKMEKTKQFELLDISWLIESMKVGKPVDTKGKYQLAESGEMSANPDPTEGRENELPPTMKTVSPYACQRRTTLNNHNQRFTDALEILAENYEFKRRDDTALEFRRAISVLKSLPFEVRSLKDTEGLPWIGDEVKGIMEEIIEVGESLEVQAVLNDEWYQSFHRFKSVFGVGVKTADKWYRMGLRTLEDVRSSKTLKLTPMQKAGLCYYEDLARGVTKAEADAISLLVQDAVATFDPDALVEIVGGFRRGKPQGHDVDLLITSPGAEKEQEDQLLQKVTNLWKKQGLLLYGRLEWSQFEDGKLPSGKADAGDAGAKCFLILKLYDHKVDKSKWEMPTGSNMGEAKPWKAIRVDLLRCPYGGFAFALLQWTGSRMFRRDLRWYATDEKNMMLDNHALYDLTKKIFLKAKSEEEIFAHLGLEYLEPFERNA

SEQ ID NO: 2519 - DNA, 1587 bp, synthetic construct
  misc_feature 1..1587: note = Variant of terminal deoxynucleotidyltransferase
  source 1..1587: mol_type = other DNA
atgcaccatcatcatcatcatggcggtagcggcagccacggcattcgtaccatcgattcggacttcgggaagaaacgccagaaaaaaatggataaccacgatagttccgccatctatgaaatcaaatttcacgagtttgtgctgttcattctcgaagaaaaaatgggtgcgacgcgtcgtacttttctgacagatttagcccgcaagaaagggttccgcgtcgagaatgaactgtcagacagcgttacccacatcgtggcagaaaataattcacgctctgaagtattggcttggctgaaagaacacaagatggagaagaccaagcaattcgaactgctggatattagctggcttatcgaaagcatgaaagttggtaaaccggtggacaccaaggggaaataccagttggcggaatcgggtgagatgagtgcgaacccagatccgacagagggtcgtgaaaacgagctgcctcctactatgaagaccgtttctccgtatgcgtgtcaacgccgcaccaccctgaacaaccataatcaacgttttacggacgcactggaaattcttgcggaaaattacgagttcaaacgccgtgatgatactgcgctggaatttcgtcgtgctatctccgtgctgaaaagccttccgtttgaggtacgtagcctgaaagacacggaaggattgccctggatcggtgatgaagtcaaagggattatggaagaaatcatcgaggtcggtgaatcgctggaagtgcaggccgtgctcaatgatgagtggtatcaaagcttccaccgctttaagagtgtctttggagtgggggtgaaaacagcagacaagtggtaccgtatgggtctgcgcaccctcgaggatgttcgttccagcaagaccctgaagttgaccccgatgcagaaagcgggtctgtgctattatgaagatcttgctcgcggcgttacgaaagccgaagctgacgcgatttctctgctggttcaggatgcagtcgcaactttcgacccggatgcgctggtggagattgtcggtggatttcgtcgtgggaaacctcagggtcacgacgttgatctgcttatcacctctccgggagctgagaaagagcaagaagaccagctcctgcagaaagtgaccaatctgtggaagaaacaagggttgttgctgtacggtcgtctggaatggagtcagtttgaagatgggaaactcccatcgggtagtgctgatgccggtgacgcgggtgcgaaatgctttctgatcctcaaactttatgatcataaagtggacaaaagcaaatgggaaatgccgacgggttcgaacatgggcgaggccaaaccgtggaaagcaattcgcgtagatctgctgcgttgcccctacggcggttttgcgtttgcgttgttgcagtggaccggaagccgcatgttccgccgtgatctgcgctggtacgccactgacgagaagaacatgatgctggacaatcatgcgctgtatgacctgaccaagaaaatctttctcaaagctaaaagtgaagaggaaattttcgcacatctggggcttgaatacctggaaccgttcgaacgtaacgca

SEQ ID NO: 2520 - protein, 529 aa, synthetic construct
  REGION 1..529: note = Variant of terminal deoxynucleotidyltransferase
MHHHHHHGGSGSHGIRTIDSDFGKKRQKKMDNHDSSAIYEIKFHEFVLFILEEKMGATRRTFLTDLARKKGFRVENELSDSVTHIVAENNSRSEVLAWLKEHKMEKTKQFELLDISWLIESMKVGKPVDTKGKYQLAESGEMSANPDPTEGRENELPPTMKTVSPYACQRRTTLNNHNQRFTDALEILAENYEFKRRDDTALEFRRAISVLKSLPFEVRSLKDTEGLPWIGDEVKGIMEEIIEVGESLEVQAVLNDEWYQSFHRFKSVFGVGVKTADKWYRMGLRTLEDVRSSKTLKLTPMQKAGLCYYEDLARGVTKAEADAISLLVQDAVATFDPDALVEIVGGFRRGKPQGHDVDLLITSPGAEKEQEDQLLQKVTNLWKKQGLLLYGRLEWSQFEDGKLPSGSADAGDAGAKCFLILKLYDHKVDKSKWEMPTGSNMGEAKPWKAIRVDLLRCPYGGFAFALLQWTGSRMFRRDLRWYATDEKNMMLDNHALYDLTKKIFLKAKSEEEIFAHLGLEYLEPFERNA

SEQ ID NO: 2521 - DNA, 1587 bp, synthetic construct
  misc_feature 1..1587: note = Variant of terminal deoxynucleotidyltransferase
  source 1..1587: mol_type = other DNA
atgcaccatcatcatcatcatggcggtagcggcagccacggcattcgtaccatcgattcggacttcgggaagaaacgccagaaaaaaatggataaccacgatagttccgccatctatgaaatcaaatttcacgagtttgtgctgttcattctcgaagaaaaaatgggtgcgacgcgtcgtacttttctgacagatttagcccgcaagaaagggttccgcgtcgagaatgaactgtcagacagcgttacccacatcgtggcagaaaataattcacgctctgaagtattggcttggctgaaagaacacaagatggagaagaccaagcaattcgaactgctggatattagctggcttatcgaaagcatgaaagttggtaaaccggtggacaccaaggggaaataccagttggcggaatcgggtgagatgagtgcgaacccagatccgacagagggtcgtgaaaacgagctgcctcctactatgaagaccgtttctccgtatgcgtgtcaacgccgcaccaccctgaacaaccataatcaacgttttacggacgcactggaaattcttgcggaaaattacgagttcaaacgcaacgatgatactgcgctggaatttcgtcgtgctatctccgtgctgaaaagccttccgtttgaggtacgtagcctgaaagacacggaaggattgccctggatcggtgatgaagtcaaagggattatggaagaaatcatcgaggtcggggaatcgctggaagtgcaggccgtgctcaatgatgagtggtatcaaagcttccaccgctttaagagtgtctttggagtgggggtgaagacagcagacaagtggtaccgtatgggtctgcgcaccctcgaggatgttcgttccagcaagaccctgaagttgaccccgatgcagaaagcgggtctgtgctattatgaagatcttgctcgcggcgttacgaaagccgaagctgacgcgatttctctgctggttcaggatgcagtcgcaactttcgacccggatgcgctggtggagattgtcggtggatttcgtcgtgggaaacctcagggtcacgacgttgatctgcttatcacatctccgggagctgagaaagagcaagaagaccagctcctgcagaaagtgaccaatctgtggaagaaacaagggttgttgctgtacggtcgtctggaatggagtcagtttgaagatgggaaactcccatccggtaaggctgatgccggtgacgcgggtgcgaaatgctttctgatcctcaaactttatgatcataaagtggacaaaagcaaatgggaaatgccgacgggttcgaacatgggcgaggccaaaccgtggaaagcaattcgcgtagatctggttcgttgcccctacggcggttttgcgtttgcgatgttgcagtggaccggaagccgcatgttccgccgtgatctgcgctggtacgccactgacgagaagaacatgatgctggacaatcatgcgctgtatgacctgaccaagaaaatctttctcaaagctaaatcggaagaggaaattttcgcacatctggggcttgaatacctggaaccgttcgaacgtaacgca

SEQ ID NO: 2522 - protein, 529 aa, synthetic construct
  REGION 1..529: note = Variant of terminal deoxynucleotidyltransferase
MHHHHHHGGSGSHGIRTIDSDFGKKRQKKMDNHDSSAIYEIKFHEFVLFILEEKMGATRRTFLTDLARKKGFRVENELSDSVTHIVAENNSRSEVLAWLKEHKMEKTKQFELLDISWLIESMKVGKPVDTKGKYQLAESGEMSANPDPTEGRENELPPTMKTVSPYACQRRTTLNNHNQRFTDALEILAENYEFKRNDDTALEFRRAISVLKSLPFEVRSLKDTEGLPWIGDEVKGIMEEIIEVGESLEVQAVLNDEWYQSFHRFKSVFGVGVKTADKWYRMGLRTLEDVRSSKTLKLTPMQKAGLCYYEDLARGVTKAEADAISLLVQDAVATFDPDALVEIVGGFRRGKPQGHDVDLLITSPGAEKEQEDQLLQKVTNLWKKQGLLLYGRLEWSQFEDGKLPSGKADAGDAGAKCFLILKLYDHKVDKSKWEMPTGSNMGEAKPWKAIRVDLVRCPYGGFAFAMLQWTGSRMFRRDLRWYATDEKNMMLDNHALYDLTKKIFLKAKSEEEIFAHLGLEYLEPFERNA

SEQ ID NO: 2523 - DNA, 1587 bp, synthetic construct
  misc_feature 1..1587: note = Variant of terminal deoxynucleotidyltransferase
  source 1..1587: mol_type = other DNA
atgcaccatcatcatcatcatggcggtagcggcagccacggcattcgtaccatcgattcggacttcgggaagaaacagcagaaaaaaatggataaccacgatagttccgccatctatgaaatcaaatttcacgagtttgtgctgttcattctcgaagaaaaaatgggtgcgacgcgtcgtacttttctgacagatttagcccgcaagaaagggttccgcgtcgagaatgaactgtcagacagcgttacccacatcgtggcagaaaatctgtcacgctctgaagtattggcttggctgaaagaacacaagatggagaagaccaagcaattcgaactgctggatattagctggcttatcgaaagcatgaaagttggtaaaccggtggacaccaaggggaaataccagttggcggaatcgggtgagatgagtgcgaacccagatccgacagagggtcgtgaaaacgagctgcctcctactatgaagaccgtttctccgtatgcgtgtcaacgccgcaccaccctgaacaaccataatcaacgttttacggacgcactggaaattcttgcggaaaattacgagttcaaacgcaacgatgatactgcgctggaatttcgtcgtgctatctccgtgctgaaaagccttccgtttgaggtacgtagcctgaaagacacggaaggattgccctggatcggtgatgaagtcaaagggattatggaagaaatcatcgaggtcgggaattcgcgtgaagtgcaggccgtgctcaatgatgagtggtatcaaagcttccaccgctttaagagtgtctttggagtgggggtgaagacagcagacaagtggtaccgtatgggtctgcgcaccctcgaggatgttcgttccagcaagaccctgaagttgaccccgatgcagaaagcgggtctgtgctattatgaagatcttgctcgcggcgttacgaaagccgaagctgacgcgatttctctgctggttcaggatgcagtcgcaactttcgacccggatgcgctggtggagattgtcggtggatttcgtcgtgggaaacctcagggtcacgacgttgatctgcttatcagttctccgggagctgagaaagagcaagaagaccagctcctgcagaaagtgaccaatctgtggaagaaacaagggttgttgctgtacggtcgtctggaatggacccagtgggaagatgggaaactcccatccggtaaggctgacgtaggtgacgcgggtgcgaaatgctttctgatcctcaaactttatgatcataaagtggacaaaagcaaatgggaaatgccgacgggttcgaacatgggcgaggccaaaccgtggaaagcaattcgcgtagatctgctgcgttgcccctacggcggttttgcgtttgcgatgttgcagtggaccggaagccgcatgttccgccgtgatctgcgctggtacgccactgacgagaagaacatgatgctggacaatcatgcgctgtatgacctgaccaagaaaatctttctcaaagctaaatcggaagaggaaattttcgcacatctggggcttgaatacctggaaccgttcgaacgtaacgca

SEQ ID NO: 2524 - protein, 529 aa, synthetic construct
  REGION 1..529: note = Variant of terminal deoxynucleotidyltransferase
MHHHHHHGGSGSHGIRTIDSDFGKKQQKKMDNHDSSAIYEIKFHEFVLFILEEKMGATRRTFLTDLARKKGFRVENELSDSVTHIVAENLSRSEVLAWLKEHKMEKTKQFELLDISWLIESMKVGKPVDTKGKYQLAESGEMSANPDPTEGRENELPPTMKTVSPYACQRRTTLNNHNQRFTDALEILAENYEFKRNDDTALEFRRAISVLKSLPFEVRSLKDTEGLPWIGDEVKGIMEEIIEVGNSREVQAVLNDEWYQSFHRFKSVFGVGVKTADKWYRMGLRTLEDVRSSKTLKLTPMQKAGLCYYEDLARGVTKAEADAISLLVQDAVATFDPDALVEIVGGFRRGKPQGHDVDLLISSPGAEKEQEDQLLQKVTNLWKKQGLLLYGRLEWTQWEDGKLPSGKADVGDAGAKCFLILKLYDHKVDKSKWEMPTGSNMGEAKPWKAIRVDLLRCPYGGFAFAMLQWTGSRMFRRDLRWYATDEKNMMLDNHALYDLTKKIFLKAKSEEEIFAHLGLEYLEPFERNA

SEQ ID NO: 2525 - DNA, 1587 bp, synthetic construct
  misc_feature 1..1587: note = Variant of terminal deoxynucleotidyltransferase
  source 1..1587: mol_type = other DNA
atgcaccatcatcatcatcatggcggtagcggcagccacggcattcgtaccatcgattcggacttcgggaagaaacagcagaaaaaaatggataaccacgatagttccgccatctatgaaatcaaatttcacgagtttgtgctgttcattctcgaagaaaaaatgggtgcgacgcgtcgtacttttctgacagatttagcccgcaagaaagggttccgcgtcgagaatgaactgtcagacagcgttacccacatcgtggcagaaaatctgtcacgctctgaagtattggcttggctgaaagaacacaagatggagaagaccaagcaattcgaactgctggatattagctggcttatcgaaagcatgaaagttggtaaaccggtggacaccaaggggaaataccagttggcggaatcgggtgagatgagtgcgaacccagatccgacagagggtcgtgaaaacgagctgcctcctactatgaagaccgtttctccgtatgcgtgtcaacgccgcaccaccctgaacaaccataatcaacgttttacggacgcactggaaattcttgcggaaaattacgagttcaaacgcaacgatgatactgcgctggaatttcgtcgtgctatctccgtgctgaaaagccttccgtttgaggtacgtagcctgaaagacacggaaggattgccctggatcggtgatgaagtcaaagggattatggaagaaatcatcgaggtcgggaattcgcgtgaagtgcaggccgtgctcaatgatgagtggtatcaaagcttccaccgctttaagagtgtctttggagtgggggtgaagacagcagacaagtggtaccgtatgggtctgcgcaccctcgaggatgttcgttccagcaagaccctgaagttgaccccgatgcagaaggcgggtctgtgctattatgaagatcttgctcgcggcgttacgaaagccgaagctgacgcgatttctctgctggttcaggatgcagtcgcaactttcgacccggatgcgctggtggagattgtcggtggatttcgtcgtgggaaacctcagggtcacgacgttgatctgcttatcacatctccgggagctgagaaagagcaagaagaccagctcctgcagaaagtgaccaatctgtggaagaaacaagggttgttgctgtacggtcgtctggaatggacccagtgggaagatgggaaactcccatccggtaaggctgacgtaggtgacgcgggtgcgaaatgctttctgatcctcaaactttatgatcataaagtggacaaaagcaaatgggaaatgccgacgggttcgaacatgggcgaggccaaaccgtggaaagcaattcgcgtagatctgctgcgttgcccctacggcggttttgcgtttgcgatgttgcagtggaccggaagccgcatgttccgccgtgatctgcgctggtacgccactgacgagaagaacatgatgctggacaatcatgcgctgtatgacctgaccaagaaaatctttctcaaagctaaatcggaagaggaaattttcgcacatctggggcttgaatacctggaaccgttcgaacgtaacgca

SEQ ID NO: 2526 - protein, 529 aa, synthetic construct
  REGION 1..529: note = Variant of terminal deoxynucleotidyltransferase
MHHHHHHGGSGSHGIRTIDSDFGKKQQKKMDNHDSSAIYEIKFHEFVLFILEEKMGATRRTFLTDLARKKGFRVENELSDSVTHIVAENLSRSEVLAWLKEHKMEKTKQFELLDISWLIESMKVGKPVDTKGKYQLAESGEMSANPDPTEGRENELPPTMKTVSPYACQRRTTLNNHNQRFTDALEILAENYEFKRNDDTALEFRRAISVLKSLPFEVRSLKDTEGLPWIGDEVKGIMEEIIEVGNSREVQAVLNDEWYQSFHRFKSVFGVGVKTADKWYRMGLRTLEDVRSSKTLKLTPMQKAGLCYYEDLARGVTKAEADAISLLVQDAVATFDPDALVEIVGGFRRGKPQGHDVDLLITSPGAEKEQEDQLLQKVTNLWKKQGLLLYGRLEWTQWEDGKLPSGKADVGDAGAKCFLILKLYDHKVDKSKWEMPTGSNMGEAKPWKAIRVDLLRCPYGGFAFAMLQWTGSRMFRRDLRWYATDEKNMMLDNHALYDLTKKIFLKAKSEEEIFAHLGLEYLEPFERNA

SEQ ID NO: 2527 - DNA, 1587 bp, synthetic construct
  misc_feature 1..1587: note = Variant of terminal deoxynucleotidyltransferase
  source 1..1587: mol_type = other DNA
atgcaccatcatcatcatcatggcggtagcggcagccacggcattcgtaccatcgattcggacttcgggaagaaaattcagaaaaaaatggataaccacgatagttccgccatctatgaaatcaaatttcacgagtttgtgctgttcattctcgaagaaaaaatgggtgcgacgcgtcgtacttttctgacagatttagcccgcaagaaagggttccgcgtcgagaatgaactgtcagacagcgttacccacatcgtggcagaaaataattcacgctctgaagtattggcttggctgaaagaacacaagatggagaagaccaagcaattcgaactgctggatattagctggcttatcgaaagcatgaaagttggtaaaccggtggacaccaaggggaaataccagttggcggaatcgggtgagatgagtgcgaacccagatccgacagagggtcgtgaaaacgagctgcctcctactatgaagaccgtttctccgtatgcgtgtcaacgccgcaccaccctgaacaaccataatcaacgttttacggacgcactggaaattcttgcggaaaattacgagttcaaacgcaacgatgatactgcgctggaatttcgtcgtgctatctccgtgctgaaaagccttccgtttgaggtacgtagcctgaaagacacggaaggattgccctggatcggtgatgaagtcaaagggattatggaagaaatcatcgaggtcggggaatcgcgtgaagtgcaggccgtgctcaatgatgagtggtatcaaagcttccaccgctttaagagtgtctttggagtgggggtgaagacagcagacaagtggtaccgtatgggtctgcgcaccctcgaggatgttcgttccagcaagaccctgaagttgaccccgatgcagaaagcgggtctgtgctattatgaagatcttgctcgcggcgttacgaaagccgaagctgacgcgatttctctgctggttcaggatgcagtcgcaactttcgacccggatgcgctggtggagattgtcggtggatttcgtcgtgggaaacctcagggtcacgacgttgatctgcttatcacttctccgggagctgagaaagagcaagaagaccagctcctgcagaaagtgaccaatctgtggaagaaacaagggttgttgctgtacggtcgtctggaatggacccagtgggaagatgggaaactcccatccggtaaggctgacgtaggtgacgcgggtgcgaaatgctttctgatcctcaaactttatgatcataaagtggacaaaagcaaatgggaaatgccgacgggttcgaacatgggcgaggccaaaccgtggaaagcaattcgcgtagatctgctgcgttgcccctacggcggttttgcgtttgcgatgttgcagtggaccggaagccgcatgttccgccgtgatctgcgctggtacgccactgacgagaagaacatgatgctggacaatcatgcgctgtatgacctgaccaagaaaatctttctcaaagctaaatcggaagaggaaattttcgcacatctggggcttgaatacctggaaccgttcgaacgtaacgca

SEQ ID NO: 2528 - protein, 529 aa, synthetic construct
  REGION 1..529: note = Variant of terminal deoxynucleotidyltransferase
MHHHHHHGGSGSHGIRTIDSDFGKKIQKKMDNHDSSAIYEIKFHEFVLFILEEKMGATRRTFLTDLARKKGFRVENELSDSVTHIVAENNSRSEVLAWLKEHKMEKTKQFELLDISWLIESMKVGKPVDTKGKYQLAESGEMSANPDPTEGRENELPPTMKTVSPYACQRRTTLNNHNQRFTDALEILAENYEFKRNDDTALEFRRAISVLKSLPFEVRSLKDTEGLPWIGDEVKGIMEEIIEVGESREVQAVLNDEWYQSFHRFKSVFGVGVKTADKWYRMGLRTLEDVRSSKTLKLTPMQKAGLCYYEDLARGVTKAEADAISLLVQDAVATFDPDALVEIVGGFRRGKPQGHDVDLLITSPGAEKEQEDQLLQKVTNLWKKQGLLLYGRLEWTQWEDGKLPSGKADVGDAGAKCFLILKLYDHKVDKSKWEMPTGSNMGEAKPWKAIRVDLLRCPYGGFAFAMLQWTGSRMFRRDLRWYATDEKNMMLDNHALYDLTKKIFLKAKSEEEIFAHLGLEYLEPFERNA

SEQ ID NO: 2529 - DNA, 1587 bp, synthetic construct
  misc_feature 1..1587: note = Variant of terminal deoxynucleotidyltransferase
  source 1..1587: mol_type = other DNA
atgcaccatcatcatcatcatggcggtagcggcagccacggcattcgtaccatcgattcggacttcgggaagaaaggccagaaaaaaatggataaccacgatagttccgccatctatgaaatcaaatttcacgagtttgtgctgttcattctcgaagaaaaaatgggtgcgacgcgtcgtacttttctgacagatttagcccgcaagaaagggttccgcgtcgagaatgaactgtcagacagcgttacccacatcgtggcagaaaatctgtcacgctctgaagtattggcttggctgaaagaacacaagatggagaagaccaagcaattcgaactgctggatattagctggcttatcgaaagcatgaaagttggtaaaccggtggacaccaaggggaaataccagttggcggaatcgggtgagatgagtgcgaacccagatccgacagagggtcgtgaaaacgagctgcctcctactatgaagaccgtttctccgtatgcgtgtcaacgccgcaccaccctgaacaaccataatcaacgttttacggacgcactggaaattcttgcggaaaattacgagttcaaacgcaacgatgatactgcgctggaatttcgtcgtgctatctccgtgctgaaaagccttccgtttgaggtacgtagcctgaaagacacggaaggattgccctggatcggtgatgaagtcaaagggattatggaagaaatcatcgaggtcggggaatcggtggaagtgcaggccgtgctcaatgatgagtggtatcaatcgttccaccgctttaagagtgtctttggagtgggggtgaagacagcagacaagtggtaccgtatgggtctgcgcaccctcgaggatgttcgttccagcaagaccctgaagttgaccccgatgcagaaggcgggtctgtgctattatgaagatcttgctcgcggcgttacgaaagccgaagctgacgcgatttctctgctggttcaggatgcagtcgcaactttcgacccggatgcgctggtggagattgtcggtggatttcgtcgtgggaaacctcagggtcacgacgttgatctgcttatcacttctccgggagctgagaaagagcaagaagaccagctcctgcagaaagtgaccaatctgtggaagaaacaagggttgttgctgtacggtcgtctggaatggacccagtgggaagatgggaaactcccatccggtaaggctgacgtaggtgacgcgggtgcgaaatgctttctgatcctcaaactttatgatcataaagtggacaaaagcaaatgggaaatgccgacgggttcgaacatgggcgaggccaaaccgtggaaagcaattcgcgtagatctgctgcgttgcccccacggcggttttgcgtttgcgatgttgcagtggaccggaagccgcatgttccgccgtgatctgcgctggtacgccactgacgagaagaacatgatgctggacaatcatgcgctgtatgacctgaccaagaaaatctttctcaaagctaaatcggaagaggaaattttcgcacatctggggcttgaatacctggaaccgttcgaacgtaacgca

SEQ ID NO: 2530 - protein, 529 aa, synthetic construct
  REGION 1..529: note = Variant of terminal deoxynucleotidyltransferase
MHHHHHHGGSGSHGIRTIDSDFGKKGQKKMDNHDSSAIYEIKFHEFVLFILEEKMGATRRTFLTDLARKKGFRVENELSDSVTHIVAENLSRSEVLAWLKEHKMEKTKQFELLDISWLIESMKVGKPVDTKGKYQLAESGEMSANPDPTEGRENELPPTMKTVSPYACQRRTTLNNHNQRFTDALEILAENYEFKRNDDTALEFRRAISVLKSLPFEVRSLKDTEGLPWIGDEVKGIMEEIIEVGESVEVQAVLNDEWYQSFHRFKSVFGVGVKTADKWYRMGLRTLEDVRSSKTLKLTPMQKAGLCYYEDLARGVTKAEADAISLLVQDAVATFDPDALVEIVGGFRRGKPQGHDVDLLITSPGAEKEQEDQLLQKVTNLWKKQGLLLYGRLEWTQWEDGKLPSGKADVGDAGAKCFLILKLYDHKVDKSKWEMPTGSNMGEAKPWKAIRVDLLRCPHGGFAFAMLQWTGSRMFRRDLRWYATDEKNMMLDNHALYDLTKKIFLKAKSEEEIFAHLGLEYLEPFERNA

SEQ ID NO: 2531 - DNA, 1587 bp, synthetic construct
  misc_feature 1..1587: note = Variant of terminal deoxynucleotidyltransferase
  source 1..1587: mol_type = other DNA
atgcaccatcatcatcatcatggcggtagcggcagccacggcattcgtaccatcgattcggacttcgggaagaaacagcagaaaaaaatggataaccacgatagttccgccatctatgaaatcaaatttcacgagtttgtgctgttcattctcgaagaaaaaatgggtgcgacgcgtcgtacttttctgacagatttagcccgcaagaaagggttccgcgtcgagaatgaactgtcagacagcgttacccacatcgtggcagaaaatctgtcacgctctgaagtattggcttggctgaaagaacacaagatggagaagaccaagcaattcgaactgctggatattagctggcttatcgaaagcatgaaagttggtaaaccggtggacaccaaggggaaataccagttggcggaatcgggtgagatgagtgcgaacccagatccgacagagggtcgtgaaaacgagctgcctcctactatgaagaccgtttctccgtatgcgtgtcaacgccgcaccaccctgaacaaccataatcaacgttttacggacgcactggaaattcttgcggaaaattacgagttcaaacgcaacgatgatactgcgctggaatttcgtcgtgctatctccgtgctgaaaagccttccgtttgaggtacgtagcctgaaagacacggaaggattgccctggatcggtgatgaagtcaaagggattatggaagaaatcatcgaggtcgggaattcgctggaagtgcaggccgtgctcaatgatgagtggtatcaaagcttccaccgctttaagagtgtctttggagtgggggtgaagacagcagacaagtggtaccgtatgggtctgcgcaccctcgaggatgttcgttccagcaagaccctgaagttgaccccgatgcagaaagcgggtctgtgctattatgaagatcttgctcgcggcgttacgaaagccgaagctgacgcgatttctctgctggttcaggatgcagtcgcaactttcgacccggatgcgctggtggagattgtcggtggatttcgtcgtgggaaacctcagggtcacgacgttgatctgcttatcacatctccgggagctgagaaagagcaagaagaccagctcctgcagaaagtgaccaatctgtggaagaaacaagggttgttgctgtacggtcgtctggaatggacccagtgggaagatgggaaactcccatccggtaaggctgacgtaggtgacgcgggtgcgaaatgctttctgatcctcaaactttatgatcataaagtggacaaaagcaaatgggaaatgccgacgggttcgaacatgggcgaggccaaaccgtggaaagcaattcgcgtagatctgctgcgttgcccctacggcggttttgcgtttgcgatgttgcagtggaccggaagccgcatgttccgccgtgatctgcgctggtacgccactgacgagaagaacatgatgctggacaatcatgcgctgtatgacctgaccaagaaaatctttctcaaagctaaatcggaagaggaaattttcgcacatctggggcttgaatacctggaaccgttcgaacgtaacgca

SEQ ID NO: 2532 - protein, 529 aa, synthetic construct
  REGION 1..529: note = Variant of terminal deoxynucleotidyltransferase
MHHHHHHGGSGSHGIRTIDSDFGKKQQKKMDNHDSSAIYEIKFHEFVLFILEEKMGATRRTFLTDLARKKGFRVENELSDSVTHIVAENLSRSEVLAWLKEHKMEKTKQFELLDISWLIESMKVGKPVDTKGKYQLAESGEMSANPDPTEGRENELPPTMKTVSPYACQRRTTLNNHNQRFTDALEILAENYEFKRNDDTALEFRRAISVLKSLPFEVRSLKDTEGLPWIGDEVKGIMEEIIEVGNSLEVQAVLNDEWYQSFHRFKSVFGVGVKTADKWYRMGLRTLEDVRSSKTLKLTPMQKAGLCYYEDLARGVTKAEADAISLLVQDAVATFDPDALVEIVGGFRRGKPQGHDVDLLITSPGAEKEQEDQLLQKVTNLWKKQGLLLYGRLEWTQWEDGKLPSGKADVGDAGAKCFLILKLYDHKVDKSKWEMPTGSNMGEAKPWKAIRVDLLRCPYGGFAFAMLQWTGSRMFRRDLRWYATDEKNMMLDNHALYDLTKKIFLKAKSEEEIFAHLGLEYLEPFERNA

SEQ ID NO: 2533 - DNA, 1587 bp, synthetic construct
  misc_feature 1..1587: note = Variant of terminal deoxynucleotidyltransferase
  source 1..1587: mol_type = other DNA
atgcaccatcatcatcatcatggcggtagcggcagccacggcattcgtaccatcgattcggacttcgggaagaaacagcagaaaaaaatggataaccacgatagttccgccatctatgaaatcaaatttcacgagtttgtgctgttcattctcgaagaaaaaatgggtgcgacgcgtcgtacttttctgacagatttagcccgcaagaaagggttccgcgtcgagaatgaactgtcagacagcgttacccacatcgtggcagaaaatctgtcacgctctgaagtattggcttggctgaaagaacacaagatggagaagaccaagcaattcgaactgctggatattagctggcttatcgaaagcatgaaagttggtaaaccggtggacaccaaggggaaataccagttggcggaatcgggtgagatgagtgcgaacccagatccgacagagggtcgtgaaaacgagctgcctcctactatgaagaccgtttctccgtatgcgtgtcaacgccgcaccaccctgaacaaccataatcaacgttttacggacgcactggaaattcttgcggaaaattacgagttcaaacgcaacgatgatactgcgctggaatttcgtcgtgctatctccgtgctgaaaagccttccgtttgaggtacgtagcctgaaagacacggaaggattgccctggatcggtgatgaagtcaaagggattatggaagaaatcatcgaggtcggggaatcgcgtgaagtgcaggccgtgctcaatgatgagtggtatcaatcgttccaccgctttgtcagtgtctttggagtgggggtgaagacagcagacaagtggtaccgtatgggtctgcgcaccctcgaggatgttcgttccagcaagaccctgaagttgaccccgatgcagaaggcgggtctgtgctattatgaagatcttgctcgcggcgttacgaaagccgaagctgacgcgatttctctgctggttcaggatgcagtcgcaactttcgacccggatgcgctggtggagattgtcggtggatttcgtcgtgggaaacctcagggtcacgacgttgatctgcttatcacttctccgggagctgagaaagagcaagaagaccagctcctgcagaaagtgaccaatctgtggaagaaacaagggttgttgctgtacggtcgtctggaatggacccagtgggaagatgggaaactcccatccggtaaggctgacgtaggtgacgcgggtgcgaaatgctttctgatcctcaaactttatgatcataaagtggacaaaagcaaatgggaaatgccgacgggttcgaacatgggcgaggccaaaccgtggaaagcaattcgcgtagatctgctgcgttgcccctacggcggttttgcgtttgcgatgttgcagtggaccggaagccgcatgttccgccgtgatctgcgctggtacgccactgacgagaagaacatgatgctggacaatcatgcgctgtatgacctgaccaagaaaatctttctcaaagctaaatcggaagaggaaattttcgcacatctggggcttgaatacctggaaccgttcgaacgtaacgca

SEQ ID NO: 2534 - protein, 529 aa, synthetic construct
  REGION 1..529: note = Variant of terminal deoxynucleotidyltransferase
MHHHHHHGGSGSHGIRTIDSDFGKKQQKKMDNHDSSAIYEIKFHEFVLFILEEKMGATRRTFLTDLARKKGFRVENELSDSVTHIVAENLSRSEVLAWLKEHKMEKTKQFELLDISWLIESMKVGKPVDTKGKYQLAESGEMSANPDPTEGRENELPPTMKTVSPYACQRRTTLNNHNQRFTDALEILAENYEFKRNDDTALEFRRAISVLKSLPFEVRSLKDTEGLPWIGDEVKGIMEEIIEVGESREVQAVLNDEWYQSFHRFVSVFGVGVKTADKWYRMGLRTLEDVRSSKTLKLTPMQKAGLCYYEDLARGVTKAEADAISLLVQDAVATFDPDALVEIVGGFRRGKPQGHDVDLLITSPGAEKEQEDQLLQKVTNLWKKQGLLLYGRLEWTQWEDGKLPSGKADVGDAGAKCFLILKLYDHKVDKSKWEMPTGSNMGEAKPWKAIRVDLLRCPYGGFAFAMLQWTGSRMFRRDLRWYATDEKNMMLDNHALYDLTKKIFLKAKSEEEIFAHLGLEYLEPFERNA

SEQ ID NO: 2535 - DNA, 1587 bp, synthetic construct
  misc_feature 1..1587: note = Variant of terminal deoxynucleotidyltransferase
  source 1..1587: mol_type = other DNA
atgcaccatcatcatcatcatggcggtagcggcagccacggcattcgtaccatcgattcggacttcgggaagaaacgccagaaaaaaatggataaccacgatagttccgccatctatgaaatcaaatttcacgagtttgtgctgttcattctcgaagaaaaaatgggtgcgacgcgtcgtacttttctgacagatttagcccgcaagaaagggttccgcgtcgagaatgaactgtcagacagcgttacccacatcgtggcagaaaatctgtcacgctctgaagtattggcttggctgaaagaacacaagatggagaagaccaagcaattcgaactgctggatattagctggcttatcgaaagcatgaaagttggtaaaccggtggacaccaaggggaaataccagttggcggaatcgggtgagatgagtgcgaacccagatccgacagagggtcgtgaaaacgagctgcctcctactatgaagaccgtttctccgtatgcgtgtcaacgccgcaccaccctgaacaaccataatcaacgttttacggacgcactggaaattcttgcggaaaattacgagttcaaacgcaacgatgatactgcgctggaatttcgtcgtgctatctccgtgctgaaaagccttccgtttgaggtacgtagcctgaaagacacggaaggattgccctggatcggtgatgaagtcaaagggattatggaagaaatcatcgaggtcgggaattcgcgtgaagtgcaggccgtgctcaatgatgagtggtatcaagcgttccaccgctttgtcagtgtctttggagtgggggtgaagacagcagacaagtggtaccgtatgggtctgcgcaccctcgaggatgttcgttccagcaagaccctgaagttgaccccgatgcagaaggcgggtctgtgctattatgaagatcttgctcgcggcgttacgaaagccgaagctgacgcgatttctctgctggttcaggatgcagtcgcaactttcgacccggatgcgctggtggagattgtcggtggatttcgtcgtgggaaacctcagggtcacgacgttgatctgcttatcagttctccgggagctgagaaagagcaagaagaccagctcctgcagaaagtgaccaatctgtggaagaaacaagggttgttgctgtacggtcgtctggaatggacccagtgggaagatgggaaactcccatccggtaaggctgacgtaggtgacgcgggtgcgaaatgctttctgatcctcaaactttatgatcataaagtggacaaaagcaaatgggaaatgccgacgggttcgaacatgggcgaggccaaaccgtggaaagcaattcgcgtagatctgctgcgttgcccctacggcggttttgcgtttgcgatgttgcagtggaccggaagccgcatgttccgccgtgatctgcgctggtacgccactgacgagaagaacatgatgctggacaatcatgcgctgtatgacctgaccaagaaaatctttctcaaagctaaatcggaagaggaaattttcgcacatctggggcttgaatacctggaaccgttcgaacgtaacgca

SEQ ID NO: 2536 - protein, 529 aa, synthetic construct
  REGION 1..529: note = Variant of terminal deoxynucleotidyltransferase
MHHHHHHGGSGSHGIRTIDSDFGKKRQKKMDNHDSSAIYEIKFHEFVLFILEEKMGATRRTFLTDLARKKGFRVENELSDSVTHIVAENLSRSEVLAWLKEHKMEKTKQFELLDISWLIESMKVGKPVDTKGKYQLAESGEMSANPDPTEGRENELPPTMKTVSPYACQRRTTLNNHNQRFTDALEILAENYEFKRNDDTALEFRRAISVLKSLPFEVRSLKDTEGLPWIGDEVKGIMEEIIEVGNSREVQAVLNDEWYQAFHRFVSVFGVGVKTADKWYRMGLRTLEDVRSSKTLKLTPMQKAGLCYYEDLARGVTKAEADAISLLVQDAVATFDPDALVEIVGGFRRGKPQGHDVDLLISSPGAEKEQEDQLLQKVTNLWKKQGLLLYGRLEWTQWEDGKLPSGKADVGDAGAKCFLILKLYDHKVDKSKWEMPTGSNMGEAKPWKAIRVDLLRCPYGGFAFAMLQWTGSRMFRRDLRWYATDEKNMMLDNHALYDLTKKIFLKAKSEEEIFAHLGLEYLEPFERNA

SEQ ID NO: 2537 - DNA, 1587 bp, synthetic construct
  misc_feature 1..1587: note = Variant of terminal deoxynucleotidyltransferase
  source 1..1587: mol_type = other DNA
atgcaccatcatcatcatcatggcggtagcggcagccacggcattcgtaccatcgattcggacttcgggaagaaaggccagaaaaaaatggataaccacgatagttccgccatctatgaaatcaaatttcacgagtttgtgctgttcattctcgaagaaaaaatgggtgcgacgcgtcgtacttttctgacagatttagcccgcaagaaagggttccgcgtcgagaatgaactgtcagacagcgttacccacatcgtggcagaaaatctgtcacgctctgaagtattggcttggctgaaagaacacaagatggagaagaccaagcaattcgaactgctggatattagctggcttatcgaaagcatgaaagttggtaaaccggtggacaccaaggggaaataccagttggcggaatcgggtgagatgagtgcgaacccagatccgacagagggtcgtgaaaacgagctgcctcctactatgaagaccgtttctccgtatgcgtgtcaacgccgcaccaccctgaacaaccataatcaacgttttacggatgcactggaaattcttgcggaaaattacgagttcaaacgcaacgatgatactgcgctggaatttcgtcgtgctatctccgtgctgaaaagccttccgtttgaggtacgtagcctgaaagacacggaaggattgccctggatcggtgatgaagtcaaagggattatggaagaaatcatcgaggtcggggaatcgctggaagtgcaggccgtgctcaatgatgagtggtatcaatcgttccaccgctttgtcagtgtctttggagtgggggtgaagacagcagacaagtggtaccgtatgggtctgcgcaccctcgaggatgttcgttccagcaagaccctgaagttgaccccgatgcagaaggcgggtctgtgctattatgaagatcttgctcgcggcgttacgaaagccgaagctgacgcgatttctctgctggttcaggatgcagtcgcaactttcgacccggatgcgctggtggagattgtcggtggatttcgtcgtgggaaacctcagggtcacgacgttgatctgcttatcacttctccgggagctgagaaagagcaagaagaccagctcctgcagaaagtgaccaatctgtggaagaaacaagggttgttgctgtacggtcgtctggaatggacccagtgggaagatgggaaactcccatccggtaaggctgacgtaggtgacgcgggtgcgaaatgctttctgatcctcaaactttatgatcataaagtggacaaaagcaaatgggaaatgccgacgggttcgaacatgggcgaggccaaaccgtggaaagcaattcgcgtagatctggtgcgttgcccctacggcggttttgcgtttgcgatgttgcagtggaccggaagccgcatgttccgccgtgatctgcgctggtacgccactgacgagaagaacatgatgctggacaatcatgcgctgtatgacctgaccaagaaaatctttctcaaagctaaatcggaagaggaaattttcgcacatctggggcttgaatacctggaaccgttcgaacgtaacgca

SEQ ID NO: 2538 - protein, 529 aa, synthetic construct
  REGION 1..529: note = Variant of terminal deoxynucleotidyltransferase
MHHHHHHGGSGSHGIRTIDSDFGKKGQKKMDNHDSSAIYEIKFHEFVLFILEEKMGATRRTFLTDLARKKGFRVENELSDSVTHIVAENLSRSEVLAWLKEHKMEKTKQFELLDISWLIESMKVGKPVDTKGKYQLAESGEMSANPDPTEGRENELPPTMKTVSPYACQRRTTLNNHNQRFTDALEILAENYEFKRNDDTALEFRRAISVLKSLPFEVRSLKDTEGLPWIGDEVKGIMEEIIEVGESLEVQAVLNDEWYQSFHRFVSVFGVGVKTADKWYRMGLRTLEDVRSSKTLKLTPMQKAGLCYYEDLARGVTKAEADAISLLVQDAVATFDPDALVEIVGGFRRGKPQGHDVDLLITSPGAEKEQEDQLLQKVTNLWKKQGLLLYGRLEWTQWEDGKLPSGKADVGDAGAKCFLILKLYDHKVDKSKWEMPTGSNMGEAKPWKAIRVDLVRCPYGGFAFAMLQWTGSRMFRRDLRWYATDEKNMMLDNHALYDLTKKIFLKAKSEEEIFAHLGLEYLEPFERNA

SEQ ID NO: 2539 - DNA, 1587 bp, synthetic construct
  misc_feature 1..1587: note = Variant of terminal deoxynucleotidyltransferase
  source 1..1587: mol_type = other DNA
atgcaccatcatcatcatcatggcggtagcggcagccacggcattcgtaccatcgattcggacttcgggaagaaacagcagaaaaaaatggataaccacgatagttccgccatctatgaaatcaaatttcacgagtttgtgctgttcattctcgaagaaaaaatgggtgcgacgcgtcgtacttttctgacagatttagcccgcaagaaagggttccgcgtcgagaatgaactgtcagacagcgttacccacatcgtggcagaaaataattcacgctctgaagtattggcttggctgaaagaacacaagatggagaagaccaagcaattcgaactgctggatattagctggcttatcgaaagcatgaaagttggtaaaccggtggacaccaaggggaaataccagttggcggaatcgggtgagatgagtgcgaacccagatccgacagagggtcgtgaaaacgagctgcctcctactatgaagaccgtttctccgtatgcgtgtcaacgccgcaccatcctgaacaaccataatcaacgttttacggacgcactggaaattcttgcggaaaattacgagttcaaacgcaacgatgatactgcgctggaatttcgtcgtgctatctccgtgctgaaaagccttccgtttgaggtacgtagcctgaaagacacggaaggattgccctggatcggtgatgaagtcaaagggattatggaagaaatcatcgaggtcggggaatcgcgtgaagtgcaggccgtgctcaatgatgagtggtatcaaagcttccaccgctttaagagtgtctttggagtgggggtgaagacagcagacaagtggtaccgtatgggtctgcgcaccctcgaggatgttcgttccagcaagaccctgaagttgaccccgatgcagaaagcgggtctgtgctattatgaagatcttgctcgcggcgttacgaaagccgaagctgacgcgatttctctgctggttcaggatgcagtcgcaactttcgacccggatgcgctggtggagattgtcggtggatttcgtcgtgggaaacctcagggtcacgacgttgatctgcttatcacatctccgggagctgagaaagagcaagaagaccagctcctgcagaaagtgaccaatctgtggaagaaacaagggttgttgctgtacggtcgtctggaatggacccagtgggaagatgggaaactcccatccggtaaggctgacgtaggtgacgcgggtgcgaaatgctttctgatcctcaaactttatgatcataaagtggacaaaagcaaatgggaaatgccgacgggttcgaacatgggcgaggccaaaccgtggaaagcaattcgcgtagatctggtgcgttgcccctacggcggttttgcgtttgcgatgttgcagtggaccggaagccgcatgttccgccgtgatctgcgctggtacgccactgacgagaagaacatgatgctggacaatcatgcgctgtatgacctgaccaagaaaatctttctcaaagctaaatcggaagaggaaattttcgcacatctggggcttgaatacctggaaccgttcgaacgtaacgca

SEQ ID NO: 2540 - protein, 529 aa, synthetic construct
  REGION 1..529: note = Variant of terminal deoxynucleotidyltransferase
MHHHHHHGGSGSHGIRTIDSDFGKKQQKKMDNHDSSAIYEIKFHEFVLFILEEKMGATRRTFLTDLARKKGFRVENELSDSVTHIVAENNSRSEVLAWLKEHKMEKTKQFELLDISWLIESMKVGKPVDTKGKYQLAESGEMSANPDPTEGRENELPPTMKTVSPYACQRRTILNNHNQRFTDALEILAENYEFKRNDDTALEFRRAISVLKSLPFEVRSLKDTEGLPWIGDEVKGIMEEIIEVGESREVQAVLNDEWYQSFHRFKSVFGVGVKTADKWYRMGLRTLEDVRSSKTLKLTPMQKAGLCYYEDLARGVTKAEADAISLLVQDAVATFDPDALVEIVGGFRRGKPQGHDVDLLITSPGAEKEQEDQLLQKVTNLWKKQGLLLYGRLEWTQWEDGKLPSGKADVGDAGAKCFLILKLYDHKVDKSKWEMPTGSNMGEAKPWKAIRVDLVRCPYGGFAFAMLQWTGSRMFRRDLRWYATDEKNMMLDNHALYDLTKKIFLKAKSEEEIFAHLGLEYLEPFERNA

SEQ ID NO: 2541 - DNA, 1587 bp, synthetic construct
  misc_feature 1..1587: note = Variant of terminal deoxynucleotidyltransferase
  source 1..1587: mol_type = other DNA
atgcaccatcatcatcatcatggcggtagcggcagccacggcattcgtaccatcgattcggacttcgggaagaaacagcagaaaaaaatggataaccacgatagttccgccatctatgaaatcaaatttcacgagtttgtgctgttcattctcgaagaaaaaatgggtgcgacgcgtcgtacttttctgacagatttagcccgcaagaaagggttccgcgtcgagaatgaactgtcagacagcgttacccacatcgtggcagaaaataattcacgctctgaagtattggcttggctgaaagaacacaagatggagaagaccaagcaattcgaactgctggatattagctggcttatcgaaagcatgaaagttggtaaaccggtggacaccaaggggaaataccagttggcggaatcgggtgagatgagtgcgaacccagatccgacagagggtcgtgaaaacgagctgcctcctactatgaagaccgtttctccgtatgcgtgtcaacgccgcaccaccctgaacaaccataatcaacgttttacggacgcactggaaattcttgcggaaaattacgagttcaaacgcaacgatgatactgcgctggaatttcgtcgtgctatctccgtgctgaaaagccttccgtttgaggtacgtagcctgaaagacacggaaggattgccctggatcggtgatgaagtcaaagggattatggaagaaatcatcgaggtcgggaattcggtggaagtgcaggccgtgctcaatgatgagtggtatcaaagcttccaccgctttaagagtgtctttggagtgggggtgaagacagcagacaagtggtaccgtatgggtctgcgcaccctcgaggatgttcgttccagcaagaccctgaagttgaccccgatgcagaaggcgggtctgtgctattatgaagatcttgctcgcggcgttacgaaagccgaagctgacgcgatttctctgctggttcaggatgcagtcgcaactttcgacccggatgcgctggtggagattgtcggtggatttcgtcgtgggaaacctcagggtcacgacgttgatctgcttatcagttctccgggagctgagaaagagcaagaagaccagctcctgcagaaagtgaccaatctgtggaagaaacaagggttgttgctgtacggtcgtctggaatggacccagtgggaagatgggaaactcccatccggtaaggctgacgtaggtgacgcgggtgcgaaatgctttctgatcctcaaactttatgatcataaagtggacaaaagcaaatgggaaatgccgacgggttcgaacatgggcgaggccaaaccgtggaaagcaattcgcgtagatctggttcgttgcccctacggcggttttgcgtttgcgatgttgcagtggaccggaagccgcatgttccgccgtgatctgcgctggtacgccactgacgagaagaacatgatgctggacaatcatgcgctgtatgacctgaccaagaaaatctttctcaaagctaaatcggaagaggaaattttcgcacatctggggcttgaatacctggaaccgttcgaacgtaacgca

SEQ ID NO: 2542 - protein, 529 aa, synthetic construct
  REGION 1..529: note = Variant of terminal deoxynucleotidyltransferase
MHHHHHHGGSGSHGIRTIDSDFGKKQQKKMDNHDSSAIYEIKFHEFVLFILEEKMGATRRTFLTDLARKKGFRVENELSDSVTHIVAENNSRSEVLAWLKEHKMEKTKQFELLDISWLIESMKVGKPVDTKGKYQLAESGEMSANPDPTEGRENELPPTMKTVSPYACQRRTTLNNHNQRFTDALEILAENYEFKRNDDTALEFRRAISVLKSLPFEVRSLKDTEGLPWIGDEVKGIMEEIIEVGNSVEVQAVLNDEWYQSFHRFKSVFGVGVKTADKWYRMGLRTLEDVRSSKTLKLTPMQKAGLCYYEDLARGVTKAEADAISLLVQDAVATFDPDALVEIVGGFRRGKPQGHDVDLLISSPGAEKEQEDQLLQKVTNLWKKQGLLLYGRLEWTQWEDGKLPSGKADVGDAGAKCFLILKLYDHKVDKSKWEMPTGSNMGEAKPWKAIRVDLVRCPYGGFAFAMLQWTGSRMFRRDLRWYATDEKNMMLDNHALYDLTKKIFLKAKSEEEIFAHLGLEYLEPFERNA

SEQ ID NO: 2543 - DNA, 1587 bp, synthetic construct
  misc_feature 1..1587: note = Variant of terminal deoxynucleotidyltransferase
  source 1..1587: mol_type = other DNA
atgcaccatcatcatcatcatggcggtagcggcagccacggcattcgtaccatcgattcggacttcgggaagaaacagcagaaaaaaatggataaccacgatagttccgccatctatgaaatcaaatttcacgagtttgtgctgttcattctcgaagaaaaaatgggtgcgacgcgtcgtacttttctgacagatttagcccgcaagaaagggttccgcgtcgagaatgaactgtcagacagcgttacccacatcgtggcagaaaataattcacgctctgaagtattggcttggctgaaagaacacaagatggagaagaccaagcaattcgaactgctggatattagctggcttatcgaaagcatgaaagttggtaaaccggtggacaccaaggggaaataccagttggcggaatcgggtgagatgagtgcgaacccagatccgacagagggtcgtgaaaacgagctgcctcctactatgaagaccgtttctccgtatgcgtgtcaacgccgcaccaccctgaacaaccataatcaacgttttacggacgcactggaaattcttgcggaaaattacgagttcaaacgcaacgatgatactgcgctggaatttcgtcgtgctatctccgtgctgaaaagccttccgtttgaggtacgtagcctgaaagacacggaaggattgccctggatcggtgatgaagtcaaagggattatggaagaaatcatcgaggtcggggaatcggtggaagtgcaggccgtgctcaatgatgagtggtatcaaagcttccaccgctttaagagtgtctttggagtgggggtgaagacagcagacaagtggtaccgtatgggtctgcgcaccctcgaggatgttcgttccagcaagaccctgaagttgaccccgatgcagaaagcgggtctgtgctattatgaagatcttgctcgcggcgttacgaaagccgaagctgacgcgatttctctgctggttcaggatgcagtcgcaactttcgacccggatgcgctggtggagattgtcggtggatttcgtcgtgggaaacctcagggtcacgacgttgatctgcttatcacatctccgggagctgagaaagagcaagaagaccagctcctgcagaaagtgaccaatctgtggaagaaacaagggttgttgctgtacggtcgtctggaatggacccagtgggaagatgggaaactcccatccggtaaggctgacgtaggtgacgcgggtgcgaaatgctttctgatcctcaaactttatgatcataaagtggacaaaagcaaatgggaaatgccgacgggttcgaacatgggcgaggccaaaccgtggaaagcaattcgcgtagatctggttcgttgcccctacggcggttttgcgtttgcgatgttgcagtggaccggaagccgcatgttccgccgtgatctgcgctggtacgccactgacgagaagaacatgatgctggacaatcatgcgctgtatgacctgaccaagaaaatctttctcaaagctaaatcggaagaggaaattttcgcacatctggggcttgaatacctggaaccgttcgaacgtaacgca

SEQ ID NO: 2544 - protein, 529 aa, synthetic construct
  REGION 1..529: note = Variant of terminal deoxynucleotidyltransferase
MHHHHHHGGSGSHGIRTIDSDFGKKQQKKMDNHDSSAIYEIKFHEFVLFILEEKMGATRRTFLTDLARKKGFRVENELSDSVTHIVAENNSRSEVLAWLKEHKMEKTKQFELLDISWLIESMKVGKPVDTKGKYQLAESGEMSANPDPTEGRENELPPTMKTVSPYACQRRTTLNNHNQRFTDALEILAENYEFKRNDDTALEFRRAISVLKSLPFEVRSLKDTEGLPWIGDEVKGIMEEIIEVGESVEVQAVLNDEWYQSFHRFKSVFGVGVKTADKWYRMGLRTLEDVRSSKTLKLTPMQKAGLCYYEDLARGVTKAEADAISLLVQDAVATFDPDALVEIVGGFRRGKPQGHDVDLLITSPGAEKEQEDQLLQKVTNLWKKQGLLLYGRLEWTQWEDGKLPSGKADVGDAGAKCFLILKLYDHKVDKSKWEMPTGSNMGEAKPWKAIRVDLVRCPYGGFAFAMLQWTGSRMFRRDLRWYATDEKNMMLDNHALYDLTKKIFLKAKSEEEIFAHLGLEYLEPFERNA

SEQ ID NO: 2545 - DNA, 1587 bp, synthetic construct
  misc_feature 1..1587: note = Variant of terminal deoxynucleotidyltransferase
  source 1..1587: mol_type = other DNA
atgcaccatcatcatcatcatggcggtagcggcagccacggcattcgtaccatcgattcggacttcgggaagaaacagcagaaaaaaatggataaccacgatagttccgccatctatgaaatcaaatttcacgagtttgtgctgttcattctcgaagaaaaaatgggtgcgacgcgtcgtacttttctgacagatttagcccgcaagaaagggttccgcgtcgagaatgaactgtcagacagcgttacccacatcgtggcagaaaataattcacgctctgaagtattggcttggctgaaagaacacaagatggagaagaccaagcaattcgaactgctggatattagctggcttatcgaaagcatgaaagttggtaaaccggtggacaccaaggggaaataccagttggcggaatcgggtgagatgagtgcgaacccagatccgacagagggtcgtgaaaacgagctgcctcctactatgaagaccgtttctccgtatgcgtgtcaacgccgcaccaccctgaacaaccataatcaacgttttacggacgcactggaaattcttgcggaaaattacgagttcaaacgcaacgatgatactgcgctggaatttcgtcgtgctatctccgtgctgaaaagccttccgtttgaggtacgtagcctgaaagacacggaaggattgccctggatcggtgatgaagtcaaagggattatggaagaaatcatcgaggtcggggaatcgcgtgaagtgcaggccgtgctcaatgatgagtggtatcaaagcttccaccgctttaagagtgtctttggagtgggggtgaagacagcagacaagtggtaccgtatgggtctgcgcaccctcgaggatgttcgttccagcaagaccctgaagttgaccccgatgcagaaggcgggtctgtgctattatgaagatcttgctcgcggcgttacgaaagccgaagctgacgcgatttctctgctggttcaggatgcagtcgcaactttcgacccggatgcgctggtggagattgtcggtggatttcgtcgtgggaaacctcagggtcacgacgttgatctgcttatcacttctccgggagctgagaaagagcaagaagaccagctcctgcagaaagtgaccaatctgtggaagaaacaagggttgttgctgtacggtcgtctggaatggacccagtgggaagatgggaaactcccatccggtaaggctgacgtaggtgacgcgggtgcgaaatgctttctgatcctcaaactttatgatcataaagtggacaaaagcaaatgggaaatgccgacgggttcgaacatgggcgaggccaaaccgtggaaagcaattcgcgtagatctggtgcgttgcccctacggcggttttgcgtttgcgatgttgcagtggaccggaagccgcatgttccgccgtgatctgcgctggtacgccactgacgagaagaacatgatgctggacaatcatgcgctgtatgacctgaccaagaaaatctttctcaaagctaaatcggaagaggaaattttcgcacatctggggcttgaatacctggaaccgttcgaacgtaacgca

SEQ ID NO: 2546 - protein, 529 aa, synthetic construct
  REGION 1..529: note = Variant of terminal deoxynucleotidyltransferase
MHHHHHHGGSGSHGIRTIDSDFGKKQQKKMDNHDSSAIYEIKFHEFVLFILEEKMGATRRTFLTDLARKKGFRVENELSDSVTHIVAENNSRSEVLAWLKEHKMEKTKQFELLDISWLIESMKVGKPVDTKGKYQLAESGEMSANPDPTEGRENELPPTMKTVSPYACQRRTTLNNHNQRFTDALEILAENYEFKRNDDTALEFRRAISVLKSLPFEVRSLKDTEGLPWIGDEVKGIMEEIIEVGESREVQAVLNDEWYQSFHRFKSVFGVGVKTADKWYRMGLRTLEDVRSSKTLKLTPMQKAGLCYYEDLARGVTKAEADAISLLVQDAVATFDPDALVEIVGGFRRGKPQGHDVDLLITSPGAEKEQEDQLLQKVTNLWKKQGLLLYGRLEWTQWEDGKLPSGKADVGDAGAKCFLILKLYDHKVDKSKWEMPTGSNMGEAKPWKAIRVDLVRCPYGGFAFAMLQWTGSRMFRRDLRWYATDEKNMMLDNHALYDLTKKIFLKAKSEEEIFAHLGLEYLEPFERNA

SEQ ID NO: 2547 - DNA, 1587 bp, synthetic construct
  misc_feature 1..1587: note = Variant of terminal deoxynucleotidyltransferase
  source 1..1587: mol_type = other DNA
atgcaccatcatcatcatcatggcggtagcggcagccacggcattcgtaccatcgattcggacttcgggaagaaacgccagaaaaaaatggataaccacgatagttccgccatctatgaaatcaaatttcacgagtttgtgctgttcattctcgaagaaaaaatgggtgcgactcgtcgtacttggctgacagatttagcccgcaagaaagggttccgcgtcgagaatgaactgtcagacagcgttacccacatcgtggcagaaaataattcacgctctgaagtattggcttggctgaaagaacacaagatggagaagaccaagcaattcgaactgctggatattagctggcttatcgaaagcatgaaagttggtaaaccggtggacaccaaggggaaataccagttggcggaatcgggtgagatgagtgcgaacccagatccgacagagggtcgtgaaaacgagctgcctcctactatgaagaccgtttctccgtatgcgtgtcaacgccgcaccaccctgaacaaccataatcaacgttttacggacgcactggaaattcttgcggaaaattacgagttcaaacgcaacgatgatactgcgctggaatttcgtcgtgctatctccgtgctgaaaagccttccgtttgaggtacgtagcctgaaagacacggaaggattgccctggatcggtgatgaagtcaaagggattatggaagaaatcatcgaggtcggggaatcgctgcgtgtgcaggccgtgctcaatgatgagtggtatcaaagcttccaccgctttaagagtgtctttggagtgggggtgaagacagcagacaagtggtaccgtatgggtctgcgcaccctcgaggatgttcgttccagcaagaccctgaagttgaccccgatgcagaaagcgggtctgtgctattatgaagatcttgctcgcggcgttacgaaagccgaagctgacgcgatttctctgctggttcaggatgcagtcgcaactttcgacccggatgcgctggtggagattgtcggtggatttcgtcgtgggaaacctcagggtcacgacgttgatctgcttatcacatctccgggagctgagaaagagcaagaagaccagctcctgcagaaagtgaccaatctgtggaagaaacaagggttgttgctgtacggtcgtctggaatggacccagtgggaagatgggaaactcccatccggtaaggctgacgtaggtgacgcgggtgcgaaatgctttctgatcctcaaactttatgatcataaagtggacaaaagcaaatgggaaatgccgacgggttcgaacatgggcgaggccaaaccgtggaaagcaattcgcgtagatctggttcgttgcccctacggcggttttgcgtttgcgatgttgcagtggaccggaagccgcatgttccgccgtgatctgcgctggtacgccactgacgagaagaacatgatgctggacaatcatgcgctgtatgacctgaccaagaaaatctttctcaaagctaaatcggaagaggaaattttcgcacatctggggcttgaatacctggaaccgttcgaacgtaacgca

SEQ ID NO: 2548 - protein, 529 aa, synthetic construct
  REGION 1..529: note = Variant of terminal deoxynucleotidyltransferase
MHHHHHHGGSGSHGIRTIDSDFGKKRQKKMDNHDSSAIYEIKFHEFVLFILEEKMGATRRTWLTDLARKKGFRVENELSDSVTHIVAENNSRSEVLAWLKEHKMEKTKQFELLDISWLIESMKVGKPVDTKGKYQLAESGEMSANPDPTEGRENELPPTMKTVSPYACQRRTTLNNHNQRFTDALEILAENYEFKRNDDTALEFRRAISVLKSLPFEVRSLKDTEGLPWIGDEVKGIMEEIIEVGESLRVQAVLNDEWYQSFHRFKSVFGVGVKTADKWYRMGLRTLEDVRSSKTLKLTPMQKAGLCYYEDLARGVTKAEADAISLLVQDAVATFDPDALVEIVGGFRRGKPQGHDVDLLITSPGAEKEQEDQLLQKVTNLWKKQGLLLYGRLEWTQWEDGKLPSGKADVGDAGAKCFLILKLYDHKVDKSKWEMPTGSNMGEAKPWKAIRVDLVRCPYGGFAFAMLQWTGSRMFRRDLRWYATDEKNMMLDNHALYDLTKKIFLKAKSEEEIFAHLGLEYLEPFERNA

SEQ ID NO: 2549 - DNA, 1587 bp, synthetic construct
  misc_feature 1..1587: note = Variant of terminal deoxynucleotidyltransferase
  source 1..1587: mol_type = other DNA
atgcaccatcatcatcatcatggcggtagcggcagccacggcattcgtaccatcgattcggacttcgggaagaaacgccagaaaaaaatggataaccacgatagttccgccatctatgaaatcaaatttcacgagtttgtgctgttcattctcgaagaaaaaatgggtgcgacgcgtcgtacttttctgacagatttagcccgcaagaaagggttccgcgtcgagaatgaactgtcagacagcgttacccacatcgtggcagaaaataattcacgctctgaagtattggcttggctgaaagaacacaagatggagaagaccaagcaattcgaactgctggatattagctggcttatcgaaagcatgaaagttggtaaaccggtggacaccaaggggaaataccagttggcggaatcgggtgagatgagtgcgaacccagatccgacagagggtcgtgaaaacgagctgcctcctactatgaagaccgtttctccgtatgcgtgtcaacgccgcaccaccctgaacaaccataatcaacgttttacggacgcactggaaattcttgcggaaaattacgagttcaaacgcaacgatgatactgcgctggaatttcgtcgtgctatctccgtgctgaaaagccttccgtttgaggtacgtagcctgaaagacacggaaggattgccctggatcggtgatgaagtcaaagggattatggaagaaatcatcgaggtcggggaatcggtggaagtgcaggccgtgctcaatgatgagtggtatcaaagcttccaccgctttgtcagtgtctttggagtgggggtgaagacagcagacaagtggtaccgtatgggtctgcgcaccctcgaggatgttcgttccagcaagaccctgaagttgaccccgatgcagaaggcgggtctgtgctattatgaagatcttgctcgcggcgttacgaaagccgaagctgacgcgatttctctgctggttcaggatgcagtcgcaactttcgacccggatgcgctggtggagattgtcggtggatttcgtcgtgggaaacctcagggtcacgacgttgatctgcttatcagttctccgggagctgagaaagagcaagaagaccagctcctgcagaaagtgaccaatctgtggaagaaacaagggttgttgctgtacggtcgtctggaatggacccagtgggaagatgggaaactcccatccggtaaggctgacgtaggtgacgcgggtgcgaaatgctttctgatcctcaaactttatgatcataaagtggacaaaagcaaatgggaaatgccgacgggttcgaacatgggcgaggccaaaccgtggaaagcaattcgcgtagatctggtgcgttgcccctacggcggttttgcgtttgcgatgttgcagtggaccggaagccgcatgttccgccgtgatctgcgctggtacgccactgacgagaagaacatgatgctggacaatcatgcgctgtatgacctgaccaagaaaatctttctcaaagctaaatcggaagaggaaattttcgcacatctggggcttgaatacctggaaccgttcgaacgtaacgca

SEQ ID NO: 2550 - protein, 529 aa, synthetic construct
  REGION 1..529: note = Variant of terminal deoxynucleotidyltransferase
MHHHHHHGGSGSHGIRTIDSDFGKKRQKKMDNHDSSAIYEIKFHEFVLFILEEKMGATRRTFLTDLARKKGFRVENELSDSVTHIVAENNSRSEVLAWLKEHKMEKTKQFELLDISWLIESMKVGKPVDTKGKYQLAESGEMSANPDPTEGRENELPPTMKTVSPYACQRRTTLNNHNQRFTDALEILAENYEFKRNDDTALEFRRAISVLKSLPFEVRSLKDTEGLPWIGDEVKGIMEEIIEVGESVEVQAVLNDEWYQSFHRFVSVFGVGVKTADKWYRMGLRTLEDVRSSKTLKLTPMQKAGLCYYEDLARGVTKAEADAISLLVQDAVATFDPDALVEIVGGFRRGKPQGHDVDLLISSPGAEKEQEDQLLQKVTNLWKKQGLLLYGRLEWTQWEDGKLPSGKADVGDAGAKCFLILKLYDHKVDKSKWEMPTGSNMGEAKPWKAIRVDLVRCPYGGFAFAMLQWTGSRMFRRDLRWYATDEKNMMLDNHALYDLTKKIFLKAKSEEEIFAHLGLEYLEPFERNA

SEQ ID NO: 2551 - DNA, 1587 bp, synthetic construct
  misc_feature 1..1587: note = Variant of terminal deoxynucleotidyltransferase
  source 1..1587: mol_type = other DNA
atgcaccatcatcatcatcatggcggtagcggcagccacggcattcgtaccatcgattcggacttcgggaagaaaggccagaaaaaaatggataaccacgatagttccgccatctatgaaatcaaatttcacgagtttgtgctgttcattctcgaagaaaaaatgggtgcgacgcgtcgtacttttctgacagatttagcccgcaagaaagggttccgcgtcgagaatgaactgtcagacagcgttacccacatcgtggcagaaaatctgtcacgctctgaagtattggcttggctgaaagaacacaagatggagaagaccaagcaattcgaactgctggatattagctggcttatcgaaagcatgaaagttggtaaaccggtggacaccaaggggaaataccagttggcggaatcgggtgagatgagtgcgaacccagatccgacagagggtcgtgaaaacgagctgcctcctactatgaagaccgtttctccgtatgcgtgtcaacgccgcaccaccctgaacaaccataatcaacgttttacggacgcactggaaattcttgcggaaaattacgagttcaaacgcaacgatgatactgcgctggaatttcgtcgtgctatctccgtgctgaaaagccttccgtttgaggtacgtagcctgaaagacacggaaggattgccctggatcggtgatgaagtcaaagggattatggaagaaatcatcgaggtcggggaatcggtggaagtgcaggccgtgctcaatgatgagtggtatcaaagcttccaccgctttaagagtgtctttggagtgggggtgaagacagcagacaagtggtaccgtatgggtctgcgcaccctcgaggatgttcgttccagcaagaccctgaagttgaccccgatgcagaaggcgggtctgtgctattatgaagatcttgctcgcggcgttacgaaagccgaagctgacgcgatttctctgctggttcaggatgcagtcgcaactttcgacccggatgcgctggtggagattgtcggtggatttcgtcgtgggaaacctcagggtcacgacgttgatctgcttatcacatctccgggagctgagaaagagcaagaagaccagctcctgcagaaagtgaccaatctgtggaagaaacaagggttgttgctgtacggtcgtctggaatggacccagtgggaagatgggaaactcccatccggtaaggctgacgtaggtgacgcgggtgcgaaatgctttctgatcctcaaactttatgatcataaagtggacaaaagcaaatgggaaatgccgacgggttcgaacatgggcgaggccaaaccgtggaaagcaattcgcgtagatctgctgcgttgcccctacggcggttttgcgtttgcgatgttgcagtggaccggaagccgcatgttccgccgtgatctgcgctggtacgccactgacgagaagaacatgatgctggacaatcatgcgctgtatgacctgaccaagaaaatctttctcaaagctaaatcggaagaggaaattttcgcacatctggggcttgaatacctggaaccgttcgaacgtaacgca

SEQ ID NO: 2552 - protein, 529 aa, synthetic construct
  REGION 1..529: note = Variant of terminal deoxynucleotidyltransferase
MHHHHHHGGSGSHGIRTIDSDFGKKGQKKMDNHDSSAIYEIKFHEFVLFILEEKMGATRRTFLTDLARKKGFRVENELSDSVTHIVAENLSRSEVLAWLKEHKMEKTKQFELLDISWLIESMKVGKPVDTKGKYQLAESGEMSANPDPTEGRENELPPTMKTVSPYACQRRTTLNNHNQRFTDALEILAENYEFKRNDDTALEFRRAISVLKSLPFEVRSLKDTEGLPWIGDEVKGIMEEIIEVGESVEVQAVLNDEWYQSFHRFKSVFGVGVKTADKWYRMGLRTLEDVRSSKTLKLTPMQKAGLCYYEDLARGVTKAEADAISLLVQDAVATFDPDALVEIVGGFRRGKPQGHDVDLLITSPGAEKEQEDQLLQKVTNLWKKQGLLLYGRLEWTQWEDGKLPSGKADVGDAGAKCFLILKLYDHKVDKSKWEMPTGSNMGEAKPWKAIRVDLLRCPYGGFAFAMLQWTGSRMFRRDLRWYATDEKNMMLDNHALYDLTKKIFLKAKSEEEIFAHLGLEYLEPFERNA

SEQ ID NO: 2553 - DNA, 1587 bp, synthetic construct
  misc_feature 1..1587: note = Variant of terminal deoxynucleotidyltransferase
  source 1..1587: mol_type = other DNA
atgcaccatcatcatcatcatggcggtagcggcagccacggcattcgtaccatcgattcggacttcgggaagaaacgccagaaaaaaatggataaccacgatagttccgccatctatgaaatcaaatttcacgagtttgtgctgttcattctcgaagaaaaaatgggtgcgacgcgtcgtacttttctgacagatttagcccgcaagaaagggttccgcgtcgagaatgaactgtcagacagcgttacccacatcgtggcagaaaatctgtcacgctctgaagtattggcttggctgaaagaacacaagatggagaagaccaagcaattcgaactgctggatattagctggcttatcgaaagcatgaaagttggtaaaccggtggacaccaaggggaaataccagttggcggaatcgggtgagatgagtgcgaacccagatccgacagagggtcgtgaaaacgagctgcctcctactatgaagaccgtttctccgtatgcgtgtcaacgccgcaccaccctgaacaaccataatcaacgttttacggacgcactggaaattcttgcggaaaattacgagttcaaacgcaacgatgatactgcgctggaatttcgtcgtgctatctccgtgctgaaaagccttccgtttgaggtacgtagcctgaaagacacggaaggattgccctggatcggtgatgaagtcaaagggattatggaagaaatcatcgaggtcgggaattcgcgtgaagtgcaggccgtgctcaatgatgagtggtatcaatcgttccaccgctttgtcagtgtctttggagtgggggtgaagacagcagacaagtggtaccgtatgggtctgcgcaccctcgaggatgttcgttccagcaagaccctgaagttgaccccgatgcagaaagcgggtctgtgctattatgaagatcttgctcgcggcgttacgaaagccgaagctgacgcgatttctctgctggttcaggatgcagtcgcaactttcgacccggatgcgctggtggagattgtcggtggatttcgtcgtgggaaacctcagggtcacgacgttgatctgcttatcagttctccgggagctgagaaagagcaagaagaccagctcctgcagaaagtgaccaatctgtggaagaaacaagggttgttgctgtacggtcgtctggaatggacccagtgggaagatgggaaactcccatccggtaaggctgacgtaggtgacgcgggtgcgaaatgctttctgatcctcaaactttatgatcataaagtggacaaaagcaaatgggaaatgccgacgggttcgaacatgggcgaggccaaaccgtggaaagcaattcgcgtagatctgctgcgttgcccctacggcggttttgcgtttgcgatgttgcagtggaccggaagccgcatgttccgccgtgatctgcgctggtacgccactgacgagaagaacatgatgctggacaatcatgcgctgtatgacctgaccaagaaaatctttctcaaagctaaatcggaagaggaaattttcgcacatctggggcttgaatacctggaaccgttcgaacgtaacgca

SEQ ID NO: 2554 - protein, 529 aa, synthetic construct
  REGION 1..529: note = Variant of terminal deoxynucleotidyltransferase
MHHHHHHGGSGSHGIRTIDSDFGKKRQKKMDNHDSSAIYEIKFHEFVLFILEEKMGATRRTFLTDLARKKGFRVENELSDSVTHIVAENLSRSEVLAWLKEHKMEKTKQFELLDISWLIESMKVGKPVDTKGKYQLAESGEMSANPDPTEGRENELPPTMKTVSPYACQRRTTLNNHNQRFTDALEILAENYEFKRNDDTALEFRRAISVLKSLPFEVRSLKDTEGLPWIGDEVKGIMEEIIEVGNSREVQAVLNDEWYQSFHRFVSVFGVGVKTADKWYRMGLRTLEDVRSSKTLKLTPMQKAGLCYYEDLARGVTKAEADAISLLVQDAVATFDPDALVEIVGGFRRGKPQGHDVDLLISSPGAEKEQEDQLLQKVTNLWKKQGLLLYGRLEWTQWEDGKLPSGKADVGDAGAKCFLILKLYDHKVDKSKWEMPTGSNMGEAKPWKAIRVDLLRCPYGGFAFAMLQWTGSRMFRRDLRWYATDEKNMMLDNHALYDLTKKIFLKAKSEEEIFAHLGLEYLEPFERNA

SEQ ID NO: 2555 - DNA, 1587 bp, synthetic construct
  misc_feature 1..1587: note = Variant of terminal deoxynucleotidyltransferase
  source 1..1587: mol_type = other DNA
atgcaccatcatcatcatcatggcggtagcggcagccacggcattcgtaccatcgattcggacttcgggaagaaaattcagaaaaaaatggataaccacgatagttccgccatctatgaaatcaaatttcacgagtttgtgctgttcattctcgaagaaaaaatgggtgcgacgcgtcgtacttttctgacagatttagcccgcaagaaagggttccgcgtcgagaatgaactgtcagacagcgttacccacatcgtggcagaaaatctgtcacgctctgaagtattggcttggctgaaagaacacaagatggagaagaccaagcaattcgaactgctggatattagctggcttatcgaaagcatgaaagttggtaaaccggtggacaccaaggggaaataccagttggcggaatcgggtgagatgagtgcgaacccagatccgacagagggtcgtgaaaacgagctgcctcctactatgaagaccgtttctccgtatgcgtgtcaacgccgcaccaccctgaacaaccataatcaacgttttacggacgcactggaaattcttgcggaaaattacgagttcaaacgcaacgatgatactgcgctggaatttcgtcgtgctatctccgtgctgaaaagccttccgtttgaggtacgtagcctgaaagacacggaaggattgccctggatcggtgatgaagtcaaagggattatggaagaaatcatcgaggtcgggaattcgcgtgaagtgcaggccgtgctcaatgatgagtggtatcaaagcttccaccgctttaagagtgtctttggagtgggggtgaagacagcagacaagtggtaccgtatgggtctgcgcaccctcgaggatgttcgttccagcaagaccctgaagttgaccccgatgcagaaggcgggtctgtgctattatgaagatcttgctcgcggcgttacgaaagccgaagctgacgcgatttctctgctggttcaggatgcagtcgcaactttcgacccggatgcgctggtggagattgtcggtggatttcgtcgtgggaaacctcagggtcacgacgttgatctgcttatcacatctccgggagctgagaaagagcaagaagaccagctcctgcagaaagtgaccaatctgtggaagaaacaagggttgttgctgtacggtcgtctggaatggacccagtgggaagatgggaaactcccatccggtaaggctgacgtaggtgacgcgggtgcgaaatgctttctgatcctcaaactttatgatcataaagtggacaaaagcaaatgggaaatgccgacgggttcgaacatgggcgaggccaaaccgtggaaagcaattcgcgtagatctggttcgttgcccctacggcggttttgcgtttgcgatgttgcagtggaccggaagccgcatgttccgccgtgatctgcgctggtacgccactgacgagaagaacatgatgctggacaatcatgcgctgtatgacctgaccaagaaaatctttctcaaagctaaatcggaagaggaaattttcgcacatctggggcttgaatacctggaaccgttcgaacgtaacgca

SEQ ID NO: 2556 - protein, 529 aa, synthetic construct
  REGION 1..529: note = Variant of terminal deoxynucleotidyltransferase
MHHHHHHGGSGSHGIRTIDSDFGKKIQKKMDNHDSSAIYEIKFHEFVLFILEEKMGATRRTFLTDLARKKGFRVENELSDSVTHIVAENLSRSEVLAWLKEHKMEKTKQFELLDISWLIESMKVGKPVDTKGKYQLAESGEMSANPDPTEGRENELPPTMKTVSPYACQRRTTLNNHNQRFTDALEILAENYEFKRNDDTALEFRRAISVLKSLPFEVRSLKDTEGLPWIGDEVKGIMEEIIEVGNSREVQAVLNDEWYQSFHRFKSVFGVGVKTADKWYRMGLRTLEDVRSSKTLKLTPMQKAGLCYYEDLARGVTKAEADAISLLVQDAVATFDPDALVEIVGGFRRGKPQGHDVDLLITSPGAEKEQEDQLLQKVTNLWKKQGLLLYGRLEWTQWEDGKLPSGKADVGDAGAKCFLILKLYDHKVDKSKWEMPTGSNMGEAKPWKAIRVDLVRCPYGGFAFAMLQWTGSRMFRRDLRWYATDEKNMMLDNHALYDLTKKIFLKAKSEEEIFAHLGLEYLEPFERNA

SEQ ID NO: 2557 - DNA, 1587 bp, synthetic construct
  misc_feature 1..1587: note = Variant of terminal deoxynucleotidyltransferase
  source 1..1587: mol_type = other DNA
atgcaccatcatcatcatcatggcggtagcggcagccacggcattcgtaccatcgattcggacttcgggaagaaaggccagaaaaaaatggataaccacgatagttccgccatctatgaaatcaaatttcacgagtttgtgctgttcattctcgaagaaaaaatgggtgcgacgcgtcgtacttttctgacagatttagcccgcaagaaagggttccgcgtcgagaatgaactgtcagacagcgttacccacatcgtggcagaaaataattcacgctctgaagtattggcttggctgaaagaacacaagatggagaagaccaagcaattcgaactgctggatattagctggcttatcgaaagcatgaaagttggtaaaccggtggacaccaaggggaaataccagttggcggaatcgggtgagatgagtgcgaacccagatccgacagagggtcgtgaaaacgagctgcctcctactatgaagaccgtttctccgtatgcgtgtcaacgccgcaccaccctgaacaaccataatcaacgttttacggacgcactggaaattcttgcggaaaattacgagttcaaacgcaacgatgatactgcgctggaatttcgtcgtgctatctccgtgctgaaaagccttccgtttgaggtacgtagcctgaaagacacggaaggattgccctggatcggtgatgaagtcaaagggattatggaagaaatcatcgaggtcgggaattcgcgtgaagtgcaggccgtgctcaatgatgagtggtatcaaagcttccaccgctttaagagtgtctttggagtgggggtgaagacagcagacaagtggtaccgtatgggtctgcgcaccctcgaggatgttcgttccagcaagaccctgaagttgaccccgatgcagaaggcgggtctgtgctattatgaagatcttgctcgcggcgttacgaaagccgaagctgacgcgatttctctgctggttcaggatgcagtcgcaactttcgacccggatgcgctggtggagattgtcggtggatttcgtcgtgggaaacctcagggtcacgacgttgatctgcttatcagttctccgggagctgagaaagagcaagaagaccagctcctgcagaaagtgaccaatctgtggaagaaacaagggttgttgctgtacggtcgtctggaatggacccagtgggaagatgggaaactcccatccggtaaggctgacgtaggtgacgcgggtgcgaaatgctttctgatcctcaaactttatgatcataaagtggacaaaagcaaatgggaaatgccgacgggttcgaacatgggcgaggccaaaccgtggaaagcaattcgcgtagatctggttcgttgcccctacggcggttttgcgtttgcgatgttgcagtggaccggaagccgcatgttccgccgtgatctgcgctggtacgccactgacgagaagaacatgatgctggacaatcatgcgctgtatgacctgaccaagaaaatctttctcaaagctaaatcggaagaggaaattttcgcacatctggggcttgaatacctggaaccgttcgaacgtaacgca

SEQ ID NO: 2558 - protein, 529 aa, synthetic construct
  REGION 1..529: note = Variant of terminal deoxynucleotidyltransferase
MHHHHHHGGSGSHGIRTIDSDFGKKGQKKMDNHDSSAIYEIKFHEFVLFILEEKMGATRRTFLTDLARKKGFRVENELSDSVTHIVAENNSRSEVLAWLKEHKMEKTKQFELLDISWLIESMKVGKPVDTKGKYQLAESGEMSANPDPTEGRENELPPTMKTVSPYACQRRTTLNNHNQRFTDALEILAENYEFKRNDDTALEFRRAISVLKSLPFEVRSLKDTEGLPWIGDEVKGIMEEIIEVGNSREVQAVLNDEWYQSFHRFKSVFGVGVKTADKWYRMGLRTLEDVRSSKTLKLTPMQKAGLCYYEDLARGVTKAEADAISLLVQDAVATFDPDALVEIVGGFRRGKPQGHDVDLLISSPGAEKEQEDQLLQKVTNLWKKQGLLLYGRLEWTQWEDGKLPSGKADVGDAGAKCFLILKLYDHKVDKSKWEMPTGSNMGEAKPWKAIRVDLVRCPYGGFAFAMLQWTGSRMFRRDLRWYATDEKNMMLDNHALYDLTKKIFLKAKSEEEIFAHLGLEYLEPFERNA

SEQ ID NO: 2559 - DNA, 1587 bp, synthetic construct
  misc_feature 1..1587: note = Variant of terminal deoxynucleotidyltransferase
  source 1..1587: mol_type = other DNA
atgcaccatcatcatcatcatggcggtagcggcagccacggcattcgtaccatcgattcggacttcgggaagaaaattcagaaaaaaatggataaccacgatagttccgccatctatgaaatcaaatttcacgagtttgtgctgttcattctcgaagaaaaaatgggtgcgacgcgtcgtacttttctgacagatttagcccgcaagaaagggttccgcgtcgagaatgaactgtcagacagcgttacccacatcgtggcagaaaataattcacgctctgaagtattggcttggctgaaagaacacaagatggagaagaccaagcaattcgaactgctggatattagctggcttatcgaaagcatgaaagttggtaaaccggtggacaccaaggggaaataccagttggcggaatcgggtgagatgagtgcgaacccagatccgacagagggtcgtgaaaacgagctgcctcctactatgaagaccgtttctccgtatgcgtgtcaacgccgcaccaccctgaacaaccataatcaacgttttacggacgcactggaaattcttgcggaaaattacgagttcaaacgcaacgatgatactgcgctggaatttcgtcgtgctatctccgtgctgaaaagccttccgtttgaggtacgtagcctgaaagacacggaaggattgccctggatcggtgatgaagtcaaagggattatggaagaaatcatcgaggtcggggaatcgcgtgaagtgcaggccgtgctcaatgatgagtggtatcaatcgttccaccgctttgtcagtgtctttggagtgggggtgaagacagcagacaagtggtaccgtatgggtctgcgcaccctcgaggatgttcgttccagcaagaccctgaagttgaccccgatgcagaaggcgggtctgtgctattatgaagatcttgctcgcggcgttacgaaagccgaagctgacgcgatttctctgctggttcaggatgcagtcgcaactttcgacccggatgcgctggtggagattgtcggtggatttcgtcgtgggaaacctcagggtcacgacgttgatctgcttatcagttctccgggagctgagaaagagcaagaagaccagctcctgcagaaagtgaccaatctgtggaagaaacaagggttgttgctgtacggtcgtctggaatggacccagtgggaagatgggaaactcccatccggtaaggctgacgtaggtgacgcgggtgcgaaatgctttctgatcctcaaactttatgatcataaagtggacaaaagcaaatgggaaatgccgacgggttcgaacatgggcgaggccaaaccgtggaaagcaattcgcgtagatctggtgcgttgcccctacggcggttttgcgtttgcgatgttgcagtggaccggaagccgcatgttccgccgtgatctgcgctggtacgccactgacgagaagaacatgatgctggacaatcatgcgctgtatgacctgaccaagaaaatctttctcaaagctaaatcggaagaggaaattttcgcacatctggggcttgaatacctggaaccgttcgaacgtaacgca

SEQ ID NO: 2560 - protein, 529 aa, synthetic construct
  REGION 1..529: note = Variant of terminal deoxynucleotidyltransferase
MHHHHHHGGSGSHGIRTIDSDFGKKIQKKMDNHDSSAIYEIKFHEFVLFILEEKMGATRRTFLTDLARKKGFRVENELSDSVTHIVAENNSRSEVLAWLKEHKMEKTKQFELLDISWLIESMKVGKPVDTKGKYQLAESGEMSANPDPTEGRENELPPTMKTVSPYACQRRTTLNNHNQRFTDALEILAENYEFKRNDDTALEFRRAISVLKSLPFEVRSLKDTEGLPWIGDEVKGIMEEIIEVGESREVQAVLNDEWYQSFHRFVSVFGVGVKTADKWYRMGLRTLEDVRSSKTLKLTPMQKAGLCYYEDLARGVTKAEADAISLLVQDAVATFDPDALVEIVGGFRRGKPQGHDVDLLISSPGAEKEQEDQLLQKVTNLWKKQGLLLYGRLEWTQWEDGKLPSGKADVGDAGAKCFLILKLYDHKVDKSKWEMPTGSNMGEAKPWKAIRVDLVRCPYGGFAFAMLQWTGSRMFRRDLRWYATDEKNMMLDNHALYDLTKKIFLKAKSEEEIFAHLGLEYLEPFERNA

SEQ ID NO: 2561 - DNA, 1587 bp, synthetic construct
  misc_feature 1..1587: note = Variant of terminal deoxynucleotidyltransferase
  source 1..1587: mol_type = other DNA
atgcaccatcatcatcatcatggcggtagcggcagccacggcattcgtaccatcgattcggacttcgggaagaaacagcagaaaaaaatggataaccacgatagttccgccatctatgaaatcaaatttcacgagtttgtgctgttcattctcgaagaaaaaatgggtgcgacgcgtcgtacttttctgacagatttagcccgcaagaaagggttccgcgtcgagaatgaactgtcagacagcgttacccacatcgtggcagaaaatctgtcacgctctgaagtattggcttggctgaaagaacacaagatggagaagaccaagcaattcgaactgctggatattagctggcttatcgaaagcatgaaagttggtaaaccggtggacaccaaggggaaataccagttggcggaatcgggtgagatgagtgcgaacccagatccgacagagggtcgtgaaaacgagctgcctcctactatgaagaccgtttctccgtatgcgtgtcaacgccgcaccaccctgaacaaccataatcaacgttttacggacgcactggaaattcttgcggaaaattacgagttcaaacgcaacgatgatactgcgctggaatttcgtcgtgctatctccgtgctgaaaagccttccgtttgaggtacgtagcctgaaagacacggaaggattgccctggatcggtgatgaagtcaaagggattatggaagaaatcatcgaggtcgggaattcgcgtgaagtgcaggccgtgctcaatgatgagtggtatcaagcgttccaccgctttaagagtgtctttggagtgggggtgaagacagcagacaagtggtaccgtatgggtctgcgcaccctcgaggatgttcgttccagcaagaccctgaagttgaccccgatgcagaaagcgggtctgtgctattatgaagatcttgctcgcggcgttacgaaagccgaagctgacgcgatttctctgctggttcaggatgcagtcgcaactttcgacccggatgcgctggtggagattgtcggtggatttcgtcgtgggaaacctcagggtcacgacgttgatctgcttatcacatctccgggagctgagaaagagcaagaagaccagctcctgcagaaagtgaccaatctgtggaagaaacaagggttgttgctgtacggtcgtctggaatggacccagtgggaagatgggaaactcccatccggtaaggctgacgtaggtgacgcgggtgcgaaatgctttctgatcctcaaactttatgatcataaagtggacaaaagcaaatgggaaatgccgacgggttcgaacatgggcgaggccaaaccgtggaaagcaattcgcgtagatctggttcgttgcccctacggcggttttgcgtttgcgatgttgcagtggaccggaagccgcatgttccgccgtgatctgcgctggtacgccactgacgagaagaacatgatgctggacaatcatgcgctgtatgacctgaccaagaaaatctttctcaaagctaaatcggaagaggaaattttcgcacatctggggcttgaatacctggaaccgttcgaacgtaacgca

SEQ ID NO: 2562 - protein, 529 aa, synthetic construct
  REGION 1..529: note = Variant of terminal deoxynucleotidyltransferase
MHHHHHHGGSGSHGIRTIDSDFGKKQQKKMDNHDSSAIYEIKFHEFVLFILEEKMGATRRTFLTDLARKKGFRVENELSDSVTHIVAENLSRSEVLAWLKEHKMEKTKQFELLDISWLIESMKVGKPVDTKGKYQLAESGEMSANPDPTEGRENELPPTMKTVSPYACQRRTTLNNHNQRFTDALEILAENYEFKRNDDTALEFRRAISVLKSLPFEVRSLKDTEGLPWIGDEVKGIMEEIIEVGNSREVQAVLNDEWYQAFHRFKSVFGVGVKTADKWYRMGLRTLEDVRSSKTLKLTPMQKAGLCYYEDLARGVTKAEADAISLLVQDAVATFDPDALVEIVGGFRRGKPQGHDVDLLITSPGAEKEQEDQLLQKVTNLWKKQGLLLYGRLEWTQWEDGKLPSGKADVGDAGAKCFLILKLYDHKVDKSKWEMPTGSNMGEAKPWKAIRVDLVRCPYGGFAFAMLQWTGSRMFRRDLRWYATDEKNMMLDNHALYDLTKKIFLKAKSEEEIFAHLGLEYLEPFERNA

SEQ ID NO: 2563 - DNA, 1587 bp, synthetic construct
  misc_feature 1..1587: note = Variant of terminal deoxynucleotidyltransferase
  source 1..1587: mol_type = other DNA
atgcaccatcatcatcatcatggcggtagcggcagccacggcattcgtaccatcgattcggacttcgggaagaaaggccagaaaaaaatggataaccacgatagttccgccatctatgaaatcaaatttcacgagtttgtgctgttcattctcgaagaaaaaatgggtgcgacgcgtcgtacttttctgacagatttagcccgcaagaaagggttccgcgtcgagaatgaactgtcagacagcgttacccacatcgtggcagaaaataattcacgctctgaagtattggcttggctgaaagaacacaagatggagaagaccaagcaattcgaactgctggatattagctggcttatcgaaagcatgaaagttggtaaaccggtggacaccaaggggaaataccagttggcggaatcgggtgagatgagtgcgaacccagatccgacagagggtcgtgaaaacgagctgcctcctactatgaagaccgtttctccgtatgcgtgtcaacgccgcaccaccctgaacaaccataatcaacgttttacggacgcactggaaattcttgcggaaaattacgagttcaaacgcaacgatgatactgcgctggaatttcgtcgtgctatctccgtgctgaaaagccttccgtttgaggtacgtagcctgaaagacacggaaggattgccctggatcggtgatgaagtcaaagggattatggaagaaatcatcgaggtcgggaattcggtggaagtgcaggccgtgctcaatgatgagtggtatcaaagcttccaccgctttaagagtgtctttggagtgggggtgaagacagcagacaagtggtaccgtatgggtctgcgcaccctcgaggatgttcgttccagcaagaccctgaagttgaccccgatgcagaaagcgggtctgtgctattatgaagatcttgctcgcggcgttacgaaagccgaagctgacgcgatttctctgctggttcaggatgcagtcgcaactttcgacccggatgcgctggtggagattgtcggtggatttcgtcgtgggaaacctcagggtcacgacgttgatctgcttatcacatctccgggagctgagaaagagcaagaagaccagctcctgcagaaagtgaccaatctgtggaagaaacaagggttgttgctgtacggtcgtctggaatggacccagtgggaagatgggaaactcccatccggtaaggctgacgtaggtgacgcgggtgcgaaatgctttctgatcctcaaactttatgatcataaagtggacaaaagcaaatgggaaatgccgacgggttcgaacatgggcgaggccaaaccgtggaaagcaattcgcgtagatctgctgcgttgcccctacggcggttttgcgtttgcgatgttgcagtggaccggaagccgcatgttccgccgtgatctgcgctggtacgccactgacgagaagaacatgatgctggacaatcatgcgctgtatgacctgaccaagaaaatctttctcaaagctaaatcggaagaggaaattttcgcacatctggggcttgaatacctggaaccgttcgaacgtaacgca

SEQ ID NO: 2564 - protein, 529 aa, synthetic construct
  REGION 1..529: note = Variant of terminal deoxynucleotidyltransferase
MHHHHHHGGSGSHGIRTIDSDFGKKGQKKMDNHDSSAIYEIKFHEFVLFILEEKMGATRRTFLTDLARKKGFRVENELSDSVTHIVAENNSRSEVLAWLKEHKMEKTKQFELLDISWLIESMKVGKPVDTKGKYQLAESGEMSANPDPTEGRENELPPTMKTVSPYACQRRTTLNNHNQRFTDALEILAENYEFKRNDDTALEFRRAISVLKSLPFEVRSLKDTEGLPWIGDEVKGIMEEIIEVGNSVEVQAVLNDEWYQSFHRFKSVFGVGVKTADKWYRMGLRTLEDVRSSKTLKLTPMQKAGLCYYEDLARGVTKAEADAISLLVQDAVATFDPDALVEIVGGFRRGKPQGHDVDLLITSPGAEKEQEDQLLQKVTNLWKKQGLLLYGRLEWTQWEDGKLPSGKADVGDAGAKCFLILKLYDHKVDKSKWEMPTGSNMGEAKPWKAIRVDLLRCPYGGFAFAMLQWTGSRMFRRDLRWYATDEKNMMLDNHALYDLTKKIFLKAKSEEEIFAHLGLEYLEPFERNA

SEQ ID NO: 2565 - DNA, 1587 bp, synthetic construct
  misc_feature 1..1587: note = Variant of terminal deoxynucleotidyltransferase
  source 1..1587: mol_type = other DNA
atgcaccatcatcatcatcatggcggtagcggcagccacggcattcgtaccatcgattcggacttcgggaagaaacagcagaaaaaaatggataaccacgatagttccgccatctatgaaatcaaatttcacgagtttgtgctgttcattctcgaagaaaaaatgggtgcgacgcgtcgtacttttctgacagatttagcccgcaagaaagggttccgcgtcgagaatgaactgtcagacagcgttacccacatcgtggcagaaaataattcacgctctgaagtattggcttggctgaaagaacacaagatggagaagaccaagcaattcgaactgctggatattagctggcttatcgaaagcatgaaagttggtaaaccggtggacaccaaggggaaataccagttggcggaatcgggtgagatgagtgcgaacccagatccgacagagggtcgtgaaaacgagctgcctcctactatgaagaccgtttctccgtatgcgtgtcaacgccgcaccaccctgaacaaccataatcaacgttttacggacgcactggaaattcttgcggaaaattacgagttcaaacgcaacgatgatactgcgctggaatttcgtcgtgctatctccgtgctgaaaagccttccgtttgaggtacgtagcctgaaagacacggaaggattgccctggatcggtgatgaagtcaaagggattatggaagaaatcatcgaggtcggggaatcgctggaagtgcaggccgtgctcaatgatgagtggtatcaaagcttccaccgctttaagagtgtctttggagtgggggtgaagacagcagacaagtggtaccgtatgggtctgcgcaccctcgaggatgttcgttccagcaagaccctgaagttgaccccgatgcagaaggcgggtctgtgctattatgaagatcttgctcgcggcgttacgaaagccgaagctgacgcgatttctctgctggttcaggatgcagtcgcaactttcgacccggatgcgctggtggagattgtcggtggatttcgtcgtgggaaacctcagggtcacgacgttgatctgcttatcagttctccgggagctgagaaagagcaagaagaccagctcctgcagaaagtgaccaatctgtggaagaaacaagggttgttgctgtacggtcgtctggaatggacccagtgggaagatgggaaactcccatccggtaaggctgacgtaggtgacgcgggtgcgaaatgctttctgatcctcaaactttatgatcataaagtggacaaaagcaaatgggaaatgccgacgggttcgaacatgggcgaggccaaaccgtggaaagcaattcgcgtagatctggtgcgttgcccctacggcggttttgcgtttgcgatgttgcagtggaccggaagccgcatgttccgccgtgatctgcgctggtacgccactgacgagaagaacatgatgctggacaatcatgcgctgtatgacctgaccaagaaaatctttctcaaagctaaatcggaagaggaaattttcgcacatctggggcttgaatacctggaaccgttcgaacgtaacgca

SEQ ID NO: 2566 - protein, 529 aa, synthetic construct
  REGION 1..529: note = Variant of terminal deoxynucleotidyltransferase
MHHHHHHGGSGSHGIRTIDSDFGKKQQKKMDNHDSSAIYEIKFHEFVLFILEEKMGATRRTFLTDLARKKGFRVENELSDSVTHIVAENNSRSEVLAWLKEHKMEKTKQFELLDISWLIESMKVGKPVDTKGKYQLAESGEMSANPDPTEGRENELPPTMKTVSPYACQRRTTLNNHNQRFTDALEILAENYEFKRNDDTALEFRRAISVLKSLPFEVRSLKDTEGLPWIGDEVKGIMEEIIEVGESLEVQAVLNDEWYQSFHRFKSVFGVGVKTADKWYRMGLRTLEDVRSSKTLKLTPMQKAGLCYYEDLARGVTKAEADAISLLVQDAVATFDPDALVEIVGGFRRGKPQGHDVDLLISSPGAEKEQEDQLLQKVTNLWKKQGLLLYGRLEWTQWEDGKLPSGKADVGDAGAKCFLILKLYDHKVDKSKWEMPTGSNMGEAKPWKAIRVDLVRCPYGGFAFAMLQWTGSRMFRRDLRWYATDEKNMMLDNHALYDLTKKIFLKAKSEEEIFAHLGLEYLEPFERNA

SEQ ID NO: 2567 - DNA, 1587 bp, synthetic construct
  misc_feature 1..1587: note = Variant of terminal deoxynucleotidyltransferase
  source 1..1587: mol_type = other DNA
atgcaccatcatcatcatcatggcggtagcggcagccacggcattcgtaccatcgattcggacttcgggaagaaaggccagaaaaaaatggataaccacgatagttccgccatctatgaaatcaaatttcacgagtttgtgctgttcattctcgaagaaaaaatgggtgcgacgcgtcgtacttttctgacagatttagcccgcaagaaagggttccgcgtcgagaatgaactgtcagacagcgttacccacatcgtggcagaaaatctgtcacgctctgaagtattggcttggctgaaagaacacaagatggagaagaccaagcaattcgaactgctggatattagctggcttatcgaaagcatgaaagttggtaaaccggtggacaccaaggggaaataccagttggcggaatcgggtgagatgagtgcgaacccagatccgacagagggtcgtgaaaacgagctgcctcctactatgaagaccgtttctccgtatgcgtgtcaacgccgcaccaccctgaacaaccataatcaacgttttacggacgcactggaaattcttgcggaaaattacgagttcaaacgcaacgatgatactgcgctggaatttcgtcgtgctatctccgtgctgaaaagccttccgtttgaggtacgtagcctgaaagacacggaaggattgccctggatcggtgatgaagtcaaagggattatggaagaaatcatcgaggtcgggaattcgctggaagtgcaggccgtgctcaatgatgagtggtatcaatcgttccaccgctttgtcagtgtctttggagtgggggtgaagacagcagacaagtggtaccgtatgggtctgcgcaccctcgaggatgttcgttccagcaagaccctgaagttgaccccgatgcagaaagcgggtctgtgctattatgaagatcttgctcgcggcgttacgaaagccgaagctgacgcgatttctctgctggttcaggatgcagtcgcaactttcgacccggatgcgctggtggagattgtcggtggatttcgtcgtgggaaacctcagggtcacgacgttgatctgcttatcagttctccgggagctgagaaagagcaagaagaccagctcctgcagaaagtgaccaatctgtggaagaaacaagggttgttgctgtacggtcgtctggaatggacccagtgggaagatgggaaactcccatccggtaaggctgacgtaggtgacgcgggtgcgaaatgctttctgatcctcaaactttatgatcataaagtggacaaaagcaaatgggaaatgccgacgggttcgaacatgggcgaggccaaaccgtggaaagcaattcgcgtagatctggtgcgttgcccctacggcggttttgcgtttgcgatgttgcagtggaccggaagccgcatgttccgccgtgatctgcgctggtacgccactgacgagaagaacatgatgctggacaatcatgcgctgtatgacctgaccaagaaaatctttctcaaagctaaatcggaagaggaaattttcgcacatctggggcttgaatacctggaaccgttcgaacgtaacgca

SEQ ID NO: 2568 - protein, 529 aa, synthetic construct
  REGION 1..529: note = Variant of terminal deoxynucleotidyltransferase
MHHHHHHGGSGSHGIRTIDSDFGKKGQKKMDNHDSSAIYEIKFHEFVLFILEEKMGATRRTFLTDLARKKGFRVENELSDSVTHIVAENLSRSEVLAWLKEHKMEKTKQFELLDISWLIESMKVGKPVDTKGKYQLAESGEMSANPDPTEGRENELPPTMKTVSPYACQRRTTLNNHNQRFTDALEILAENYEFKRNDDTALEFRRAISVLKSLPFEVRSLKDTEGLPWIGDEVKGIMEEIIEVGNSLEVQAVLNDEWYQSFHRFVSVFGVGVKTADKWYRMGLRTLEDVRSSKTLKLTPMQKAGLCYYEDLARGVTKAEADAISLLVQDAVATFDPDALVEIVGGFRRGKPQGHDVDLLISSPGAEKEQEDQLLQKVTNLWKKQGLLLYGRLEWTQWEDGKLPSGKADVGDAGAKCFLILKLYDHKVDKSKWEMPTGSNMGEAKPWKAIRVDLVRCPYGGFAFAMLQWTGSRMFRRDLRWYATDEKNMMLDNHALYDLTKKIFLKAKSEEEIFAHLGLEYLEPFERNA

SEQ ID NO: 2569 - DNA, 1587 bp, synthetic construct
  misc_feature 1..1587: note = Variant of terminal deoxynucleotidyltransferase
  source 1..1587: mol_type = other DNA
atgcaccatcatcatcatcatggcggtagcggcagccacggcattcgtaccatcgattcggacttcgggaagaaacgccagaaaaaaatggataaccacgatagttccgccatctatgaaatcaaatttcacgagtttgtgctgttcattctcgaagaaaaaatgggtgcgacgcgtcgtacttttctgacagatttagcccgcaagaaagggttccgcgtcgagaatgaactgtcagacagcgttacccacatcgtggcagaaaataattcacgctctgaagtattggcttggctgaaagaacacaagatggagaagaccaagcaattcgaactgctggatattagctggcttatcgaaagcatgaaagttggtaaaccggtggacaccaaggggaaataccagttggcggaatcgggtgagatgagtgcgaacccagatccgacagagggtcgtgaaaacgagctgcctcctactatgaagaccgtttctccgtatgcgtgtcaacgccgcaccaccctgaacaaccataatcaacgttttacggacgcactggaaattcttgcggaaaattacgagttcaaacgcaacgatgatactgcgctggaatttcgtcgtgctatctccgtgctgaaaagccttccgtttgaggtacgtagcctgaaagacacggaaggattgccctggatcggtgatgaagtcaaagggattatggaagaaatcatcgaggtcggggaatcgcgtgaagtgcaggccgtgctcaatgatgagtggtatcaatcgttccaccgctttaagagtgtctttggagtgggggtgaagacagcagacaagtggtaccgtatgggtctgcgcaccctcgaggatgttcgttccagcaagaccctgaagttgaccccgatgcagaaagcgggtctgtgctattatgaagatcttgctcgcggcgttacgaaagccgaagctgacgcgatttctctgctggttcaggatgcagtcgcaactttcgacccggatgcgctggtggagattgtcggtggatttcgtcgtgggaaacctcagggtcacgacgttgatctgcttatcacttctccgggagctgagaaagagcaagaagaccagctcctgcagaaagtgaccaatctgtggaagaaacaagggttgttgctgtacggtcgtctggaatggacccagtgggaagatgggaaactcccatccggtaaggctgacgtaggtgacgcgggtgcgaaatgctttctgatcctcaaactttatgatcataaagtggacaaaagcaaatgggaaatgccgacgggttcgaacatgggcgaggccaaaccgtggaaagcaattcgcgtagatctggttcgttgcccctacggcggttttgcgtttgcgatgttgcagtggaccggaagccgcatgttccgccgtgatctgcgctggtacgccactgacgagaagaacatgatgctggacaatcatgcgctgtatgacctgaccaagaaaatctttctcaaagctaaatcggaagaggaaattttcgcacatctggggcttgaatacctggaaccgttcgaacgtaacgca

SEQ ID NO: 2570 - protein, 529 aa, synthetic construct
  REGION 1..529: note = Variant of terminal deoxynucleotidyltransferase
MHHHHHHGGSGSHGIRTIDSDFGKKRQKKMDNHDSSAIYEIKFHEFVLFILEEKMGATRRTFLTDLARKKGFRVENELSDSVTHIVAENNSRSEVLAWLKEHKMEKTKQFELLDISWLIESMKVGKPVDTKGKYQLAESGEMSANPDPTEGRENELPPTMKTVSPYACQRRTTLNNHNQRFTDALEILAENYEFKRNDDTALEFRRAISVLKSLPFEVRSLKDTEGLPWIGDEVKGIMEEIIEVGESREVQAVLNDEWYQSFHRFKSVFGVGVKTADKWYRMGLRTLEDVRSSKTLKLTPMQKAGLCYYEDLARGVTKAEADAISLLVQDAVATFDPDALVEIVGGFRRGKPQGHDVDLLITSPGAEKEQEDQLLQKVTNLWKKQGLLLYGRLEWTQWEDGKLPSGKADVGDAGAKCFLILKLYDHKVDKSKWEMPTGSNMGEAKPWKAIRVDLVRCPYGGFAFAMLQWTGSRMFRRDLRWYATDEKNMMLDNHALYDLTKKIFLKAKSEEEIFAHLGLEYLEPFERNA

SEQ ID NO: 2571 - DNA, 1587 bp, synthetic construct
  misc_feature 1..1587: note = Variant of terminal deoxynucleotidyltransferase
  source 1..1587: mol_type = other DNA
atgcaccatcatcatcatcatggcggtagcggcagccacggcattcgtaccatcgattcggacttcgggaagaaaattcagaaaaaaatggataaccacgatagttccgccatctatgaaatcaaatttcacgagtttgtgctgttcattctcgaagaaaaaatgggtgcgacgcgtcgtacttttctgacagatttagcccgcaagaaagggttccgcgtcgagaatgaactgtcagacagcgttacccacatcgtggcagaaaataattcacgctctgaagtattggcttggctgaaagaacacaagatggagaagaccaagcaattcgaactgctggatattagctggcttatcgaaagcatgaaagttggtaaaccggtggacaccaaggggaaataccagttggcggaatcgggtgagatgagtgcgaacccagatccgacagagggtcgtgaaaacgagctgcctcctactatgaagaccgtttctccgtatgcgtgtcaacgccgcaccaccctgaacaaccataatcaacgttttacggacgcactggaaattcttgcggaaaattacgagttcaaacgcaacgatgatactgcgctggaatttcgtcgtgctatctccgtgctgaaaagccttccgtttgaggtacgtagcctgaaagacacggaaggattgccctggatcggtgatgaagtcaaagggattatggaagaaatcatcgaggtcgggaattcgcgtgaagtgcaggccgtgctcaatgatgagtggtatcaaagcttccaccgctttaagagtgtctttggagtgggggtgaagacagcagacaagtggtaccgtatgggtctgcgcaccctcgaggatgttcgttccagcaagaccctgaagttgaccccgatgcagaaggcgggtctgtgctattatgaagatcttgctcgcggcgttacgaaagccgaagctgacgcgatttctctgctggttcaggatgcagtcgcaactttcgacccggatgcgctggtggagattgtcggtggatttcgtcgtgggaaacctcagggtcacgacgttgatctgcttatcagttctccgggagctgagaaagagcaagaagaccagctcctgcagaaagtgaccaatctgtggaagaaacaagggttgttgctgtacggtcgtctggaatggacccagtgggaagatgggaaactcccatccggtaaggctgacgtaggtgacgcgggtgcgaaatgctttctgatcctcaaactttatgatcataaagtggacaaaagcaaatgggaaatgccgacgggttcgaacatgggcgaggccaaaccgtggaaagcaattcgcgtagatctgctgcgttgcccctacggcggttttgcgtttgcgatgttgcagtggaccggaagccgcatgttccgccgtgatctgcgctggtacgccactgacgagaagaacatgatgctggacaatcatgcgctgtatgacctgaccaagaaaatctttctcaaagctaaatcggaagaggaaattttcgcacatctggggcttgaatacctggaaccgttcgaacgtaacgca

SEQ ID NO: 2572 - protein, 529 aa, synthetic construct
  REGION 1..529: note = Variant of terminal deoxynucleotidyltransferase
MHHHHHHGGSGSHGIRTIDSDFGKKIQKKMDNHDSSAIYEIKFHEFVLFILEEKMGATRRTFLTDLARKKGFRVENELSDSVTHIVAENNSRSEVLAWLKEHKMEKTKQFELLDISWLIESMKVGKPVDTKGKYQLAESGEMSANPDPTEGRENELPPTMKTVSPYACQRRTTLNNHNQRFTDALEILAENYEFKRNDDTALEFRRAISVLKSLPFEVRSLKDTEGLPWIGDEVKGIMEEIIEVGNSREVQAVLNDEWYQSFHRFKSVFGVGVKTADKWYRMGLRTLEDVRSSKTLKLTPMQKAGLCYYEDLARGVTKAEADAISLLVQDAVATFDPDALVEIVGGFRRGKPQGHDVDLLISSPGAEKEQEDQLLQKVTNLWKKQGLLLYGRLEWTQWEDGKLPSGKADVGDAGAKCFLILKLYDHKVDKSKWEMPTGSNMGEAKPWKAIRVDLLRCPYGGFAFAMLQWTGSRMFRRDLRWYATDEKNMMLDNHALYDLTKKIFLKAKSEEEIFAHLGLEYLEPFERNA

SEQ ID NO: 2573 - DNA, 1587 bp, synthetic construct
  misc_feature 1..1587: note = Variant of terminal deoxynucleotidyltransferase
  source 1..1587: mol_type = other DNA
atgcaccatcatcatcatcatggcggtagcggcagccacggcattcgtaccatcgattcggacttcgggaagaaacagcagaaaaaaatggataaccacgatagttccgccatctatgaaatcaaatttcacgagtttgtgctgttcattctcgaagaaaaaatgggtgcgacgcgtcgtacttttctgacagatttagcccgcaagaaagggttccgcgtcgagaatgaactgtcagacagcgttacccacatcgtggcagaaaataattcacgctctgaagtattggcttggctgaaagaacacaagatggagaagaccaagcaattcgaactgctggatattagctggcttatcgaaagcatgaaagttggtaaaccggtggacaccaaggggaaataccagttggcggaatcgggtgagatgagtgcgaacccagatccgacagagggtcgtgaaaacgagctgcctcctactatgaagaccgtttctccgtatgcgtgtcaacgccgcaccaccctgaacaaccataatcaacgttttacggacgcactggaaattcttgcggaaaattacgagttcaaacgcaacgatgatactgcgctggaatttcgtcgtgctatctccgtgctgaaaagccttccgtttgaggtacgtagcctgaaagacacggaaggattgccctggatcggtgatgaagtcaaagggattatggaagaaatcatcgaggtcggggaatcgcgtgaagtgcaggccgtgctcaatgatgagtggtatcaagcgttccaccgctttgtcagtgtctttggagtgggggtgaagacagcagacaagtggtaccgtatgggtctgcgcaccctcgaggatgttcgttccagcaagaccctgaagttgaccccgatgcagaaggcgggtctgtgctattatgaagatcttgctcgcggcgttacgaaagccgaagctgacgcgatttctctgctggttcaggatgcagtcgcaactttcgacccggatgcgctggtggagattgtcggtggatttcgtcgtgggaaacctcagggtcacgacgttgatctgcttatcagttctccgggagctgagaaagagcaagaagaccagctcctgcagaaagtgaccaatctgtggaagaaacaagggttgttgctgtacggtcgtctggaatggacccagtgggaagatgggaaactcccatccggtaaggctgacgtaggtgacgcgggtgcgaaatgctttctgatcctcaaactttatgatcataaagtggacaaaagcaaatgggaaatgccgacgggttcgaacatgggcgaggccaaaccgtggaaagcaattcgcgtagatctgctgcgttgcccctacggcggttttgcgtttgcgatgttgcagtggaccggaagccgcatgttccgccgtgatctgcgctggtacgccactgacgagaagaacatgatgctggacaatcatgcgctgtatgacctgaccaagaaaatctttctcaaagctaaatcggaagaggaaattttcgcacatctggggcttgaatacctggaaccgttcgaacgtaacgca

SEQ ID NO: 2574 - protein, 529 aa, synthetic construct
  REGION 1..529: note = Variant of terminal deoxynucleotidyltransferase
MHHHHHHGGSGSHGIRTIDSDFGKKQQKKMDNHDSSAIYEIKFHEFVLFILEEKMGATRRTFLTDLARKKGFRVENELSDSVTHIVAENNSRSEVLAWLKEHKMEKTKQFELLDISWLIESMKVGKPVDTKGKYQLAESGEMSANPDPTEGRENELPPTMKTVSPYACQRRTTLNNHNQRFTDALEILAENYEFKRNDDTALEFRRAISVLKSLPFEVRSLKDTEGLPWIGDEVKGIMEEIIEVGESREVQAVLNDEWYQAFHRFVSVFGVGVKTADKWYRMGLRTLEDVRSSKTLKLTPMQKAGLCYYEDLARGVTKAEADAISLLVQDAVATFDPDALVEIVGGFRRGKPQGHDVDLLISSPGAEKEQEDQLLQKVTNLWKKQGLLLYGRLEWTQWEDGKLPSGKADVGDAGAKCFLILKLYDHKVDKSKWEMPTGSNMGEAKPWKAIRVDLLRCPYGGFAFAMLQWTGSRMFRRDLRWYATDEKNMMLDNHALYDLTKKIFLKAKSEEEIFAHLGLEYLEPFERNA

SEQ ID NO: 2575 - DNA, 1587 bp, synthetic construct
  misc_feature 1..1587: note = Variant of terminal deoxynucleotidyltransferase
  source 1..1587: mol_type = other DNA
atgcaccatcatcatcatcatggcggtagcggcagccacggcattcgtaccatcgattcggacttcgggaagaaacgccagaaaaaaatggataaccacgatagttccgccatctatgaaatcaaatttcacgagtttgtgctgttcattctcgaagaaaaaatgggtgcgacgcgtcgtacttttctgacagatttagcccgcaagaaagggttccgcgtcgagaatgaactgtcagacagcgttacccacatcgtggcagaaaataattcacgctctgaagtattggcttggctgaaagaacacaagatggagaagaccaagcaattcgaactgctggatattagctggcttatcgaaagcatgaaagttggtaaaccggtggacaccaaggggaaataccagttggcggaatcgggtgagatgagtgcgaacccagatccgacagagggtcgtgaaaacgagctgcctcctactatgaagaccgtttctccgtatgcgtgtcaacgccgcaccaccctgaacaaccataatcaacgttttacggacgcactggaaattcttgcggaaaattacgagttcaaacgcaacgatgatactgcgctggaatttcgtcgtgctatctccgtgctgaaaagccttccgtttgaggtacgtagcctgaaagacacggaaggattgccctggatcggtgatgaagtcaaagggattatggaagaaatcatcgaggtcggggaatcgcgtgaagtgcaggccgtgctcaatgatgagtggtatcaaagcttccaccgctttaagagtgtctttggagtgggggtgaagacagcagacaagtggtaccgtatgggtctgcgcaccctcgaggatgttcgttccagcaagaccctgaagttgaccccgatgcagaaggcgggtctgtgctattatgaagatcttgctcgcggcgttacgaaagccgaagctgacgcgatttctctgctggttcaggatgcagtcgcaactttcgacccggatgcgctggtggagattgtcggtggatttcgtcgtgggaaacctcagggtcacgacgttgatctgcttatcacatctccgggagctgagaaagagcaagaagaccagctcctgcagaaagtgaccaatctgtggaagaaacaagggttgttgctgtacggtcgtctggaatggacccagtgggaagatgggaaactcccatccggtaaggctgacgtaggtgacgcgggtgcgaaatgctttctgatcctcaaactttatgatcataaagtggacaaaagcaaatgggaaatgccgacgggttcgaacatgggcgaggccaaaccgtggaaagcaattcgcgtagatctgctgcgttgcccctacggcggttttgcgtttgcgatgttgcagtggaccggaagccgcatgttccgccgtgatctgcgctggtacgccactgacgagaagaacatgatgctggacaatcatgcgctgtatgacctgaccaagaaaatctttctcaaagctaaatcggaagaggaaattttcgcacatctggggcttgaatacctggaaccgttcgaacgtaacgca

SEQ ID NO: 2576 - protein, 529 aa, synthetic construct
  REGION 1..529: note = Variant of terminal deoxynucleotidyltransferase
MHHHHHHGGSGSHGIRTIDSDFGKKRQKKMDNHDSSAIYEIKFHEFVLFILEEKMGATRRTFLTDLARKKGFRVENELSDSVTHIVAENNSRSEVLAWLKEHKMEKTKQFELLDISWLIESMKVGKPVDTKGKYQLAESGEMSANPDPTEGRENELPPTMKTVSPYACQRRTTLNNHNQRFTDALEILAENYEFKRNDDTALEFRRAISVLKSLPFEVRSLKDTEGLPWIGDEVKGIMEEIIEVGESREVQAVLNDEWYQSFHRFKSVFGVGVKTADKWYRMGLRTLEDVRSSKTLKLTPMQKAGLCYYEDLARGVTKAEADAISLLVQDAVATFDPDALVEIVGGFRRGKPQGHDVDLLITSPGAEKEQEDQLLQKVTNLWKKQGLLLYGRLEWTQWEDGKLPSGKADVGDAGAKCFLILKLYDHKVDKSKWEMPTGSNMGEAKPWKAIRVDLLRCPYGGFAFAMLQWTGSRMFRRDLRWYATDEKNMMLDNHALYDLTKKIFLKAKSEEEIFAHLGLEYLEPFERNA

SEQ ID NO: 2577 - DNA, 1587 bp, synthetic construct
  misc_feature 1..1587: note = Variant of terminal deoxynucleotidyltransferase
  source 1..1587: mol_type = other DNA
atgcaccatcatcatcatcatggcggtagcggcagccacggcattcgtaccatcgattcggacttcgggaagaaacgccagaaaaaaatggataaccacgatagttccgccatctatgaaatcaaatttcacgagtttgtgctgttcattctcgaagaaaaaatgggtgcgacgcgtcgtacttttctgacagatttagcccgcaagaaagggttccgcgtcgagaatgaactgtcagacagcgttacccacatcgtggcagaaaataattcacgctctgaagtattggcttggctgaaagaacacaagatggagaagaccaagcaattcgaactgctggatattagctggcttatcgaaagcatgaaagttggtaaaccggtggacaccaaggggaaataccagttggcggaatcgggtgagatgagtgcgaacccagatccgacagagggtcgtgaaaacgagctgcctcctactatgaagaccgtttctccgtatgcgtgtcaacgccgcaccaccctgaacaaccataatcaacgttttacggacgcactggaaattcttgcggaaaattacgagttcaaacgcaacgatgatactgcgctggaatttcgtcgtgctatctccgtgctgaaaagccttccgtttgaggtacgtagcctgaaagacacggaaggattgccctggatcggtgatgaagtcaaagggattatggaagaaatcatcgaggtcgggaattcgcgtgaagtgcaggccgtgctcaatgatgagtggtatcaaagcttccaccgctttaagagtgtctttggagtgggggtgaagacagcagacaagtggtaccgtatgggtctgcgcaccctcgaggatgttcgttccagcaagaccctgaagttgaccccgatgcagaaggcgggtctgtgctattatgaagatcttgctcgcggcgttacgaaagccgaagctgacgcgatttctctgctggttcaggatgcagtcgcaactttcgacccggatgcgctggtggagattgtcggtggatttcgtcgtgggaaacctcagggtcacgacgttgatctgcttatcagttctccgggagctgagaaagagcaagaagaccagctcctgcagaaagtgaccaatctgtggaagaaacaagggttgttgctgtacggtcgtctggaatggacccagtgggaagatgggaaactcccatccggtaaggctgacgtaggtgacgcgggtgcgaaatgctttctgatcctcaaactttatgatcataaagtggacaaaagcaaatgggaaatgccgacgggttcgaacatgggcgaggccaaaccgtggaaagcaattcgcgtagatctggttcgttgcccctacggcggttttgcgtttgcgatgttgcagtggaccggaagccgcatgttccgccgtgatctgcgctggtacgccactgacgagaagaacatgatgctggacaatcatgcgctgtatgacctgaccaagaaaatctttctcaaagctaaatcggaagaggaaattttcgcacatctggggcttgaatacctggaaccgttcgaacgtaacgca

SEQ ID NO: 2578 - protein, 529 aa, synthetic construct
  REGION 1..529: note = Variant of terminal deoxynucleotidyltransferase
MHHHHHHGGSGSHGIRTIDSDFGKKRQKKMDNHDSSAIYEIKFHEFVLFILEEKMGATRRTFLTDLARKKGFRVENELSDSVTHIVAENNSRSEVLAWLKEHKMEKTKQFELLDISWLIESMKVGKPVDTKGKYQLAESGEMSANPDPTEGRENELPPTMKTVSPYACQRRTTLNNHNQRFTDALEILAENYEFKRNDDTALEFRRAISVLKSLPFEVRSLKDTEGLPWIGDEVKGIMEEIIEVGNSREVQAVLNDEWYQSFHRFKSVFGVGVKTADKWYRMGLRTLEDVRSSKTLKLTPMQKAGLCYYEDLARGVTKAEADAISLLVQDAVATFDPDALVEIVGGFRRGKPQGHDVDLLISSPGAEKEQEDQLLQKVTNLWKKQGLLLYGRLEWTQWEDGKLPSGKADVGDAGAKCFLILKLYDHKVDKSKWEMPTGSNMGEAKPWKAIRVDLVRCPYGGFAFAMLQWTGSRMFRRDLRWYATDEKNMMLDNHALYDLTKKIFLKAKSEEEIFAHLGLEYLEPFERNA

SEQ ID NO: 2579 - DNA, 1587 bp, synthetic construct
  misc_feature 1..1587: note = Variant of terminal deoxynucleotidyltransferase
  source 1..1587: mol_type = other DNA
atgcaccatcatcatcatcatggcggtagcggcagccacggcattcgtaccatcgattcggacttcgggaagaaaggccagaaaaaaatggataaccacgatagttccgccatctatgaaatcaaatttcacgagtttgtgctgttcattctcgaagaaaaaatgggtgcgacgcgtcgtacttttctgacagatttagcccgcaagaaagggttccgcgtcgagaatgaactgtcagacagcgttacccacatcgtggcagaaaataattcacgctctgaagtattggcttggctgaaagaacacaagatggagaagaccaagcaattcgaactgctggatattagctggcttatcgaaagcatgaaagttggtaaaccggtggacaccaaggggaaataccagttggcggaatcgggtgagatgagtgcgaacccagatccgacagagggtcgtgaaaacgagctgcctcctactatgaagaccgtttctccgtatgcgtgtcaacgccgcaccaccctgaacaaccataatcaacgttttacggacgcactggaaattcttgcggaaaattacgagttcaaacgcaacgatgatactgcgctggaatttcgtcgtgctatctccgtgctgaaaagccttccgtttgaggtacgtagcctgaaagacacggaaggattgccctggatcggtgatgaagtcaaagggattatggaagaaatcatcgaggtcggggaatcggtggaagtgcaggccgtgctcaatgatgagtggtatcaagcgttccaccgctttgtcagtgtctttggagtgggggtgaagacagcagacaagtggtaccgtatgggtctgcgcaccctcgaggatgttcgttccagcaagaccctgaagttgaccccgatgcagaaagcgggtctgtgctattatgaagatcttgctcgcggcgttacgaaagccgaagctgacgcgatttctctgctggttcaggatgcagtcgcaactttcgacccggatgcgctggtggagattgtcggtggatttcgtcgtgggaaacctcagggtcacgacgttgatctgcttatcacttctccgggagctgagaaagagcaagaagaccagctcctgcagaaagtgaccaatctgtggaagaaacaagggttgttgctgtacggtcgtctggaatggacccagtgggaagatgggaaactcccatccggtaaggctgacgtaggtgacgcgggtgcgaaatgctttctgatcctcaaactttatgatcataaagtggacaaaagcaaatgggaaatgccgacgggttcgaacatgggcgaggccaaaccgtggaaagcaattcgcgtagatctggtgcgttgcccctacggcggttttgcgtttgcgatgttgcagtggaccggaagccgcatgttccgccgtgatctgcgctggtacgccactgacgagaagaacatgatgctggacaatcatgcgctgtatgacctgaccaagaaaatctttctcaaagctaaatcggaagaggaaattttcgcacatctggggcttgaatacctggaaccgttcgaacgtaacgca

SEQ ID NO: 2580 - protein, 529 aa, synthetic construct
  REGION 1..529: note = Variant of terminal deoxynucleotidyltransferase
MHHHHHHGGSGSHGIRTIDSDFGKKGQKKMDNHDSSAIYEIKFHEFVLFILEEKMGATRRTFLTDLARKKGFRVENELSDSVTHIVAENNSRSEVLAWLKEHKMEKTKQFELLDISWLIESMKVGKPVDTKGKYQLAESGEMSANPDPTEGRENELPPTMKTVSPYACQRRTTLNNHNQRFTDALEILAENYEFKRNDDTALEFRRAISVLKSLPFEVRSLKDTEGLPWIGDEVKGIMEEIIEVGESVEVQAVLNDEWYQAFHRFVSVFGVGVKTADKWYRMGLRTLEDVRSSKTLKLTPMQKAGLCYYEDLARGVTKAEADAISLLVQDAVATFDPDALVEIVGGFRRGKPQGHDVDLLITSPGAEKEQEDQLLQKVTNLWKKQGLLLYGRLEWTQWEDGKLPSGKADVGDAGAKCFLILKLYDHKVDKSKWEMPTGSNMGEAKPWKAIRVDLVRCPYGGFAFAMLQWTGSRMFRRDLRWYATDEKNMMLDNHALYDLTKKIFLKAKSEEEIFAHLGLEYLEPFERNA

SEQ ID NO: 2581 - DNA, 1587 bp, synthetic construct
  misc_feature 1..1587: note = Variant of terminal deoxynucleotidyltransferase
  source 1..1587: mol_type = other DNA
atgcaccatcatcatcatcatggcggtagcggcagccacggcattcgtaccatcgattcggacttcgggaagaaacagcagaaaaaaatggataaccacgatagttccgccatctatgaaatcaaatttcacgagtttgtgctgttcattctcgaagaaaaaatgggtgcgacgcgtcgtacttttctgacagatttagcccgcaagaaagggttccgcgtcgagaatgaactgtcagacagcgttacccacatcgtggcagaaaataattcacgctctgaagtattggcttggctgaaagaacacaagatggagaagaccaagcaattcgaactgctggatattagctggcttatcgaaagcatgaaagttggtaaaccggtggacaccaaggggaaataccagttggcggaatcgggtgagatgagtgcgaacccagatccgacagagggtcgtgaaaacgagctgcctcctactatgaagaccgtttctccgtatgcgtgtcaacgccgcaccaccctgaacaaccataatcaacgttttacggacgcactggaaattcttgcggaaaattacgagttcaaacgcaacgatgatactgcgctggaatttcgtcgtgctatctccgtgctgaaaagccttccgtttgaggtacgtagcctgaaagacacggaaggattgccctggatcggtgatgaagtcaaagggattatggaagaaatcatcgaggtcggggaatcgcgtgaagtgcaggccgtgctcaatgatgagtggtatcaatcgttccaccgctttaagagtgtctttggagtgggggtgaagacagcagacaagtggtaccgtatgggtctgcgcaccctcgaggatgttcgttccagcaagaccctgaagttgaccccgatgcagaaggcgggtctgtgctattatgaagatcttgctcgcggcgttacgaaagccgaagctgacgcgatttctctgctggttcaggatgcagtcgcaactttcgacccggatgcgctggtggagattgtcggtggatttcgtcgtgggaaacctcagggtcacgacgttgatctgcttatcagttctccgggagctgagaaagagcaagaagaccagctcctgcagaaagtgaccaatctgtggaagaaacaagggttgttgctgtacggtcgtctggaatggacccagtgggaagatgggaaactcccatccggtaaggctgacgtaggtgacgcgggtgcgaaatgctttctgatcctcaaactttatgatcataaagtggacaaaagcaaatgggaaatgccgacgggttcgaacatgggcgaggccaaaccgtggaaagcaattcgcgtagatctgctgcgttgcccctacggcggttttgcgtttgcgatgttgcagtggaccggaagccgcatgttccgccgtgatctgcgctggtacgccactgacgagaagaacatgatgctggacaatcatgcgctgtatgacctgaccaagaaaatctttctcaaagctaaatcggaagaggaaattttcgcacatctggggcttgaatacctggaaccgttcgaacgtaacgca

SEQ ID NO: 2582 - protein, 529 aa, synthetic construct
  REGION 1..529: note = Variant of terminal deoxynucleotidyltransferase
MHHHHHHGGSGSHGIRTIDSDFGKKQQKKMDNHDSSAIYEIKFHEFVLFILEEKMGATRRTFLTDLARKKGFRVENELSDSVTHIVAENNSRSEVLAWLKEHKMEKTKQFELLDISWLIESMKVGKPVDTKGKYQLAESGEMSANPDPTEGRENELPPTMKTVSPYACQRRTTLNNHNQRFTDALEILAENYEFKRNDDTALEFRRAISVLKSLPFEVRSLKDTEGLPWIGDEVKGIMEEIIEVGESREVQAVLNDEWYQSFHRFKSVFGVGVKTADKWYRMGLRTLEDVRSSKTLKLTPMQKAGLCYYEDLARGVTKAEADAISLLVQDAVATFDPDALVEIVGGFRRGKPQGHDVDLLISSPGAEKEQEDQLLQKVTNLWKKQGLLLYGRLEWTQWEDGKLPSGKADVGDAGAKCFLILKLYDHKVDKSKWEMPTGSNMGEAKPWKAIRVDLLRCPYGGFAFAMLQWTGSRMFRRDLRWYATDEKNMMLDNHALYDLTKKIFLKAKSEEEIFAHLGLEYLEPFERNA

SEQ ID NO: 2583 - DNA, 1587 bp, synthetic construct
  misc_feature 1..1587: note = Variant of terminal deoxynucleotidyltransferase
  source 1..1587: mol_type = other DNA
atgcaccatcatcatcatcatggcggtagcggcagccacggcattcgtaccatcgattcggacttcgggaagaaacagcagaaaaaaatggataaccacgatagttccgccatctatgaaatcaaatttcacgagtttgtgctgttcattctcgaagaaaaaatgggtgcgacgcgtcgtacttttctgacagatttagcccgcaagaaagggttccgcgtcgagaatgaactgtcagacagcgttacccacatcgtggcagaaaatctgtcacgctctgaagtattggcttggctgaaagaacacaagatggagaagaccaagcaattcgaactgctggatattagctggcttatcgaaagcatgaaagttggtaaaccggtggacaccaaggggaaataccagttggcggaatcgggtgagatgagtgcgaacccagatccgacagagggtcgtgaaaacgagctgcctcctactatgaagaccgtttctccgtatgcgtgtcaacgccgcaccaccctgaacaaccataatcaacgttttacggacgcactggaaattcttgcggaaaattacgagttcaaacgcaacgatgatactgcgctggaatttcgtcgtgctatctccgtgctgaaaagccttccgtttgaggtacgtagcctgaaagacacggaaggattgccctggatcggtgatgaagtcaaagggattatggaagaaatcatcgaggtcgggaattcggtggaagtgcaggccgtgctcaatgatgagtggtatcaaagcttccaccgctttaagagtgtctttggagtgggggtgaagacagcagacaagtggtaccgtatgggtctgcgcaccctcgaggatgttcgttccagcaagaccctgaagttgaccccgatgcagaaagcgggtctgtgctattatgaagatcttgctcgcggcgttacgaaagccgaagctgacgcgatttctctgctggttcaggatgcagtcgcaactttcgacccggatgcgctggtggagattgtcggtggatttcgtcgtgggaaacctcagggtcacgacgttgatctgcttatcagttctccgggagctgagaaagagcaagaagaccagctcctgcagaaagtgaccaatctgtggaagaaacaagggttgttgctgtacggtcgtctggaatggacccagtgggaagatgggaaactcccatccggtaaggctgacgtaggtgacgcgggtgcgaaatgctttctgatcctcaaactttatgatcataaagtggacaaaagcaaatgggaaatgccgacgggttcgaacatgggcgaggccaaaccgtggaaagcaattcgcgtagatctgctgcgttgcccctacggcggttttgcgtttgcgatgttgcagtggaccggaagccgcatgttccgccgtgatctgcgctggtacgccactgacgagaagaacatgatgctggacaatcatgcgctgtatgacctgaccaagaaaatctttctcaaagctaaatcggaagaggaaattttcgcacatctggggcttgaatacctggaaccgttcgaacgtaacgca

SEQ ID NO: 2584 - protein, 529 aa, synthetic construct
  REGION 1..529: note = Variant of terminal deoxynucleotidyltransferase
MHHHHHHGGSGSHGIRTIDSDFGKKQQKKMDNHDSSAIYEIKFHEFVLFILEEKMGATRRTFLTDLARKKGFRVENELSDSVTHIVAENLSRSEVLAWLKEHKMEKTKQFELLDISWLIESMKVGKPVDTKGKYQLAESGEMSANPDPTEGRENELPPTMKTVSPYACQRRTTLNNHNQRFTDALEILAENYEFKRNDDTALEFRRAISVLKSLPFEVRSLKDTEGLPWIGDEVKGIMEEIIEVGNSVEVQAVLNDEWYQSFHRFKSVFGVGVKTADKWYRMGLRTLEDVRSSKTLKLTPMQKAGLCYYEDLARGVTKAEADAISLLVQDAVATFDPDALVEIVGGFRRGKPQGHDVDLLISSPGAEKEQEDQLLQKVTNLWKKQGLLLYGRLEWTQWEDGKLPSGKADVGDAGAKCFLILKLYDHKVDKSKWEMPTGSNMGEAKPWKAIRVDLLRCPYGGFAFAMLQWTGSRMFRRDLRWYATDEKNMMLDNHALYDLTKKIFLKAKSEEEIFAHLGLEYLEPFERNA

SEQ ID NO: 2585 - DNA, 1587 bp, synthetic construct
  misc_feature 1..1587: note = Variant of terminal deoxynucleotidyltransferase
  source 1..1587: mol_type = other DNA
atgcaccatcatcatcatcatggcggtagcggcagccacggcattcgtaccatcgattcggacttcgggaagaaacagcagaaaaaaatggataaccacgatagttccgccatctatgaaatcaaatttcacgagtttgtgctgttcattctcgaagaaaaaatgggtgcgacgcgtcgtacttttctgacagatttagcccgcaagaaagggttccgcgtcgagaatgaactgtcagacagcgttacccacatcgtggcagaaaataattcacgctctgaagtattggcttggctgaaagaacacaagatggagaagaccaagcaattcgaactgctggatattagctggcttatcgaaagcatgaaagttggtaaaccggtggacaccaaggggaaataccagttggcggaatcgggtgagatgagtgcgaacccagatccgacagagggtcgtgaaaacgagctgcctcctactatgaagaccgtttctccgtatgcgtgtcaacgccgcaccaccctgaacaaccataatcaacgttttacggacgcactggaaattcttgcggaaaattacgagttcaaacgcaacgatgatactgcgctggaatttcgtcgtgctatctccgtgctgaaaagccttccgtttgaggtacgtagcctgaaagacacggaaggattgccctggatcggtgatgaagtcaaagggattatggaagaaatcatcgaggtcggggaatcggtggaagtgcaggccgtgctcaatgatgagtggtatcaaagcttccaccgctttaagagtgtctttggagtgggggtgaagacagcagacaagtggtaccgtatgggtctgcgcaccctcgaggatgttcgttccagcaagaccctgaagttgaccccgatgcagaaagcgggtctgtgctattatgaagatcttgctcgcggcgttacgaaagccgaagctgacgcgatttctctgctggttcaggatgcagtcgcaactttcgacccggatgcgctggtggagattgtcggtggatttcgtcgtgggaaacctcagggtcacgacgttgatctgcttatcagttctccgggagctgagaaagagcaagaagaccagctcctgcagaaagtgaccaatctgtggaagaaacaagggttgttgctgtacggtcgtctggaatggacccagtgggaagatgggaaactcccatccggtaaggctgacgtaggtgacgcgggtgcgaaatgctttctgatcctcaaactttatgatcataaagtggacaaaagcaaatgggaaatgccgacgggttcgaacatgggcgaggccaaaccgtggaaagcaattcgcgtagatctgctgcgttgcccctacggcggttttgcgtttgcgatgttgcagtggaccggaagccgcatgttccgccgtgatctgcgctggtacgccactgacgagaagaacatgatgctggacaatcatgcgctgtatgacctgaccaagaaaatctttctcaaagctaaatcggaagaggaaattttcgcacatctggggcttgaatacctggaaccgttcgaacgtaacgca

SEQ ID NO: 2586 - protein, 529 aa, synthetic construct
  REGION 1..529: note = Variant of terminal deoxynucleotidyltransferase
MHHHHHHGGSGSHGIRTIDSDFGKKQQKKMDNHDSSAIYEIKFHEFVLFILEEKMGATRRTFLTDLARKKGFRVENELSDSVTHIVAENNSRSEVLAWLKEHKMEKTKQFELLDISWLIESMKVGKPVDTKGKYQLAESGEMSANPDPTEGRENELPPTMKTVSPYACQRRTTLNNHNQRFTDALEILAENYEFKRNDDTALEFRRAISVLKSLPFEVRSLKDTEGLPWIGDEVKGIMEEIIEVGESVEVQAVLNDEWYQSFHRFKSVFGVGVKTADKWYRMGLRTLEDVRSSKTLKLTPMQKAGLCYYEDLARGVTKAEADAISLLVQDAVATFDPDALVEIVGGFRRGKPQGHDVDLLISSPGAEKEQEDQLLQKVTNLWKKQGLLLYGRLEWTQWEDGKLPSGKADVGDAGAKCFLILKLYDHKVDKSKWEMPTGSNMGEAKPWKAIRVDLLRCPYGGFAFAMLQWTGSRMFRRDLRWYATDEKNMMLDNHALYDLTKKIFLKAKSEEEIFAHLGLEYLEPFERNA

SEQ ID NO: 2587 - DNA, 1587 bp, synthetic construct
  misc_feature 1..1587: note = Variant of terminal deoxynucleotidyltransferase
  source 1..1587: mol_type = other DNA
atgcaccatcatcatcatcatggcggtagcggcagccacggcattcgtaccatcgattcggacttcgggaagaaaggccagaaaaaaatggataaccacgatagttccgccatctatgaaatcaaatttcacgagtttgtgctgttcattctcgaagaaaaaatgggtgcgacgcgtcgtacttttctgacagatttagcccgcaagaaagggttccgcgtcgagaatgaactgtcagacagcgttacccacatcgtggcagaaaatctgtcacgctctgaagtattggcttggctgaaagaacacaagatggagaagaccaagcaattcgaactgctggatattagctggcttatcgaaagcatgaaagttggtaaaccggtggacaccaaggggaaataccagttggcggaatcgggtgagatgagtgcgaacccagatccgacagagggtcgtgaaaacgagctgcctcctactatgaagaccgtttctccgtatgcgtgtcaacgccgcaccaccctgaacaaccataatcaacgttttacggacgcactggaaattcttgcggaaaattacgagttcaaacgcaacgatgatactgcgctggaatttcgtcgtgctatctccgtgctgaaaagccttccgtttgaggtacgtagcctgaaagacacggaaggattgccctggatcggtgatgaagtcaaagggattatggaagaaatcatcgaggtcggggaatcgctggaagtgcaggccgtgctcaatgatgagtggtatcaaagcttccaccgctttaagagtgtctttggagtgggggtgaagacagcagacaagtggtaccgtatgggtctgcgcaccctcgaggatgttcgttccagcaagaccctgaagttgaccccgatgcagaaagcgggtctgtgctattatgaagatcttgctcgcggcgttacgaaagccgaagctgacgcgatttctctgctggttcaggatgcagtcgcaactttcgacccggatgcgctggtggagattgtcggtggatttcgtcgtgggaaacctcagggtcacgacgttgatctgcttatcagttctccgggagctgagaaagagcaagaagaccagctcctgcagaaagtgaccaatctgtggaagaaacaagggttgttgctgtacggtcgtctggaatggacccagtgggaagatgggaaactcccatccggtaaggctgacgtaggtgacgcgggtgcgaaatgctttctgatcctcaaactttatgatcataaagtggacaaaagcaaatgggaaatgccgacgggttcgaacatgggcgaggccaaaccgtggaaagcaattcgcgtagatctgctgcgttgcccctacggcggttttgcgtttgcgatgttgcagtggaccggaagccgcatgttccgccgtgatctgcgctggtacgccactgacgagaagaacatgatgctggacaatcatgcgctgtatgacctgaccaagaaaatctttctcaaagctaaatcggaagaggaaattttcgcacatctggggcttgaatacctggaaccgttcgaacgtaacgca

SEQ ID NO: 2588 - protein, 529 aa, synthetic construct
  REGION 1..529: note = Variant of terminal deoxynucleotidyltransferase
MHHHHHHGGSGSHGIRTIDSDFGKKGQKKMDNHDSSAIYEIKFHEFVLFILEEKMGATRRTFLTDLARKKGFRVENELSDSVTHIVAENLSRSEVLAWLKEHKMEKTKQFELLDISWLIESMKVGKPVDTKGKYQLAESGEMSANPDPTEGRENELPPTMKTVSPYACQRRTTLNNHNQRFTDALEILAENYEFKRNDDTALEFRRAISVLKSLPFEVRSLKDTEGLPWIGDEVKGIMEEIIEVGESLEVQAVLNDEWYQSFHRFKSVFGVGVKTADKWYRMGLRTLEDVRSSKTLKLTPMQKAGLCYYEDLARGVTKAEADAISLLVQDAVATFDPDALVEIVGGFRRGKPQGHDVDLLISSPGAEKEQEDQLLQKVTNLWKKQGLLLYGRLEWTQWEDGKLPSGKADVGDAGAKCFLILKLYDHKVDKSKWEMPTGSNMGEAKPWKAIRVDLLRCPYGGFAFAMLQWTGSRMFRRDLRWYATDEKNMMLDNHALYDLTKKIFLKAKSEEEIFAHLGLEYLEPFERNA

SEQ ID NO: 2589 - DNA, 1587 bp, synthetic construct
  misc_feature 1..1587: note = Variant of terminal deoxynucleotidyltransferase
  source 1..1587: mol_type = other DNA
atgcaccatcatcatcatcatggcggtagcggcagccacggcattcgtaccatcgattcggacttcgggaagaaacagcagaaaaaaatggataaccacgatagttccgccatctatgaaatcaaatttcacgagtttgtgctgttcattctcgaagaaaaaatgggtgcgacgcgtcgtacttttctgacagatttagcccgcaagaaagggttccgcgtcgagaatgaactgtcagacagcgttacccacatcgtggcagaaaataattcacgctctgaagtattggcttggctgaaagaacacaagatggagaagaccaagcaattcgaactgctggatattagctggcttatcgaaagcatgaaagttggtaaaccggtggacaccaaggggaaataccagttggcggaatcgggtgagatgagtgcgaacccagatccgacagagggtcgtgaaaacgagctgcctcctactatgaagaccgtttctccgtatgcgtgtcaacgccgcaccaccctgaacaaccataatcaacgttttacggacgcactggaaattcttgcggaaaattacgagttcaaacgcaacgatgatactgcgctggaatttcgtcgtgctatctccgtgctgaaaagccttccgtttgaggtacgtagcctgaaagacacggaaggattgccctggatcggtgatgaagtcaaagggattatggaagaaatcatcgaggtcggggaatcgcgtgaagtgcaggccgtgctcaatgatgagtggtatcaaagcttccaccgctttaagagtgtctttggagtgggggtgaagacagcagacaagtggtaccgtatgggtctgcgcaccctcgaggatgttcgttccagcaagaccctgaagttgaccccgatgcagaaagcgggtctgtgctattatgaagatcttgctcgcggcgttacgaaagccgaagctgacgcgatttctctgctggttcaggatgcagtcgcaactttcgacccggatgcgctggtggagattgtcggtggatttcgtcgtgggaaacctcagggtcacgacgttgatctgcttatcacatctccgggagctgagaaagagcaagaagaccagctcctgcagaaagtgaccaatctgtggaagaaacaagggttgttgctgtacggtcgtctggaatggacccagtgggaagatgggaaactcccatccggtaaggctgacgtaggtgacgcgggtgcgaaatgctttctgatcctcaaactttatgatcataaagtggacaaaagcaaatgggaaatgccgacgggttcgaacatgggcgaggccaaaccgtggaaagcaattcgcgtagatctgctgcgttgcccctacggcggttttgcgtttgcgatgttgcagtggaccggaagccgcatgttccgccgtgatctgcgctggtacgccactgacgagaagaacatgatgctggacaatcatgcgctgtatgacctgaccaagaaaatctttctcaaagctaaatcggaagaggaaattttcgcacatctggggcttgaatacctggaaccgttcgaacgtaacgca

SEQ ID NO: 2590 - protein, 529 aa, synthetic construct
  REGION 1..529: note = Variant of terminal deoxynucleotidyltransferase
MHHHHHHGGSGSHGIRTIDSDFGKKQQKKMDNHDSSAIYEIKFHEFVLFILEEKMGATRRTFLTDLARKKGFRVENELSDSVTHIVAENNSRSEVLAWLKEHKMEKTKQFELLDISWLIESMKVGKPVDTKGKYQLAESGEMSANPDPTEGRENELPPTMKTVSPYACQRRTTLNNHNQRFTDALEILAENYEFKRNDDTALEFRRAISVLKSLPFEVRSLKDTEGLPWIGDEVKGIMEEIIEVGESREVQAVLNDEWYQSFHRFKSVFGVGVKTADKWYRMGLRTLEDVRSSKTLKLTPMQKAGLCYYEDLARGVTKAEADAISLLVQDAVATFDPDALVEIVGGFRRGKPQGHDVDLLITSPGAEKEQEDQLLQKVTNLWKKQGLLLYGRLEWTQWEDGKLPSGKADVGDAGAKCFLILKLYDHKVDKSKWEMPTGSNMGEAKPWKAIRVDLLRCPYGGFAFAMLQWTGSRMFRRDLRWYATDEKNMMLDNHALYDLTKKIFLKAKSEEEIFAHLGLEYLEPFERNA

SEQ ID NO: 2591 - DNA, 1587 bp, synthetic construct
  misc_feature 1..1587: note = Variant of terminal deoxynucleotidyltransferase
  source 1..1587: mol_type = other DNA
atgcaccatcatcatcatcatggcggtagcggcagccacggcattcgtaccatcgattcggacttcgggaagaaacgccagaaaaaaatggataaccacgatagttccgccatctatgaaatcaaatttcacgagtttgtgctgttcattctcgaagaaaaaatgggtgcgacgcgtcgtacttttctgacagatttagcccgcaagaaagggttccgcgtcgagaatgaactgtcagacagcgttacccacatcgtggcagaaaataattcacgctctgaagtattggcttggctgaaagaacacaagatggagaagaccaagcaattcgaactgctggatattagctggcttatcgaaagcatgaaagttggtaaaccggtggacaccaaggggaaataccagttggcggaatcgggtgagatgagtgcgaacccagatccgacagagggtcgtgaaaacgagctgcctcctactatgaagaccgtttctccgtatgcgtgtcaacgccgcaccaccctgaacaaccataatcaacgttttacggacgcactggaaattcttgcggaaaattacgagttcaaacgcaacgatgatactgcgctggaatttcgtcgtgctatctccgtgctgaaaagccttccgtttgaggtacgtagcctgaaagacacggaaggattgccctggatcggtgatgaagtcaaagggattatggaagaaatcatcgaggtcgggaattcgcgtgaagtgcaggccgtgctcaatgatgagtggtatcaaagcttccaccgctttaagagtgtctttggagtgggggtgaagacagcagacaagtggtaccgtatgggtctgcgcaccctcgaggatgttcgttccagcaagaccctgaagttgaccccgatgcagaaggcgggtctgtgctattatgaagatcttgctcgcggcgttacgaaagccgaagctgacgcgatttctctgctggttcaggatgcagtcgcaactttcgacccggatgcgctggtggagattgtcggtggatttcgtcgtgggaaacctcagggtcacgacgttgatctgcttatcacttctccgggagctgagaaagagcaagaagaccagctcctgcagaaagtgaccaatctgtggaagaaacaagggttgttgctgtacggtcgtctggaatggacccagtgggaagatgggaaactcccatccggtaaggctgacgtaggtgacgcgggtgcgaaatgctttctgatcctcaaactttatgatcataaagtggacaaaagcaaatgggaaatgccgacgggttcgaacatgggcgaggccaaaccgtggaaagcaattcgcgtagatctggtgcgttgcccctacggcggttttgcgtttgcgatgttgcagtggaccggaagccgcatgttccgccgtgatctgcgctggtacgccactgacgagaagaacatgatgctggacaatcatgcgctgtatgacctgaccaagaaaatctttctcaaagctaaatcggaagaggaaattttcgcacatctggggcttgaatacctggaaccgttcgaacgtaacgca

SEQ ID NO: 2592 - protein, 529 aa, synthetic construct
  REGION 1..529: note = Variant of terminal deoxynucleotidyltransferase
MHHHHHHGGSGSHGIRTIDSDFGKKRQKKMDNHDSSAIYEIKFHEFVLFILEEKMGATRRTFLTDLARKKGFRVENELSDSVTHIVAENNSRSEVLAWLKEHKMEKTKQFELLDISWLIESMKVGKPVDTKGKYQLAESGEMSANPDPTEGRENELPPTMKTVSPYACQRRTTLNNHNQRFTDALEILAENYEFKRNDDTALEFRRAISVLKSLPFEVRSLKDTEGLPWIGDEVKGIMEEIIEVGNSREVQAVLNDEWYQSFHRFKSVFGVGVKTADKWYRMGLRTLEDVRSSKTLKLTPMQKAGLCYYEDLARGVTKAEADAISLLVQDAVATFDPDALVEIVGGFRRGKPQGHDVDLLITSPGAEKEQEDQLLQKVTNLWKKQGLLLYGRLEWTQWEDGKLPSGKADVGDAGAKCFLILKLYDHKVDKSKWEMPTGSNMGEAKPWKAIRVDLVRCPYGGFAFAMLQWTGSRMFRRDLRWYATDEKNMMLDNHALYDLTKKIFLKAKSEEEIFAHLGLEYLEPFERNA

SEQ ID NO: 2593 - DNA, 1587 bp, synthetic construct
  misc_feature 1..1587: note = Variant of terminal deoxynucleotidyltransferase
  source 1..1587: mol_type = other DNA
atgcaccatcatcatcatcatggcggtagcggcagccacggcattcgtaccatcgattcggacttcgggaagaaacgccagaaaaaaatggataaccacgatagttccgccatctatgaaatcaaatttcacgagtttgtgctgttcattctcgaagaaaaaatgggtgcgacgcgtcgtacttttctgacagatttagcccgcaagaaagggttccgcgtcgagaatgaactgtcagacagcgttacccacatcgtggcagaaaataattcacgctctgaagtattggcttggctgaaagaacacaagatggagaagaccaagcaattcgaactgctggatattagctggcttatcgaaagcatgaaagttggtaaaccggtggacaccaaggggaaataccagttggcggaatcgggtgagatgagtgcgaacccagatccgacagagggtcgtgaaaacgagctgcctcctactatgaagaccgtttctccgtatgcgtgtcaacgccgcaccaccctgaacaaccataatcaacgttttacggacgcactggaaattcttgcggaaaattacgagttcaaacgcaacgatgatactgcgctggaatttcgtcgtgctatctccgtgctgaaaagccttccgtttgaggtacgtagcctgaaagacacggaaggattgccctggatcggtgatgaagtcaaagggattatggaagaaatcatcgaggtcgggaattcgctggaagtgcaggccgtgctcaatgatgagtggtatcaaagcttccaccgctttgtcagtgtctttggagtgggggtgaagacagcagacaagtggtaccgtatgggtctgcgcaccctcgaggatgttcgttccagcaagaccctgaagttgaccccgatgcagaaggcgggtctgtgctattatgaagatcttgctcgcggcgttacgaaagccgaagctgacgcgatttctctgctggttcaggatgcagtcgcaactttcgacccggatgcgctggtggagattgtcggtggatttcgtcgtgggaaacctcagggtcacgacgttgatctgcttatcacttctccgggagctgagaaagagcaagaagaccagctcctgcagaaagtgaccaatctgtggaagaaacaagggttgttgctgtacggtcgtctggaatggacccagtgggaagatgggaaactcccatccggtaaggctgacgtaggtgacgcgggtgcgaaatgctttctgatcctcaaactttatgatcataaagtggacaaaagcaaatgggaaatgccgacgggttcgaacatgggcgaggccaaaccgtggaaagcaattcgcgtagatctgctgcgttgcccctacggcggttttgcgtttgcgatgttgcagtggaccggaagccgcatgttccgccgtgatctgcgctggtacgccactgacgagaagaacatgatgctggacaatcatgcgctgtatgacctgaccaagaaaatctttctcaaagctaaatcggaagaggaaattttcgcacatctggggcttgaatacctggaaccgttcgaacgtaacgca

SEQ ID NO: 2594 - protein, 529 aa, synthetic construct
  REGION 1..529: note = Variant of terminal deoxynucleotidyltransferase
MHHHHHHGGSGSHGIRTIDSDFGKKRQKKMDNHDSSAIYEIKFHEFVLFILEEKMGATRRTFLTDLARKKGFRVENELSDSVTHIVAENNSRSEVLAWLKEHKMEKTKQFELLDISWLIESMKVGKPVDTKGKYQLAESGEMSANPDPTEGRENELPPTMKTVSPYACQRRTTLNNHNQRFTDALEILAENYEFKRNDDTALEFRRAISVLKSLPFEVRSLKDTEGLPWIGDEVKGIMEEIIEVGNSLEVQAVLNDEWYQSFHRFVSVFGVGVKTADKWYRMGLRTLEDVRSSKTLKLTPMQKAGLCYYEDLARGVTKAEADAISLLVQDAVATFDPDALVEIVGGFRRGKPQGHDVDLLITSPGAEKEQEDQLLQKVTNLWKKQGLLLYGRLEWTQWEDGKLPSGKADVGDAGAKCFLILKLYDHKVDKSKWEMPTGSNMGEAKPWKAIRVDLLRCPYGGFAFAMLQWTGSRMFRRDLRWYATDEKNMMLDNHALYDLTKKIFLKAKSEEEIFAHLGLEYLEPFERNA

SEQ ID NO: 2595 - DNA, 1587 bp, synthetic construct
  misc_feature 1..1587: note = Variant of terminal deoxynucleotidyltransferase
  source 1..1587: mol_type = other DNA
atgcaccatcatcatcatcatggcggtagcggcagccacggcattcgtaccatcgattcggacttcgggaagaaacagcagaaaaaaatggataaccacgatagttccgccatctatgaaatcaaatttcacgagtttgtgctgttcattctcgaagaaaaaatgggtgcgacgcgtcgtacttttctgacagatttagcccgcaagaaagggttccgcgtcgagaatgaactgtcagacagcgttacccacatcgtggcagaaaatctgtcacgctctgaagtattggcttggctgaaagaacacaagatggagaagaccaagcaattcgaactgctggatattagctggcttatcgaaagcatgaaagttggtaaaccggtggacaccaaggggaaataccagttggcggaatcgggtgagatgagtgcgaacccagatccgacagagggtcgtgaaaacgagctgcctcctactatgaagaccgtttctccgtatgcgtgtcaacgccgcaccaccctgaacaaccataatcaacgttttacggacgcactggaaattcttgcggaaaattacgagttcaaacgcaacgatgatactgcgctggaatttcgtcgtgctatctccgtgctgaaaagccttccgtttgaggtacgtagcctgaaagacacggaaggattgccctggatcggtgatgaagtcaaagggattatggaagaaatcatcgaggtcgggaattcgctggaagtgcaggccgtgctcaatgatgagtggtatcaatcgttccaccgctttaagagtgtctttggagtgggggtgaagacagcagacaagtggtaccgtatgggtctgcgcaccctcgaggatgttcgttccagcaagaccctgaagttgaccccgatgcagaaggcgggtctgtgctattatgaagatcttgctcgcggcgttacgaaagccgaagctgacgcgatttctctgctggttcaggatgcagtcgcaactttcgacccggatgcgctggtggagattgtcggtggatttcgtcgtgggaaacctcagggtcacgacgttgatctgcttatcagttctccgggagctgagaaagagcaagaagaccagctcctgcagaaagtgaccaatctgtggaagaaacaagggttgttgctgtacggtcgtctggaatggacccagtgggaagatgggaaactcccatccggtaaggctgacgtaggtgacgcgggtgcgaaatgctttctgatcctcaaactttatgatcataaagtggacaaaagcaaatgggaaatgccgacgggttcgaacatgggcgaggccaaaccgtggaaagcaattcgcgtagatctggtgcgttgcccctacggcggttttgcgtttgcgatgttgcagtggaccggaagccgcatgttccgccgtgatctgcgctggtacgccactgacgagaagaacatgatgctggacaatcatgcgctgtatgacctgaccaagaaaatctttctcaaagctaaatcggaagaggaaattttcgcacatctggggcttgaatacctggaaccgttcgaacgtaacgca

SEQ ID NO: 2596 - protein, 529 aa, synthetic construct
  REGION 1..529: note = Variant of terminal deoxynucleotidyltransferase
MHHHHHHGGSGSHGIRTIDSDFGKKQQKKMDNHDSSAIYEIKFHEFVLFILEEKMGATRRTFLTDLARKKGFRVENELSDSVTHIVAENLSRSEVLAWLKEHKMEKTKQFELLDISWLIESMKVGKPVDTKGKYQLAESGEMSANPDPTEGRENELPPTMKTVSPYACQRRTTLNNHNQRFTDALEILAENYEFKRNDDTALEFRRAISVLKSLPFEVRSLKDTEGLPWIGDEVKGIMEEIIEVGNSLEVQAVLNDEWYQSFHRFKSVFGVGVKTADKWYRMGLRTLEDVRSSKTLKLTPMQKAGLCYYEDLARGVTKAEADAISLLVQDAVATFDPDALVEIVGGFRRGKPQGHDVDLLISSPGAEKEQEDQLLQKVTNLWKKQGLLLYGRLEWTQWEDGKLPSGKADVGDAGAKCFLILKLYDHKVDKSKWEMPTGSNMGEAKPWKAIRVDLVRCPYGGFAFAMLQWTGSRMFRRDLRWYATDEKNMMLDNHALYDLTKKIFLKAKSEEEIFAHLGLEYLEPFERNA

SEQ ID NO: 2597 - DNA, 1587 bp, synthetic construct
  misc_feature 1..1587: note = Variant of terminal deoxynucleotidyltransferase
  source 1..1587: mol_type = other DNA
atgcaccatcatcatcatcatggcggtagcggcagccacggcattcgtaccatcgattcggacttcgggaagaaaggccagaaaaaaatggataaccacgatagttccgccatctatgaaatcaaatttcacgagtttgtgctgttcattctcgaagaaaaaatgggtgcgacgcgtcgtacttttctgacagatttagcccgcaagaaagggttccgcgtcgagaatgaactgtcagacagcgttacccacatcgtggcagaaaataattcacgctctgaagtattggcttggctgaaagaacacaagatggagaagaccaagcaattcgaactgctggatattagctggcttatcgaaagcatgaaagttggtaaaccggtggacaccaaggggaaataccagttggcggaatcgggtgagatgagtgcgaacccagatccgacagagggtcgtgaaaacgagctgcctcctactatgaagaccgtttctccgtatgcgtgtcaacgccgcaccaccctgaacaaccataatcaacgttttacggacgcactggaaattcttgcggaaaattacgagttcaaacgcaacgatgatactgcgctggaatttcgtcgtgctatctccgtgctgaaaagccttccgtttgaggtacgtagcctgaaagacacggaaggattgccctggatcggtgatgaagtcaaagggattatggaagaaatcatcgaggtcgggaattcgctggaagtgcaggccgtgctcaatgatgagtggtatcaaagcttccaccgctttaagagtgtctttggagtgggggtgaagacagcagacaagtggtaccgtatgggtctgcgcaccctcgaggatgttcgttccagcaagaccctgaagttgaccccgatgcagaaagcgggtctgtgctattatgaagatcttgctcgcggcgttacgaaagccgaagctgacgcgatttctctgctggttcaggatgcagtcgcaactttcgacccggatgcgctggtggagattgtcggtggatttcgtcgtgggaaacctcagggtcacgacgttgatctgcttatcacttctccgggagctgagaaagagcaagaagaccagctcctgcagaaagtgaccaatctgtggaagaaacaagggttgttgctgtacggtcgtctggaatggacccagtgggaagatgggaaactcccatccggtaaggctgacgtaggtgacgcgggtgcgaaatgctttctgatcctcaaactttatgatcataaagtggacaaaagcaaatgggaaatgccgacgggttcgaacatgggcgaggccaaaccgtggaaagcaattcgcgtagatctggttcgttgcccctacggcggttttgcgtttgcgatgttgcagtggaccggaagccgcatgttccgccgtgatctgcgctggtacgccactgacgagaagaacatgatgctggacaatcatgcgctgtatgacctgaccaagaaaatctttctcaaagctaaatcggaagaggaaattttcgcacatctggggcttgaatacctggaaccgttcgaacgtaacgca

SEQ ID NO: 2598 - protein, 529 aa, synthetic construct
  REGION 1..529: note = Variant of terminal deoxynucleotidyltransferase
MHHHHHHGGSGSHGIRTIDSDFGKKGQKKMDNHDSSAIYEIKFHEFVLFILEEKMGATRRTFLTDLARKKGFRVENELSDSVTHIVAENNSRSEVLAWLKEHKMEKTKQFELLDISWLIESMKVGKPVDTKGKYQLAESGEMSANPDPTEGRENELPPTMKTVSPYACQRRTTLNNHNQRFTDALEILAENYEFKRNDDTALEFRRAISVLKSLPFEVRSLKDTEGLPWIGDEVKGIMEEIIEVGNSLEVQAVLNDEWYQSFHRFKSVFGVGVKTADKWYRMGLRTLEDVRSSKTLKLTPMQKAGLCYYEDLARGVTKAEADAISLLVQDAVATFDPDALVEIVGGFRRGKPQGHDVDLLITSPGAEKEQEDQLLQKVTNLWKKQGLLLYGRLEWTQWEDGKLPSGKADVGDAGAKCFLILKLYDHKVDKSKWEMPTGSNMGEAKPWKAIRVDLVRCPYGGFAFAMLQWTGSRMFRRDLRWYATDEKNMMLDNHALYDLTKKIFLKAKSEEEIFAHLGLEYLEPFERNA

SEQ ID NO: 2599 - DNA, 1587 bp, synthetic construct
  misc_feature 1..1587: note = Variant of terminal deoxynucleotidyltransferase
  source 1..1587: mol_type = other DNA
atgcaccatcatcatcatcatggcggtagcggcagccacggcattcgtaccatcgattcggacttcgggaagaaacagcagaaaaaaatggataaccacgatagttccgccatctatgaaatcaaatttcacgagtttgtgctgttcattctcgaagaaaaaatgggtgcgacgcgtcgtacttttctgacagatttagcccgcaagaaagggttccgcgtcgagaatgaactgtcagacagcgttacccacatcgtggcagaaaataattcacgctctgaagtattggcttggctgaaagaacacaagatggagaagaccaagcaattcgaactgctggatattagctggcttatcgaaagcatgaaagttggtaaaccggtggacaccaaggggaaataccagttggcggaatcgggtgagatgagtgcgaacccagatccgacagagggtcgtgaaaacgagctgcctcctactatgaagaccgtttctccgtatgcgtgtcaacgccgcaccaccctgaacaaccataatcaacgttttacggacgcactggaaattcttgcggaaaattacgagttcaaacgcaacgatgatactgcgctggaatttcgtcgtgctatctccgtgctgaaaagccttccgtttgaggtacgtagcctgaaagacacggaaggattgccctggatcggtgatgaagtcaaagggattatggaagaaatcatcgaggtcggggaatcggtggaagtgcaggccgtgctcaatgatgagtggtatcaaagcttccaccgctttgtcagtgtctttggagtgggggtgaagacagcagacaagtggtaccgtatgggtctgcgcaccctcgaggatgttcgttccagcaagaccctgaagttgaccccgatgcagaaggcgggtctgtgctattatgaagatcttgctcgcggcgttacgaaagccgaagctgacgcgatttctctgctggttcaggatgcagtcgcaactttcgacccggatgcgctggtggagattgtcggtggatttcgtcgtgggaaacctcagggtcacgacgttgatctgcttatcagttctccgggagctgagaaagagcaagaagaccagctcctgcagaaagtgaccaatctgtggaagaaacaagggttgttgctgtacggtcgtctggaatggacccagtgggaagatgggaaactcccatccggtaaggctgacgtaggtgacgcgggtgcgaaatgctttctgatcctcaaactttatgatcataaagtggacaaaagcaaatgggaaatgccgacgggttcgaacatgggcgaggccaaaccgtggaaagcaattcgcgtagatctggtgcgttgcccctacggcggttttgcgtttgcgatgttgcagtggaccggaagccgcatgttccgccgtgatctgcgctggtacgccactgacgagaagaacatgatgctggacaatcatgcgctgtatgacctgaccaagaaaatctttctcaaagctaaatcggaagaggaaattttcgcacatctggggcttgaatacctggaaccgttcgaacgtaacgca

SEQ ID NO: 2600 - protein, 529 aa, synthetic construct
  REGION 1..529: note = Variant of terminal deoxynucleotidyltransferase
MHHHHHHGGSGSHGIRTIDSDFGKKQQKKMDNHDSSAIYEIKFHEFVLFILEEKMGATRRTFLTDLARKKGFRVENELSDSVTHIVAENNSRSEVLAWLKEHKMEKTKQFELLDISWLIESMKVGKPVDTKGKYQLAESGEMSANPDPTEGRENELPPTMKTVSPYACQRRTTLNNHNQRFTDALEILAENYEFKRNDDTALEFRRAISVLKSLPFEVRSLKDTEGLPWIGDEVKGIMEEIIEVGESVEVQAVLNDEWYQSFHRFVSVFGVGVKTADKWYRMGLRTLEDVRSSKTLKLTPMQKAGLCYYEDLARGVTKAEADAISLLVQDAVATFDPDALVEIVGGFRRGKPQGHDVDLLISSPGAEKEQEDQLLQKVTNLWKKQGLLLYGRLEWTQWEDGKLPSGKADVGDAGAKCFLILKLYDHKVDKSKWEMPTGSNMGEAKPWKAIRVDLVRCPYGGFAFAMLQWTGSRMFRRDLRWYATDEKNMMLDNHALYDLTKKIFLKAKSEEEIFAHLGLEYLEPFERNA

SEQ ID NO: 2601 - DNA, 1587 bp, synthetic construct
  misc_feature 1..1587: note = Variant of terminal deoxynucleotidyltransferase
  source 1..1587: mol_type = other DNA
atgcaccatcatcatcatcatggcggtagcggcagccacggcattcgtaccatcgattcggacttcgggaagaaacgccagaaaaaaatggataaccacgatagttccgccatctatgaaatcaaatttcacgagtttgtgctgttcattctcgaagaaaaaatgggtgcgaatcgtcgtacttttctgacagatttagcccgcaagaaagggttccgcgtcgagaatgaactgtcagacagcgttacccacatcgtggcagaaaataattcacgctctgaagtattggcttggctgaaagaacacaagatggagaagaccaagcaattcgaactgctggatattagctggcttatcgaaagcatgaaagttggtaaaccggtggacaccaaggggaaataccagttggcggaatcgggtgagatgagtgcgaacccagatccgacagagggtcgtgaaaacgagctgcctcctactatgaagaccgtttctccgtatgcgtgtcaacgccgcaccaccctgaacaaccataatcaacgttttacggacgcactggaaattcttgcggaaaattacgagttcaaacgcctggatgatactgcgctggaatttcgtcgtgctatctccgtgctgaaaagccttccgtttgaggtacgtagcctgaaagacacggaaggattgccctggatcggtgatgaagtcaaagggattatggaagaaatcatcgaggtcggggaatcgctgcgtgtgcaggccgtgctcaatgatgagtggtatcaaagcttccaccgctttaagagtgtctttggagtgggggtgaagacagcagacaagtggtaccgtatgggtctgcgcaccctcgaggatgttcgttccagcaagaccctgaagttgaccccgatgcagaaagcgggtctgtgctattatgaagatcttgctcgcggcgttacgaaagccgaagctgacgcgatttctctgctggttcaggatgcagtcgcaactttcgacccggatgcgctggtggagattgtcggtggatttcgtcgtgggaaacctcagggtcacgacgttgatctgcttatcacatctccgggagctgagaaagagcaagaagaccagctcctgcagaaagtgaccaatctgtggaagaaacaagggttgttgctgtacggtcgtctggaatggacccagtgggaagatgggaaactcccatccggtaatgctgactcgggcgacgcgggtgcgaaatgctttctgatcctcaaactttatgatcataaagtggacaaaagcaaatgggaaatgccgacgggttcgaacatgggcgaggccaaaccgtggaaagcaattcgcgtagatctggttcgttgcccctacggcggttttgcgtttgcgatgttgcagtggaccggaagccgcatgttccgccgtgatctgcgctggtacgccactgacgagaagaacatgatgctggacaatcatgcgctgtatgacctgaccaagaaaatctttctcaaagctaaatcggaagaggaaattttcgcacatctggggcttgaatacctggaaccgttcgaacgtaacgca

SEQ ID NO: 2602 - protein, 529 aa, synthetic construct
  REGION 1..529: note = Variant of terminal deoxynucleotidyltransferase
MHHHHHHGGSGSHGIRTIDSDFGKKRQKKMDNHDSSAIYEIKFHEFVLFILEEKMGANRRTFLTDLARKKGFRVENELSDSVTHIVAENNSRSEVLAWLKEHKMEKTKQFELLDISWLIESMKVGKPVDTKGKYQLAESGEMSANPDPTEGRENELPPTMKTVSPYACQRRTTLNNHNQRFTDALEILAENYEFKRLDDTALEFRRAISVLKSLPFEVRSLKDTEGLPWIGDEVKGIMEEIIEVGESLRVQAVLNDEWYQSFHRFKSVFGVGVKTADKWYRMGLRTLEDVRSSKTLKLTPMQKAGLCYYEDLARGVTKAEADAISLLVQDAVATFDPDALVEIVGGFRRGKPQGHDVDLLITSPGAEKEQEDQLLQKVTNLWKKQGLLLYGRLEWTQWEDGKLPSGNADSGDAGAKCFLILKLYDHKVDKSKWEMPTGSNMGEAKPWKAIRVDLVRCPYGGFAFAMLQWTGSRMFRRDLRWYATDEKNMMLDNHALYDLTKKIFLKAKSEEEIFAHLGLEYLEPFERNA

SEQ ID NO: 2603 - DNA, 1587 bp, synthetic construct
  misc_feature 1..1587: note = Variant of terminal deoxynucleotidyltransferase
  source 1..1587: mol_type = other DNA
atgcaccatcatcatcatcatggcggtagcggcagccacggcattcgtaccatcgattcggacttcgggaagaaaggccagaaaaaaatggataaccacgatagttccgccatctatgaaatcaaatttcacgagtttgtgctgttcattctcgaagaaaaaatgggtgcgacgcgtcgtacttttctgacagatttagcccgcaagaaagggttccgcgtcgagaatgaactgtcagacagcgttacccacatcgtggcagaaaatctgtcacgctctgaagtattggcttggctgaaagaacacaagatggagaagaccaagcaattcgaactgctggatattagctggcttatcgaaagcatgaaagttggtaaaccggtggacaccaaggggaaataccagttggcggaatcgggtgagatgagtgcgaacccagatccgacagagggtcgtgaaaacgagctgcctcctactatgaagaccgtttctccgtatgcgtgtcaacgccgcaccaccctgaacaaccataatcaacgttttacggacgcactggaaattcttgcggaaaattacgagttcaaacgcaacgatgatactgcgctggaatttcgtcgtgctatctccgtgctgaaaagccttccgtttgaggtacgtagcctgaaagacacggaaggattgccctggatcggtgatgaagtcaaagggattatggaagaaatcatcgaggtcgggaattcgctggaagtgcaggccgtgctcaatgatgagtggtatcaaagcttccaccgctttaagagtgtctttggagtgggggtgaagacagcagacaagtggtaccgtatgggtctgcgcaccctcgaggatgttcgttccagcaagaccctgaagttgaccccgatgcagaaagcgggtctgtgctattatgaagatcttgctcgcggcgttacgaaagccgaagctgacgcgatttctctgctggttcaggatgcagtcgcaactttcgacccggatgcgctggtggagattgtcggtggatttcgtcgtgggaaacctcagggtcacgacgttgatctgcttatcacatctccgggagctgagaaagagcaagaagaccagctcctgcagaaagtgaccaatctgtggaagaaacaagggttgttgctgtacggtcgtctggaatggacccagtgggaagatgggaaactcccatccggtaaggctgacgtaggtgacgcgggtgcgaaatgctttctgatcctcaaactttatgatcataaagtggacaaaagcaaatgggaaatgccgacgggttcgaacatgggcgaggccaaaccgtggaaagcaattcgcgtagatctggttcgttgcccctacggcggttttgcgtttgcgatgttgcagtggaccggaagccgcatgttccgccgtgatctgcgctggtacgccactgacgagaagaacatgatgctggacaatcatgcgctgtatgacctgaccaagaaaatctttctcaaagctaaatcggaagaggaaattttcgcacatctggggcttgaatacctggaaccgttcgaacgtaacgca

SEQ ID NO: 2604 - protein, 529 aa, synthetic construct
  REGION 1..529: note = Variant of terminal deoxynucleotidyltransferase
MHHHHHHGGSGSHGIRTIDSDFGKKGQKKMDNHDSSAIYEIKFHEFVLFILEEKMGATRRTFLTDLARKKGFRVENELSDSVTHIVAENLSRSEVLAWLKEHKMEKTKQFELLDISWLIESMKVGKPVDTKGKYQLAESGEMSANPDPTEGRENELPPTMKTVSPYACQRRTTLNNHNQRFTDALEILAENYEFKRNDDTALEFRRAISVLKSLPFEVRSLKDTEGLPWIGDEVKGIMEEIIEVGNSLEVQAVLNDEWYQSFHRFKSVFGVGVKTADKWYRMGLRTLEDVRSSKTLKLTPMQKAGLCYYEDLARGVTKAEADAISLLVQDAVATFDPDALVEIVGGFRRGKPQGHDVDLLITSPGAEKEQEDQLLQKVTNLWKKQGLLLYGRLEWTQWEDGKLPSGKADVGDAGAKCFLILKLYDHKVDKSKWEMPTGSNMGEAKPWKAIRVDLVRCPYGGFAFAMLQWTGSRMFRRDLRWYATDEKNMMLDNHALYDLTKKIFLKAKSEEEIFAHLGLEYLEPFERNA

SEQ ID NO: 2605 - DNA, 1587 bp, synthetic construct
  misc_feature 1..1587: note = Variant of terminal deoxynucleotidyltransferase
  source 1..1587: mol_type = other DNA
atgcaccatcatcatcatcatggcggtagcggcagccacggcattcgtaccatcgattcggacttcgggaagaaacagcagaaaaaaatggataaccacgatagttccgccatctatgaaatcaaatttcacgagtttgtgctgttcattctcgaagaaaaaatgggtgcgacgcgtcgtacttttctgacagatttagcccgcaagaaagggttccgcgtcgagaatgaactgtcagacagcgttacccacatcgtggcagaaaataattcacgctctgaagtattggcttggctgaaagaacacaagatggagaagaccaagcaattcgaactgctggatattagctggcttatcgaaagcatgaaagttggtaaaccggtggacaccaaggggaaataccagttggcggaatcgggtgagatgagtgcgaacccagatccgacagagggtcgtgaaaacgagctgcctcctactatgaagaccgtttctccgtatgcgtgtcaacgccgcaccaccctgaacaaccataatcaacgttttacggacgcactggaaattcttgcggaaaattacgagttcaaacgcaacgatgatactgcgctggaatttcgtcgtgctatctccgtgctgaaaagccttccgtttgaggtacgtagcctgaaagacacggaaggattgccctggatcggtgatgaagtcaaagggattatggaagaaatcatcgaggtcggggaatcgctggaagtgcaggccgtgctcaatgatgagtggtatcaaagcttccaccgctttaagagtgtctttggagtgggggtgaagacagcagacaagtggtaccgtatgggtctgcgcaccctcgaggatgttcgttccagcaagaccctgaagttgaccccgatgcagaaggctggtctgtgctattatgaagatcttgctcgcggcgttacgaaagccgaagctgacgcgatttctctgctggttcaggatgcagtcgcaactttcgacccggatgcgctggtggagattgtcggtggatttcgtcgtgggaaacctcagggtcacgacgttgatctgcttatcagttctccgggagctgagaaagagcaagaagaccagctcctgcagaaagtgaccaatctgtggaagaaacaagggttgttgctgtacggtcgtctggaatggacccagtgggaagatgggaaactcccatccggtaaggctgacgtaggtgacgcgggtgcgaaatgctttctgatcctcaaactttatgatcataaagtggacaaaagcaaatgggaaatgccgacgggttcgaacatgggcgaggccaaaccgtggaaagcaattcgcgtagatctgctgcgttgcccctacggcggttttgcgtttgcgatgttgcagtggaccggaagccgcatgttccgccgtgatctgcgctggtacgccactgacgagaagaacatgatgctggacaatcatgcgctgtatgacctgaccaagaaaatctttctcaaagctaaatcggaagaggaaattttcgcacatctggggcttgaatacctggaaccgttcgaacgtaacgca

SEQ ID NO: 2606 - protein, 529 aa, synthetic construct
  REGION 1..529: note = Variant of terminal deoxynucleotidyltransferase
MHHHHHHGGSGSHGIRTIDSDFGKKQQKKMDNHDSSAIYEIKFHEFVLFILEEKMGATRRTFLTDLARKKGFRVENELSDSVTHIVAENNSRSEVLAWLKEHKMEKTKQFELLDISWLIESMKVGKPVDTKGKYQLAESGEMSANPDPTEGRENELPPTMKTVSPYACQRRTTLNNHNQRFTDALEILAENYEFKRNDDTALEFRRAISVLKSLPFEVRSLKDTEGLPWIGDEVKGIMEEIIEVGESLEVQAVLNDEWYQSFHRFKSVFGVGVKTADKWYRMGLRTLEDVRSSKTLKLTPMQKAGLCYYEDLARGVTKAEADAISLLVQDAVATFDPDALVEIVGGFRRGKPQGHDVDLLISSPGAEKEQEDQLLQKVTNLWKKQGLLLYGRLEWTQWEDGKLPSGKADVGDAGAKCFLILKLYDHKVDKSKWEMPTGSNMGEAKPWKAIRVDLLRCPYGGFAFAMLQWTGSRMFRRDLRWYATDEKNMMLDNHALYDLTKKIFLKAKSEEEIFAHLGLEYLEPFERNA

SEQ ID NO: 2607 - DNA, 1587 bp, synthetic construct
  misc_feature 1..1587: note = Variant of terminal deoxynucleotidyltransferase
  source 1..1587: mol_type = other DNA
atgcaccatcatcatcatcatggcggtagcggcagccacggcattcgtaccatcgattcggacttcgggaagaaacgccagaaaaaaatggataaccacgatagttccgccatctatgaaatcaaatttcacgagtttgtgctgttcattctcgaagaaaaaatgggtgcgacgcgtcgtacttttctgacagatttagcccgcaagaaagggttccgcgtcgagaatgaactgtcagacagcgttacccacatcgtggcagaaaataattcacgctctgaagtattggcttggctgaaagaacacaagatggagaagaccaagcaattcgaactgctggatattagctggcttatcgaaagcatgaaagttggtaaaccggtggacaccaaggggaaataccagttggcggaatcgggtgagatgagtgcgaacccagatccgacagagggtcgtgaaaacgagctgcctcctactatgaagaccgtttctccgtatgcgtgtcaacgccgcaccaccctgaacaaccataatcaacgttttacggacgcactggaaattcttgcggaaaattacgagttcaaacgcaacgatgatactgcgctggaatttcgtcgtgctatctccgtgctgaaaagccttccgtttgaggtacgtagcctgaaagacacggaaggattgccctggatcggtgatgaagtcaaagggattatggaagaaatcatcgaggtcggggaatcggtggaagtgcaggccgtgctcaatgatgagtggtatcaaagcttccaccgctttaagagtgtctttggagtgggggtgaagacagcagacaagtggtaccgtatgggtctgcgcaccctcgaggatgttcgttccagcaagaccctgaagttgaccccgatgcagaaagcgggtctgtgctattatgaagatcttgctcgcggcgttacgaaagccgaagctgacgcgatttctctgctggttcaggatgcagtcgcaactttcgacccggatgcgctggtggagattgtcggtggatttcgtcgtgggaaacctcagggtcacgacgttgatctgcttatcagttctccgggagctgagaaagagcaagaagaccagctcctgcagaaagtgaccaatctgtggaagaaacaagggttgttgctgtacggtcgtctggaatggacccagtgggaagatgggaaactcccatccggtaaggctgacgtaggtgacgcgggtgcgaaatgctttctgatcctcaaactttatgatcataaagtggacaaaagcaaatgggaaatgccgacgggttcgaacatgggcgaggccaaaccgtggaaagcaattcgcgtagatctgctgcgttgcccctacggcggttttgcgtttgcgatgttgcagtggaccggaagccgcatgttccgccgtgatctgcgctggtacgccactgacgagaagaacatgatgctggacaatcatgcgctgtatgacctgaccaagaaaatctttctcaaagctaaatcggaagaggaaattttcgcacatctggggcttgaatacctggaaccgttcgaacgtaacgca

SEQ ID NO: 2608 - protein, 529 aa, synthetic construct
  REGION 1..529: note = Variant of terminal deoxynucleotidyltransferase
MHHHHHHGGSGSHGIRTIDSDFGKKRQKKMDNHDSSAIYEIKFHEFVLFILEEKMGATRRTFLTDLARKKGFRVENELSDSVTHIVAENNSRSEVLAWLKEHKMEKTKQFELLDISWLIESMKVGKPVDTKGKYQLAESGEMSANPDPTEGRENELPPTMKTVSPYACQRRTTLNNHNQRFTDALEILAENYEFKRNDDTALEFRRAISVLKSLPFEVRSLKDTEGLPWIGDEVKGIMEEIIEVGESVEVQAVLNDEWYQSFHRFKSVFGVGVKTADKWYRMGLRTLEDVRSSKTLKLTPMQKAGLCYYEDLARGVTKAEADAISLLVQDAVATFDPDALVEIVGGFRRGKPQGHDVDLLISSPGAEKEQEDQLLQKVTNLWKKQGLLLYGRLEWTQWEDGKLPSGKADVGDAGAKCFLILKLYDHKVDKSKWEMPTGSNMGEAKPWKAIRVDLLRCPYGGFAFAMLQWTGSRMFRRDLRWYATDEKNMMLDNHALYDLTKKIFLKAKSEEEIFAHLGLEYLEPFERNA

SEQ ID NO: 2609 - DNA, 1587 bp, synthetic construct
  misc_feature 1..1587: note = Variant of terminal deoxynucleotidyltransferase
  source 1..1587: mol_type = other DNA
atgcaccatcatcatcatcatggcggtagcggcagccacggcattcgtaccatcgattcggacttcgggaagaaacgccagaaaaaaatggataaccacgatagttccgccatctatgaaatcaaatttcacgagtttgtgctgttcattctcgaagaaaaaatgggtgcgacgcgtcgtacttttctgacagatttagcccgcaagaaagggttccgcgtcgagaatgaactgtcagacagcgttacccacatcgtggcagaaaatctgtcacgctctgaagtattggcttggctgaaagaacacaagatggagaagaccaagcaattcgaactgctggatattagctggcttatcgaaagcatgaaagttggtaaaccggtggacaccaaggggaaataccagttggcggaatcgggtgagatgagtgcgaacccagatccgacagagggtcgtgaaaacgagctgcctcctactatgaagaccgtttctccgtatgcgtgtcaacgccgcaccaccctgaacaaccataatcaacgttttacggacgcactggaaattcttgcggaaaattacgagttcaaacgcaacgatgatactgcgctggaatttcgtcgtgctatctccgtgctgaaaagccttccgtttgaggtacgtagcctgaaagacacggaaggattgccctggatcggtgatgaagtcaaagggattatggaagaaatcatcgaggtcgggaattcgcgtgaagtgcaggccgtgctcaatgatgagtggtatcaatcgttccaccgctttaagagtgtctttggagtgggggtgaagacagcagacaagtggtaccgtatgggtctgcgcaccctcgaggatgttcgttccagcaagaccctgaagttgaccccgatgcagaaagcgggtctgtgctattatgaagatcttgctcgcggcgttacgaaagccgaagctgacgcgatttctctgctggttcaggatgcagtcgcaactttcgacccggatgcgctggtggagattgtcggtggatttcgtcgtgggaaacctcagggtcacgacgttgatctgcttatcacatctccgggagctgagaaagagcaagaagaccagctcctgcagaaagtgaccaatctgtggaagaaacaagggttgttgctgtacggtcgtctggaatggacccagtgggaagatgggaaactcccatccggtaaggctgacgtaggtgacgcgggtgcgaaatgctttctgatcctcaaactttatgatcataaagtggacaaaagcaaatgggaaatgccgacgggttcgaacatgggcgaggccaaaccgtggaaagcaattcgcgtagatctggtgcgttgcccctacggcggttttgcgtttgcgatgttgcagtggaccggaagccgcatgttccgccgtgatctgcgctggtacgccactgacgagaagaacatgatgctggacaatcatgcgctgtatgacctgaccaagaaaatctttctcaaagctaaatcggaagaggaaattttcgcacatctggggcttgaatacctggaaccgttcgaacgtaacgca

SEQ ID NO: 2610 - protein, 529 aa, synthetic construct
  REGION 1..529: note = Variant of terminal deoxynucleotidyltransferase
MHHHHHHGGSGSHGIRTIDSDFGKKRQKKMDNHDSSAIYEIKFHEFVLFILEEKMGATRRTFLTDLARKKGFRVENELSDSVTHIVAENLSRSEVLAWLKEHKMEKTKQFELLDISWLIESMKVGKPVDTKGKYQLAESGEMSANPDPTEGRENELPPTMKTVSPYACQRRTTLNNHNQRFTDALEILAENYEFKRNDDTALEFRRAISVLKSLPFEVRSLKDTEGLPWIGDEVKGIMEEIIEVGNSREVQAVLNDEWYQSFHRFKSVFGVGVKTADKWYRMGLRTLEDVRSSKTLKLTPMQKAGLCYYEDLARGVTKAEADAISLLVQDAVATFDPDALVEIVGGFRRGKPQGHDVDLLITSPGAEKEQEDQLLQKVTNLWKKQGLLLYGRLEWTQWEDGKLPSGKADVGDAGAKCFLILKLYDHKVDKSKWEMPTGSNMGEAKPWKAIRVDLVRCPYGGFAFAMLQWTGSRMFRRDLRWYATDEKNMMLDNHALYDLTKKIFLKAKSEEEIFAHLGLEYLEPFERNA

SEQ ID NO: 2611 - DNA, 1587 bp, synthetic construct
  misc_feature 1..1587: note = Variant of terminal deoxynucleotidyltransferase
  source 1..1587: mol_type = other DNA
atgcaccatcatcatcatcatggcggtagcggcagccacggcattcgtaccatcgattcggacttcgggaagaaaggccagaaaaaaatggataaccacgatagttccgccatctatgaaatcaaatttcacgagtttgtgctgttcattctcgaagaaaaaatgggtgcgacgcgtcgtacttttctgacagatttagcccgcaagaaagggttccgcgtcgagaatgaactgtcagacagcgttacccacatcgtggcagaaaatctgtcacgctctaaagtattggcttggctgaaagaacacaagatggagaagaccaagcaattcgaactgctggatattagctggcttatcgaaagcatgaaagttggtaaaccggtggacaccaaggggaaataccagttggcggaatcgggtgagatgagtgcgaacccagatccgacagagggtcgtgaaaacgagctgcctcctactatgaagaccgtttctccgtatgcgtgtcaacgccgcaccaccctgaacaaccataatcaacgttttacggacgcactggaaattcttgcggaaaattacgagttcaaacgcaacgatgatactgcgctggaatttcgtcgtgctatctccgtgctgaaaagccttccgtttgaggtacgtagcctgaaagacacggaaggattgccctggatcggtgatgaagtcaaagggattatggaagaaatcatcgaggtcggggaatcgcgtgaagtgcaggccgtgctcaatgatgagtggtatcaagcgttccaccgctttgtcagtgtctttggagtgggggtgaagacagcagacaagtggtaccgtatgggtctgcgcaccctcgaggatgttcgttccagcaagaccctgaagttgaccccgatgcagaaggcgggtctgtgctattatgaagatcttgctcgcggcgttacgaaagccgaagctgacgcgatttctctgctggttcaggatgcagtcgcaactttcgacccggatgcgctggtggagattgtcggtggatttcgtcgtgggaaacctcagggtcacgacgttgatctgcttatcagttctccgggagctgagaaagagcaagaagaccagctcctgcagaaagtgaccaatctgtggaagaaacaagggttgttgctgtacggtcgtctggaatggacccagtgggaagatgggaaactcccatccggtaaggctgacgtaggtgacgcgggtgcgaaatgctttctgatcctcaaactttatgatcataaagtggacaaaagcaaatgggaaatgccgacgggttcgaacatgggcgaggccaaaccgtggaaagcaattcgcgtagatctgctgcgttgcccctacggcggttttgcgtttgcgatgttgcagtggaccggaagccgcatgttccgccgtgatctgcgctggtacgccactgacgagaagaacatgatgctggacaatcatgcgctgtatgacctgaccaagaaaatctttctcaaagctaaatcggaagaggaaattttcgcacatctggggcttgaatacctggaaccgttcgaacgtaacgca

SEQ ID NO: 2612 - protein, 529 aa, synthetic construct
  REGION 1..529: note = Variant of terminal deoxynucleotidyltransferase
MHHHHHHGGSGSHGIRTIDSDFGKKGQKKMDNHDSSAIYEIKFHEFVLFILEEKMGATRRTFLTDLARKKGFRVENELSDSVTHIVAENLSRSKVLAWLKEHKMEKTKQFELLDISWLIESMKVGKPVDTKGKYQLAESGEMSANPDPTEGRENELPPTMKTVSPYACQRRTTLNNHNQRFTDALEILAENYEFKRNDDTALEFRRAISVLKSLPFEVRSLKDTEGLPWIGDEVKGIMEEIIEVGESREVQAVLNDEWYQAFHRFVSVFGVGVKTADKWYRMGLRTLEDVRSSKTLKLTPMQKAGLCYYEDLARGVTKAEADAISLLVQDAVATFDPDALVEIVGGFRRGKPQGHDVDLLISSPGAEKEQEDQLLQKVTNLWKKQGLLLYGRLEWTQWEDGKLPSGKADVGDAGAKCFLILKLYDHKVDKSKWEMPTGSNMGEAKPWKAIRVDLLRCPYGGFAFAMLQWTGSRMFRRDLRWYATDEKNMMLDNHALYDLTKKIFLKAKSEEEIFAHLGLEYLEPFERNA

SEQ ID NO: 2613 - DNA, 1587 bp, synthetic construct
  misc_feature 1..1587: note = Variant of terminal deoxynucleotidyltransferase
  source 1..1587: mol_type = other DNA
atgcaccatcatcatcatcatggcggtagcggcagccacggcattcgtaccatcgattcggacttcgggaagaaaggccagaaaaaaatggataaccacgatagttccgccatctatgaaatcaaatttcacgagtttgtgctgttcattctcgaagaaaaaatgggtgcgacgcgtcgtacttttctgacagatttagcccgcaagaaagggttccgcgtcgagaatgaactgtcagacagcgttacccacatcgtggcagaaaataattcacgctctgaagtattggcttggctgaaagaacacaagatggagaagaccaagcaattcgaactgctggatattagctggcttatcgaaagcatgaaagttggtaaaccggtggacaccaaggggaaataccagttggcggaatcgggtgagatgagtgcgaacccagatccgacagagggtcgtgaaaacgagctgcctcctactatgaagaccgtttctccgtatgcgtgtcaacgccgcaccaccctgaacaaccataatcaacgttttacggacgcactggaaattcttgcggaaaattacgagttcaaacgcaacgatgatactgcgctggaatttcgtcgtgctatctccgtgctgaaaagccttccgtttgaggtacgtagcctgaaagacacggaaggattgccctggatcggtgatgaagtcaaagggattatggaagaaatcatcgaggtcggggaatcgcgtgaagtgcaggccgtgctcaatgatgagtggtatcaaagcttccaccgctttaagagtgtctttggagtgggggtgaagacagcagacaagtggtaccgtatgggtctgcgcaccctcgaggatgttcgttccagcaagaccctgaagttgaccccgatgcagaaagcgggtctgtgctattatgaagatcttgctcgcggcgttacgaaagccgaagctgacgcgatttctctgctggttcaggatgcagtcgcaactttcgacccggatgcgctggtggagattgtcggtggatttcgtcgtgggaaacctcagggtcacgacgttgatctgcttatcacatctccgggagctgagaaagagcaagaagaccagctcctgcagaaagtgaccaatctgtggaagaaacaagggttgttgctgtacggtcgtctggaatggacccagtgggaagatgggaaactcccatccggtaaggctgacgtaggtgacgcgggtgcgaaatgctttctgatcctcaaactttatgatcataaagtggacaaaagcaaatgggaaatgccgacgggttcgaacatgggcgaggccaaaccgtggaaagcaattcgcgtagatctggtgcgttgcccctacggcggttttgcgtttgcgatgttgcagtggaccggaagccgcatgttccgccgtgatctgcgctggtacgccactgacgagaagaacatgatgctggacaatcatgcgctgtatgacctgaccaagaaaatctttctcaaagctaaatcggaagaggaaattttcgcacatctggggcttgaatacctggaaccgttcgaacgtaacgca

SEQ ID NO: 2614 - protein, 529 aa, synthetic construct
  REGION 1..529: note = Variant of terminal deoxynucleotidyltransferase
MHHHHHHGGSGSHGIRTIDSDFGKKGQKKMDNHDSSAIYEIKFHEFVLFILEEKMGATRRTFLTDLARKKGFRVENELSDSVTHIVAENNSRSEVLAWLKEHKMEKTKQFELLDISWLIESMKVGKPVDTKGKYQLAESGEMSANPDPTEGRENELPPTMKTVSPYACQRRTTLNNHNQRFTDALEILAENYEFKRNDDTALEFRRAISVLKSLPFEVRSLKDTEGLPWIGDEVKGIMEEIIEVGESREVQAVLNDEWYQSFHRFKSVFGVGVKTADKWYRMGLRTLEDVRSSKTLKLTPMQKAGLCYYEDLARGVTKAEADAISLLVQDAVATFDPDALVEIVGGFRRGKPQGHDVDLLITSPGAEKEQEDQLLQKVTNLWKKQGLLLYGRLEWTQWEDGKLPSGKADVGDAGAKCFLILKLYDHKVDKSKWEMPTGSNMGEAKPWKAIRVDLVRCPYGGFAFAMLQWTGSRMFRRDLRWYATDEKNMMLDNHALYDLTKKIFLKAKSEEEIFAHLGLEYLEPFERNA

SEQ ID NO: 2615 - DNA, 1587 bp, synthetic construct
  misc_feature 1..1587: note = Variant of terminal deoxynucleotidyltransferase
  source 1..1587: mol_type = other DNA
atgcaccatcatcatcatcatggcggtagcggcagccacggcattcgtaccatcgattcggacttcgggaagaaacgccagaaaaaaatggataaccacgatagttccgccatctatgaaatcaaatttcacgagtttgtgctgttcattctcgaagaaaaaatgggtgcgacgcgtcgtacttttctgacagatttagcccgcaagaaagggttccgcgtcgagaatgaactgtcagacagcgttacccacatcgtggcagaaaataattcacgctctgaagtattggcttggctgaaagaacacaagatggagaagaccaagcaattcgaactgctggatattagctggcttatcgaaagcatgaaagttggtaaaccggtggacaccaaggggaaataccagttggcggaatcgggtgagatgagtgcgaacccagatccgacagagggtcgtgaaaacgagctgcctcctactatgaagaccgtttctccgtatgcgtgtcaacgccgcaccaccctgaacaaccataatcaacgttttacggacgcactggaaattcttgcggaaaattacgagttcaaacgcaacgatgatactgcgctggaatttcgtcgtgctatctccgtgctgaaaagccttccgtttgaggtacgtagcctgaaagacacggaaggattgccctggatcggtgatgaagtcaaagggattatggaagaaatcatcgaggtcggggaatcgctggaagtgcaggccgtgctcaatgatgagtggtatcaaagcttccaccgctttaagagtgtctttggagtgggggtgaagacagcagacaagtggtaccgtatgggtctgcgcaccctcgaggatgttcgttccagcaagaccctgaagttgaccccgatgcagaaagcgggtctgtgctattatgaagatcttgctcgcggcgttacgaaagccgaagctgacgcgatttctctgctggttcaggatgcagtcgcaactttcgacccggatgcgctggtggagattgtcggtggatttcgtcgtgggaaacctcagggtcacgacgttgatctgcttatcagttctccgggagctgagaaagagcaagaagaccagctcctgcagaaagtgaccaatctgtggaagaaacaagggttgttgctgtacggtcgtctggaatggacccagtgggaagatgggaaactcccatccggtaaggctgacgtaggtgacgcgggtgcgaaatgctttctgatcctcaaactttatgatcataaagtggacaaaagcaaatgggaaatgccgacgggttcgaacatgggcgaggccaaaccgtggaaagcaattcgcgtagatctggtgcgttgcccctacggcggttttgcgtttgcgatgttgcagtggaccggaagccgcatgttccgccgtgatctgcgctggtacgccactgacgagaagaacatgatgctggacaatcatgcgctgtatgacctgaccaagaaaatctttctcaaagctaaatcggaagaggaaattttcgcacatctggggcttgaatacctggaaccgttcgaacgtaacgca

SEQ ID NO: 2616 - protein, 529 aa, synthetic construct
  REGION 1..529: note = Variant of terminal deoxynucleotidyltransferase
MHHHHHHGGSGSHGIRTIDSDFGKKRQKKMDNHDSSAIYEIKFHEFVLFILEEKMGATRRTFLTDLARKKGFRVENELSDSVTHIVAENNSRSEVLAWLKEHKMEKTKQFELLDISWLIESMKVGKPVDTKGKYQLAESGEMSANPDPTEGRENELPPTMKTVSPYACQRRTTLNNHNQRFTDALEILAENYEFKRNDDTALEFRRAISVLKSLPFEVRSLKDTEGLPWIGDEVKGIMEEIIEVGESLEVQAVLNDEWYQSFHRFKSVFGVGVKTADKWYRMGLRTLEDVRSSKTLKLTPMQKAGLCYYEDLARGVTKAEADAISLLVQDAVATFDPDALVEIVGGFRRGKPQGHDVDLLISSPGAEKEQEDQLLQKVTNLWKKQGLLLYGRLEWTQWEDGKLPSGKADVGDAGAKCFLILKLYDHKVDKSKWEMPTGSNMGEAKPWKAIRVDLVRCPYGGFAFAMLQWTGSRMFRRDLRWYATDEKNMMLDNHALYDLTKKIFLKAKSEEEIFAHLGLEYLEPFERNA

SEQ ID NO: 2617 - DNA, 1587 bp, synthetic construct
  misc_feature 1..1587: note = Variant of terminal deoxynucleotidyltransferase
  source 1..1587: mol_type = other DNA
atgcaccatcatcatcatcatggcggtagcggcagccacggcattcgtaccatcgattcggacttcgggaagaaaggccagaaaaaaatggataaccacgatagttccgccatctatgaaatcaaatttcacgagtttgtgctgttcattctcgaagaaaaaatgggtgcgacgcgtcgtacttttctgacagatttagcccgcaagaaagggttccgcgtcgagaatgaactgtcagacagcgttacccacatcgtggcagaaaatctgtcacgctctgaagtattggcttggctgaaagaacacaagatggagaagaccaagcaattcgaactgctggatattagctggcttatcgaaagcatgaaagttggtaaaccggtggacaccaaggggaaataccagttggcggaatcgggtgagatgagtgcgaacccagatccgacagagggtcgtgaaaacgagctgcctcctactatgaagaccgtttctccgtatgcgtgtcaacgccgcaccaccctgaacaaccataatcaacgttttacggacgcactggaaattcttgcggaaaattacgagttcaaacgcaacgatgatactgcgctggaatttcgtcgtgctatctccgtgctgaaaagccttccgtttgaggtacgtagcctgaaagacacggaaggattgccctggatcggtgatgaagtcaaagggattatggaagaaatcatcgaggtcgggaattcgcgtgaagtgcaggccgtgctcaatgatgagtggtatcaaagcttccaccgctttaagagtgtctttggagtgggggtgaagacagcagacaagtggtaccgtatgggtctgcgcaccctcgaggatgttcgttccagcaagaccctgaagttgaccccgatgcagaaagcgggtctgtgctattatgaagatcttgctcgcggcgttacgaaagccgaagctgacgcgatttctctgctggttcaggatgcagtcgcaactttcgacccggatgcgctggtggagattgtcggtggatttcgtcgtgggaaacctcagggtcacgacgttgatctgcttatcacttctccgggagctgagaaagagcaagaagaccagctcctgcagaaagtgaccaatctgtggaagaaacaagggttgttgctgtacggtcgtctggaatggacccagtgggaagatgggaaactcccatccggtaaggctgacgtaggtgacgcgggtgcgaaatgctttctgatcctcaaactttatgatcataaagtggacaaaagcaaatgggaaatgccgacgggttcgaacatgggcgaggccaaaccgtggaaagcaattcgcgtagatctggtgcgttgcccctacggcggttttgcgtttgcgatgttgcagtggaccggaagccgcatgttccgccgtgatctgcgctggtacgccactgacgagaagaacatgatgctggacaatcatgcgctgtatgacctgaccaagaaaatctttctcaaagctaaatcggaagaggaaattttcgcacatctggggcttgaatacctggaaccgttcgaacgtaacgca

SEQ ID NO: 2618 - protein, 529 aa, synthetic construct
  REGION 1..529: note = Variant of terminal deoxynucleotidyltransferase
MHHHHHHGGSGSHGIRTIDSDFGKKGQKKMDNHDSSAIYEIKFHEFVLFILEEKMGATRRTFLTDLARKKGFRVENELSDSVTHIVAENLSRSEVLAWLKEHKMEKTKQFELLDISWLIESMKVGKPVDTKGKYQLAESGEMSANPDPTEGRENELPPTMKTVSPYACQRRTTLNNHNQRFTDALEILAENYEFKRNDDTALEFRRAISVLKSLPFEVRSLKDTEGLPWIGDEVKGIMEEIIEVGNSREVQAVLNDEWYQSFHRFKSVFGVGVKTADKWYRMGLRTLEDVRSSKTLKLTPMQKAGLCYYEDLARGVTKAEADAISLLVQDAVATFDPDALVEIVGGFRRGKPQGHDVDLLITSPGAEKEQEDQLLQKVTNLWKKQGLLLYGRLEWTQWEDGKLPSGKADVGDAGAKCFLILKLYDHKVDKSKWEMPTGSNMGEAKPWKAIRVDLVRCPYGGFAFAMLQWTGSRMFRRDLRWYATDEKNMMLDNHALYDLTKKIFLKAKSEEEIFAHLGLEYLEPFERNA

SEQ ID NO: 2619 - DNA, 1587 bp, synthetic construct
  misc_feature 1..1587: note = Variant of terminal deoxynucleotidyltransferase
  source 1..1587: mol_type = other DNA
atgcaccatcatcatcatcatggcggtagcggcagccacggcattcgtaccatcgattcggacttcgggaagaaaattcagaaaaaaatggataaccacgatagttccgccatctatgaaatcaaatttcacgagtttgtgctgttcattctcgaagaaaaaatgggtgcgacgcgtcgtacttttctgacagatttagcccgcaagaaagggttccgcgtcgagaatgaactgtcagacagcgttacccacatcgtggcagaaaatctgtcacgctctgaagtattggcttggctgaaagaacacaagatggagaagaccaagcaattcgaactgctggatattagctggcttatcgaaagcatgaaagttggtaaaccggtggacaccaaggggaaataccagttggcggaatcgggtgagatgagtgcgaacccagatccgacagagggtcgtgaaaacgagctgcctcctactatgaagaccgtttctccgtatgcgtgtcaacgccgcaccaccctgaacaaccataatcaacgttttacggacgcactggaaattcttgcggaaaattacgagttcaaacgcaacgatgatactgcgctggaatttcgtcgtgctatctccgtgctgaaaagccttccgtttgaggtacgtagcctgaaagacacggaaggattgccctggatcggtgatgaagtcaaagggattatggaagaaatcatcgaggtcggggaatcgcgtgaagtgcaggccgtgctcaatgatgagtggtatcaaagcttccaccgctttaagagtgtctttggagtgggggtgaagacagcagacaagtggtaccgtatgggtctgcgcaccctcgaggatgttcgttccagcaagaccctgaagttgaccccgatgcagaaggcgggtctgtgctattatgaagatcttgctcgcggcgttacgaaagccgaagctgacgcgatttctctgctggttcaggatgcagtcgcaactttcgacccggatgcgctggtggagattgtcggtggatttcgtcgtgggaaacctcagggtcacgacgttgatctgcttatcacatctccgggagctgagaaagagcaagaagaccagctcctgcagaaagtgaccaatctgtggaagaaacaagggttgttgctgtacggtcgtctggaatggacccagtgggaagatgggaaactcccatccggtaaggctgacgtaggtgacgcgggtgcgaaatgctttctgatcctcaaactttatgatcataaagtggacaaaagcaaatgggaaatgccgacgggttcgaacatgggcgaggccaaaccgtggaaagcaattcgcgtagatctggtgcgttgcccctacggcggttttgcgtttgcgatgttgcagtggaccggaagccgcatgttccgccgtgatctgcgctggtacgccactgacgagaagaacatgatgctggacaatcatgcgctgtatgacctgaccaagaaaatctttctcaaagctaaatcggaagaggaaattttcgcacatctggggcttgaatacctggaaccgttcgaacgtaacgca

SEQ ID NO: 2620 - protein, 529 aa, synthetic construct
  REGION 1..529: note = Variant of terminal deoxynucleotidyltransferase
MHHHHHHGGSGSHGIRTIDSDFGKKIQKKMDNHDSSAIYEIKFHEFVLFILEEKMGATRRTFLTDLARKKGFRVENELSDSVTHIVAENLSRSEVLAWLKEHKMEKTKQFELLDISWLIESMKVGKPVDTKGKYQLAESGEMSANPDPTEGRENELPPTMKTVSPYACQRRTTLNNHNQRFTDALEILAENYEFKRNDDTALEFRRAISVLKSLPFEVRSLKDTEGLPWIGDEVKGIMEEIIEVGESREVQAVLNDEWYQSFHRFKSVFGVGVKTADKWYRMGLRTLEDVRSSKTLKLTPMQKAGLCYYEDLARGVTKAEADAISLLVQDAVATFDPDALVEIVGGFRRGKPQGHDVDLLITSPGAEKEQEDQLLQKVTNLWKKQGLLLYGRLEWTQWEDGKLPSGKADVGDAGAKCFLILKLYDHKVDKSKWEMPTGSNMGEAKPWKAIRVDLVRCPYGGFAFAMLQWTGSRMFRRDLRWYATDEKNMMLDNHALYDLTKKIFLKAKSEEEIFAHLGLEYLEPFERNA

SEQ ID NO: 2621 - DNA, 1587 bp, synthetic construct
  misc_feature 1..1587: note = Variant of terminal deoxynucleotidyltransferase
  source 1..1587: mol_type = other DNA
atgcaccatcatcatcatcatggcggtagcggcagccacggcattcgtaccatcgattcggacttcgggaagaaacaacagaaaaaaggggataaccacgatagttccgccatctatgaaatcaaatttcacgagtttgtgctgttcattctcgaagaaaaaatgggtgcgacgcgtcgtacttttctgacagatttagcccgcaagaaggggttccgcgtcgagaatgaactgtcagacagcgttacccacatcgtggcagaaaatctgtcacgctctgaagtattggcttggctgaaagaacacaagatggagaagaccaagcaattcgaactgctggatattagctggcttatcgaaagcatgaaagttggtaaaccggtggacaccaaggggaaataccagttggcggaatcgggtgagatgagtgcgaacccagatccgacagagggtcgtgaaaacgagctgcctcctactatgaagaccgtttctccgtatgcgtgtcaacgccgcaccaccctgaacaaccataatcaacgttttacggacgcactggaaattcttgcggaaaattacgagttcaaacgcaacgatgatactgcgctggaatttcgtcgtgctatctccgtgctgaaaagccttccgtttgaggtacgtagcctgaaagacacggaaggattgccctggatcggtgatgaagtcaaagggattatggaagaaatcatcgaggtcgggaattcgcgtgaagtgcaggccgtgctcaatgatgagtggtatcaatcgttccaccgctttgtcagtgtctttggagtgggggtgaagacagcagacaagtggtaccgtatgggtctgcgcaccctcgaggatgttcgttccagcaagaccctgaagttgaccccgatgcagaaagcgggtctgtgttattatgaagatcttgctcgcggcgttacgaaagccgaagctgacgcgatttctctgctggttcaggatgcagtcgcaactttcgacccggatgcgctggtggagattgtcggtggatttcgtcgtgggaaacctcgcggtcacgacgttgatctgcttatcagttctccgggagctgagaaagagcaagaagaccagctcctgcagaaagtgaccaatctgtggaagaaacaagggttgttgctgtacggtcgtctggaatggacccagtgggaagatgggaaactcccatccggtaaggctgacgtaggtgacgcgggtgcgaaatgctttctgatcctcaaactttatgatcataaagtggacaaaagcaaatgggaaatgccgacgggttcgaacatgggcgaggccaaaccgtggaaagcaattcgcgtagatctgctgcgttgcccctacggcggttttgcgtttgcgatgttgcagtggaccggaagccgcatgttccgccgtgatctgcgctggtacgccactgacgagaagaacatgatgctggacaatcatgcgctgtatgacctgaccaagaaaatctttctcaaagctaaatcggaagaggaaattttcgcacatctggggcttgaatacctggaaccgttcgaacgtaacgca

SEQ ID NO: 2622 - protein, 529 aa, synthetic construct
  REGION 1..529: note = Variant of terminal deoxynucleotidyltransferase
MHHHHHHGGSGSHGIRTIDSDFGKKQQKKGDNHDSSAIYEIKFHEFVLFILEEKMGATRRTFLTDLARKKGFRVENELSDSVTHIVAENLSRSEVLAWLKEHKMEKTKQFELLDISWLIESMKVGKPVDTKGKYQLAESGEMSANPDPTEGRENELPPTMKTVSPYACQRRTTLNNHNQRFTDALEILAENYEFKRNDDTALEFRRAISVLKSLPFEVRSLKDTEGLPWIGDEVKGIMEEIIEVGNSREVQAVLNDEWYQSFHRFVSVFGVGVKTADKWYRMGLRTLEDVRSSKTLKLTPMQKAGLCYYEDLARGVTKAEADAISLLVQDAVATFDPDALVEIVGGFRRGKPRGHDVDLLISSPGAEKEQEDQLLQKVTNLWKKQGLLLYGRLEWTQWEDGKLPSGKADVGDAGAKCFLILKLYDHKVDKSKWEMPTGSNMGEAKPWKAIRVDLLRCPYGGFAFAMLQWTGSRMFRRDLRWYATDEKNMMLDNHALYDLTKKIFLKAKSEEEIFAHLGLEYLEPFERNA

SEQ ID NO: 2623 - DNA, 1587 bp, synthetic construct
  misc_feature 1..1587: note = Variant of terminal deoxynucleotidyltransferase
  source 1..1587: mol_type = other DNA
atgcaccatcatcatcatcatggcggtagcggcagccacggcattcgtaccatcgattcggacttcgggaagaaacaacagaaaaaaggggataaccacgatagttccgccatctatgaaatcaaatttcacgagtttgtgctgttcattctcgaagaaaaaatgggtgcgacgcgtcgtacttttctgacagatttagcccgcaagaaagggttccgcgtcgagaatgaactgtcagacagcgttacccacatcgtggcagaaaatctgtcacgctctgaagtattggcttggctgaaagaacacaagatggagaagaccaagcaattcgaactgctggatattagctggcttatcgaaagcatgaaagttggtaaaccggtggacaccaaggggaaataccagttggcggaatcgggtgagatgagtgcgaacccagatccgacagagggtcgtgaaaacgagctgcctcctactatgaagaccgtttctccgtatgcgtgtcaacgccgcaccaccctgaacaaccataatcaacgttttacggacgcactggaaattcttgcggaaaattacgagttcaaacgcaacgatgatactgcgctggaatttcgtcgtgctatctccgtgctgaaaagccttccgtttgaggtacgtagcctgaaagacacggaaggattgccctggatcggtgatgaagtcaaagggattatggaagaaatcatcgaggtcgggaattcgcgtgaagtgcaggccgtgctcaatgatgagtggtatcaagcgttccaccgctttgtcagtgtctttggagtgggggtgaagacagcagacaagtggtaccgtatgggtctgcgcaccctcgaggatgttcgttccagcaagaccctgaagttgaccccgatgcagaaagcgggtctgtgttattatgaagatcttgctcgcggcgttacgaaagccgaagctgacgcgatttctctgctggttcaggatgcagtcgcaactttcgacccggatgcgctggtggagattgtcggtggatttcgtcgtgggaaacctcgcggtcacgacgttgatctgcttatcagttctccgggagctgagaaagagcaagaagaccagctcctgcagaaagtgaccaatctgtggaagaaacaagggttgttgctgtacggtcgtctggaatggacccagtgggaagatgggaaactcccatccggtaaggctgacgtaggtgacgcgggtgcgaaatgctttctgatcctcaaactttatgatcataaagtggacaaaagcaaatgggaaatgccgacgggttcgaacatgggcgaggccaaaccgtggaaagcaattcgcgtagatctgctgcgttgcccctacggcggttttgcgtttgcgatgttgagctggaccggaagccgcatgttccgccgtgatctgcgctggtacgccactgacgagaagaacatgatgctggacaatcatgcgctgtatgacctgaccaagaaaatctttctcaaagctaaatcggaagaggaaattttcgcacatctggggcttgaatacctggaaccgttcgaacgtaacgca

SEQ ID NO: 2624 - protein, 529 aa, synthetic construct
  REGION 1..529: note = Variant of terminal deoxynucleotidyltransferase
MHHHHHHGGSGSHGIRTIDSDFGKKQQKKGDNHDSSAIYEIKFHEFVLFILEEKMGATRRTFLTDLARKKGFRVENELSDSVTHIVAENLSRSEVLAWLKEHKMEKTKQFELLDISWLIESMKVGKPVDTKGKYQLAESGEMSANPDPTEGRENELPPTMKTVSPYACQRRTTLNNHNQRFTDALEILAENYEFKRNDDTALEFRRAISVLKSLPFEVRSLKDTEGLPWIGDEVKGIMEEIIEVGNSREVQAVLNDEWYQAFHRFVSVFGVGVKTADKWYRMGLRTLEDVRSSKTLKLTPMQKAGLCYYEDLARGVTKAEADAISLLVQDAVATFDPDALVEIVGGFRRGKPRGHDVDLLISSPGAEKEQEDQLLQKVTNLWKKQGLLLYGRLEWTQWEDGKLPSGKADVGDAGAKCFLILKLYDHKVDKSKWEMPTGSNMGEAKPWKAIRVDLLRCPYGGFAFAMLSWTGSRMFRRDLRWYATDEKNMMLDNHALYDLTKKIFLKAKSEEEIFAHLGLEYLEPFERNA

SEQ ID NO: 2625 - DNA, 1587 bp, synthetic construct
  misc_feature 1..1587: note = Variant of terminal deoxynucleotidyltransferase
  source 1..1587: mol_type = other DNA
atgcaccatcatcatcatcatggcggtagcggcagccacggcattcgtaccatcgattcggacttcgggaagaaacagcagaaaaaaatggataaccacgatagttccgccatctatgaaatcaaatttcacgagtttgtgctgttcattctcgaagaaaaaatgggtgcgacgcgtcgtacttttctgacagatttagcccgcaagaaagggttccgcgtcgagaatgaactgtcagacagcgttacccacatcgtggcagaaaatctgtcacgctctgaagtattggcttggctgaaagaacacaagatggagaagaccaagcaattcgaactgctggatattagctggcttatcgaaagcatgaaagttggtaaaccggtggacaccaaggggaaataccagttggcggaatcgggtgagatgagtgcgaacccagatccgacagagggtcgtgaaaacgagctgcctcctactatgaagaccgtttctccgtatgcgtgtcaacgccgcaccaccctgaacaaccataatcaacgttttacggacgcactggaaattcttgcggaaaattacgagttcaaacgcaacgatgatactgcgctggaatttcgtcgtgctatctccgtgctgaaaagccttccgtttgaggtacgtagcctgaaagacacggaaggattgccctggatcggtgatgaagtcaaagggattatggaagaaatcatcgaggtcgggaattcgcgtgaagtgcaggccgtgctcaatgatgagtggtatcaaagcttccaccgctttgtcagtgtctttggagtgggggtgaagacagcagacaagtggtaccgtatgggtctgcgcaccctcgaggatgttcgttccagcaagaccctgaagttgaccccgatgcagaaagcgggtctgtgctattatgaagatcttgctcgcggcgttacgaaagccgaagctgacgcgatttctctgctggttcaggatgcagtcgcaactttcgacccggatgcgctggtggagattgtcggtggatttcgtcgtgggaaacctcgcggtcacgacgttgatctgcttatcagttctccgggagctgagaaagagcaagaagaccagctcctgcagaaagtgaccaatctgtggaagaaacaagggttgttgctgtacggtcgtctggaatggacccagtgggaagatgggaaactcccatccggtaaggctgacgtaggtgacgcgggtgcgaaatgctttctgatcctcaaactttatgatcataaagtggacaaaagcaaatgggaaatgccgacgggttcgaacatgggcgaggccaaaccgtggaaagcaattcgcgtagatctgctgcgttgcccctacggcggttttgcgtttgcgatgttgagctggaccggaagccgcatgttccgccgtgatctgcgctggtacgccactgacgagaagaacatgatgctggacaatcatgcgctgtatgacctgaccaagaaaatctttctcaaagctaaatcggaagaggaaattttcgcacatctggggcttgaatacctggaaccgttcgaacgtaacgca

SEQ ID NO: 2626 - protein, 529 aa, synthetic construct
  REGION 1..529: note = Variant of terminal deoxynucleotidyltransferase
MHHHHHHGGSGSHGIRTIDSDFGKKQQKKMDNHDSSAIYEIKFHEFVLFILEEKMGATRRTFLTDLARKKGFRVENELSDSVTHIVAENLSRSEVLAWLKEHKMEKTKQFELLDISWLIESMKVGKPVDTKGKYQLAESGEMSANPDPTEGRENELPPTMKTVSPYACQRRTTLNNHNQRFTDALEILAENYEFKRNDDTALEFRRAISVLKSLPFEVRSLKDTEGLPWIGDEVKGIMEEIIEVGNSREVQAVLNDEWYQSFHRFVSVFGVGVKTADKWYRMGLRTLEDVRSSKTLKLTPMQKAGLCYYEDLARGVTKAEADAISLLVQDAVATFDPDALVEIVGGFRRGKPRGHDVDLLISSPGAEKEQEDQLLQKVTNLWKKQGLLLYGRLEWTQWEDGKLPSGKADVGDAGAKCFLILKLYDHKVDKSKWEMPTGSNMGEAKPWKAIRVDLLRCPYGGFAFAMLSWTGSRMFRRDLRWYATDEKNMMLDNHALYDLTKKIFLKAKSEEEIFAHLGLEYLEPFERNA

SEQ ID NO: 2627 - DNA, 1587 bp, synthetic construct
  misc_feature 1..1587: note = Variant of terminal deoxynucleotidyltransferase
  source 1..1587: mol_type = other DNA
atgcaccatcatcatcatcatggcggtagcggcagccacggcattcgtaccatcgattcggacttcgggaagaaacaacagaaaaaagaggataaccacgatagttccgccatctatgaaatcaaatttcacgagtttgtgctgttcattctcgaagaaaaaatgggtgcgacgcgtcgtacttttctgacagatttagcccgcaagaaggggttccgcgtcgagaatgaactgtcagacagcgttacccacatcgtggcagaaaatctgtcacgctctgaagtattggcttggctgaaagaacacaagatggagaagaccaagcaattcgaactgctggatattagctggcttatcgaaagcatgaaagttggtaaaccggtggacaccaaggggaaataccagttggcggaatcgggtgagatgagtgcgaacccagatccgacagagggtcgtgaaaacgagctgcctcctactatgaagaccgtttctccgtatgcgtgtcaacgccgcaccaccctgaacaaccataatcaacgttttacggacgcactggaaattcttcgcgaaaattacgagttcaaacgcaacgatgatactgcgctggaatttcgtcgtgctatctccgtgctgaaaagccttccgtttgaggtacgtagcctgaaagacacggaaggattgccctggatcggtgatgaagtcaaagggattatggaagaaatcatcgaggtcgggaattcgcgtgaagtgcaggccgtgctcaatgatgagtggtatcaatcgttccaccgctttgtcagtgtctttggagtgggggtgaagacagcagacaagtggtaccgtatgggtctgcgcaccctcgaggatgttcgttccagcaagaccctgaagttgaccccgatgcagaaagcgggtctgtgttattatgaagatcttgctcgcggcgttacgaaagccgaagctgacgcgatttctctgctggttcaggatgcagtcgcaactttcgacccggatgcgctggtggagattgtcggtggatttcgtcgtgggaaacctcaaggtcacgacgttgatctgcttatcagttctccgggagctgagaaagagcaagaagaccagctcctgcagaaagtgaccaatctgtggaagaaacaagggttgttgctgtacggtcgtctggaatggacccagtgggaagatgggaaactcccatccggtaaggctgacgtaggtgacgcgggtgcgaaatgctttctgatcctcaaactttatgatcataaagtggacaaaagcaaatgggaaatgccgacgggttcgaacatgggcgaggccaaaccgtggaaagcaattcgcgtagatctgctgcgttgcccctacggcggttttgcgtttgcgatgttgcagtggaccggaagccgcatgttccgccgtgatctgcgctggtacgccactgacgagaagaacatgatgctggacaatcatgcgctgtatgacctgaccaagaaaatctttctcaaagctaaatcggaagaggaaattttcgcacatctggggcttgaatacctggaaccgttcgaacgtaacgca

SEQ ID NO: 2628 - protein, 529 aa, synthetic construct
  REGION 1..529: note = Variant of terminal deoxynucleotidyltransferase
MHHHHHHGGSGSHGIRTIDSDFGKKQQKKEDNHDSSAIYEIKFHEFVLFILEEKMGATRRTFLTDLARKKGFRVENELSDSVTHIVAENLSRSEVLAWLKEHKMEKTKQFELLDISWLIESMKVGKPVDTKGKYQLAESGEMSANPDPTEGRENELPPTMKTVSPYACQRRTTLNNHNQRFTDALEILRENYEFKRNDDTALEFRRAISVLKSLPFEVRSLKDTEGLPWIGDEVKGIMEEIIEVGNSREVQAVLNDEWYQSFHRFVSVFGVGVKTADKWYRMGLRTLEDVRSSKTLKLTPMQKAGLCYYEDLARGVTKAEADAISLLVQDAVATFDPDALVEIVGGFRRGKPQGHDVDLLISSPGAEKEQEDQLLQKVTNLWKKQGLLLYGRLEWTQWEDGKLPSGKADVGDAGAKCFLILKLYDHKVDKSKWEMPTGSNMGEAKPWKAIRVDLLRCPYGGFAFAMLQWTGSRMFRRDLRWYATDEKNMMLDNHALYDLTKKIFLKAKSEEEIFAHLGLEYLEPFERNA

SEQ ID NO: 2629 - DNA, 1587 bp, synthetic construct
  misc_feature 1..1587: note = Variant of terminal deoxynucleotidyltransferase
  source 1..1587: mol_type = other DNA
atgcaccatcatcatcatcatggcggtagcggcagccacggcattcgtaccatcgattcggacttcgggaagaaacaacagaaaaaaatggataaccacgatagttccgccatctatgaaatcaaatttcacgagtttgtgctgttcattctcgaagaaaaaatgggtgcgacgcgtcgtacttttctgacagatttagcccgcaagaaggggttccgcgtcgagaatgaactgtcagacagcgttacccacatcgtggcagaaaatctgtcacgctctgaagtattggcttggctgaaagaacacaagatggagaagaccaagcaattcgaactgctggatattagctggcttatcgaaagcatgaaagttggtaaaccggtggacaccaaggggaaataccagttggcggaatcgggtgagatgagtgcgaacccagatccgacagagggtcgtgaaaacgagctgcctcctactatgaagaccgtttctccgtatgcgtgtcaacgccgcaccaccctgaacaaccataatcaacgttttacggacgcactggaaattcttgcggaaaattacgagttcaaacgcaacgatgatactgcgctggaatttcgtcgtgctatctccgtgctgaaaagccttccgtttgaggtacgtagcctgaaagacacggaaggattgccctggatcggtgatgaagtcaaagggattatggaagaaatcatcgaggtcgggaattcgcgtgaagtgcaggccgtgctcaatgatgagtggtatcaatcgttccaccgctttgtcagtgtctttggagtgggggtgaagacagcagacaagtggtaccgtatgggtctgcgcaccctcgaggatgttcgttccagcaagaccctgaagttgaccccgatgcagaaagcgggtctgtgttattatgaagatcttgctcgcggcgttacgaaagccgaagctgacgcgatttctctgctggttcaggatgcagtcgcaactttcgacccggatgcgctggtggagattgtcggtggatttcgtcgtgggaaacctcaaggtcacgacgttgatctgcttatcagttctccgggagctgagaaagagcaagaagaccagctcctgcagaaagtgaccaatctgtggaagaaacaagggttgttgctgtacggtcgtctggaatggacccagtgggaagatgggaaactcccatccggtaaggctgacgtaggtgacgcgggtgcgaaatgctttctgatcctcaaactttatgatcataaagtggacaaaagcaaatgggaaatgccgacgggttcgaacatgggcgaggccaaaccgtggaaagcaattcgcgtagatctgctgcgttgcccctacggcggttttgcgtttgcgatgttgagctggaccggaagccgcatgttccgccgtgatctgcgctggtacgccactgacgagaagaacatgatgctggacaatcatgcgctgtatgacctgaccaagaaaatctttctcaaagctaaatcggaagaggaaattttcgcacatctggggcttgaatacctggaaccgttcgaacgtaacgca

SEQ ID NO: 2630 - protein, 529 aa, synthetic construct
  REGION 1..529: note = Variant of terminal deoxynucleotidyltransferase
MHHHHHHGGSGSHGIRTIDSDFGKKQQKKMDNHDSSAIYEIKFHEFVLFILEEKMGATRRTFLTDLARKKGFRVENELSDSVTHIVAENLSRSEVLAWLKEHKMEKTKQFELLDISWLIESMKVGKPVDTKGKYQLAESGEMSANPDPTEGRENELPPTMKTVSPYACQRRTTLNNHNQRFTDALEILAENYEFKRNDDTALEFRRAISVLKSLPFEVRSLKDTEGLPWIGDEVKGIMEEIIEVGNSREVQAVLNDEWYQSFHRFVSVFGVGVKTADKWYRMGLRTLEDVRSSKTLKLTPMQKAGLCYYEDLARGVTKAEADAISLLVQDAVATFDPDALVEIVGGFRRGKPQGHDVDLLISSPGAEKEQEDQLLQKVTNLWKKQGLLLYGRLEWTQWEDGKLPSGKADVGDAGAKCFLILKLYDHKVDKSKWEMPTGSNMGEAKPWKAIRVDLLRCPYGGFAFAMLSWTGSRMFRRDLRWYATDEKNMMLDNHALYDLTKKIFLKAKSEEEIFAHLGLEYLEPFERNA

SEQ ID NO: 2631 - DNA, 1587 bp, synthetic construct
  misc_feature 1..1587: note = Variant of terminal deoxynucleotidyltransferase
  source 1..1587: mol_type = other DNA
atgcaccatcatcatcatcatggcggtagcggcagccacggcattcgtaccatcgattcggacttcgggaagaaacaacagaaaaaaggggataaccacgatagttccgccatctatgaaatcaaatttcacgagtttgtgctgttcattctcgaagaaaaaatgggtgcgacgcgtcgtacttttctgacagatttagcccgcaagaaggggttccgcgtcgagaatgaactgtcagacagcgttacccacatcgtggcagaaaatctgtcacgctctgaagtattggcttggctgaaagaacacaagatggagaagaccaagcaattcgaactgctggatattagctggcttatcgaaagcatgaaagttggtaaaccggtggacaccaaggggaaataccagttggcggaatcgggtgagatgagtgcgaacccagatccgacagagggtcgtgaaaacgagctgcctcctactatgaagaccgtttctccgtatgcgtgtcaacgccgcaccaccctgaacaaccataatcaacgttttacggacgcactggaaattcttgcggaaaattacgagttcaaacgcaacgatgatactgcgctggaatttcgtcgtgctatctccgtgctgaaaagccttccgtttgaggtacgtagcctgaaagacacggaaggattgccctggatcggtgatgaagtcaaagggattatggaagaaatcatcgaggtcgggaattcgcgtgaagtgcaggccgtgctcaatgatgagtggtatcaatcgttccaccgctttgtcagtgtctttggagtgggggtgaagacagcagacaagtggtaccgtatgggtctgcgcaccctcgaggatgttcgttccagcaagaccctgaagttgaccccgatgcagaaagcgggtctgtgttattatgaagatcttgctcgcggcgttacgaaagccgaagctgacgcgatttctctgctggttcaggatgcagtcgcaactttcgacccggatgcgctggtggagattgtcggtggatttcgtcgtgggaaacctcagggtcacgacgttgatctgcttatcagttctccgggagctgagaaagagcaagaagaccagctcctgcagaaagtgaccaatctgtggaagaaacaagggttgttgctgtacggtcgtctggaatggacccagtgggaagatgggaaactcccatccggtaaggctgacgtaggtgacgcgggtgcgaaatgctttctgatcctcaaactttatgatcataaagtggacaaaagcaaatgggaaatgccgacgggttcgaacatgggcgaggccaaaccgtggaaagcaattcgcgtagatctgctgcgttgcccctacggcggttttgcgtttgcgatgttgcagtggaccggaagccgcatgttccgccgtgatctgcgctggtacgccactgacgagaagaacatgatgctggacaatcatgcgctgtatgacctgaccaagaaaatctttctcaaagctaaatcggaagaggaaattttcgcacatctggggcttgaatacctggaaccgttcgaacgtaacgca

SEQ ID NO: 2632 - protein, 529 aa, synthetic construct
  REGION 1..529: note = Variant of terminal deoxynucleotidyltransferase
MHHHHHHGGSGSHGIRTIDSDFGKKQQKKGDNHDSSAIYEIKFHEFVLFILEEKMGATRRTFLTDLARKKGFRVENELSDSVTHIVAENLSRSEVLAWLKEHKMEKTKQFELLDISWLIESMKVGKPVDTKGKYQLAESGEMSANPDPTEGRENELPPTMKTVSPYACQRRTTLNNHNQRFTDALEILAENYEFKRNDDTALEFRRAISVLKSLPFEVRSLKDTEGLPWIGDEVKGIMEEIIEVGNSREVQAVLNDEWYQSFHRFVSVFGVGVKTADKWYRMGLRTLEDVRSSKTLKLTPMQKAGLCYYEDLARGVTKAEADAISLLVQDAVATFDPDALVEIVGGFRRGKPQGHDVDLLISSPGAEKEQEDQLLQKVTNLWKKQGLLLYGRLEWTQWEDGKLPSGKADVGDAGAKCFLILKLYDHKVDKSKWEMPTGSNMGEAKPWKAIRVDLLRCPYGGFAFAMLQWTGSRMFRRDLRWYATDEKNMMLDNHALYDLTKKIFLKAKSEEEIFAHLGLEYLEPFERNA

SEQ ID NO: 2633 - DNA, 1587 bp, synthetic construct
  misc_feature 1..1587: note = Variant of terminal deoxynucleotidyltransferase
  source 1..1587: mol_type = other DNA
atgcaccatcatcatcatcatggcggtagcggcagccacggcattcgtaccatcgattcggacttcgggaagaaacaacagaaaaaaatggataaccacgatagttccgccatctatgaaatcaaatttcacgagtttgtgctgttcattctcgaagaaaaaatgggtgcgacgcgtcgtacttttctgacagatttagcccgcaagaaagggttccgcgtcgagaatgaactgtcagacagcgttacccacatcgtggcagaaaatctgtcacgctctgaagtattggcttggctgaaagaacacaagatggagaagaccaagcaattcgaactgctggatattagctggcttatcgaaagcatgaaagttggtaaaccggtggacaccaaggggaaataccagttggcggaatcgggtgagatgagtgcgaacccagatccgacagagggtcgtgaaaacgagctgcctcctactatgaagaccgtttctccgtatgcgtgtcaacgccgcaccaccctgaacaaccataatcaacgttttacggacgcactggaaattcttcgcgaaaattacgagttcaaacgcaacgatgatactgcgctggaatttcgtcgtgctatctccgtgctgaaaagccttccgtttgaggtacgtagcctgaaagacacggaaggattgccctggatcggtgatgaagtcaaagggattatggaagaaatcatcgaggtcgggaattcgcgtgaagtgcaggccgtgctcaatgatgagtggtatcaagcgttccaccgctttaagagtgtctttggagtgggggtgaagacagcagacaagtggtaccgtatgggtctgcgcaccctcgaggatgttcgttccagcaagaccctgaagttgaccccgatgcagaaagcgggtctgtgctattatgaagatcttgctcgcggcgttacgaaagccgaagctgacgcgatttctctgctggttcaggatgcagtcgcaactttcgacccggatgcgctggtggagattgtcggtggatttcgtcgtgggaaacctcagggtcacgacgttgatctgcttatcagttctccgggagctgagaaagagcaagaagaccagctcctgcagaaagtgaccaatctgtggaagaaacaagggttgttgctgtacggtcgtctggaatggacccagtgggaagatgggaaactcccatccggtaaggctgacgtaggtgacgcgggtgcgaaatgctttctgatcctcaaactttatgatcataaagtggacaaaagcaaatgggaaatgccgacgggttcgaacatgggcgaggccaaaccgtggaaagcaattcgcgtagatctgctgcgttgcccctacggcggttttgcgtttgcgatgttgcagtggaccggaagccgcatgttccgccgtgatctgcgctggtacgccactgacgagaagaacatgatgctggacaatcatgcgctgtatgacctgaccaagaaaatctttctcaaagctaaatcggaagaggaaattttcgcacatctggggcttgaatacctggaaccgttcgaacgtaacgca

SEQ ID NO: 2634 - protein, 529 aa, synthetic construct
  REGION 1..529: note = Variant of terminal deoxynucleotidyltransferase
MHHHHHHGGSGSHGIRTIDSDFGKKQQKKMDNHDSSAIYEIKFHEFVLFILEEKMGATRRTFLTDLARKKGFRVENELSDSVTHIVAENLSRSEVLAWLKEHKMEKTKQFELLDISWLIESMKVGKPVDTKGKYQLAESGEMSANPDPTEGRENELPPTMKTVSPYACQRRTTLNNHNQRFTDALEILRENYEFKRNDDTALEFRRAISVLKSLPFEVRSLKDTEGLPWIGDEVKGIMEEIIEVGNSREVQAVLNDEWYQAFHRFKSVFGVGVKTADKWYRMGLRTLEDVRSSKTLKLTPMQKAGLCYYEDLARGVTKAEADAISLLVQDAVATFDPDALVEIVGGFRRGKPQGHDVDLLISSPGAEKEQEDQLLQKVTNLWKKQGLLLYGRLEWTQWEDGKLPSGKADVGDAGAKCFLILKLYDHKVDKSKWEMPTGSNMGEAKPWKAIRVDLLRCPYGGFAFAMLQWTGSRMFRRDLRWYATDEKNMMLDNHALYDLTKKIFLKAKSEEEIFAHLGLEYLEPFERNA

SEQ ID NO: 2635 - DNA, 1587 bp, synthetic construct
  misc_feature 1..1587: note = Variant of terminal deoxynucleotidyltransferase
  source 1..1587: mol_type = other DNA
atgcaccatcatcatcatcatggcggtagcggcagccacggcattcgtaccatcgattcggacttcgggaagaaacagcagaaaaaaatggataaccacgatagttccgccatctatgaaatcaaatttcacgagtttgtgctgttcattctcgaagaaaaaatgggtgcgacgcgtcgtacttttctgacagatttagcccgcaagaaggggttccgcgtcgagaatgaactgtcagacagcgttacccacatcgtggcagaaaatctgtcacgctctgaagtattggcttggctgaaagaacacaagatggagaagaccaagcaattcgaactgctggatattagctggcttatcgaaagcatgaaagttggtaaaccggtggacaccaaggggaaataccagttggcggaatcgggtgagatgagtgcgaacccagatccgacagagggtcgtgaaaacgagctgcctcctactatgaagaccgtttctccgtatgcgtgtcaacgccgcaccaccctgaacaaccataatcaacgttttacggacgcactggaaattcttcgcgaaaattacgagttcaaacgcaacgatgatactgcgctggaatttcgtcgtgctatctccgtgctgaaaagccttccgtttgaggtacgtagcctgaaagacacggaaggattgccctggatcggtgatgaagtcaaagggattatggaagaaatcatcgaggtcgggaattcgcgtgaagtgcaggccgtgctcaatgatgagtggtatcaaagcttccaccgctttaagagtgtctttggagtgggggtgaagacagcagacaagtggtaccgtatgggtctgcgcaccctcgaggatgttcgttccagcaagaccctgaagttgaccccgatgcagaaagcgggtctgtgctattatgaagatcttgctcgcggcgttacgaaagccgaagctgacgcgatttctctgctggttcaggatgcagtcgcaactttcgacccggatgcgctggtggagattgtcggtggatttcgtcgtgggaaacctcgcggtcacgacgttgatctgcttatcagttctccgggagctgagaaagagcaagaagaccagctcctgcagaaagtgaccaatctgtggaagaaacaagggttgttgctgtacggtcgtctggaatggacccagtgggaagatgggaaactcccatccggtaaggctgacgtaggtgacgcgggtgcgaaatgctttctgatcctcaaactttatgatcataaagtggacaaaagcaaatgggaaatgccgacgggttcgaacatgggcgaggccaaaccgtggaaagcaattcgcgtagatctgctgcgttgcccctacggcggttttgcgtttgcgatgttgcagtggaccggaagccgcatgttccgccgtgatctgcgctggtacgccactgacgagaagaacatgatgctggacaatcatgcgctgtatgacctgaccaagaaaatctttctcaaagctaaatcggaagaggaaattttcgcacatctggggcttgaatacctggaaccgttcgaacgtaacgca

SEQ ID NO: 2636 - protein, 529 aa, synthetic construct
  REGION 1..529: note = Variant of terminal deoxynucleotidyltransferase
MHHHHHHGGSGSHGIRTIDSDFGKKQQKKMDNHDSSAIYEIKFHEFVLFILEEKMGATRRTFLTDLARKKGFRVENELSDSVTHIVAENLSRSEVLAWLKEHKMEKTKQFELLDISWLIESMKVGKPVDTKGKYQLAESGEMSANPDPTEGRENELPPTMKTVSPYACQRRTTLNNHNQRFTDALEILRENYEFKRNDDTALEFRRAISVLKSLPFEVRSLKDTEGLPWIGDEVKGIMEEIIEVGNSREVQAVLNDEWYQSFHRFKSVFGVGVKTADKWYRMGLRTLEDVRSSKTLKLTPMQKAGLCYYEDLARGVTKAEADAISLLVQDAVATFDPDALVEIVGGFRRGKPRGHDVDLLISSPGAEKEQEDQLLQKVTNLWKKQGLLLYGRLEWTQWEDGKLPSGKADVGDAGAKCFLILKLYDHKVDKSKWEMPTGSNMGEAKPWKAIRVDLLRCPYGGFAFAMLQWTGSRMFRRDLRWYATDEKNMMLDNHALYDLTKKIFLKAKSEEEIFAHLGLEYLEPFERNA

SEQ ID NO: 2637 - DNA, 1587 bp, synthetic construct
  misc_feature 1..1587: note = Variant of terminal deoxynucleotidyltransferase
  source 1..1587: mol_type = other DNA
atgcaccatcatcatcatcatggcggtagcggcagccacggcattcgtaccatcgattcggacttcgggaagaaacagcagaaaaaaatggataaccacgatagttccgccacttatgaaatcaaatttcacgagtttgtgctgttcattctcgaagaaaaaatgggtgcgacgcgtcgtacttttctgacagatttagcccgcaagaaagggttccgcgtcgagaatgaactgagcgacgaagttacccacatcgtggcagaaaatctgtcacgctctgaagtattggcttggctgaaagaacacaagatggagaagaccaagcaattcgaactgctggatattagctggcttatcgaaagcatgaaagttggtaaaccggtggacaccaaggggaaataccagttggcggaatcgggtgagatgagtgcgaacccagatccgacagagggtcgtgaaaacgagctgcctcctactatgaagaccgtttctccgtatgcgtgtcaacgccgcaccaccctgaacaaccataatcaacgttttacggacgcactggaaattcttgcggaaaattacgagttcaaacgcaacgatgatactgcgctggaatttcgtcgtgctatctccgtgctgaaaagccttccgtttgaggtacgtagcctgaaagacacggaaggattgccctggatcggtgatgaagtcaaagggattatggaagaaatcatcgaggtcgggaattcgcgtgaagtgcaggccgtgctcaatgatgagtggtatcaaagcttccaccgctttaagagtgtctttggagtgggggtgaagacagcagacaagtggtaccgtatgggtctgcgcaccctcgaggatgttcgttccagcaagaccctgaagttgaccccgatgcagaaagcgggtctgtgctattatgaagatcttgctcgcggcgttacgcgtgccgaagctgacgcgatttctctgctggttcaggatgcagtcgcaactttcgacccggatgcgctggtggagattgtcggtggatttcgtcgtgggaaacctcagggtcacgacgttgatctgcttatcagttctccgggagctgagaaagagcaagaagaccagctcctgcagaaagtgaccaatctgtggaagaaacaagggttgttgctgtacggtcgtctggaatggacccagtgggaagatgggaaactcccatccggtaaggctgacgtaggtgacgcgggtgcgaaatgctttctgatcctcaaactttatgatcataaagtggacaaaagcaaatgggaaatgccgacgggttcgaacatgggcgaggccaaaccgtggaaagcaattcgcgtagatctgctgcgttgcccctacggcggttttgcgtttgcgatgttgcagtggaccggaagccgcatgttccgccgtgatctgcgctggtacgccactgacgagaagaacatgatgctggacaatcatgcgctgtatgacctgaccaagaaaatctttctcaaagctaaatcggaagaggaaattttcgcacatctggggcttgaatacctggaaccgttcgaacgtaacgca

SEQ ID NO: 2638 - protein, 529 aa, synthetic construct
  REGION 1..529: note = Variant of terminal deoxynucleotidyltransferase
MHHHHHHGGSGSHGIRTIDSDFGKKQQKKMDNHDSSATYEIKFHEFVLFILEEKMGATRRTFLTDLARKKGFRVENELSDEVTHIVAENLSRSEVLAWLKEHKMEKTKQFELLDISWLIESMKVGKPVDTKGKYQLAESGEMSANPDPTEGRENELPPTMKTVSPYACQRRTTLNNHNQRFTDALEILAENYEFKRNDDTALEFRRAISVLKSLPFEVRSLKDTEGLPWIGDEVKGIMEEIIEVGNSREVQAVLNDEWYQSFHRFKSVFGVGVKTADKWYRMGLRTLEDVRSSKTLKLTPMQKAGLCYYEDLARGVTRAEADAISLLVQDAVATFDPDALVEIVGGFRRGKPQGHDVDLLISSPGAEKEQEDQLLQKVTNLWKKQGLLLYGRLEWTQWEDGKLPSGKADVGDAGAKCFLILKLYDHKVDKSKWEMPTGSNMGEAKPWKAIRVDLLRCPYGGFAFAMLQWTGSRMFRRDLRWYATDEKNMMLDNHALYDLTKKIFLKAKSEEEIFAHLGLEYLEPFERNA

SEQ ID NO: 2639 - DNA, 1587 bp, synthetic construct
  misc_feature 1..1587: note = Variant of terminal deoxynucleotidyltransferase
  source 1..1587: mol_type = other DNA
atgcaccatcatcatcatcatggcggtagcggcagccacggcattcgtaccatcgattcggacttcgggaagaaacagcagaaaaaaatggataaccacgatagttccgccatctatgaaatcaaatttcacgagtttgtgctgttcattctcgaagaaaaaatgggtgcgacgcgtcgtacttttctgacagatttagcccgcaagaaagggttccgcgtcgagaatgaactgtcagacagcgttacccacatcgtggcagaaaatctgtcacgctctgaagtattggcttggctgaaagaacacaagatggagaagaccaagcaattcgaactgctggatattagctggcttatcgaaagcatgaaagttggtaaaccggtggacaccaaggggaaataccagttggcggaatcgggtgagatgagtgcgaacccagatccgacagagggtcgtgaaaacgagctgcctcctactatgaagaccgtttctccgtatgcgtgtcaacgccgcaccaccctgaacaaccataatcaacgttttacggacgcactggaaattcttgcggaaaattacgagttcaaacgcaacgatgatactgcgctggaatttcgtcgtgctatctccgtgctgaaaagccttccgtttgaggtacgtagcctgaaagacacggaaggattgccctggatcggtgatgaagtcaaagggattatggaagaaatcatcgaggtcgggaattcgcgtgaagtgcaggccgtgctcaatgatgagtggtatcaatcgttccaccgctttgtcagtgtctttggagtgggggtgaagacagcagacaagtggtaccgtatgggtctgcgcaccctcgaggatgttcgttccagcaagaccctgaagttgaccccgatgcagaaagcgggtctgagttattatgaagatcttgctcgcggcgttacgaaagccgaagctgacgcgatttctctgctggttcaggatgcagtcgcaactttcgacccggatgcgctggtggagattgtcggtggatttcgtcgtgggaaacctcgcggtcacgacgttgatctgcttatcagttctccgggagctgagaaagagcaagaagaccagctcctgcagaaagtgaccaatctgtggaagaaacaagggttgttgctgtacggtcgtctggaatggacccagtgggaagatgggaaactcccatccggtaaggctgacgtaggtgacgcgggtgcgaaatgctttctgatcctcaaactttatgatcataaagtggacaaaagcaaatgggaaatgccgacgggttcgaacatgggcgaggccaaaccgtggaaagcaattcgcgtagatctgctgcgttgcccctacggcggttttgcgtttgcgatgttgagctggaccggaagccgcatgttccgccgtgatctgcgctggtacgccactgacgagaagaacatgatgctggacaatcatgcgctgtatgacctgaccaagaaaatctttctcaaagctaaatcggaagaggaaattttcgcacatctggggcttgaatacctggaaccgttcgaacgtaacgca

SEQ ID NO: 2640 - protein, 529 aa, synthetic construct
  REGION 1..529: note = Variant of terminal deoxynucleotidyltransferase
MHHHHHHGGSGSHGIRTIDSDFGKKQQKKMDNHDSSAIYEIKFHEFVLFILEEKMGATRRTFLTDLARKKGFRVENELSDSVTHIVAENLSRSEVLAWLKEHKMEKTKQFELLDISWLIESMKVGKPVDTKGKYQLAESGEMSANPDPTEGRENELPPTMKTVSPYACQRRTTLNNHNQRFTDALEILAENYEFKRNDDTALEFRRAISVLKSLPFEVRSLKDTEGLPWIGDEVKGIMEEIIEVGNSREVQAVLNDEWYQSFHRFVSVFGVGVKTADKWYRMGLRTLEDVRSSKTLKLTPMQKAGLSYYEDLARGVTKAEADAISLLVQDAVATFDPDALVEIVGGFRRGKPRGHDVDLLISSPGAEKEQEDQLLQKVTNLWKKQGLLLYGRLEWTQWEDGKLPSGKADVGDAGAKCFLILKLYDHKVDKSKWEMPTGSNMGEAKPWKAIRVDLLRCPYGGFAFAMLSWTGSRMFRRDLRWYATDEKNMMLDNHALYDLTKKIFLKAKSEEEIFAHLGLEYLEPFERNA

SEQ ID NO: 2641 - DNA, 1587 bp, synthetic construct
  misc_feature 1..1587: note = Variant of terminal deoxynucleotidyltransferase
  source 1..1587: mol_type = other DNA
atgcaccatcatcatcatcatggcgggagcagttcgcacggcatccgtaccatcgattcggacttcgggaagaaacagcagaaaaaaatggataaccacgatagttccgccatctatgaaatcaaatttcacgagtttgtgctgttcattctcgaagaaaaaatgggtgcgaatcgtcgtactttcctgacagatttagcccgcaagaaagggttccgcgtcgagaatgaactgtcagacagcgttacccacatcgtggcagaaaatctgtcacgctctgaagtattggcttggctgaaagaacacaagatggagaagaccaagcaattcgaactgctggatattagctggcttatcgaaagcatgaaagttggtaaaccggtggacaccaaggggaaataccagttggcggaatcgggtgagatgagtgcgaacccagatccgacagagggtcgtgaaaacgagctgccgccgactatgaagaccgtttctccgtatgcgtgtcaacgccgcaccaccctgaacaaccataatcaacgttttacggacgcactggaaattcttgcggaaaattacgagttcaaacgcaacgatgatactgcgctggaatttcgtcgtgctatctccgtgctgaaaagccttccgtttgaggtacgtagcctgaaagacacggaaggaatgccctggatcggtgatgaagtcaaagggattatggaagaaatcatcgaggtcggggagtcgcgcgaagtgcaggccgtgctcaatgatgagtggtatcaaagcttccaccgctttaagagtgtctttggagtgggggtgaagacagcagacaagtggtaccgtatgggtctgcgcaccctcgaggatgttcgttccagcaagaccctgaagttgaccccgatgcagaaagcgggtctgtgctattatgaagatcttgctcgcggcgttacgaaagccgaagctgacgcgatttctctgctggttcaggatgcagtcgcaactttcgacccggatgcgctggtggagattgtcggtggatttcgtcgtgggaaacctcagggtcacgacgttgatctgcttatcagttctccgggagctgagaaagagcaagaagaccagctcctgcagaaagtgaccaatctgtggaagaaacaagggttgttgctgtacggtcgtctggaatggacccagtgggaagatgggaaactcccatccggtaaggctgacgtaggtgacgcgggtgcgaaatgctttctgatcctcaaactttatgatcataaagtggacaaaagcaaatgggaaatgccgacgggttcgaacatgggcgaggccaaaccgtggaaagcaattcgcgtagatctgctgcgttgcccctacggcggttttgcgtttgcgatgttgcagtggaccggaagccgcatgttccgccgtgatctgcgctggtacgccactgacgagaagaacatgatgctggacaatcatgcgctgtatgacctgaccaagaaaatctttctcaaagctaaatcggaagaggaaattttcgcacatctggggcttgaatacctggaaccgttcgaacgtaacgca

SEQ ID NO: 2642 - protein, 529 aa, synthetic construct
  REGION 1..529: note = Variant of terminal deoxynucleotidyltransferase
MHHHHHHGGSSSHGIRTIDSDFGKKQQKKMDNHDSSAIYEIKFHEFVLFILEEKMGANRRTFLTDLARKKGFRVENELSDSVTHIVAENLSRSEVLAWLKEHKMEKTKQFELLDISWLIESMKVGKPVDTKGKYQLAESGEMSANPDPTEGRENELPPTMKTVSPYACQRRTTLNNHNQRFTDALEILAENYEFKRNDDTALEFRRAISVLKSLPFEVRSLKDTEGMPWIGDEVKGIMEEIIEVGESREVQAVLNDEWYQSFHRFKSVFGVGVKTADKWYRMGLRTLEDVRSSKTLKLTPMQKAGLCYYEDLARGVTKAEADAISLLVQDAVATFDPDALVEIVGGFRRGKPQGHDVDLLISSPGAEKEQEDQLLQKVTNLWKKQGLLLYGRLEWTQWEDGKLPSGKADVGDAGAKCFLILKLYDHKVDKSKWEMPTGSNMGEAKPWKAIRVDLLRCPYGGFAFAMLQWTGSRMFRRDLRWYATDEKNMMLDNHALYDLTKKIFLKAKSEEEIFAHLGLEYLEPFERNA

SEQ ID NO: 2643 - DNA, 1587 bp, synthetic construct
  misc_feature 1..1587: note = Variant of terminal deoxynucleotidyltransferase
  source 1..1587: mol_type = other DNA
atgcaccatcatcatcatcatggcggtagcggcagccacggcattcgtaccatcgattcggacttcgggaagaaacaacagaaaaaaacggataaccacgatagttccgccatctatgaaatcaaatttcacgagtttgtgctgttcattctcgaagaaaaaatgggtgcgacgcgtcgtacttttctgacagatttagcccgcaagaaagggttccgcgtcgagaatgaactgtcagacagcgttacccacatcgtggcagaaaatctgtcacgctctgaagtattggcttggctgaaagaacacaagatggagaagaccaagcaattcgaactgctggatattagctggcttatcgaaagcatgaaagttggtaaaccggtggacaccaaggggaaataccagttggcggaatcgggtgagatgagtgcgaacccagatccgacagagggtcgtgaaaacgagctgcctcctactatgaagaccgtttctccgtatgcgtgtcaacgccgcaccaccctgaacaaccataatcaacgttttacggacgcactggaaattcttgcggaaaattacgagttcaaacgcaacgatgatactgcgctggaatttcgtcgtgctatctccgtgctgaaaagccttccgtttgaggtacgtagcctgaaagacacggaaggattgccctggatcggtgatgaagtcaaagggattatggaagaaatcatcgaggtcgggaattcgcgtgaagtgcaggccgtgctcaatgatgagtggtatcaatcgttccaccgctttgtcagtgtctttggagtgggggtgaagacagcagacaagtggtaccgtatgggtctgcgcaccctcgaggatgttcgttccagcaagaccctgaagttgaccccgatgcaggaagcgggtctgtgttattatgaagatcttgctcgcggcgttacgaaagccgaagctgacgcgatttctctgctggttcaggatgcagtcgcaactttcgacccggatgcgctggtggagattgtcggtggatttcgtcgtgggaaacctcaaggtcacgacgttgatctgcttatcagttctccgggagctgagaaagagcaagaagaccagctcctgcagaaagtgaccaatctgtggaagaaacaagggttgttgctgtacggtcgtctggaatggacccagtgggaagatgggaaactcccatccggtaaggctgacgtaggtgacgcgggtgcgaaatgctttctgatcctcaaactttatgatcataaagtggacaaaagcaaatgggaaatgccgacgggttcgaacatgggcgaggccaaaccgtggaaagcaattcgcgtagatctgctgcgttgcccctacggcggttttgcgtttgcgatgttgcagtggaccggaagccgcatgttccgccgtgatctgcgctggtacgccactgacgagaagaacatgatgctggacaatcatgcgctgtatgacctgaccaagaaaatctttctcaaagctaaatcggaagaggaaattttcgcacatctggggcttgaatacctggaaccgttcgaacgtaacgca

SEQ ID NO: 2644 - protein, 529 aa, synthetic construct
  REGION 1..529: note = Variant of terminal deoxynucleotidyltransferase
MHHHHHHGGSGSHGIRTIDSDFGKKQQKKTDNHDSSAIYEIKFHEFVLFILEEKMGATRRTFLTDLARKKGFRVENELSDSVTHIVAENLSRSEVLAWLKEHKMEKTKQFELLDISWLIESMKVGKPVDTKGKYQLAESGEMSANPDPTEGRENELPPTMKTVSPYACQRRTTLNNHNQRFTDALEILAENYEFKRNDDTALEFRRAISVLKSLPFEVRSLKDTEGLPWIGDEVKGIMEEIIEVGNSREVQAVLNDEWYQSFHRFVSVFGVGVKTADKWYRMGLRTLEDVRSSKTLKLTPMQEAGLCYYEDLARGVTKAEADAISLLVQDAVATFDPDALVEIVGGFRRGKPQGHDVDLLISSPGAEKEQEDQLLQKVTNLWKKQGLLLYGRLEWTQWEDGKLPSGKADVGDAGAKCFLILKLYDHKVDKSKWEMPTGSNMGEAKPWKAIRVDLLRCPYGGFAFAMLQWTGSRMFRRDLRWYATDEKNMMLDNHALYDLTKKIFLKAKSEEEIFAHLGLEYLEPFERNA

SEQ ID NO: 2645 - DNA, 1587 bp, synthetic construct
  misc_feature 1..1587: note = Variant of terminal deoxynucleotidyltransferase
  source 1..1587: mol_type = other DNA
atgcaccatcatcatcatcatggcgggagcggtgcgcacggcatcagtaccatcgattcggacttcgggaagaaacagcagaaaaaaatggataaccacgatagttccgccatctatgaaatcaaatttcacgagtttgtgctgttcattctcgaagaaaaaatgggtgcgactcgtcgtactttcctgacagatttagcccgcaagaaagggttccgcgtcgagaatgaactgtcagacagcgttacccacatcgtggcagaaaatctgtcacgctctgaagtattggcttggctgaaagaacacaagatggagaagaccaagcaattcgaactgctggatattagctggcttatcgaaagcatgaaagttggtaaaccggtggacaccaaggggaaataccagttggcggaatcgggtgagatgagtgcgaacccagatccgacagagggtcgtgaaaacgagctgccggcgactatgaagaccgtttctccgtatgcgtgtcaacgccgcaccaccctgaacaaccataatcaacgttttacggacgcactggaaattcttgcggaaaattacgagttcaaacgcaacgatgatactgcgctggaatttcgtcgtgctatctccgtgctgaaaagccttccgtttgaggtacgtagcctgaaagacacggaaggattgccctggatcggtgatgaagtcaaagggattatggaagaaatcatcgaggtcggggagtcgctgcgcgtgcaggccgtgctcaatgatgagtggtatcaaagcttccaccgctttaagagtgtctttggagtgggggtgaagacagcagacaagtggtaccgtatgggtctgcgcaccctcgaggatgttcgttccagcaagaccctgaagttgaccccgatgcagaaagcgggtctgtgctattatgaagatcttgctcgcggcgttacgaaagccgaagctgacgcgatttctctgctggttcaggatgcagtcgcaactttcgacccggatgcgctggtggagattgtcggtggatttcgtcgtgggaaacctcagggtcacgacgttgatctgcttatcagttctccgggagctgagaaagagcaagaagaccagctcctgcagaaagtgaccaatctgtggaagaaacaagggttgttgctgtacggtcgtctggaatggacccagtgggaagatgggaaactcccatccggtaaggctgacgtaggtgacgcgggtgcgaaatgctttctgatcctcaaactttatgatcataaagtggacaaaagcaaatgggaaatgccgacgggttcgaacatgggcgaggccaaaccgtggaaagcaattcgcgtagatctgctgcgttgcccctacggcggttttgcgtttgcgatgttgcagtggaccggaagccgcatgttccgccgtgatctgcgctggtacgccactgacgagaagaacatgatgctggacaatcatgcgctgtatgacctgaccaagaaaatctttctcaaagctaaatcggaagaggaaattttcgcacatctggggcttgaatacctggaaccgttcgaacgtaacgca

SEQ ID NO: 2646 - protein, 529 aa, synthetic construct
  REGION 1..529: note = Variant of terminal deoxynucleotidyltransferase
MHHHHHHGGSGAHGISTIDSDFGKKQQKKMDNHDSSAIYEIKFHEFVLFILEEKMGATRRTFLTDLARKKGFRVENELSDSVTHIVAENLSRSEVLAWLKEHKMEKTKQFELLDISWLIESMKVGKPVDTKGKYQLAESGEMSANPDPTEGRENELPATMKTVSPYACQRRTTLNNHNQRFTDALEILAENYEFKRNDDTALEFRRAISVLKSLPFEVRSLKDTEGLPWIGDEVKGIMEEIIEVGESLRVQAVLNDEWYQSFHRFKSVFGVGVKTADKWYRMGLRTLEDVRSSKTLKLTPMQKAGLCYYEDLARGVTKAEADAISLLVQDAVATFDPDALVEIVGGFRRGKPQGHDVDLLISSPGAEKEQEDQLLQKVTNLWKKQGLLLYGRLEWTQWEDGKLPSGKADVGDAGAKCFLILKLYDHKVDKSKWEMPTGSNMGEAKPWKAIRVDLLRCPYGGFAFAMLQWTGSRMFRRDLRWYATDEKNMMLDNHALYDLTKKIFLKAKSEEEIFAHLGLEYLEPFERNA

SEQ ID NO: 2647 - DNA, 1587 bp, synthetic construct
  misc_feature 1..1587: note = Variant of terminal deoxynucleotidyltransferase
  source 1..1587: mol_type = other DNA
atgcaccatcatcatcatcatggcggtagcggcagccacggcattcgtaccatcgattcggacttcgggaagaaacaacagaaaaaaacggataaccacgatagttccgccatctatgaaatcaaatttcacgagtttgtgctgttcattctcgaagaaaaaatgggtgcgacgcgtcgtacttttctgacagatttagcccgcaagaaggggttccgcgtcgagaatgaactgtcagacagcgttacccacatcgtggcagaaaatctgtcacgctctgaagtattggcttggctgaaagaacacaagatggagaagaccaagcaattcgaactgctggatattagctggcttatcgaaagcatgaaagttggtaaaccggtggacaccaaggggaaataccagttggcggaatcgggtgagatgagtgcgaacccagatccgacagagggtcgtgaaaacgagctgcctcctactatgaagaccgtttctccgtatgcgtgtcaacgccgcaccaccctgaacaaccataatcaacgttttacggacgcactggaaattcttcgcgaaaattacgagttcaaacgcaacgatgatactgcgctggaatttcgtcgtgctatctccgtgctgaaaagccttccgtttgaggtacgtagcctgaaagacacggaaggattgccctggatcggtgatgaagtcaaagggattatggaagaaatcatcgaggtcgggaattcgcgtgaagtgcaggccgtgctcaatgatgagtggtatcaagcgttccaccgctttgtcagtgtctttggagtgggggtgaagacagcagacaagtggtaccgtatgggtctgcgcaccctcgaggatgttcgttccagcaagaccctgaagttgaccccgatgcagaaagcgggtctgtgttattatgaagatcttgctcgcggcgttacgaaagccgaagctgacgcgatttctctgctggttcaggatgcagtcgcaactttcgacccggatgcgctggtggagattgtcggtggatttcgtcgtgggaaacctcgcggtcacgacgttgatctgcttatcagttctccgggagctgagaaagagcaagaagaccagctcctgcagaaagtgaccaatctgtggaagaaacaagggttgttgctgtacggtcgtctggaatggacccagtgggaagatgggaaactcccatccggtaaggctgacgtaggtgacgcgggtgcgaaatgctttctgatcctcaaactttatgatcataaagtggacaaaagcaaatgggaaatgccgacgggttcgaacatgggcgaggccaaaccgtggaaagcaattcgcgtagatctgctgcgttgcccctacggcggttttgcgtttgagatgttgagctggaccggaagccgcatgttccgccgtgatctgcgctggtacgccactgacgagaagaacatgatgctggacaatcatgcgctgtatgacctgaccaagaaaatctttctcaaagctaaatcggaagaggaaattttcgcacatctggggcttgaatacctggaaccgttcgaacgtaacgca

SEQ ID NO: 2648 - protein, 529 aa, synthetic construct
  REGION 1..529: note = Variant of terminal deoxynucleotidyltransferase
MHHHHHHGGSGSHGIRTIDSDFGKKQQKKTDNHDSSAIYEIKFHEFVLFILEEKMGATRRTFLTDLARKKGFRVENELSDSVTHIVAENLSRSEVLAWLKEHKMEKTKQFELLDISWLIESMKVGKPVDTKGKYQLAESGEMSANPDPTEGRENELPPTMKTVSPYACQRRTTLNNHNQRFTDALEILRENYEFKRNDDTALEFRRAISVLKSLPFEVRSLKDTEGLPWIGDEVKGIMEEIIEVGNSREVQAVLNDEWYQAFHRFVSVFGVGVKTADKWYRMGLRTLEDVRSSKTLKLTPMQKAGLCYYEDLARGVTKAEADAISLLVQDAVATFDPDALVEIVGGFRRGKPRGHDVDLLISSPGAEKEQEDQLLQKVTNLWKKQGLLLYGRLEWTQWEDGKLPSGKADVGDAGAKCFLILKLYDHKVDKSKWEMPTGSNMGEAKPWKAIRVDLLRCPYGGFAFEMLSWTGSRMFRRDLRWYATDEKNMMLDNHALYDLTKKIFLKAKSEEEIFAHLGLEYLEPFERNA

SEQ ID NO: 2649 - DNA, 1587 bp, synthetic construct
  misc_feature 1..1587: note = Variant of terminal deoxynucleotidyltransferase
  source 1..1587: mol_type = other DNA
atgcaccatcatcatcatcatggcggtagcggcagccacggcattcgtaccatcgattcggacttcgggaagaaacagcagaaaaaaatggataaccacgatagttccgccatctatgaaatcaaatttcacgagtttgtgctgttcattctcgaagaaaaaatgggtgcgactcgtcgtactttcctgacagatttagcccgcaagaaagggttccgcgtcgagaatgaactgtcagacagcgttacccacatcgtggcagaaaatctgtcacgctctgaagtattggcttggctgaaagaacacaagatggagaagaccaagcaattcgaactgctggatattagctggcttatcgaaagcatgaaagttggtaaaccggtggacaccaaggggaaataccagttggcggaatcgggtgagatgagtgcgaacccagatccgacagagggtcgtgaaaacgagctgccgccgactatgaagaccgtttctccgtatgcgtgtcaacgccgcaccaccctgaacaaccataatcaacgttttacggacgcactggaaattcttgcggaaaattacgagttcaaacgcaacgatgatactgcgctggaatttcgtcgtgctatctccgtgctgaaaagccttccgtttgaggtacgtagcctgaaagacacggaaggattgccctggatcggtgatgaagtcaaagggattatggaagaaatcatcgaggtcggggagtcgcgccgcgtgcaggccgtgctcaatgatgagtggtatcaaagcttccaccgctttaagagtgtctttggagtgggggtgaagacagcagacaagtggtaccgtatgggtctgcgcaccctcgaggatgttcgttccagcaagaccctgaagttgaccccgatgcagaaagcgggtctgtgctattatgaagatcttgctcgcggcgttacgaaagccgaagctgacgcgatttctctgctggttcaggatgcagtcgcaactttcgacccggatgcgctggtggagattgtcggtggatttcgtcgtgggaaacctcagggtcacgacgttgatctgcttatcagttctccgggagctgagaaagagcaagaagaccagctcctgcagaaagtgaccaatctgtggaagaaacaagggttgttgctgtacggtcgtctggaatggacccagtgggaagatgggaaactcccatccggtaaggctgacgtaggtgacgcgggtgcgaaatgctttctgatcctcaaactttatgatcataaagtggacaaaagcaaatgggaaatgccgacgggttcgaacatgggcgaggccaaaccgtggaaagcaattcgcgtagatctgctgcgttgcccctacggcggttttgcgtttgcgatgttgcagtggaccggaagccgcatgttccgccgtgatctgcgctggtacgccactgacgagaagaacatgatgctggacaatcatgcgctgtatgacctgaccaagaaaatctttctcaaagctaaatcggaagaggaaattttcgcacatctggggcttgaatacctggaaccgttcgaacgtaacgca

SEQ ID NO: 2650 - protein, 529 aa, synthetic construct
  REGION 1..529: note = Variant of terminal deoxynucleotidyltransferase
MHHHHHHGGSGSHGIRTIDSDFGKKQQKKMDNHDSSAIYEIKFHEFVLFILEEKMGATRRTFLTDLARKKGFRVENELSDSVTHIVAENLSRSEVLAWLKEHKMEKTKQFELLDISWLIESMKVGKPVDTKGKYQLAESGEMSANPDPTEGRENELPPTMKTVSPYACQRRTTLNNHNQRFTDALEILAENYEFKRNDDTALEFRRAISVLKSLPFEVRSLKDTEGLPWIGDEVKGIMEEIIEVGESRRVQAVLNDEWYQSFHRFKSVFGVGVKTADKWYRMGLRTLEDVRSSKTLKLTPMQKAGLCYYEDLARGVTKAEADAISLLVQDAVATFDPDALVEIVGGFRRGKPQGHDVDLLISSPGAEKEQEDQLLQKVTNLWKKQGLLLYGRLEWTQWEDGKLPSGKADVGDAGAKCFLILKLYDHKVDKSKWEMPTGSNMGEAKPWKAIRVDLLRCPYGGFAFAMLQWTGSRMFRRDLRWYATDEKNMMLDNHALYDLTKKIFLKAKSEEEIFAHLGLEYLEPFERNA

SEQ ID NO: 2651 - DNA, 1587 bp, synthetic construct
  misc_feature 1..1587: note = Variant of terminal deoxynucleotidyltransferase
  source 1..1587: mol_type = other DNA
atgcaccatcatcatcatcatggcaccagcggttcgcacggcatcagtaccatcgattcggacttcgggaagaaacagcagaaaaaaatggataaccacgatagttccgccatctatgaaatcaaatttcacgagtttgtgctgttcattctcgaagaaaaaatgggtgcgactcgtcgtacttggctgacagatttagcccgcaagaaagggttccgcgtcgagaatgaactgtcagacagcgttacccacatcgtggcagaaaatctgtcacgctctgaagtattggcttggctgaaagaacacaagatggagaagaccaagcaattcgaactgctggatattagctggcttatcgaaagcatgaaagttggtaaaccggtggacaccaaggggaaataccagttggcggaatcgggtgagatgagtgcgaacccagatccgacagagggtcgtgaaaacgagctgctgccgactatgaagaccgtttctccgtatgcgtgtcaacgccgcaccaccctgaacaaccataatcaacgttttacggacgcactggaaattcttgcggaaaattacgagttcaaacgcaacgatgatactgcgctggaatttcgtcgtgctatctccgtgctgaaaagccttccgtttgaggtacgtagcctgaaagacacggaaggattgccctggatcggtgatgaagtcaaagggattatggaagaaatcatcgaggtcggggagtcgcgccgcgtgcaggccgtgctcaatgatgagtggtatcaaagcttccaccgctttaagagtgtctttggagtgggggtgaagacagcagacaagtggtaccgtatgggtctgcgcaccctcgaggatgttcgttccagcaagaccctgaagttgaccccgatgcagaaagcgggtctgtgctattatgaagatcttgctcgcggcgttacgaaagccgaagctgacgcgatttctctgctggttcaggatgcagtcgcaactttcgacccggatgcgctggtggagattgtcggtggatttcgtcgtgggaaacctcagggtcacgacgttgatctgcttatcacttctccgggagctgagaaagagcaagaagaccagctcctgcagaaagtgaccaatctgtggaagaaacaagggttgttgctgtacggtcgtctggaatggacccagtgggaagatgggaaactcccatccggtaaggctgacgtaggtgacgcgggtgcgaaatgctttctgatcctcaaactttatgatcataaagtggacaaaagcaaatgggaaatgccgacgggttcgaacatgggcgaggccaaaccgtggaaagcaattcgcgtagatctgctgcgttgcccctacggcggttttgcgtttgcgatgttgcagtggaccggaagccgcatgttccgccgtgatctgcgctggtacgccactgacgagaagaacatgatgctggacaatcatgcgctgtatgacctgaccaagaaaatctttctcaaagctaaatcggaagaggaaattttcgcacatctggggcttgaatacctggaaccgttcgaacgtaacgca

SEQ ID NO: 2652 - protein, 529 aa, synthetic construct
  REGION 1..529: note = Variant of terminal deoxynucleotidyltransferase
MHHHHHHGTSGSHGISTIDSDFGKKQQKKMDNHDSSAIYEIKFHEFVLFILEEKMGATRRTWLTDLARKKGFRVENELSDSVTHIVAENLSRSEVLAWLKEHKMEKTKQFELLDISWLIESMKVGKPVDTKGKYQLAESGEMSANPDPTEGRENELLPTMKTVSPYACQRRTTLNNHNQRFTDALEILAENYEFKRNDDTALEFRRAISVLKSLPFEVRSLKDTEGLPWIGDEVKGIMEEIIEVGESRRVQAVLNDEWYQSFHRFKSVFGVGVKTADKWYRMGLRTLEDVRSSKTLKLTPMQKAGLCYYEDLARGVTKAEADAISLLVQDAVATFDPDALVEIVGGFRRGKPQGHDVDLLITSPGAEKEQEDQLLQKVTNLWKKQGLLLYGRLEWTQWEDGKLPSGKADVGDAGAKCFLILKLYDHKVDKSKWEMPTGSNMGEAKPWKAIRVDLLRCPYGGFAFAMLQWTGSRMFRRDLRWYATDEKNMMLDNHALYDLTKKIFLKAKSEEEIFAHLGLEYLEPFERNA

SEQ ID NO: 2653 - DNA, 1587 bp, synthetic construct
  misc_feature 1..1587: note = Variant of terminal deoxynucleotidyltransferase
  source 1..1587: mol_type = other DNA
atgcaccatcatcatcatcatggcggtagcggcagccacggcattcgtaccatcgattcggacttcgggaagaaacagcagaaaaaaatggataaccacgatagttccgccatctatgaaatcaaatttcacgagtttgtgctgttcattctcgaagaaaaaatgggtgcgacgcgtcgtacttttctgacagatttagcccgcaagaaagggttccgcgtcgagaatgaactgaccgacgaagttacccacatcgtggcagaaaatctgtcacgctctgaagtattggcttggctgaaagaacacaagatggagaagaccaagcaattcgaactgctggatattagctggcttatcgaaagcatgaaagttggtaaaccggtggacaccaaggggaaataccagttggcggaatcgggtgagatgagtgcgaacccagatccgacagagggtcgtgaaaacgagctgcctcctactatgaagaccgtttctccgtatgcgtgtcaacgccgcaccaccctgaacaaccataatcaacgttttacggacgcactggaaattcttgcggaaaattacgagttcaaacgcaacgatgatactgcgctggaatttcgtcgtgctatctccgtgctgaaaagccttccgtttgaggtacgtagcctgaaagacacggaaggattgccctggatcggtgatgaagtcaaagggattatggaagaaatcatcgaggtcgggaattcgcgtgaagtgcaggccgtgctcaatgatgagtggtatcaaagcttccaccgctttaagagtgtctttggagtgggggtgaagacagcagacaagtggtaccgtatgggtctgcgcaccctcgaggatgttcgttccagcaagaccctgaagttgaccccgatgcagaaagcgggtctgtgctattatgaagatcttgctcgcggcgttacgaaggccgaagctgacgcgatttctctgctggttcaggatgcagtcgcaactttcgacccggatgcgctggtggagattgtcggtggatttcgtcgtgggaaacctcagggtcacgacgttgatctgcttatcagttctccgggagctgagaaagagcaagaagaccagctcctgcagaaagtgaccaatctgtggaagaaacaagggttgttgctgtacggtcgtctggaatggacccagtgggaagatgggaaactcccatccggtaaggctgacgtaggtgacgcgggtgcgaaatgctttctgatcctcaaactttatgatcataaagtggacaaaagcaaatgggaaatgccgacgggttcgaacatgggcgaggccaaaccgtggaaagcaattcgcgtagatctgctgcgttgcccctacggcggttttgcgtttgcgatgttgcagtggaccggaagccgcatgttccgccgtgatctgcgctggtacgccactgacgagaagaacatgatgctggacaatcatgcgctgtatgacctgaccaagaaaatctttctcaaagctaaatcggaagaggaaattttcgcacatctggggcttgaatacctggaaccgttcgaacgtaacgca

SEQ ID NO: 2654 - protein, 529 aa, synthetic construct
  REGION 1..529: note = Variant of terminal deoxynucleotidyltransferase
MHHHHHHGGSGSHGIRTIDSDFGKKQQKKMDNHDSSAIYEIKFHEFVLFILEEKMGATRRTFLTDLARKKGFRVENELTDEVTHIVAENLSRSEVLAWLKEHKMEKTKQFELLDISWLIESMKVGKPVDTKGKYQLAESGEMSANPDPTEGRENELPPTMKTVSPYACQRRTTLNNHNQRFTDALEILAENYEFKRNDDTALEFRRAISVLKSLPFEVRSLKDTEGLPWIGDEVKGIMEEIIEVGNSREVQAVLNDEWYQSFHRFKSVFGVGVKTADKWYRMGLRTLEDVRSSKTLKLTPMQKAGLCYYEDLARGVTKAEADAISLLVQDAVATFDPDALVEIVGGFRRGKPQGHDVDLLISSPGAEKEQEDQLLQKVTNLWKKQGLLLYGRLEWTQWEDGKLPSGKADVGDAGAKCFLILKLYDHKVDKSKWEMPTGSNMGEAKPWKAIRVDLLRCPYGGFAFAMLQWTGSRMFRRDLRWYATDEKNMMLDNHALYDLTKKIFLKAKSEEEIFAHLGLEYLEPFERNA

SEQ ID NO: 2655 - DNA, 1587 bp, synthetic construct
  misc_feature 1..1587: note = Variant of terminal deoxynucleotidyltransferase
  source 1..1587: mol_type = other DNA
atgcaccatcatcatcatcatggcggtagcggcagccacggcattcgtaccatcgattcggacttcgggaagaaacagcagaaaaaaatggataaccacgatagttccgccattggggaaatcaaatttcacgagtttgtgctgttcattctcgaagaaaaaatgggtgcgacgcgtcgtacttttctgacagatttagcccgcaagaaagggttccgcgtcgagaatgaactgaccgacagcgttacccacatcgtggcagaaaatctgtcacgctctgaagtattggcttggctgaaagaacacaagatggagaagaccaagcaattcgaactgctggatattagctggcttatcgaaagcatgaaagttggtaaaccggtggacaccaaggggaaataccagttggcggaatcgggtgagatgagtgcgaacccagatccgacagagggtcgtgaaaacgagctgcctcctactatgaagaccgtttctccgtatgcgtgtcaacgccgcaccaccctgaacaaccataatcaacgttttacggacgcactggaaattcttgcggaaaattacgagttcaaacgcaacgatgatactgcgctggaatttcgtcgtgctatctccgtgctgaaaagccttccgtttgaggtacgtagcctgaaagacacggaaggattgccctggatcggtgatgaagtcaaagggattatggaagaaatcatcgaggtcgggaattcgcgtgaagtgcaggccgtgctcaatgatgagtggtatcaaagcttccaccgctttaagagtgtctttggagtgggggtgaagacagcagacaagtggtaccgtatgggtctgcgcaccctcgaggatgttcgttccagcaagaccctgaagttgaccccgatgcagaaagcgggtctgtgctattatgaagatcttgctcgcggcgttacgaaggccgaagctgacgcgatttctctgctggttcaggatgcagtcgcaactttcgacccggatgcgctggtggagattgtcggtggatttcgtcgtgggaaacctcagggtcacgacgttgatctgcttatcagttctccgggagctgagaaagagcaagaagaccagctcctgcagaaagtgaccaatctgtggaagaaacaagggttgttgctgtacggtcgtctggaatggacccagtgggaagatgggaaactcccatccggtaaggctgacgtaggtgacgcgggtgcgaaatgctttctgatcctcaaactttatgatcataaagtggacaaaagcaaatgggaaatgccgacgggttcgaacatgggcgaggccaaaccgtggaaagcaattcgcgtagatctgctgcgttgcccctacggcggttttgcgtttgcgatgttgcagtggaccggaagccgcatgttccgccgtgatctgcgctggtacgccactgacgagaagaacatgatgctggacaatcatgcgctgtatgacctgaccaagaaaatctttctcaaagctaaatcggaagaggaaattttcgcacatctggggcttgaatacctggaaccgttcgaacgtaacgca

SEQ ID NO: 2656 - protein, 529 aa, synthetic construct
  REGION 1..529: note = Variant of terminal deoxynucleotidyltransferase
MHHHHHHGGSGSHGIRTIDSDFGKKQQKKMDNHDSSAIGEIKFHEFVLFILEEKMGATRRTFLTDLARKKGFRVENELTDSVTHIVAENLSRSEVLAWLKEHKMEKTKQFELLDISWLIESMKVGKPVDTKGKYQLAESGEMSANPDPTEGRENELPPTMKTVSPYACQRRTTLNNHNQRFTDALEILAENYEFKRNDDTALEFRRAISVLKSLPFEVRSLKDTEGLPWIGDEVKGIMEEIIEVGNSREVQAVLNDEWYQSFHRFKSVFGVGVKTADKWYRMGLRTLEDVRSSKTLKLTPMQKAGLCYYEDLARGVTKAEADAISLLVQDAVATFDPDALVEIVGGFRRGKPQGHDVDLLISSPGAEKEQEDQLLQKVTNLWKKQGLLLYGRLEWTQWEDGKLPSGKADVGDAGAKCFLILKLYDHKVDKSKWEMPTGSNMGEAKPWKAIRVDLLRCPYGGFAFAMLQWTGSRMFRRDLRWYATDEKNMMLDNHALYDLTKKIFLKAKSEEEIFAHLGLEYLEPFERNA

SEQ ID NO: 2657 - DNA, 1587 bp, synthetic construct
  misc_feature 1..1587: note = Variant of terminal deoxynucleotidyltransferase
  source 1..1587: mol_type = other DNA
atgcaccatcatcatcatcatggcggtagcggcagccacggcattcgtaccatcgattcggacttcgggaagaaacagcagaaaaaaatggataaccacgatagttccgccattggggaaatcaaatttcacgagtttgtgctgttcattctcgaagaaaaaatgggtgcgacgcgtcgtacttttctgacagatttagcccgcaagaaagggttccgcgtcgagaatgaactgtcagacagcgttacccacatcgtggcagaaaatctgtcacgctctgaagtattggcttggctgaaagaacacaagatggagaagaccaagcaattcgaactgctggatattagctggcttatcgaaagcatgaaagttggtaaaccggtggacaccaaggggaaataccagttggcggaatcgggtgagatgagtgcgaacccagatccgacagagggtcgtgaaaacgagctgcctcctactatgaagaccgtttctccgtatgcgtgtcaacgccgcaccaccctgaacaaccataatcaacgttttacggacgcactggaaattcttgcggaaaattacgagttcaaacgcaacgatgatactgcgctggaatttcgtcgtgctatctccgtgctgaaaagccttccgtttgaggtacgtagcctgaaagacacggaaggattgccctggatcggtgatgaagtcaaagggattatggaagaaatcatcgaggtcgggaattcgcgtgaagtgcaggccgtgctcaatgatgagtggtatcaaagcttccaccgctttaagagtgtctttggagtgggggtgaagacagcagacaagtggtaccgtatgggtctgcgcaccctcgaggatgttcgttccagcaagaccctgaagttgaccccgatgcagaaagcgggtctgtgctattatgaagatcttgctcgcggcgttacgaaagccgaagctgacgcgatttctctgctggttcaggatgcagtcgcaactttcgacccggatgcgctggtggagattgtcggtggatttcgtcgtgggaaacctcagggtcacgacgttgatctgcttatcagttctccgggagctgagaaagagcaagaagaccagctcctgcagaaagtgaccaatctgtggaagaaacaagggttgttgctgtacggtcgtctggaatggacccagtgggaagatgggaaactcccatccggtaaggctgacgtaggtgacgcgggtgcgaaatgctttctgatcctcaaactttatgatcataaagtggacaaaagcaaatgggaaatgccgacgggttcgaacatgggcgaggccaaaccgtggaaagcaattcgcgtagatctgctgcgttgcccctacggcggttttgcgtttgcgatgttgcagtggaccggaagccgcatgttccgccgtgatctgcgctggtacgccactgacgagaagaacatgatgctggacaatcatgcgctgtatgacctgaccaagaaaatctttctcaaagctaaatcggaagaggaaattttcgcacatctggggcttgaatacctggaaccgttcgaacgtaacgca

SEQ ID NO: 2658 - protein, 529 aa, synthetic construct
  REGION 1..529: note = Variant of terminal deoxynucleotidyltransferase
MHHHHHHGGSGSHGIRTIDSDFGKKQQKKMDNHDSSAIGEIKFHEFVLFILEEKMGATRRTFLTDLARKKGFRVENELSDSVTHIVAENLSRSEVLAWLKEHKMEKTKQFELLDISWLIESMKVGKPVDTKGKYQLAESGEMSANPDPTEGRENELPPTMKTVSPYACQRRTTLNNHNQRFTDALEILAENYEFKRNDDTALEFRRAISVLKSLPFEVRSLKDTEGLPWIGDEVKGIMEEIIEVGNSREVQAVLNDEWYQSFHRFKSVFGVGVKTADKWYRMGLRTLEDVRSSKTLKLTPMQKAGLCYYEDLARGVTKAEADAISLLVQDAVATFDPDALVEIVGGFRRGKPQGHDVDLLISSPGAEKEQEDQLLQKVTNLWKKQGLLLYGRLEWTQWEDGKLPSGKADVGDAGAKCFLILKLYDHKVDKSKWEMPTGSNMGEAKPWKAIRVDLLRCPYGGFAFAMLQWTGSRMFRRDLRWYATDEKNMMLDNHALYDLTKKIFLKAKSEEEIFAHLGLEYLEPFERNA

SEQ ID NO: 2659 - DNA, 1587 bp, synthetic construct
  misc_feature 1..1587: note = Variant of terminal deoxynucleotidyltransferase
  source 1..1587: mol_type = other DNA
atgcaccatcatcatcatcatggcggtagcggcagccacggcattcgtaccatcgattcggacttcgggaagaaacagcagaaaaaaatggataaccacgatagttccgccatctatgaaatcaaatttcacgagtttgtgctgttcattctcgaagaaaaaatgggtgcgacgcgtcgtacttttctgacagatttagcccgcaagaaagggttccgcgtcgagaatgaactgtcagacagcgttacccacatcgtggcagaaaatctgtcacgctctgaagtattggcttggctgaaagaacacaagatggagaagaccaagcaattcgaactgctggatattagctggcttatcgaaagcatgaaagttggtaaaccggtggacaccaaggggaaataccagttggcggaatcgggtgagatgagtgcgaacccagatccgacagagggtcgtgaaaacgagctgcctcctactatgaagaccgtttctccgtatgcgtgtcaacgccgcaccaccctgaacaaccataatcaacgttttacggacgcactggaaattcttgcggaaaattacgagttcaaacgcaacgatgatactgcgctggaatttcgtcgtgctatctccgtgctgaaaagccttccgtttgaggtacgtagcctgaaagacacggaaggattgccctggatcggtgatgaagtcaaagggattatggaagaaatcatcgaggtcgggaattcgcgtgaagtgcaggccgtgctcaatgatgagtggtatcaagcgttccaccgctttaagagtgtctttggagtgggggtgaagacagcagacaagtggtaccgtatgggtctgcgcaccctcgaggatgttcgttccagcaagaccctgaagttgaccccgatgcagaaagcgggtctgtgttattatgaagatcttgctcgcggcgttacgaaagccgaagctgacgcgatttctctgctggttcaggatgcagtcgcaactttcgacccggatgcgctggtggagattgtcggtggatttcgtcgtgggaaacctcgcggtcacgacgttgatctgcttatcagttctccgggagctgagaaagagcaagaagaccagctcctgcagaaagtgaccaatctgtggaagaaacaagggttgttgctgtacggtcgtctggaatggacccagtgggaagatgggaaactcccatccggtaaggctgacgtaggtgacgcgggtgcgaaatgctttctgatcctcaaactttatgatcataaagtggacaaaagcaaatgggaaatgccgacgggttcgaacatgggcgaggccaaaccgtggaaagcaattcgcgtagatctgctgcgttgcccctacggcggttttgcgtttgcgatgttgcagtggaccggaagccgcatgttccgccgtgatctgcgctggtacgccactgacgagaagaacatgatgctggacaatcatgcgctgtatgacctgaccaagaaaatctttctcaaagctaaatcggaagaggaaattttcgcacatctggggcttgaatacctggaaccgttcgaacgtaacgca

SEQ ID NO: 2660 - protein, 529 aa, synthetic construct
  REGION 1..529: note = Variant of terminal deoxynucleotidyltransferase
MHHHHHHGGSGSHGIRTIDSDFGKKQQKKMDNHDSSAIYEIKFHEFVLFILEEKMGATRRTFLTDLARKKGFRVENELSDSVTHIVAENLSRSEVLAWLKEHKMEKTKQFELLDISWLIESMKVGKPVDTKGKYQLAESGEMSANPDPTEGRENELPPTMKTVSPYACQRRTTLNNHNQRFTDALEILAENYEFKRNDDTALEFRRAISVLKSLPFEVRSLKDTEGLPWIGDEVKGIMEEIIEVGNSREVQAVLNDEWYQAFHRFKSVFGVGVKTADKWYRMGLRTLEDVRSSKTLKLTPMQKAGLCYYEDLARGVTKAEADAISLLVQDAVATFDPDALVEIVGGFRRGKPRGHDVDLLISSPGAEKEQEDQLLQKVTNLWKKQGLLLYGRLEWTQWEDGKLPSGKADVGDAGAKCFLILKLYDHKVDKSKWEMPTGSNMGEAKPWKAIRVDLLRCPYGGFAFAMLQWTGSRMFRRDLRWYATDEKNMMLDNHALYDLTKKIFLKAKSEEEIFAHLGLEYLEPFERNA

SEQ ID NO: 2661 - DNA, 1587 bp, synthetic construct
  misc_feature 1..1587: note = Variant of terminal deoxynucleotidyltransferase
  source 1..1587: mol_type = other DNA
atgcaccatcatcatcatcatggcggtagcggcagccacggcatccgtaccatcgattcggacttcgggaagaaacagcagaaaaaaatggataaccacgatagttccgccatctatgaaatcaaatttcacgagtttgtgctgttcattctcgaagaaaaaatgggtgcgaatcgtcgtactttcctgacagatttagcccgcaagaaagggttccgcgtcgagaatgaactgtcagacagcgttacccacatcgtggcagaaaatctgtcacgctctgaagtattggcttggctgaaagaacacaagatggagaagaccaagcaattcgaactgctggatattagctggcttatcgaaagcatgaaagttggtaaaccggtggacaccaaggggaaataccagttggcggaatcgggtgagatgagtgcgaacccagatccgacagagggtcgtgaaaacgagctgctggcgactatgaagaccgtttctccgtatgcgtgtcaacgccgcaccaccctgaacaaccataatcaacgttttacggacgcactggaaattcttgcggaaaattacgagttcaaacgcaacgatgatactgcgctggaatttcgtcgtgctatctccgtgctgaaaagccttccgtttgaggtacgtagcctgaaagacacggaaggattgccctggatcggtgatgaagtcaaagggattatggaagaaatcatcgaggtcgggaactcgcgcgaagtgcaggccgtgctcaatgatgagtggtatcaaagcttccaccgctttaagagtgtctttggagtgggggtgaagacagcagacaagtggtaccgtatgggtctgcgcaccctcgaggatgttcgttccagcaagaccctgaagttgaccccgatgcagaaagcgggtctgtgctattatgaagatcttgctcgcggcgttacgaaagccgaagctgacgcgatttctctgctggttcaggatgcagtcgcaactttcgacccggatgcgctggtggagattgtcggtggatttcgtcgtgggaaacctcagggtcacgacgttgatctgcttatcacttctccgggagctgagaaagagcaagaagaccagctcctgcagaaagtgaccaatctgtggaagaaacaagggttgttgctgtacggtcgtctggaatggacccagtgggaagatgggaaactcccatccggtaaggctgacgtaggtgacgcgggtgcgaaatgctttctgatcctcaaactttatgatcataaagtggacaaaagcaaatgggaaatgccgacgggttcgaacatgggcgaggccaaaccgtggaaagcaattcgcgtagatctgctgcgttgcccctacggcggttttgcgtttgcgatgttgcagtggaccggaagccgcatgttccgccgtgatctgcgctggtacgccactgacgagaagaacatgatgctggacaatcatgcgctgtatgacctgaccaagaaaatctttctcaaagctaaatcggaagaggaaattttcgcacatctggggcttgaatacctggaaccgttcgaacgtaacgca

SEQ ID NO: 2662 - protein, 529 aa, synthetic construct
  REGION 1..529: note = Variant of terminal deoxynucleotidyltransferase
MHHHHHHGGSGSHGIRTIDSDFGKKQQKKMDNHDSSAIYEIKFHEFVLFILEEKMGANRRTFLTDLARKKGFRVENELSDSVTHIVAENLSRSEVLAWLKEHKMEKTKQFELLDISWLIESMKVGKPVDTKGKYQLAESGEMSANPDPTEGRENELLATMKTVSPYACQRRTTLNNHNQRFTDALEILAENYEFKRNDDTALEFRRAISVLKSLPFEVRSLKDTEGLPWIGDEVKGIMEEIIEVGNSREVQAVLNDEWYQSFHRFKSVFGVGVKTADKWYRMGLRTLEDVRSSKTLKLTPMQKAGLCYYEDLARGVTKAEADAISLLVQDAVATFDPDALVEIVGGFRRGKPQGHDVDLLITSPGAEKEQEDQLLQKVTNLWKKQGLLLYGRLEWTQWEDGKLPSGKADVGDAGAKCFLILKLYDHKVDKSKWEMPTGSNMGEAKPWKAIRVDLLRCPYGGFAFAMLQWTGSRMFRRDLRWYATDEKNMMLDNHALYDLTKKIFLKAKSEEEIFAHLGLEYLEPFERNA

SEQ ID NO: 2663 - DNA, 1587 bp, synthetic construct
  misc_feature 1..1587: note = Variant of terminal deoxynucleotidyltransferase
  source 1..1587: mol_type = other DNA
atgcaccatcatcatcatcatggcggtagcggcagccacggcattcgtaccatcgattcggacttcgggaagaaacaacagaaaaaaatggataaccacgatagttccgccatctatgaaatcaaatttcacgagtttgtgctgttcattctcgaagaaaaaatgggtgcgacgcgtcgtacttttctgacagatttagcccgcaaggcggggttccgcgtcgagaatgaactgtcagacagcgttacccacatcgtggcagaaaatctgtcacgctctgaagtattggcttggctgaaagaacacaagatggagaagaccaagcaattcgaactgctggatattagctggcttatcgaaagcatgaaagttggtaaaccggtggacaccaaggggaaataccagttggcggaatcgggtgagatgagtgcgaacccagatccgacagagggtcgtgaaaacgagctgcctcctactatgaagaccgtttctccgtatgcgtgtcaacgccgcaccaccctgaacaaccataatcaacgttttacggacgcactggaaattcttgcggaaaattacgagttcaaacgcaacgatgatactgcgctggaatttcgtcgtgctatctccgtgctgaaaagccttccgtttgaggtacgtagcctgaaagacacggaaggattgccctggatcggtgatgaagtcaaagggattatggaagaaatcatcgaggtcgggaattcgcgtgaagtgcaggccgtgctcaatgatgagtggtatcaaagcttccaccgctttaagagtgtctttggagtgggggtgaagacagcagacaagtggtaccgtatgggtctgcgcaccctcgaggatgttcgttccagcaagaccctgaagttgaccccgatgcagaaagcgggtctgtgctattatgaagatcttgctcgcggcgttacgaaagccgaagctgacgcgatttctctgctggttcaggatgcagtcgcaactttcgacccggatgcgctggtggagattgtcggtggatttcgtcgtgggaaacctcgcggtcacgacgttgatctgcttatcagttctccgggagctgagaaagagcaagaagaccagctcctgcagaaagtgaccaatctgtggaagaaacaagggttgttgctgtacggtcgtctggaatggacccagtgggaagatgggaaactcccatccggtaaggctgacgtaggtgacgcgggtgcgaaatgctttctgatcctcaaactttatgatcataaagtggacaaaagcaaatgggaaatgccgacgggttcgaacatgggcgaggccaaaccgtggaaagcaattcgcgtagatctgctgcgttgcccctacggcggttttgcgtttgcgatgttgcagtggaccggaagccgcatgttccgccgtgatctgcgctggtacgccactgacgagaagaacatgatgctggacaatcatgcgctgtatgacctgaccaagaaaatctttctcaaagctaaatcggaagaggaaattttcgcacatctggggcttgaatacctggaaccgttcgaacgtaacgca

SEQ ID NO: 2664 - protein, 529 aa, synthetic construct
  REGION 1..529: note = Variant of terminal deoxynucleotidyltransferase
MHHHHHHGGSGSHGIRTIDSDFGKKQQKKMDNHDSSAIYEIKFHEFVLFILEEKMGATRRTFLTDLARKAGFRVENELSDSVTHIVAENLSRSEVLAWLKEHKMEKTKQFELLDISWLIESMKVGKPVDTKGKYQLAESGEMSANPDPTEGRENELPPTMKTVSPYACQRRTTLNNHNQRFTDALEILAENYEFKRNDDTALEFRRAISVLKSLPFEVRSLKDTEGLPWIGDEVKGIMEEIIEVGNSREVQAVLNDEWYQSFHRFKSVFGVGVKTADKWYRMGLRTLEDVRSSKTLKLTPMQKAGLCYYEDLARGVTKAEADAISLLVQDAVATFDPDALVEIVGGFRRGKPRGHDVDLLISSPGAEKEQEDQLLQKVTNLWKKQGLLLYGRLEWTQWEDGKLPSGKADVGDAGAKCFLILKLYDHKVDKSKWEMPTGSNMGEAKPWKAIRVDLLRCPYGGFAFAMLQWTGSRMFRRDLRWYATDEKNMMLDNHALYDLTKKIFLKAKSEEEIFAHLGLEYLEPFERNA

SEQ ID NO: 2665 - DNA, 1587 bp, synthetic construct
  misc_feature 1..1587: note = Variant of terminal deoxynucleotidyltransferase
  source 1..1587: mol_type = other DNA
atgcaccatcatcatcatcatggcggtagcggcagccacggcattcgtaccatcgattcggacttcgggaagaaacagcagaaaaaaatggataaccacgatagttccgccacttatgaaatcaaatttcacgagtttgtgctgttcattctcgaagaaaaaatgggtgcgacgcgtcgtacttttctgacagatttagcccgcaagaaagggttccgcgtcgagaatgaactgtcagacagcgttacccacatcgtggcagaaaatctgtcacgctctgaagtattggcttggctgaaagaacacaagatggagaagaccaagcaattcgaactgctggatattagctggcttatcgaaagcatgaaagttggtaaaccggtggacaccaaggggaaataccagttggcggaatcgggtgagatgagtgcgaacccagatccgacagagggtcgtgaaaacgagctgcctcctactatgaagaccgtttctccgtatgcgtgtcaacgccgcaccaccctgaacaaccataatcaacgttttacggacgcactggaaattcttgcggaaaattacgagttcaaacgcctggatgatactgcgctggaatttcgtcgtgctatctccgtgctgaaaagccttccgtttgaggtacgtagcctgaaagacacggaaggattgccctggatcggtgatgaagtcaaagggattatggaagaaatcatcgaggtcgggaattcgcgtgaagtgcaggccgtgctcaatgatgagtggtatcaaagcttccaccgctttaagagtgtctttggagtgggggtgaagacagcagacaagtggtaccgtatgggtctgcgcaccctcgaggatgttcgttccagcaagaccctgaagttgaccccgatgcagaaagcgggtctgtgctattatgaagatcttgctcgcggcgttacgaaggccgaagctgacgcgatttctctgctggttcaggatgcagtcgcaactttcgacccggatgcgctggtggagattgtcggtggatttcgtcgtgggaaacctcagggtcacgacgttgatctgcttatcagttctccgggagctgagaaagagcaagaagaccagctcctgcagaaagtgaccaatctgtggaagaaacaagggttgttgctgtacggtcgtctggaatggacccagtgggaagatgggaaactcccatccggtaaggctgacgtaggtgacgcgggtgcgaaatgctttctgatcctcaaactttatgatcataaagtggacaaaagcaaatgggaaatgccgacgggttcgaacatgggcgaggccaaaccgtggaaagcaattcgcgtagatctgctgcgttgcccctacggcggttttgcgtttgcgatgttgcagtggaccggaagccgcatgttccgccgtgatctgcgctggtacgccactgacgagaagaacatgatgctggacaatcatgcgctgtatgacctgaccaagaaaatctttctcaaagctaaatcggaagaggaaattttcgcacatctggggcttgaatacctggaaccgttcgaacgtaacgca

SEQ ID NO: 2666 - protein, 529 aa, synthetic construct
  REGION 1..529: note = Variant of terminal deoxynucleotidyltransferase
MHHHHHHGGSGSHGIRTIDSDFGKKQQKKMDNHDSSATYEIKFHEFVLFILEEKMGATRRTFLTDLARKKGFRVENELSDSVTHIVAENLSRSEVLAWLKEHKMEKTKQFELLDISWLIESMKVGKPVDTKGKYQLAESGEMSANPDPTEGRENELPPTMKTVSPYACQRRTTLNNHNQRFTDALEILAENYEFKRLDDTALEFRRAISVLKSLPFEVRSLKDTEGLPWIGDEVKGIMEEIIEVGNSREVQAVLNDEWYQSFHRFKSVFGVGVKTADKWYRMGLRTLEDVRSSKTLKLTPMQKAGLCYYEDLARGVTKAEADAISLLVQDAVATFDPDALVEIVGGFRRGKPQGHDVDLLISSPGAEKEQEDQLLQKVTNLWKKQGLLLYGRLEWTQWEDGKLPSGKADVGDAGAKCFLILKLYDHKVDKSKWEMPTGSNMGEAKPWKAIRVDLLRCPYGGFAFAMLQWTGSRMFRRDLRWYATDEKNMMLDNHALYDLTKKIFLKAKSEEEIFAHLGLEYLEPFERNA

SEQ ID NO: 2667 - DNA, 1587 bp, synthetic construct
  misc_feature 1..1587: note = Variant of terminal deoxynucleotidyltransferase
  source 1..1587: mol_type = other DNA
atgcaccatcatcatcatcatggcggtagcggcagccacggcattcgtaccatcgattcggacttcgggaagaaacagcagaaaaaaatggataaccacgatagttccgccatttatgaaatcaaatttcacgagtttgtgctgttcattctcgaagaaaaaatgggtgcgacgcgtcgtacttttctgacagatttagcccgcaagaaagggttccgcgtcgagaatgaactgagcgacgaagttacccacatcgtggcagaaaatctgtcacgctctgaagtattggcttggctgaaagaacacaagatggagaagaccaagcaattcgaactgctggatattagctggcttatcgaaagcatgaaagttggtaaaccggtggacaccaaggggaaataccagttggcggaatcgggtgagatgagtgcgaacccagatccgacagagggtcgtgaaaacgagctgcctcctactatgaagaccgtttctccgtatgcgtgtcaacgccgcaccaccctgaacaaccataatcaacgttttacggacgcactggaaattcttgcggaaaattacgagttcaaacgcaacgatgatactgcgctggaatttcgtcgtgctatctccgtgctgaaaagccttccgtttgaggtacgtagcctgaaagacacggaaggattgccctggatcggtgatgaagtcaaagggattatggaagaaatcatcgaggtcgggaattcgcgtgaagtgcaggccgtgctcaatgatgagtggtatcaaagcttccaccgctttaagagtgtctttggagtgggggtgaagacagcagacaagtggtaccgtatgggtctgcgcaccctcgaggatgttcgttccagcaagaccctgaagttgaccccgatgcagaaagcgggtctgtgctattatgaagatcttgctcgcggcgttacgaaggccgaagctgacgcgatttctctgctggttcaggatgcagtcgcaactttcgacccggatgcgctggtggagattgtcggtggatttcgtcgtgggaaacctcagggtcacgacgttgatctgcttatcagttctccgggagctgagaaagagcaagaagaccagctcctgcagaaagtgaccaatctgtggaagaaacaagggttgttgctgtacggtcgtctggaatggacccagtgggaagatgggaaactcccatccggtaaggctgacgtaggtgacgcgggtgcgaaatgctttctgatcctcaaactttatgatcataaagtggacaaaagcaaatgggaaatgccgacgggttcgaacatgggcgaggccaaaccgtggaaagcaattcgcgtagatctgctgcgttgcccctacggcggttttgcgtttgcgatgttgcagtggaccggaagccgcatgttccgccgtgatctgcgctggtacgccactgacgagaagaacatgatgctggacaatcatgcgctgtatgacctgaccaagaaaatctttctcaaagctaaatcggaagaggaaattttcgcacatctggggcttgaatacctggaaccgttcgaacgtaacgca

SEQ ID NO: 2668 - protein, 529 aa, synthetic construct
  REGION 1..529: note = Variant of terminal deoxynucleotidyltransferase
MHHHHHHGGSGSHGIRTIDSDFGKKQQKKMDNHDSSAIYEIKFHEFVLFILEEKMGATRRTFLTDLARKKGFRVENELSDEVTHIVAENLSRSEVLAWLKEHKMEKTKQFELLDISWLIESMKVGKPVDTKGKYQLAESGEMSANPDPTEGRENELPPTMKTVSPYACQRRTTLNNHNQRFTDALEILAENYEFKRNDDTALEFRRAISVLKSLPFEVRSLKDTEGLPWIGDEVKGIMEEIIEVGNSREVQAVLNDEWYQSFHRFKSVFGVGVKTADKWYRMGLRTLEDVRSSKTLKLTPMQKAGLCYYEDLARGVTKAEADAISLLVQDAVATFDPDALVEIVGGFRRGKPQGHDVDLLISSPGAEKEQEDQLLQKVTNLWKKQGLLLYGRLEWTQWEDGKLPSGKADVGDAGAKCFLILKLYDHKVDKSKWEMPTGSNMGEAKPWKAIRVDLLRCPYGGFAFAMLQWTGSRMFRRDLRWYATDEKNMMLDNHALYDLTKKIFLKAKSEEEIFAHLGLEYLEPFERNA

SEQ ID NO: 2669 - DNA, 1587 bp, synthetic construct
  misc_feature 1..1587: note = Variant of terminal deoxynucleotidyltransferase
  source 1..1587: mol_type = other DNA
atgcaccatcatcatcatcatggcggtagcggcagccacggcattcgtaccatcgattcggacttcgggaagaaacaacagaaaaaaatggataaccacgatagttccgccatctatgaaatcaaatttcacgagtttgtgctgttcattctcgaagaaaaaatgggtgcgacgcgtcgtacttttctgacagatttagcccgcaagaaggggttccgcgtcgagaatgaactgtcagacagcgttacccacatcgtggcagaaaatctgtcacgctctgaagtattggcttggctgaaagaacacaagatggagaagaccaagcaattcgaactgctggatattagctggcttatcgaaagcatgaaagttggtaaaccggtggacaccaaggggaaataccagttggcggaatcgggtgagatgagtgcgaacccagatccgacagagggtcgtgaaaacgagctgcctcctactatgaagaccgtttctccgtatgcgtgtcaacgccgcaccaccctgaacaaccataatcaacgttttacggacgcactggaaattcttcgcgaaaattacgagttcaaacgcaacgatgatactgcgctggaatttcgtcgtgctatctccgtgctgaaaagccttccgtttgaggtacgtagcctgaaagacacggaaggattgccctggatcggtgatgaagtcaaagggattatggaagaaatcatcgaggtcgggaattcgcgtgaagtgcaggccgtgctcaatgatgagtggtatcaaagcttccaccgctttaagagtgtctttggagtgggggtgaagacagcagacaagtggtaccgtatgggtctgcgcaccctcgaggatgttcgttccagcaagaccctgaagttgaccccgatgcagaaagcgggtctgtgctattatgaagatcttgctcgcggcgttacgaaagccgaagctgacgcgatttctctgctggttcaggatgcagtcgcaactttcgacccggatgcgctggtggagattgtcggtggatttcgtcgtgggaaacctcagggtcacgacgttgatctgcttatcagttctccgggagctgagaaagagcaagaagaccagctcctgcagaaagtgaccaatctgtggaagaaacaagggttgttgctgtacggtcgtctggaatggacccagtgggaagatgggaaactcccatccggtaaggctgacgtaggtgacgcgggtgcgaaatgctttctgatcctcaaactttatgatcataaagtggacaaaagcaaatgggaaatgccgacgggttcgaacatgggcgaggccaaaccgtggaaagcaattcgcgtagatctgctgcgttgcccctacggcggttttgcgtttgcgatgttgcagtggaccggaagccgcatgttccgccgtgatctgcgctggtacgccactgacgagaagaacatgatgctggacaatcatgcgctgtatgacctgaccaagaaaatctttctcaaagctaaatcggaagaggaaattttcgcacatctggggcttgaatacctggaaccgttcgaacgtaacgca

SEQ ID NO: 2670 - protein, 529 aa, synthetic construct
  REGION 1..529: note = Variant of terminal deoxynucleotidyltransferase
MHHHHHHGGSGSHGIRTIDSDFGKKQQKKMDNHDSSAIYEIKFHEFVLFILEEKMGATRRTFLTDLARKKGFRVENELSDSVTHIVAENLSRSEVLAWLKEHKMEKTKQFELLDISWLIESMKVGKPVDTKGKYQLAESGEMSANPDPTEGRENELPPTMKTVSPYACQRRTTLNNHNQRFTDALEILRENYEFKRNDDTALEFRRAISVLKSLPFEVRSLKDTEGLPWIGDEVKGIMEEIIEVGNSREVQAVLNDEWYQSFHRFKSVFGVGVKTADKWYRMGLRTLEDVRSSKTLKLTPMQKAGLCYYEDLARGVTKAEADAISLLVQDAVATFDPDALVEIVGGFRRGKPQGHDVDLLISSPGAEKEQEDQLLQKVTNLWKKQGLLLYGRLEWTQWEDGKLPSGKADVGDAGAKCFLILKLYDHKVDKSKWEMPTGSNMGEAKPWKAIRVDLLRCPYGGFAFAMLQWTGSRMFRRDLRWYATDEKNMMLDNHALYDLTKKIFLKAKSEEEIFAHLGLEYLEPFERNA

SEQ ID NO: 2671 - DNA, 1587 bp, synthetic construct
  misc_feature 1..1587: note = Variant of terminal deoxynucleotidyltransferase
  source 1..1587: mol_type = other DNA
atgcaccatcatcatcatcatggcggtagcggcagccacggcattcgtaccatcgattcggacttcgggaagaaacagcagaaaaaaatggataaccacgatagttccgccacttatgaaatcaaatttcacgagtttgtgctgttcattctcgaagaaaaaatgggtgcgacgcgtcgtacttttctgacagatttagcccgcaagaaagggttccgcgtcgagaatgaactgtcagacagcgttacccacatcgtggcagaaaatctgtcacgctctgaagtattggcttggctgaaagaacacaagatggagaagaccaagcaattcgaactgctggatattagctggcttatcgaaagcatgaaagttggtaaaccggtggacaccaaggggaaataccagttggcggaatcgggtgagatgagtgcgaacccagatccgacagagggtcgtgaaaacgagctgcctcctactatgaagaccgtttctccgtatgcgtgtcaacgccgcaccaccctgaacaaccataatcaacgttttacggacgcactggaaattcttgcggaaaattacgagttcaaacgcaatgatgatactgcgctggaatttcgtcgtgctatctccgtgctgaaaagccttccgtttgaggtacgtagcctgaaagacacggaaggattgccctggatcggtgatgaagtcaaagggattatggaagaaatcatcgaggtcgggaattcgcgtgaagtgcaggccgtgctcaatgatgagtggtatcaaagcttccaccgctttaagagtgtctttggagtgggggtgaagacagcagacaagtggtaccgtatgggtctgcgcaccctcgaggatgttcgttccagcaagaccctgaagttgaccccgatgcagaaagcgggtctgtgctattatgaagatcttgctcgcggcgttacgaaggccgaagctgacgcgatttctctgctggttcaggatgcagtcgcaactttcgacccggatgcgctggtggagattgtcggtggatttcgtcgtgggaaacctcagggtcacgacgttgatctgcttatcagttctccgggagctgagaaagagcaagaagaccagctcctgcagaaagtgaccaatctgtggaagaaacaagggttgttgctgtacggtcgtctggaatggacccagtgggaagatgggaaactcccatccggtaaggctgacgtaggtgacgcgggtgcgaaatgctttctgatcctcaaactttatgatcataaagtggacaaaagcaaatgggaaatgccgacgggttcgaacatgggcgaggccaaaccgtggaaagcaattcgcgtagatctgctgcgttgcccctacggcggttttgcgtttgcgatgttgcagtggaccggaagccgcatgttccgccgtgatctgcgctggtacgccactgacgagaagaacatgatgctggacaatcatgcgctgtatgacctgaccaagaaaatctttctcaaagctaaatcggaagaggaaattttcgcacatctggggcttgaatacctggaaccgttcgaacgtaacgca

SEQ ID NO: 2672 - protein, 529 aa, synthetic construct
  REGION 1..529: note = Variant of terminal deoxynucleotidyltransferase
MHHHHHHGGSGSHGIRTIDSDFGKKQQKKMDNHDSSATYEIKFHEFVLFILEEKMGATRRTFLTDLARKKGFRVENELSDSVTHIVAENLSRSEVLAWLKEHKMEKTKQFELLDISWLIESMKVGKPVDTKGKYQLAESGEMSANPDPTEGRENELPPTMKTVSPYACQRRTTLNNHNQRFTDALEILAENYEFKRNDDTALEFRRAISVLKSLPFEVRSLKDTEGLPWIGDEVKGIMEEIIEVGNSREVQAVLNDEWYQSFHRFKSVFGVGVKTADKWYRMGLRTLEDVRSSKTLKLTPMQKAGLCYYEDLARGVTKAEADAISLLVQDAVATFDPDALVEIVGGFRRGKPQGHDVDLLISSPGAEKEQEDQLLQKVTNLWKKQGLLLYGRLEWTQWEDGKLPSGKADVGDAGAKCFLILKLYDHKVDKSKWEMPTGSNMGEAKPWKAIRVDLLRCPYGGFAFAMLQWTGSRMFRRDLRWYATDEKNMMLDNHALYDLTKKIFLKAKSEEEIFAHLGLEYLEPFERNA

SEQ ID NO: 2673 - DNA, 1587 bp, synthetic construct
  misc_feature 1..1587: note = Variant of terminal deoxynucleotidyltransferase
  source 1..1587: mol_type = other DNA
atgcaccatcatcatcatcatggcggtagcggcagccacggcattcgtaccatcgattcggacttcgggaagaaacagcagaaaaaaatggataaccacgatagttccgccatctatgaaatcaaatttcacgagtttgtgctgttcattctcgaagaaaaaatgggtgcgacgcgtcgtacttttctgacagatttagcccgcaagaaagggttccgcgtcgagaatgaactgtcagacagcgttacccacatcgtggcagaaaatctgtcacgctctgaagtattggcttggctgaaagaacacaagatggagaagaccaagcaattcgaactgctggatattagctggcttatcgaaagcatgaaagttggtaaaccggtggacaccaaggggaaataccagttggcggaatcgggtgagatgagtgcgaacccagatccgacagagggtcgtgaaaacgagctgcctcctactatgaagaccgtttctccgtatgcgtgtcaacgccgcaccaccctgaacaaccataatcaacgttttacggacgcactggaaattcttgcggaaaattacgagttcaaacgcaacgatgatactgcgctggaatttcgtcgtgctatctccgtgctgaaaagccttccgtttgaggtacgtagcctgaaagacacggaaggattgccctggatcggtgatgaagtcaaagggattatggaagaaatcatcgaggtcgggaattcgcgtgaagtgcaggccgtgctcaatgatgagtggtatcaaagcttccaccgctttaagagtgtctttggagtgggggtgaagacagcagacaagtggtaccgtatgggtctgcgcaccctcgaggatgttcgttccagcaagaccctgaagttgaccccgatgcagaaagcgggtctgtgctattatgaagatcttgctcgcggcgttacgaaagccgaagctgacgcgatttctctgctggttcaggatgcagtcgcaactttcgacccggatgcgctggtggagattgtcggtggatttcgtcgtgggaaacctcagggtcacgacgttgatctgcttatcagttctccgggagctgagaaagagcaagaagaccagctcctgcagaaagtgctgaatctgtggaagaaacaagggttgttgctgtacggtcgtctggaatggacccagtgggaagatgggaaactcccatccggtaaggctgacgtaggtgacgcgggtgcgaaatgctttctgatcctcaaactttatgatcataaagtggacaaaagcaaatgggaaatgccgacgggttcgaacatgggcgaggccaaaccgtggaaagcaattcgcgtagatctgctgcgttgcccctacggcggttttgcgtttgcgatgttgcagtggaccggaagccgcatgttccgccgtgatctgcgctggtacgccactgacgagaagaacatgatgctggacaatcatgcgctgtatgacctgaccaagaaaatctttctcaaagctaaatcggaagaggaaattttcgcacatctggggcttgaatacctggaaccgttcgaacgtaacgca

SEQ ID NO: 2674 - protein, 529 aa, synthetic construct
  REGION 1..529: note = Variant of terminal deoxynucleotidyltransferase
MHHHHHHGGSGSHGIRTIDSDFGKKQQKKMDNHDSSAIYEIKFHEFVLFILEEKMGATRRTFLTDLARKKGFRVENELSDSVTHIVAENLSRSEVLAWLKEHKMEKTKQFELLDISWLIESMKVGKPVDTKGKYQLAESGEMSANPDPTEGRENELPPTMKTVSPYACQRRTTLNNHNQRFTDALEILAENYEFKRNDDTALEFRRAISVLKSLPFEVRSLKDTEGLPWIGDEVKGIMEEIIEVGNSREVQAVLNDEWYQSFHRFKSVFGVGVKTADKWYRMGLRTLEDVRSSKTLKLTPMQKAGLCYYEDLARGVTKAEADAISLLVQDAVATFDPDALVEIVGGFRRGKPQGHDVDLLISSPGAEKEQEDQLLQKVLNLWKKQGLLLYGRLEWTQWEDGKLPSGKADVGDAGAKCFLILKLYDHKVDKSKWEMPTGSNMGEAKPWKAIRVDLLRCPYGGFAFAMLQWTGSRMFRRDLRWYATDEKNMMLDNHALYDLTKKIFLKAKSEEEIFAHLGLEYLEPFERNA

SEQ ID NO: 2675 - DNA, 1587 bp, synthetic construct
  misc_feature 1..1587: note = Variant of terminal deoxynucleotidyltransferase
  source 1..1587: mol_type = other DNA
atgcaccatcatcatcatcatggcggtagcggcagccacggcattcgtaccatcgattcggacttcgggaagaaacagcagaaaaaaatggataaccacgatagttccgccatctatgaaatcaaatttcacgagtttgtgctgttcattctcgaagaaaaaatgggtgcgacgcgtcgtacttttctgacagatttagcccgcaagaaagggttccgcgtcgagaatgaactgtcagacagcgttacccacatcgtggcagaaaatctgtcacgctctgaagtattggcttggctgaaagaacacaagatggagaagaccaagcaattcgaactgctggatattagctggcttatcgaaagcatgaaagttggtaaaccggtggacaccaaggggaaataccagttggcggaatcgggtgagatgagtgcgaacccagatccgacagagggtcgtgaaaacgagctgcctcctactatgaagaccgtttctccgtatgcgtgtcaacgccgcaccaccctgaacaaccataatcaacgttttacggacgcactggaaattcttgcggaaaattacgagttcaaacgcaacgatgatactgcgctggaatttcgtcgtgctatctccgtgctgaaaagccttccgtttgaggtacgtagcctgaaagacacggaaggattgccctggatcggtgatgaagtcaaagggattatggaagaaatcatcgaggtcgggaattcgcgtgaagtgcaggccgtgctcaatgatgagtggtatcaaagcttccaccgctttaagagtgtctttggagtgggggtgaagacagcagacaagtggtaccgtatgggtctgcgcaccctcgaggatgttcgttccagcaagaccctgaagttgaccccgatgcagaaagcgggtctgtgctattatgaagatcttgctcgcggcgttacgaaagccgaagctgacgcgatttctctgctggttcaggatgcagtcgcaactttcgacccggatgcgctggtggagattgtcggtggatttcgtcgtgggaaacctcagggtcacgacgttgatctgcttatcagttctccgggagctgagaaagagcaagaagaccagctcctgcagaaagtgatgaatctgtggaagaaacaagggttgttgctgtacggtcgtctggaatggacccagtgggaagatgggaaactcccatccggtaaggctgacgtaggtgacgcgggtgcgaaatgctttctgatcctcaaactttatgatcataaagtggacaaaagcaaatgggaaatgccgacgggttcgaacatgggcgaggccaaaccgtggaaagcaattcgcgtagatctgctgcgttgcccctacggcggttttgcgtttgcgatgttgcagtggaccggaagccgcatgttccgccgtgatctgcgctggtacgccactgacgagaagaacatgatgctggacaatcatgcgctgtatgacctgaccaagaaaatctttctcaaagctaaatcggaagaggaaattttcgcacatctggggcttgaatacctggaaccgttcgaacgtaacgca

SEQ ID NO: 2676 - protein, 529 aa, synthetic construct
  REGION 1..529: note = Variant of terminal deoxynucleotidyltransferase
MHHHHHHGGSGSHGIRTIDSDFGKKQQKKMDNHDSSAIYEIKFHEFVLFILEEKMGATRRTFLTDLARKKGFRVENELSDSVTHIVAENLSRSEVLAWLKEHKMEKTKQFELLDISWLIESMKVGKPVDTKGKYQLAESGEMSANPDPTEGRENELPPTMKTVSPYACQRRTTLNNHNQRFTDALEILAENYEFKRNDDTALEFRRAISVLKSLPFEVRSLKDTEGLPWIGDEVKGIMEEIIEVGNSREVQAVLNDEWYQSFHRFKSVFGVGVKTADKWYRMGLRTLEDVRSSKTLKLTPMQKAGLCYYEDLARGVTKAEADAISLLVQDAVATFDPDALVEIVGGFRRGKPQGHDVDLLISSPGAEKEQEDQLLQKVMNLWKKQGLLLYGRLEWTQWEDGKLPSGKADVGDAGAKCFLILKLYDHKVDKSKWEMPTGSNMGEAKPWKAIRVDLLRCPYGGFAFAMLQWTGSRMFRRDLRWYATDEKNMMLDNHALYDLTKKIFLKAKSEEEIFAHLGLEYLEPFERNA

SEQ ID NO: 2677 - DNA, 1587 bp, synthetic construct
  misc_feature 1..1587: note = Variant of terminal deoxynucleotidyltransferase
  source 1..1587: mol_type = other DNA
atgcaccatcatcatcatcatggcggtagcggcagccacggcattcgtaccatcgattcggacttcgggaagaaacagcagaaaaaaatggataaccacgatagttccgccatctatgaaatcaaatttcacgagtttgtgctgttcattctcgaagaaaaaatgggtgcgacgcgtcgtacttttctgacagatttagcccgcaagaaagggttccgcgtcgagaatgaactgtcagacagcgttacccacatcgtggcagaaaatctgtcacgctctgaagtattggcttggctgaaagaacacaagatggagaagaccaagcaattcgaactgctggatattagctggcttatcgaaagcatgaaagttggtaaaccggtggacaccaaggggaaataccagttggcggaatcgggtgagatgagtgcgaacccagatccgacagagggtcgtgaaaacgagctgcctcctactatgaagaccgtttctccgtatgcgtgtcaacgccgcaccaccctgaacaaccataatcaacgttttacggacgcactggaaattcttgcggaaaattacgagttcaaacgcaacgatgatactgcgctggaatttcgtcgtgctatctccgtgctgaaaagccttccgtttgaggtacgtagcctgaaagacacggaaggattgccctggatcggtgatgaagtcaaagggattatggaagaaatcatcgaggtcgggaattcgcgtgaagtgcaggccgtgctcaatgatgagtggtatcaaagcttccaccgctttaagagtgtctttggagtgggggtgaagacagcagacaagtggtaccgtatgggtctgcgcaccctcgaggatgttcgttccagcaagaccctgaagttgaccccgatgcagaaagcgggtctgtgctattatgaagatcttgctcgcggcgttacgaaagccgaagctgacgcgatttctctgctggttcaggatgcagtcgcaactttcgacccggatgcgctggtggagattgtcggtggatttcgtcgtgggaaacctcagggtcacgacgttgatctgcttatcagttctccgggagctgagaaagagcaagaagaccagctcctgcagaaagtgaccaatctgtggaagaaacaagggttgttgctgtacggtcgtctggaatggacccagtgggaagatgggaaactcccatccggtaaggctgacgtaggtgacgcgggtgcgaaatgctttctgatcctcaaactttatgatcatttggtggacaaaagcaaatgggaaatgccgacgggttcgaacatgggcgaggccaaaccgtggaaagcaattcgcgtagatctgctgcgttgcccctacggcggttttgcgtttgcgatgttgcagtggaccggaagccgcatgttccgccgtgatctgcgctggtacgccactgacgagaagaacatgatgctggacaatcatgcgctgtatgacctgaccaagaaaatctttctcaaagctaaatcggaagaggaaattttcgcacatctggggcttgaatacctggaaccgttcgaacgtaacgca

SEQ ID NO: 2678 - protein, 529 aa, synthetic construct
  REGION 1..529: note = Variant of terminal deoxynucleotidyltransferase
MHHHHHHGGSGSHGIRTIDSDFGKKQQKKMDNHDSSAIYEIKFHEFVLFILEEKMGATRRTFLTDLARKKGFRVENELSDSVTHIVAENLSRSEVLAWLKEHKMEKTKQFELLDISWLIESMKVGKPVDTKGKYQLAESGEMSANPDPTEGRENELPPTMKTVSPYACQRRTTLNNHNQRFTDALEILAENYEFKRNDDTALEFRRAISVLKSLPFEVRSLKDTEGLPWIGDEVKGIMEEIIEVGNSREVQAVLNDEWYQSFHRFKSVFGVGVKTADKWYRMGLRTLEDVRSSKTLKLTPMQKAGLCYYEDLARGVTKAEADAISLLVQDAVATFDPDALVEIVGGFRRGKPQGHDVDLLISSPGAEKEQEDQLLQKVTNLWKKQGLLLYGRLEWTQWEDGKLPSGKADVGDAGAKCFLILKLYDHLVDKSKWEMPTGSNMGEAKPWKAIRVDLLRCPYGGFAFAMLQWTGSRMFRRDLRWYATDEKNMMLDNHALYDLTKKIFLKAKSEEEIFAHLGLEYLEPFERNA

SEQ ID NO: 2679 - DNA, 1587 bp, synthetic construct
  misc_feature 1..1587: note = Variant of terminal deoxynucleotidyltransferase
  source 1..1587: mol_type = other DNA
atgcaccatcatcatcatcatggcggtagcggcagccacggcattcgtaccatcgattcggacttcgggaagaaacagcagaaaaaaatggataaccacgatagttccgccatctatgaaatcaaatttcacgagtttgtgctgttcattctcgaagaaaaaatgggtgcgacgcgtcgtacttttctgacagatttagcccgcaagaaagggttccgcgtcgagaatgaactgtcagacagcgttacccacatcgtggcagaaaatctgtcacgctctgaagtattggcttggctgaaagaacacaagatggagaagaccaagcaattcgaactgctggatattagctggcttatcgaaagcatgaaagttggtaaaccggtggacaccaaggggaaataccagttggcggaatcgggtgagatgagtgcgaacccagatccgacagagggtcgtgaaaacgagctgcctcctactatgaagaccgtttctccgtatgcgtgtcaacgccgcaccaccctgaacaaccataatcaacgttttacggacgcactggaaattcttgcggaaaattacgagttcaaacgcaacgatgatactgcgctggaatttcgtcgtgctatctccgtgctgaaaagccttccgtttgaggtacgtagcctgaaagacacggaaggattgccctggatcggtgatgaagtcaaagggattatggaagaaatcatcgaggtcgggaattcgcgtgaagtgcaggccgtgctcaatgatgagtggtatcaaagcttccaccgctttaagagtgtctttggagtgggggtgaagacagcagacaagtggtaccgtatgggtctgcgcaccctcgaggatgttcgttccagcaagaccctgaagttgaccccgatgcagaaagcgggtctgtgctattatgaagatcttgctcgcggcgttacgaaagccgaagctgacgcgatttctctgctggttcaggatgcagtcgcaactttcgacccggatgcgctggtggagattgtcggtggatttcgtcgtgggaaacctcagggtcacgacgttgatctgcttatcagttctccgggagctgagaaagagcaagaagaccagctcctgcagaaagtgaccaatctgtggaagaaacaagggttgttgctgtacggtcgtctggaatggacccagtgggaagatgggggtctcccatccggtaaggctgacgtaggtgacgcgggtgcgaaatgctttctgatcctcaaactttatgatcataaagtggacaaaagcaaatgggaaatgccgacgggttcgaacatgggcgaggccaaaccgtggaaagcaattcgcgtagatctgctgcgttgcccctacggcggttttgcgtttgcgatgttgcagtggaccggaagccgcatgttccgccgtgatctgcgctggtacgccactgacgagaagaacatgatgctggacaatcatgcgctgtatgacctgaccaagaaaatctttctcaaagctaaatcggaagaggaaattttcgcacatctggggcttgaatacctggaaccgttcgaacgtaacgca

SEQ ID NO: 2680 - protein, 529 aa, synthetic construct
  REGION 1..529: note = Variant of terminal deoxynucleotidyltransferase
MHHHHHHGGSGSHGIRTIDSDFGKKQQKKMDNHDSSAIYEIKFHEFVLFILEEKMGATRRTFLTDLARKKGFRVENELSDSVTHIVAENLSRSEVLAWLKEHKMEKTKQFELLDISWLIESMKVGKPVDTKGKYQLAESGEMSANPDPTEGRENELPPTMKTVSPYACQRRTTLNNHNQRFTDALEILAENYEFKRNDDTALEFRRAISVLKSLPFEVRSLKDTEGLPWIGDEVKGIMEEIIEVGNSREVQAVLNDEWYQSFHRFKSVFGVGVKTADKWYRMGLRTLEDVRSSKTLKLTPMQKAGLCYYEDLARGVTKAEADAISLLVQDAVATFDPDALVEIVGGFRRGKPQGHDVDLLISSPGAEKEQEDQLLQKVTNLWKKQGLLLYGRLEWTQWEDGGLPSGKADVGDAGAKCFLILKLYDHKVDKSKWEMPTGSNMGEAKPWKAIRVDLLRCPYGGFAFAMLQWTGSRMFRRDLRWYATDEKNMMLDNHALYDLTKKIFLKAKSEEEIFAHLGLEYLEPFERNA

SEQ ID NO: 2681 - DNA, 1587 bp, synthetic construct
  misc_feature 1..1587: note = Variant of terminal deoxynucleotidyltransferase
  source 1..1587: mol_type = other DNA
atgcaccatcatcatcatcatggcggtagcggcagccacggcattcgtaccatcgattcggacttcgggaagaaacagcagaaaaaaatggataaccacgatagttccgccatctatgaaatcaaatttcacgagtttgtgctgttcattctcgaagaaaaaatgggtgcgacgcgtcgtacttttctgacagatttagcccgcaagaaagggttccgcgtcgagaatgaactgtcagacagcgttacccacatcgtggcagaaaatctgtcacgctctgaagtattggcttggctgaaagaacacaagatggagaagaccaagcaattcgaactgctggatattagctggcttatcgaaagcatgaaagttggtaaaccggtggacaccaaggggaaataccagttggcggaatcgggtgagatgagtgcgaacccagatccgacagagggtcgtgaaaacgagctgcctcctactatgaagaccgtttctccgtatgcgtgtcaacgccgcaccaccctgaacaaccataatcaacgttttacggacgcactggaaattcttgcggaaaattacgagttcaaacgcaacgatgatactgcgctggaatttcgtcgtgctatctccgtgctgaaaagccttccgtttgaggtacgtagcctgaaagacacggaaggattgccctggatcggtgatgaagtcaaagggattatggaagaaatcatcgaggtcgggaattcgcgtgaagtgcaggccgtgctcaatgatgagtggtatcaaagcttccaccgctttaagagtgtctttggagtgggggtgaagacagcagacaagtggtaccgtatgggtctgcgcaccctcgaggatgttcgttccagcaagaccctgaagttgaccccgatgcagaaagcgggtctgtgctattatgaagatcttgctcgcggcgttacgaaagccgaagctgacgcgatttctctgctggttcaggatgcagtcgcaactttcgacccggatgcgctggtggagattgtcggtggatttcgtcgtgggaaacctcagggtcacgacgttgatctgcttatcagttctccgggagctgagaaagagcaagaagaccagctcctgcagaaagtgaccaatctgtggaagaaacaagggttgttgctgtacggtcgtctggaatggacccagtgggaagatgggaaactcccatccggtaaggctgacgtaggtgacgcgggtgcgaaatgctttctgatcctcaaactttatgatcatatggtggacaaaagcaaatgggaaatgccgacgggttcgaacatgggcgaggccaaaccgtggaaagcaattcgcgtagatctgctgcgttgcccctacggcggttttgcgtttgcgatgttgcagtggaccggaagccgcatgttccgccgtgatctgcgctggtacgccactgacgagaagaacatgatgctggacaatcatgcgctgtatgacctgaccaagaaaatctttctcaaagctaaatcggaagaggaaattttcgcacatctggggcttgaatacctggaaccgttcgaacgtaacgca

SEQ ID NO: 2682 - protein, 529 aa, synthetic construct
  REGION 1..529: note = Variant of terminal deoxynucleotidyltransferase
MHHHHHHGGSGSHGIRTIDSDFGKKQQKKMDNHDSSAIYEIKFHEFVLFILEEKMGATRRTFLTDLARKKGFRVENELSDSVTHIVAENLSRSEVLAWLKEHKMEKTKQFELLDISWLIESMKVGKPVDTKGKYQLAESGEMSANPDPTEGRENELPPTMKTVSPYACQRRTTLNNHNQRFTDALEILAENYEFKRNDDTALEFRRAISVLKSLPFEVRSLKDTEGLPWIGDEVKGIMEEIIEVGNSREVQAVLNDEWYQSFHRFKSVFGVGVKTADKWYRMGLRTLEDVRSSKTLKLTPMQKAGLCYYEDLARGVTKAEADAISLLVQDAVATFDPDALVEIVGGFRRGKPQGHDVDLLISSPGAEKEQEDQLLQKVTNLWKKQGLLLYGRLEWTQWEDGKLPSGKADVGDAGAKCFLILKLYDHMVDKSKWEMPTGSNMGEAKPWKAIRVDLLRCPYGGFAFAMLQWTGSRMFRRDLRWYATDEKNMMLDNHALYDLTKKIFLKAKSEEEIFAHLGLEYLEPFERNA

SEQ ID NO: 2683 - DNA, 1587 bp, synthetic construct
  misc_feature 1..1587: note = Variant of terminal deoxynucleotidyltransferase
  source 1..1587: mol_type = other DNA
atgcaccatcatcatcatcatggcggtagcggcagccacggcattcgtaccatcgattcggacttcgggaagaaacagcagaaaaaaatggataaccacgatagttccgccatctatgaaatcaaatttcacgagtttgtgctgttcattctcgaagaaaaaatgggtgcgacgcgtcgtacttttctgacagatttagcccgcaagaaagggttccgcgtcgagaatgaactgtcagacagcgttacccacatcgtggcagaaaatctgtcacgctctgaagtattggcttggctgaaagaacacaagatggagaagaccaagcaattcgaactgctggatattagctggcttatcgaaagcatgaaagttggtaaaccggtggacaccaaggggaaataccagttggcggaatcgggtgagatgagtgcgaacccagatccgacagagggtcgtgaaaacgagctgcctcctactatgaagaccgtttctccgtatgcgtgtcaacgccgcaccaccctgaacaaccataatcaacgttttacggacgcactggaaattcttgcggaaaattacgagttcaaacgcaacgatgatactgcgctggaatttcgtcgtgctatctccgtgctgaaaagccttccgtttgaggtacgtagcctgaaagacacggaaggattgccctggatcggtgatgaagtcaaagggattatggaagaaatcatcgaggtcgggaattcgcgtgaagtgcaggccgtgctcaatgatgagtggtatcaaagcttccaccgctttaagagtgtctttggagtgggggtgaagacagcagacaagtggtaccgtatgggtctgcgcaccctcgaggatgttcgttccagcaagaccctgaagttgaccccgatgcagaaagcgggtctgtgctattatgaagatcttgctcgcggcgttacgaaagccgaagctgacgcgatttctctgatggttcaggatgcagtcgcaactttcgacccggatgcgctggtggagattgtcggtggatttcgtcgtgggaaacctcagggtcacgacgttgatctgcttatcagttctccgggagctgagaaagagcaagaagaccagctcctgcagaaagtgaccaatctgtggaagaaacaagggttgttgctgtacggtcgtctggaatggacccagtgggaagatgggaaactcccatccacgaaggctgacgtaggtgacgcgggtgcgaaatgctttctgatcctcaaactttatgatcataaagtggacaaaagcaaatgggaaatgccgacgggttcgaacatgggcgaggccaaaccgtggaaagcaattcgcgtagatctgctgcgttgcccctacggcggttttgcgtttgcgatgttgcagtggaccggaagccgcatgttccgccgtgatctgcgctggtacgccactgacgagaagaacatgatgctggacaatcatgcgctgtatgacctgaccaagaaaatctttctcaaagctaaatcggaagaggaaattttcgcacatctggggcttgaatacctggaaccgttcgaacgtaacgca

SEQ ID NO: 2684 - protein, 529 aa, synthetic construct
  REGION 1..529: note = Variant of terminal deoxynucleotidyltransferase
MHHHHHHGGSGSHGIRTIDSDFGKKQQKKMDNHDSSAIYEIKFHEFVLFILEEKMGATRRTFLTDLARKKGFRVENELSDSVTHIVAENLSRSEVLAWLKEHKMEKTKQFELLDISWLIESMKVGKPVDTKGKYQLAESGEMSANPDPTEGRENELPPTMKTVSPYACQRRTTLNNHNQRFTDALEILAENYEFKRNDDTALEFRRAISVLKSLPFEVRSLKDTEGLPWIGDEVKGIMEEIIEVGNSREVQAVLNDEWYQSFHRFKSVFGVGVKTADKWYRMGLRTLEDVRSSKTLKLTPMQKAGLCYYEDLARGVTKAEADAISLMVQDAVATFDPDALVEIVGGFRRGKPQGHDVDLLISSPGAEKEQEDQLLQKVTNLWKKQGLLLYGRLEWTQWEDGKLPSTKADVGDAGAKCFLILKLYDHKVDKSKWEMPTGSNMGEAKPWKAIRVDLLRCPYGGFAFAMLQWTGSRMFRRDLRWYATDEKNMMLDNHALYDLTKKIFLKAKSEEEIFAHLGLEYLEPFERNA

SEQ ID NO: 2685 - DNA, 1587 bp, synthetic construct
  misc_feature 1..1587: note = Variant of terminal deoxynucleotidyltransferase
  source 1..1587: mol_type = other DNA
atgcaccatcatcatcatcatggcggtagcggcagccacggcattcgtaccatcgattcggacttcgggaagaaacagcagaaaaaaatggataaccacgatagttccgccatctatgaaatcaaatttcacgagtttgtgctgttcattctcgaagaaaaaatgggtgcgacgcgtcgtacttttctgacagatttagcccgcaagaaagggttccgcgtcgagaatgaactgtcagacagcgttacccacatcgtggcagaaaatctgtcacgctctgaagtattggcttggctgaaagaacacaagatggagaagaccaagcaattcgaactgctggatattagctggcttatcgaaagcatgaaagttggtaaaccggtggacaccaaggggaaataccagttggcggaatcgggtgagatgagtgcgaacccagatccgacagagggtcgtgaaaacgagctgcctcctactatgaagaccgtttctccgtatgcgtgtcaacgccgcaccaccctgaacaaccataatcaacgttttacggacgcactggaaattcttgcggaaaattacgagttcaaacgcaacgatgatactgcgctggaatttcgtcgtgctatctccgtgctgaaaagccttccgtttgaggtacgtagcctgaaagacacggaaggattgccctggatcggtgatgaagtcaaagggattatggaagaaatcatcgaggtcgggaattcgcgtgaagtgcaggccgtgctcaatgatgagtggtatcaaagcttccaccgctttaagagtgtctttggagtgggggtgaagacagcagacaagtggtaccgtatgggtctgcgcaccctcgaggatgttcgttccagcaagaccctgaagttgaccccgatgcagaaagcgggtctgtgctattatgaagatcttgctcgcggcgttacgaaagccgaagctgacgcgatttctctgctggttcaggatgcagtcgcaactttcgacccggatgcgctggtggagattgtcggtggatttcgtcgtgggaaacctcagggtcacgacgttgatctgcttatcagttctccgggagctgagaaagagcaagaagaccagctcctgcagaaagtgaccaatctgttgaagaaacaagggttgttgctgtacggtcgtctggaatggacccagtgggaagatgggaaactcccatccggtaaggctgacgtaggtgacgcgggtgcgaaatgctttctgatcctcaaactttatgatcataaagtggacaaaagcaaatgggaaatgccgacgggttcgaacatgggcgaggccaaaccgtggaaagcaattcgcgtagatctgctgcgttgcccctacggcggttttgcgtttgcgatgttgcagtggaccggaagccgcatgttccgccgtgatctgcgctggtacgccactgacgagaagaacatgatgctggacaatcatgcgctgtatgacctgaccaagaaaatctttctcaaagctaaatcggaagaggaaattttcgcacatctggggcttgaatacctggaaccgttcgaacgtaacgca

SEQ ID NO: 2686 - protein, 529 aa, synthetic construct
  REGION 1..529: note = Variant of terminal deoxynucleotidyltransferase
MHHHHHHGGSGSHGIRTIDSDFGKKQQKKMDNHDSSAIYEIKFHEFVLFILEEKMGATRRTFLTDLARKKGFRVENELSDSVTHIVAENLSRSEVLAWLKEHKMEKTKQFELLDISWLIESMKVGKPVDTKGKYQLAESGEMSANPDPTEGRENELPPTMKTVSPYACQRRTTLNNHNQRFTDALEILAENYEFKRNDDTALEFRRAISVLKSLPFEVRSLKDTEGLPWIGDEVKGIMEEIIEVGNSREVQAVLNDEWYQSFHRFKSVFGVGVKTADKWYRMGLRTLEDVRSSKTLKLTPMQKAGLCYYEDLARGVTKAEADAISLLVQDAVATFDPDALVEIVGGFRRGKPQGHDVDLLISSPGAEKEQEDQLLQKVTNLLKKQGLLLYGRLEWTQWEDGKLPSGKADVGDAGAKCFLILKLYDHKVDKSKWEMPTGSNMGEAKPWKAIRVDLLRCPYGGFAFAMLQWTGSRMFRRDLRWYATDEKNMMLDNHALYDLTKKIFLKAKSEEEIFAHLGLEYLEPFERNA

SEQ ID NO: 2687 - DNA, 1587 bp, synthetic construct
  misc_feature 1..1587: note = Variant of terminal deoxynucleotidyltransferase
  source 1..1587: mol_type = other DNA
atgcaccatcatcatcatcatggcggtagcggcagccacggcattcgtaccatcgattcggacttcgggaagaaacagcagaaaaaaatggataaccacgatagttccgccatctatgaaatcaaatttcacgagtttgtgctgttcattctcgaagaaaaaatgggtgcgacgcgtcgtacttttctgacagatttagcccgcaagaaagggttccgcgtcgagaatgaactgtcagacagcgttacccacatcgtggcagaaaatctgtcacgctctgaagtattggcttggctgaaagaacacaagatggagaagaccaagcaattcgaactgctggatattagctggcttatcgaaagcatgaaagttggtaaaccggtggacaccaaggggaaataccagttggcggaatcgggtgagatgagtgcgaacccagatccgacagagggtcgtgaaaacgagctgcctcctactatgaagaccgtttctccgtatgcgtgtcaacgccgcaccaccctgaacaaccataatcaacgttttacggacgcactggaaattcttgcggaaaattacgagttcaaacgcaacgatgatactgcgctggaatttcgtcgtgctatctccgtgctgaaaagccttccgtttgaggtacgtagcctgaaagacacggaaggattgccctggatcggtgatgaagtcaaagggattatggaagaaatcatcgaggtcgggaattcgcgtgaagtgcaggccgtgctcaatgatgagtggtatcaaagcttccaccgctttaagagtgtctttggagtgggggtgaagacagcagacaagtggtaccgtatgggtctgcgcaccctcgaggatgttcgttccagcaagaccctgaagttgaccccgatgcagaaagtgggtctgtgctattatgaagatcttgctcgcggcgttacgaaagccgaagctgacgcgatttctctgctggttcgggatgcagtcgcaactttcgacccggatgcgctggtggagattgtcggtggatttcgtcgtgggaaacctcagggtcacgacgttgatctgcttatcagttctccgggagctgagaaagagcaagaagaccagctcctgcagaaagtgaccaatctgtggaagaaacaagggttgttgctgtacggtcgtctggaatggacccagtgggaagatgggaaactcccatccggtaaggctgacgtaggtgacgcgggtgcgaaatgctttctgatcctcaaactttatgatcataaagtggacaaaagcaaatgggaaatgccgacgggttcgaacatgggcgaggccaaaccgtggaaagcaattcgcgtagatctgctgcgttgcccctacggcggttttgcgtttgcgatgttgcagtggaccggaagccgcatgttccgccgtgatctgcgctggtacgccactgacgagaagaacatgatgctggacaatcatgcgctgtatgacctgaccaagaaaatctttctcaaagctaaatcggaagaggaaattttcgcacatctggggcttgaatacctggaaccgttcgaacgtaacgca

SEQ ID NO: 2688 - protein, 529 aa, synthetic construct
  REGION 1..529: note = Variant of terminal deoxynucleotidyltransferase
MHHHHHHGGSGSHGIRTIDSDFGKKQQKKMDNHDSSAIYEIKFHEFVLFILEEKMGATRRTFLTDLARKKGFRVENELSDSVTHIVAENLSRSEVLAWLKEHKMEKTKQFELLDISWLIESMKVGKPVDTKGKYQLAESGEMSANPDPTEGRENELPPTMKTVSPYACQRRTTLNNHNQRFTDALEILAENYEFKRNDDTALEFRRAISVLKSLPFEVRSLKDTEGLPWIGDEVKGIMEEIIEVGNSREVQAVLNDEWYQSFHRFKSVFGVGVKTADKWYRMGLRTLEDVRSSKTLKLTPMQKVGLCYYEDLARGVTKAEADAISLLVRDAVATFDPDALVEIVGGFRRGKPQGHDVDLLISSPGAEKEQEDQLLQKVTNLWKKQGLLLYGRLEWTQWEDGKLPSGKADVGDAGAKCFLILKLYDHKVDKSKWEMPTGSNMGEAKPWKAIRVDLLRCPYGGFAFAMLQWTGSRMFRRDLRWYATDEKNMMLDNHALYDLTKKIFLKAKSEEEIFAHLGLEYLEPFERNA

SEQ ID NO: 2689 - DNA, 1587 bp, synthetic construct
  misc_feature 1..1587: note = Variant of terminal deoxynucleotidyltransferase
  source 1..1587: mol_type = other DNA
atgcaccatcatcatcatcatggcggtagcggcagccacggcattcgtaccatcgattcggacttcgggaagaaacagcagaaaaaaatggataaccacgatagttccgccatctatgaaatcaaatttcacgagtttgtgctgttcattctcgaagaaaaaatgggtgcgacgcgtcgtacttttctgacagatttagcccgcaagaaagggttccgcgtcgagaatgaactgtcagacagcgttacccacatcgtggcagaaaatctgtcacgctctgaagtattggcttggctgaaagaacacaagatggagaagaccaagcaattcgaactgctggatattagctggcttatcgaaagcatgaaagttggtaaaccggtggacaccaaggggaaataccagttggcggaatcgggtgagatgagtgcgaacccagatccgacagagggtcgtgaaaacgagctgcctcctactatgaagaccgtttctccgtatgcgtgtcaacgccgcaccaccctgaacaaccataatcaacgttttacggacgcactggaaattcttgcggaaaattacgagttcaaacgcaacgatgatactgcgctggaatttcgtcgtgctatctccgtgctgaaaagccttccgtttgaggtacgtagcctgaaagacacggaaggattgccctggatcggtgatgaagtcaaagggattatggaagaaatcatcgaggtcgggaattcgcgtgaagtgcaggccgtgctcaatgatgagtggtatcaaagcttccaccgctttaagagtgtctttggagtgggggtgaagacagcagacaagtggtaccgtatgggtctgcgcaccctcgaggatgttcgttccagcaagaccctgaagttgaccccgatgcagaaagcgggtctgtgctattatgaagatcttgctcgcggcgttacgaaagccgaagctgacgcgatttctctgctggttcaggatgcagtcgcaactttcgacccggatgcgctggtggagattgtcggtggatttcgtcgtgggaaacctcagggtcacgacgttgatctgcttatcagttctccgggagctgagaaagagcaagaagaccagctcctgcagaaagtgattaatctgtggaagaaacaagggttgttgctgtacggtcgtctggaatggacccagtgggaagatgggaaactcccatccggtaaggctgacgtaggtgacgcgggtgcgaaatgctttctgatcctcaaactttatgatcataaagtggacaaaagcaaatgggaaatgccgacgggttcgaacatgggcgaggccaaaccgtggaaagcaattcgcgtagatctgctgcgttgcccctacggcggttttgcgtttgcgatgttgcagtggaccggaagccgcatgttccgccgtgatctgcgctggtacgccactgacgagaagaacatgatgctggacaatcatgcgctgtatgacctgaccaagaaaatctttctcaaagctaaatcggaagaggaaattttcgcacatctggggcttgaatacctggaaccgttcgaacgtaacgca

SEQ ID NO: 2690 - protein, 529 aa, synthetic construct
  REGION 1..529: note = Variant of terminal deoxynucleotidyltransferase
MHHHHHHGGSGSHGIRTIDSDFGKKQQKKMDNHDSSAIYEIKFHEFVLFILEEKMGATRRTFLTDLARKKGFRVENELSDSVTHIVAENLSRSEVLAWLKEHKMEKTKQFELLDISWLIESMKVGKPVDTKGKYQLAESGEMSANPDPTEGRENELPPTMKTVSPYACQRRTTLNNHNQRFTDALEILAENYEFKRNDDTALEFRRAISVLKSLPFEVRSLKDTEGLPWIGDEVKGIMEEIIEVGNSREVQAVLNDEWYQSFHRFKSVFGVGVKTADKWYRMGLRTLEDVRSSKTLKLTPMQKAGLCYYEDLARGVTKAEADAISLLVQDAVATFDPDALVEIVGGFRRGKPQGHDVDLLISSPGAEKEQEDQLLQKVINLWKKQGLLLYGRLEWTQWEDGKLPSGKADVGDAGAKCFLILKLYDHKVDKSKWEMPTGSNMGEAKPWKAIRVDLLRCPYGGFAFAMLQWTGSRMFRRDLRWYATDEKNMMLDNHALYDLTKKIFLKAKSEEEIFAHLGLEYLEPFERNA

SEQ ID NO: 2691 - DNA, 1587 bp, synthetic construct
  misc_feature 1..1587: note = Variant of terminal deoxynucleotidyltransferase
  source 1..1587: mol_type = other DNA
atgcaccatcatcatcatcatggcggtagcggcagccacggcattcgtaccatcgattcggacttcgggaagaaacagcagaaaaaaatggataaccacgatagttccgccatctatgaaatcaaatttcacgagtttgtgctgttcattctcgaagaaaaaatgggtgcgacgcgtcgtacttttctgacagatttagcccgcaagaaagggttccgcgtcgagaatgaactgtcagacagcgttacccacatcgtggcagaaaatctgtcacgctctgaagtattggcttggctgaaagaacacaagatggagaagaccaagcaattcgaactgctggatattagctggcttatcgaaagcatgaaagttggtaaaccggtggacaccaaggggaaataccagttggcggaatcgggtgagatgagtgcgaacccagatccgacagagggtcgtgaaaacgagctgcctcctactatgaagaccgtttctccgtatgcgtgtcaacgccgcaccaccctgaacaaccataatcaacgttttacggacgcactggaaattcttgcggaaaattacgagttcaaacgcaacgatgatactgcgctggaatttcgtcgtgctatctccgtgctgaaaagccttccgtttgaggtacgtagcctgaaagacacggaaggattgccctggatcggtgatgaagtcaaagggattatggaagaaatcatcgaggtcgggaattcgcgtgaagtgcaggccgtgctcaatgatgagtggtatcaaagcttccaccgctttaagagtgtctttggagtgggggtgaagacagcagacaagtggtaccgtatgggtctgcgcaccctcgaggatgttcgttccagcaagaccctgaagttgaccccgatgcagaaagcgggtctgtgctattatgaagatcttgctcgcggcgttacgaaagccgaagctgacgcgatttctctgctggttcaggatgcagtcgcaactttcgacccggatgcgctggtggagattgtcggtggatttcgtcgtgggaaacctcagggtcacgacgttgatctgcttatcagttctccgggagctgagaaagagcaagaagaccagctcctgcagaaagtgaccaatctgtggaagaaacaagggttgttgctgtacggtcgtctggaatggacccagtgggaagatgggaaactcccatccggtaaggctgacgtaggtgacgcgggtgcgaaatgctttctgatcctcaaactttatgatcataaagtggacaaaagcaaatgggaaatgccgacgggttcgaacatgggcgaggccaaaccgtggaaagcaattcgcgtagatctgctgcgttgcccctacggcggttttgcgtttgcgatgttgcagtggaccggaagccgcatgttccgccgtgatctgcgctggtacgccgcggacgagaagaacatgatgctggacaatcatgcgctgtatgacctgaccaagaaaatctttctcaaagctaaatcggaagaggaaattttcgcacatctggggcttgaatacctggaaccgttcgaacgtaacgca

SEQ ID NO: 2692 - protein, 529 aa, synthetic construct
  REGION 1..529: note = Variant of terminal deoxynucleotidyltransferase
MHHHHHHGGSGSHGIRTIDSDFGKKQQKKMDNHDSSAIYEIKFHEFVLFILEEKMGATRRTFLTDLARKKGFRVENELSDSVTHIVAENLSRSEVLAWLKEHKMEKTKQFELLDISWLIESMKVGKPVDTKGKYQLAESGEMSANPDPTEGRENELPPTMKTVSPYACQRRTTLNNHNQRFTDALEILAENYEFKRNDDTALEFRRAISVLKSLPFEVRSLKDTEGLPWIGDEVKGIMEEIIEVGNSREVQAVLNDEWYQSFHRFKSVFGVGVKTADKWYRMGLRTLEDVRSSKTLKLTPMQKAGLCYYEDLARGVTKAEADAISLLVQDAVATFDPDALVEIVGGFRRGKPQGHDVDLLISSPGAEKEQEDQLLQKVTNLWKKQGLLLYGRLEWTQWEDGKLPSGKADVGDAGAKCFLILKLYDHKVDKSKWEMPTGSNMGEAKPWKAIRVDLLRCPYGGFAFAMLQWTGSRMFRRDLRWYAADEKNMMLDNHALYDLTKKIFLKAKSEEEIFAHLGLEYLEPFERNA

SEQ ID NO: 2693 - DNA, 1587 bp, synthetic construct
  misc_feature 1..1587: note = Variant of terminal deoxynucleotidyltransferase
  source 1..1587: mol_type = other DNA
atgcaccatcatcatcatcatggcggtagcggcagccacggcattcgtaccatcgattcggacttcgggaagaaacagcagaaaaaaatggataaccacgatagttccgccatctatgaaatcaaatttcacgagtttgtgctgttcattctcgaagaaaaaatgggtgcgacgcgtcgtacttttctgacagatttagcccgcaagaaagggttccgcgtcgagaatgaactttcagacagcgttacccacatcgtggcagaaaatctgtcacgctctgaagtattggcttggctgaaagaacacaagatggagaagaccaagcaattcgaactgctggatattagctggcttatcgaaagcatgaaagttggtaaaccggtggacaccaaggggaaataccagttggcggaatcgggtgagatgagtgcgaacccagatccgacagagggtcgtgaaaacgagctgcctcctactatgaagaccgtttctccgtatgcgtgtcaacgccgcaccaccctgaacaaccataatcaacgttttacggacgcactggaaattcttgcggaaaattacgagttcaaacgcaacgatgatactgcgctggaatttcgtcgtgctatctccgtgctgaaaagccttccgtttgaggtacgtagcctgaaagacacggaaggattgccctggatcggtgatgaagtcaaagggattatggaagaaatcatcgaggtcgggaattcgcgtgaagtgcaggccgtgctcaatgatgagtggtatcaaagcttccaccgctttaagagtgtctttggagtgggggtgaagacagcagacaagtggtaccgtatgggtctgcgcaccctcgaggatgttcgttccagcaagaccctgaagttgaccccgatgcagaaagcgggtctgtgctattatgaagatcttgctcgcggcgttacgaaagccgaagctgacgcgatttctctgctggttcaggatgcagtcgcaactttcgacccggatgcgctggtggagattgtcggtggatttcgtcgtgggaaacctcagggtcacgacgttgatctgcttatcagttctccgggagctgagaaagagcaagaagaccagctcctgcagaaagtgaccaatctgtggaagaaacaagggttgttgctgtacggtcgtctggaatggacccagtgggaagatgggaaactcccatccggtaaggctgacgtaggtgacgcgggtgcgaaatgctttctgatcctcaaactttatgatcataaagtggacaaaagcaaatgggaaatgccgacgggttcgaacatgggcgaggccaaaccgtggaaagcaattcgcgtagatctgctgcgttgcccctacggcggttttgcgtttgcgatgttgcagtggaccggaagccgcatgttccgccgtgatctgcgctggtacgccactgacgagaagaacatgatgctggacaatcatgcgctgtatgacctgaccaagaaaatctttctcccggctaaatcggaagaggaaattttcgcacatctggggcttgaatacctggaaccgttcgaacgtaacgca

SEQ ID NO: 2694 - protein, 529 aa, synthetic construct
  REGION 1..529: note = Variant of terminal deoxynucleotidyltransferase
MHHHHHHGGSGSHGIRTIDSDFGKKQQKKMDNHDSSAIYEIKFHEFVLFILEEKMGATRRTFLTDLARKKGFRVENELSDSVTHIVAENLSRSEVLAWLKEHKMEKTKQFELLDISWLIESMKVGKPVDTKGKYQLAESGEMSANPDPTEGRENELPPTMKTVSPYACQRRTTLNNHNQRFTDALEILAENYEFKRNDDTALEFRRAISVLKSLPFEVRSLKDTEGLPWIGDEVKGIMEEIIEVGNSREVQAVLNDEWYQSFHRFKSVFGVGVKTADKWYRMGLRTLEDVRSSKTLKLTPMQKAGLCYYEDLARGVTKAEADAISLLVQDAVATFDPDALVEIVGGFRRGKPQGHDVDLLISSPGAEKEQEDQLLQKVTNLWKKQGLLLYGRLEWTQWEDGKLPSGKADVGDAGAKCFLILKLYDHKVDKSKWEMPTGSNMGEAKPWKAIRVDLLRCPYGGFAFAMLQWTGSRMFRRDLRWYATDEKNMMLDNHALYDLTKKIFLPAKSEEEIFAHLGLEYLEPFERNA

SEQ ID NO: 2695 - DNA, 1587 bp, synthetic construct
  misc_feature 1..1587: note = Variant of terminal deoxynucleotidyltransferase
  source 1..1587: mol_type = other DNA
atgcaccatcatcatcatcatggcggtagcggcagccacggcattcgtaccatcgattcggacttcgggaagaaacagcagaaaaaaatggataaccacgatagttccgccatctatgaaatcaaatttcacgagtttgtgctgttcattctcgaagaaaaaatgggtgcgacgcgtcgtacttttctgacagatttagcccgcaagaaagggttccgcgtcgagaatgaactgtcagacagcgttacccacatcgtggcagaaaatctgtcacgctctgaagtattggcttggctgaaagaacacaagatggagaagaccaagcaattcgaactgctggatattagctggcttatcgaaagcatgaaagttggtaaaccggtggacaccaaggggaaataccagttggcggaatcgggtgagatgagtgcgaacccagatccgacagagggtcgtgaaaacgagctgcctcctactatgaagaccgtttctccgtatgcgtgtcaacgccgcaccaccctgaacaaccataatcaacgttttacggacgcactggaaattcttgcggaaaattacgagttcaaacgcaacgatgatactgcgctggaatttcgtcgtgctatctccgtgctgaaaagccttccgtttgaggtacgtagcctgaaagacacggaaggattgccctggatcggtgatgaagtcaaagggattatggaagaaatcatcgaggtcgggaattcgcgtgaagtgcaggccgtgctcaatgatgagtggtatcaaagcttccaccgctttaagagtgtctttggagtgggggtgaagacagcagacaagtggtaccgtatgggtctgcgcaccctcgaggatgttcgttccagcaagaccctgaagttgaccccgatgcagaaagcgggtctgtgctattatgaagatcttgctcgcggcgttacgaaagccgaagctgacgcgatttctctgctggttcaggatgcagtcgcaactttcgacccggatgcggtggtggagattgtcggtggatttcgtcgtgggaaacctcagggtcacgacgttgatctgcttatcagttctccgggagctgagaaagagcaagaagaccagctcctgcagaaagtgaccaatctgtggaagaaacaagggttgttgctgtacggtcgtctggaatggacccagtgggaagatgggaaactcccatccggtaaggctgacgtaggtgacgcgggtgcgaaatgctttctgatcctcaaactttatgatcataaagtggacaaaagcaaatgggaaatgccgacgggttcgaacatgggcgaggccaaaccgtggaaagcaattcgcgtagatctgctgcgttgcccctacggcggttttgcgtttgcgatgttgcagtggaccggaagccgcatgttccgccgtgatctgcgctggtacgccactgacgagaagaacatgatgctggacaatcatgcgctgtatgacctgaccaagaaaatctttctcaaagctaaatcggaagaggaaattttcgcacatctggggcttgaatacctggaaccgttcgaacgtaacgca

SEQ ID NO: 2696 - protein, 529 aa, synthetic construct
  REGION 1..529: note = Variant of terminal deoxynucleotidyltransferase
MHHHHHHGGSGSHGIRTIDSDFGKKQQKKMDNHDSSAIYEIKFHEFVLFILEEKMGATRRTFLTDLARKKGFRVENELSDSVTHIVAENLSRSEVLAWLKEHKMEKTKQFELLDISWLIESMKVGKPVDTKGKYQLAESGEMSANPDPTEGRENELPPTMKTVSPYACQRRTTLNNHNQRFTDALEILAENYEFKRNDDTALEFRRAISVLKSLPFEVRSLKDTEGLPWIGDEVKGIMEEIIEVGNSREVQAVLNDEWYQSFHRFKSVFGVGVKTADKWYRMGLRTLEDVRSSKTLKLTPMQKAGLCYYEDLARGVTKAEADAISLLVQDAVATFDPDAVVEIVGGFRRGKPQGHDVDLLISSPGAEKEQEDQLLQKVTNLWKKQGLLLYGRLEWTQWEDGKLPSGKADVGDAGAKCFLILKLYDHKVDKSKWEMPTGSNMGEAKPWKAIRVDLLRCPYGGFAFAMLQWTGSRMFRRDLRWYATDEKNMMLDNHALYDLTKKIFLKAKSEEEIFAHLGLEYLEPFERNA

SEQ ID NO: 2697 - DNA, 1587 bp, synthetic construct
  misc_feature 1..1587: note = Variant of terminal deoxynucleotidyltransferase
  source 1..1587: mol_type = other DNA
atgcaccatcatcatcatcatggcggtagcggcagccacggcattcgtaccatcgattcggacttcgggaagaaacagcagaaaaaaatggataaccacgatagttccgccatctatgaaatcaaatttcacgagtttgtgctgttcattctcgaagaaaaaatgggtgcgacgcgtcgtacttttctgacagatttagcccgcaagaaagggttccgcgtcgagaatgaactgtcagacagcgttacccacatcgtggcagaaaatctgtcacgctctgaagtattggcttggctgaaagaacacaagatggagaagaccaagcaattcgaactgctggatattagctggcttatcgaaagcatgaaagttggtaaaccggtggacaccaaggggaaataccagttggcggaatcgggtgagatgagtgcgaacccagatccgacagagggtcgtgaaaacgagctgcctcctactatgaagaccgtttctccgtatgcgtgtcaacgccgcaccaccctgaacaaccataatcaacgttttacggacgcactggaaattcttgcggaaaattacgagttcaaacgcaacgatgatactgcgctggaatttcgtcgtgctatctccgtgctgaaaagccttccgtttgaggtacgtagcctgaaagacacggaaggattgccctggatcggtgatgaagtcaaagggattatggaagaaatcatcgaggtcgggaattcgcgtgaagtgcaggccgtgctcaatgatgagtggtatcaaagcttccaccgctttaagagtgtctttggagtgggggtgaagacagcagacaagtggtaccgtatgggtctgcgcaccctcgaggatgttcgttccagcaagaccctgaagttgaccccgatgcagaaagcgggtctgtgctattatgaagatcttgctcgcggcgttacgaaagccgaagctgacgcgatttctctgctggttcaggatgcagtcgcaactttcgacccggatgcgctggtggagattgtcggtggatttcgtcgtgggaaacctcagggtcacgacgttgatctgcttatcagttctccgggagctgagaaagagcaagaagaccagctcctgcagaaagtggtgaatctgtggaagaaacaagggttgttgctgtacggtcgtctggaatggacccagtgggaagatgggaaactcccatccggtaaggctgacgtaggtgacgcgggtgcgaaatgctttctgatcctcaaactttatgatcataaagtggacaaaagcaaatgggaaatgccgacgggttcgaacatgggcgaggccaaaccgtggaaagcaattcgcgtagatctgctgcgttgcccctacggcggttttgcgtttgcgatgttgcagtggaccggaagccgcatgttccgccgtgatctgcgctggtacgccactgacgagaagaacatgatgctggacaatcatgcgctgtatgacctgaccaagaaaatctttctcaaagctaaatcggaagaggaaattttcgcacatctggggcttgaatacctggaaccgttcgaacgtaacgca

SEQ ID NO: 2698 - protein, 529 aa, synthetic construct
  REGION 1..529: note = Variant of terminal deoxynucleotidyltransferase
MHHHHHHGGSGSHGIRTIDSDFGKKQQKKMDNHDSSAIYEIKFHEFVLFILEEKMGATRRTFLTDLARKKGFRVENELSDSVTHIVAENLSRSEVLAWLKEHKMEKTKQFELLDISWLIESMKVGKPVDTKGKYQLAESGEMSANPDPTEGRENELPPTMKTVSPYACQRRTTLNNHNQRFTDALEILAENYEFKRNDDTALEFRRAISVLKSLPFEVRSLKDTEGLPWIGDEVKGIMEEIIEVGNSREVQAVLNDEWYQSFHRFKSVFGVGVKTADKWYRMGLRTLEDVRSSKTLKLTPMQKAGLCYYEDLARGVTKAEADAISLLVQDAVATFDPDALVEIVGGFRRGKPQGHDVDLLISSPGAEKEQEDQLLQKVVNLWKKQGLLLYGRLEWTQWEDGKLPSGKADVGDAGAKCFLILKLYDHKVDKSKWEMPTGSNMGEAKPWKAIRVDLLRCPYGGFAFAMLQWTGSRMFRRDLRWYATDEKNMMLDNHALYDLTKKIFLKAKSEEEIFAHLGLEYLEPFERNA

SEQ ID NO: 2699 - DNA, 1587 bp, synthetic construct
  misc_feature 1..1587: note = Variant of terminal deoxynucleotidyltransferase
  source 1..1587: mol_type = other DNA
atgcaccatcatcatcatcatggcggtagcggcagccacggcattcgtaccatcgattcggacttcgggaagaaacagcagaaaaaaatggataaccacgatagttccgccatctatgaaatcaaatttcacgagtttgtgctgttcattctcgaagaaaaaatgggtgcgacgcgtcgtacttttctgacagatttagcccgcaagaaagggttccgcgtcgagaatgaactgtcagacagcgttacccacatcgtggcagaaaatctgtcacgctctgaagtattggcttggctgaaagaacacaagatggagaagaccaagcaattcgaactgctggatattagctggcttatcgaaagcatgaaagttggtaaaccggtggacaccaaggggaaataccagttggcggaatcgggtgagatgagtgcgaacccagatccgacagagggtcgtgaaaacgagctgcctcctactatgaagaccgtttctccgtatgcgtgtcaacgccgcaccaccctgaacaaccataatcaacgttttacggacgcactggaaattcttgcggaaaattacgagttcaaacgcaacgatgatactgcgctggaatttcgtcgtgctatctccgtgctgaaaagccttccgtttgaggtacgtagcctgaaagacacggaaggattgccctggatcggtgatgaagtcaaagggattatggaagaaatcatcgaggtcgggaattcgcgtgaagtgcaggccgtgctcaatgatgagtggtatcaaagcttccaccgctttaagagtgtctttggagtgggggtgaagacagcagacaagtggtaccgtatgggtctgcgcaccctcgaggatgttcgttccagcaagaccctgaagttgaccccgatgcagaaagcgggtctgtgctattatgaagatcttgctcgcggcgttacgaaagccgaagctgacgcgatttctctgctggttcaggatgcagtcgcaactttcgacccggatgcgctggtggagattgtcggtggatttcgtcgtgggaaacctcagggtcacgacgttgatctgcttatcagttctccgggagctgagaaagagcaagaagaccagctcctgcagaaagtgaccaatctgtggaagaaacaagggttgttgctgtacggtcgtctggaatggacccagtgggaagatgggaaactcccatccggtaaggctgacgtaggtgacgcgggtgcgaaatgctttctgatcctcaaactttatgatcataaagtggacaaaagcaaatgggaaatgccgacgggttcgaacatgggcgaggccaaaccgtggaaagcaattcgcgtagatctgctgcgttgcccctacggcggttttgcgtttgcgatgttgcagtggaccggaagccgcatgttccgccgtgatctgcgctggtacgccactgacgagaagaacatgatgctggacaatcatgcgctgtatgacctgaccaagaaaatcaagctcaaagctaaatcggaagaggaaattttcgcacatctggggcttgaatacctggaaccgttcgaacgtaacgca

SEQ ID NO: 2700 - protein, 529 aa, synthetic construct
  REGION 1..529: note = Variant of terminal deoxynucleotidyltransferase
MHHHHHHGGSGSHGIRTIDSDFGKKQQKKMDNHDSSAIYEIKFHEFVLFILEEKMGATRRTFLTDLARKKGFRVENELSDSVTHIVAENLSRSEVLAWLKEHKMEKTKQFELLDISWLIESMKVGKPVDTKGKYQLAESGEMSANPDPTEGRENELPPTMKTVSPYACQRRTTLNNHNQRFTDALEILAENYEFKRNDDTALEFRRAISVLKSLPFEVRSLKDTEGLPWIGDEVKGIMEEIIEVGNSREVQAVLNDEWYQSFHRFKSVFGVGVKTADKWYRMGLRTLEDVRSSKTLKLTPMQKAGLCYYEDLARGVTKAEADAISLLVQDAVATFDPDALVEIVGGFRRGKPQGHDVDLLISSPGAEKEQEDQLLQKVTNLWKKQGLLLYGRLEWTQWEDGKLPSGKADVGDAGAKCFLILKLYDHKVDKSKWEMPTGSNMGEAKPWKAIRVDLLRCPYGGFAFAMLQWTGSRMFRRDLRWYATDEKNMMLDNHALYDLTKKIKLKAKSEEEIFAHLGLEYLEPFERNA

SEQ ID NO: 2701 - DNA, 1587 bp, synthetic construct
  misc_feature 1..1587: note = Variant of terminal deoxynucleotidyltransferase
  source 1..1587: mol_type = other DNA
atgcaccatcatcatcatcatggcggtagcggcagccacggcattcgtaccatcgattcggacttcgggaagaaacagcagaaaaaaatggataaccacgatagttccgccatctatgaaatcaaatttcacgagtttgtgctgttcattctcgaagaaaaaatgggtgcgacgcgtcgtacttttctgacagatttagcccgcaagaaagggttccgcgtcgagaatgaactgtcagacagcgttacccacatcgtggcagaaaatctgtcacgctctgaagtattggcttggctgaaagaacacaagatggagaagaccaagcaattcgaactgctggatattagctggcttatcgaaagcatgaaagttggtaaaccggtggacaccaaggggaaataccagttggcggaatcgggtgagatgagtgcgaacccagatccgacagagggtcgtgaaaacgagctgcctcctactatgaagaccgtttctccgtatgcgtgtcaacgccgcaccaccctgaacaaccataatcaacgttttacggacgcactggaaattcttgcggaaaattacgagttcaaacgcaacgatgatactgcgctggaatttcgtcgtgctatctccgtgctgaaaagccttccgtttgaggtacgtagcctgaaagacacggaaggattgccctggatcggtgatgaagtcaaagggattatggaagaaatcatcgaggtcgggaattcgcgtgaagtgcaggccgtgctcaatgatgagtggtatcaaagcttccaccgctttaagagtgtctttggagtgggggtgaagacagcagacaagtggtaccgtatgggtctgcgcaccctcgaggatgttcgttccagcaagaccctgaagttgaccccgatgcagaaagcgggtctgtgctattatgaagatcttgctcgcggcgttacgaaagccgaagctgacgcgatttctctgctggttcaggatgcagtcgcaactttcgacccggatgcgctggtggagattgtcggtggatttcgtcgtgggaaacctcagggtcacgacgttgatctgcttatcagttctccgggagctgagaaagagcaagaagaccagctcctgcagaaagtgaccaatctgtttaagaaacaagggttgttgctgtacggtcgtctggaatggacccagtgggaagatgggaaactcccatccggtaaggctgacgtaggtgacgcgggtgcgaaatgctttctgatcctcaaactttatgatcataaagtggacaaaagcaaatgggaaatgccgacgggttcgaacatgggcgaggccaaaccgtggaaagcaattcgcgtagatctgctgcgttgcccctacggcggttttgcgtttgcgatgttgcagtggaccggaagccgcatgttccgccgtgatctgcgctggtacgccactgacgagaagaacatgatgctggacaatcatgcgctgtatgacctgaccaagaaaatctttctcaaagctaaatcggaagaggaaattttcgcacatctggggcttgaatacctggaaccgttcgaacgtaacgca

SEQ ID NO: 2702 - protein, 529 aa, synthetic construct
  REGION 1..529: note = Variant of terminal deoxynucleotidyltransferase
MHHHHHHGGSGSHGIRTIDSDFGKKQQKKMDNHDSSAIYEIKFHEFVLFILEEKMGATRRTFLTDLARKKGFRVENELSDSVTHIVAENLSRSEVLAWLKEHKMEKTKQFELLDISWLIESMKVGKPVDTKGKYQLAESGEMSANPDPTEGRENELPPTMKTVSPYACQRRTTLNNHNQRFTDALEILAENYEFKRNDDTALEFRRAISVLKSLPFEVRSLKDTEGLPWIGDEVKGIMEEIIEVGNSREVQAVLNDEWYQSFHRFKSVFGVGVKTADKWYRMGLRTLEDVRSSKTLKLTPMQKAGLCYYEDLARGVTKAEADAISLLVQDAVATFDPDALVEIVGGFRRGKPQGHDVDLLISSPGAEKEQEDQLLQKVTNLFKKQGLLLYGRLEWTQWEDGKLPSGKADVGDAGAKCFLILKLYDHKVDKSKWEMPTGSNMGEAKPWKAIRVDLLRCPYGGFAFAMLQWTGSRMFRRDLRWYATDEKNMMLDNHALYDLTKKIFLKAKSEEEIFAHLGLEYLEPFERNA

SEQ ID NO: 2703 - DNA, 1587 bp, synthetic construct
  misc_feature 1..1587: note = Variant of terminal deoxynucleotidyltransferase
  source 1..1587: mol_type = other DNA
atgcaccatcatcatcatcatggcggtagcggcagccacggcattcgtaccatcgattcggacttcgggaagaaacagcagaaaaaaatggataaccacgatagttccgccatctatgaaatcaaatttcacgagtttgtgctgttcattctcgaagaaaaaatgggtgcgacgcgtcgtacttttctgacagatttagcccgcaagaaagggttccgcgtcgagaatgaactgtcagacagcgttacccacatcgtggcagaaaatctgtcacgctctgaagtattggcttggctgaaagaacacaagatggagaagaccaagcaattcgaactgctggatattagctggcttatcgaaagcatgaaagttggtaaaccggtggacaccaaggggaaataccagttggcggaatcgggtgagatgagtgcgaacccagatccgacagagggtcgtgaaaacgagctgcctcctactatgaagaccgtttctccgtatgcgtgtcaacgccgcaccaccctgaacaaccataatcaacgttttacggacgcactggaaattcttgcggaaaattacgagttcaaacgcaacgatgatactgcgctggaatttcgtcgtgctatctccgtgctgaaaagccttccgtttgaggtacgtagcctgaaagacacggaaggattgccctggatcggtgatgaagtcaaagggattatggaagaaatcatcgaggtcgggaattcgcgtgaagtgcaggccgtgctcaatgatgagtggtatcaaagcttccaccgctttaagagtgtctttggagtgggggtgaagacagcagacaagtggtaccgtatgggtctgcgcaccctcgaggatgttcgttccagcaagaccctgaagttgaccccgatgcagaaagcgggtctgtgctattatgaagatcttgctcgcggcgttacgaaagccgaagctgacgcgatttctctgctggttcaggatgcagtcgcaactttcgacccggatgcgctggtggagattgtcggtggatttcgtcgtgggaaacctcagggtcacgacgttgatctgcttatcagttctccgggagctgagaaagagcaagaagaccagctcctgcagaaagtgaccaatctgtggaagaaacaagggttgttgctgtacggtcgtctggaatggacccagtgggaagatgggaaatctccatccggtaaggctgacgtaggtgacgcgggtgcgaaatgctttctgatcctcaaactttatgatcataaagtggacaaaagcaaatgggaaatgccgacgggttcgaacatgggcgaggccaaaccgtggaaagcaattcgcgtagatctgctgcgttgcccctacggcggttttgcgtttgcgatgttgcagtggaccggaagccgcatgttccgccgtgatctgcgctggtacgccactgacgagaagaacatgatgctggacaatcatgcgctgtatgacctgaccaagaaaatctttctcaaagctaaatcggaagaggaaattttcgcacatctggggcttgaatacctggaaccgttcgaacgtaacgca

SEQ ID NO: 2704 - protein, 529 aa, synthetic construct
  REGION 1..529: note = Variant of terminal deoxynucleotidyltransferase
MHHHHHHGGSGSHGIRTIDSDFGKKQQKKMDNHDSSAIYEIKFHEFVLFILEEKMGATRRTFLTDLARKKGFRVENELSDSVTHIVAENLSRSEVLAWLKEHKMEKTKQFELLDISWLIESMKVGKPVDTKGKYQLAESGEMSANPDPTEGRENELPPTMKTVSPYACQRRTTLNNHNQRFTDALEILAENYEFKRNDDTALEFRRAISVLKSLPFEVRSLKDTEGLPWIGDEVKGIMEEIIEVGNSREVQAVLNDEWYQSFHRFKSVFGVGVKTADKWYRMGLRTLEDVRSSKTLKLTPMQKAGLCYYEDLARGVTKAEADAISLLVQDAVATFDPDALVEIVGGFRRGKPQGHDVDLLISSPGAEKEQEDQLLQKVTNLWKKQGLLLYGRLEWTQWEDGKSPSGKADVGDAGAKCFLILKLYDHKVDKSKWEMPTGSNMGEAKPWKAIRVDLLRCPYGGFAFAMLQWTGSRMFRRDLRWYATDEKNMMLDNHALYDLTKKIFLKAKSEEEIFAHLGLEYLEPFERNA

SEQ ID NO: 2705 - DNA, 1587 bp, synthetic construct
  misc_feature 1..1587: note = Variant of terminal deoxynucleotidyltransferase
  source 1..1587: mol_type = other DNA
atgcaccatcatcatcatcatggcggtagcggcagccacggcattcgtaccatcgattcggacttcgggaagaaacagcagaaaaaaatggataaccacgatagttccgccatctatgaaatcaaatttcacgagtttgtgctgttcattctcgaagaaaaaatgggtgcgacgcgtcgtacttttctgacagatttagcccgcaagaaagggttccgcgtcgagaatgaactgtcagacagcgttacccacatcgtggcagaaaatctgtcacgctctgaagtattggcttggctgaaagaacacaagatggagaagaccaagcaattcgaactgctggatattagctggcttatcgaaagcatgaaagttggtaaaccggtggacaccaaggggaaataccagttggcggaatcgggtgagatgagtgcgaacccagatccgacagagggtcgtgaaaacgagctgcctcctactatgaagaccgtttctccgtatgcgtgtatgcgccgcaccaccctgaacaaccataatcaacgttttacggacgcactggaaattcttgcggaaaattacgagttcaaacgcaacgatgatactgcgctggaatttcgtcgtgctatctccgtgctgaaaagccttccgtttgaggtacgtagcctgaaagacacggaaggattgccctggatcggtgatgaagtcaaagggattatggaagaaatcatcgaggtcgggaattcgcgtgaagtgcaggccgtgctcaatgatgagtggtatcaaagcttccaccgctttaagagtgtctttggagtgggggtgaagacagcagacaagtggtaccgtatgggtctgcgcaccctcgaggatgttcgttccagcaagaccctgaagttgaccccgatgcagaaagcgggtctgtgctattatgaagatcttgctcgcggcgttacgaaagccgaagctgacgcgatttctctgctggttcaggatgcagtcgcaactttcgacccggatgcgctggtggagattgtcggtggatttcgtcgtgggaaacctcagggtcacgacgttgatctgcttatcagttctccgggagctgagaaagagcaagaagaccagctcctgcagaaagtgaccaatctgtggaagaaacaagggttgttgctgtacggtcgtctggaatggacccagtgggaagatgggaaactcccatccggtaaggctgacgtaggtgacgcgggtgcgaaatgctttctgatcctcaaactttatgatcataaagtggacaaaagcaaatgggaaatgccgacgggttcgaacatgggcgaggccaaaccgtggaaagcaattcgcgtagatctgctgcgttgcccctacggcggttttgcgtttgcgatgttgcagtggaccggaagccgcatgttccgccgtgatctgcgctggtacgccactgacgagaagaacatgatgctggacaatcatgcgctgtatgacctgaccaagaaaatctttctcaaagctaaatcggaagaggaaattttcgcacatctggggcttgaatacctggaaccgttcgaacgtaacgca

SEQ ID NO: 2706 - protein, 529 aa, synthetic construct
  REGION 1..529: note = Variant of terminal deoxynucleotidyltransferase
MHHHHHHGGSGSHGIRTIDSDFGKKQQKKMDNHDSSAIYEIKFHEFVLFILEEKMGATRRTFLTDLARKKGFRVENELSDSVTHIVAENLSRSEVLAWLKEHKMEKTKQFELLDISWLIESMKVGKPVDTKGKYQLAESGEMSANPDPTEGRENELPPTMKTVSPYACMRRTTLNNHNQRFTDALEILAENYEFKRNDDTALEFRRAISVLKSLPFEVRSLKDTEGLPWIGDEVKGIMEEIIEVGNSREVQAVLNDEWYQSFHRFKSVFGVGVKTADKWYRMGLRTLEDVRSSKTLKLTPMQKAGLCYYEDLARGVTKAEADAISLLVQDAVATFDPDALVEIVGGFRRGKPQGHDVDLLISSPGAEKEQEDQLLQKVTNLWKKQGLLLYGRLEWTQWEDGKLPSGKADVGDAGAKCFLILKLYDHKVDKSKWEMPTGSNMGEAKPWKAIRVDLLRCPYGGFAFAMLQWTGSRMFRRDLRWYATDEKNMMLDNHALYDLTKKIFLKAKSEEEIFAHLGLEYLEPFERNA

SEQ ID NO: 2707 - DNA, 1587 bp, synthetic construct
  misc_feature 1..1587: note = Variant of terminal deoxynucleotidyltransferase
  source 1..1587: mol_type = other DNA
atgcaccatcatcatcatcatggcggtagcggcagccacggcattcgtaccatcgattcggacttcgggaagaaacagcagaaaaaaatggataaccacgatagttccgccatctatgaaatcaaatttcacgagtttgtgctgttcattctcgaagaaaaaatgggtgcgacgcgtcgtacttttctgacagatttagcccgcaagaaagggttccgcgtcgagaatgaactgtcagacagcgttacccacatcgtggcagaaaatctgtcacgctctgaagtattggcttggctgaaagaacacaagatggagaagaccaagcaattcgaactgctggatattagctggcttatcgaaagcatgaaagttggtaaaccggtggacaccaaggggaaataccagttggcggaatcgggtgagatgagtgcgaacccagatccgacagagggtcgtgaaaacgagctgcctcctactatgaagaccgtttctccgtatgcgtgtcaacgccgcaccaccctgaacaaccataatcaacgttttacggacgcactggaaattcttgcggaaaattacgagttcaaacgcaacgatgatactgcgctggaatttcgtcgtgctatctccgtgctgaaaagccttccgtttgaggtacgtagcctgaaagacacggaaggattgccctggatcggtgatgaagtcaaagggattatggaagaaatcatcgaggtcgggaattcgcgtgaagtgcaggccgtgctcaatgatgagtggtatcaaagcttccaccgctttaagagtgtctttggagtgggggtgaagacagcagacaagtggtaccgtatgggtctgcgcaccctcgaggatgttcgttccagcaagaccctgaagttgaccccgatgcagaaagcgggtctgtgctattatgaagatcttgctcgcggcgttacgaaagccgaagctgacgcgatttctctgctggttcaggatgcagtcgcaactttcgacccggatgcgctggtggagattgtcggtggatttcgtcgtgggaaacctcagggtcacgacgttgatctgcttatcagttctccgggagctgagaaagagcaagaagaccagctcctgcagaaagtgaccaatctgtggaagaaacaagggttgttgctgtacggtcgtctggaatggacccagtgggaagatgggaaagcgccatccggtaaggctgacgtaggtgacgcgggtgcgaaatgctttctgatcctcaaactttatgatcataaagtggacaaaagcaaatgggaaatgccgacgggttcgaacatgggcgaggccaaaccgtggaaagcaattcgcgtagatctgctgcgttgcccctacggcggttttgcgtttgcgatgttgcagtggaccggaagccgcatgttccgccgtgatctgcgctggtacgccactgacgagaagaacatgatgctggacaatcatgcgctgtatgacctgaccaagaaaatctttctcaaagctaaatcggaagaggaaattttcgcacatctggggcttgaatacctggaaccgttcgaacgtaacgca

SEQ ID NO: 2708 - protein, 529 aa, synthetic construct
  REGION 1..529: note = Variant of terminal deoxynucleotidyltransferase
MHHHHHHGGSGSHGIRTIDSDFGKKQQKKMDNHDSSAIYEIKFHEFVLFILEEKMGATRRTFLTDLARKKGFRVENELSDSVTHIVAENLSRSEVLAWLKEHKMEKTKQFELLDISWLIESMKVGKPVDTKGKYQLAESGEMSANPDPTEGRENELPPTMKTVSPYACQRRTTLNNHNQRFTDALEILAENYEFKRNDDTALEFRRAISVLKSLPFEVRSLKDTEGLPWIGDEVKGIMEEIIEVGNSREVQAVLNDEWYQSFHRFKSVFGVGVKTADKWYRMGLRTLEDVRSSKTLKLTPMQKAGLCYYEDLARGVTKAEADAISLLVQDAVATFDPDALVEIVGGFRRGKPQGHDVDLLISSPGAEKEQEDQLLQKVTNLWKKQGLLLYGRLEWTQWEDGKAPSGKADVGDAGAKCFLILKLYDHKVDKSKWEMPTGSNMGEAKPWKAIRVDLLRCPYGGFAFAMLQWTGSRMFRRDLRWYATDEKNMMLDNHALYDLTKKIFLKAKSEEEIFAHLGLEYLEPFERNA

SEQ ID NO: 2709 - DNA, 1587 bp, synthetic construct
  misc_feature 1..1587: note = Variant of terminal deoxynucleotidyltransferase
  source 1..1587: mol_type = other DNA
atgcaccatcatcatcatcatggcggtagcggcagccacggcattcgtaccatcgattcggacttcgggaagaaacagcagaaaaaaatggataaccacgatagttccgccatctatgaaatcaaatttcacgagtttgtgctgttcattctcgaagaaaaaatgggtgcgacgcgtcgtacttttctgacagatttagcccgcaagaaagggttccgcgtcgagaatgaactgtcagacagcgttacccacatcgtggcagaaaatctgtcacgctctgaagtattggcttggctgaaagaacacaagatggagaagaccaagcaattcgaactgctggatattagctggcttatcgaaagcatgaaagttggtaaaccggtggacaccaaggggaaataccagttggcggaatcgggtgagatgagtgcgaacccagatccgacagagggtcgtgaaaacgagctgcctcctactatgaagaccgtttctccgtatgcgtgtcaacgccgcaccaccctgaacaaccataatcaacgttttacggacgcactggaaattcttgcggaaaattacgagttcaaacgcaacgatgatactgcgctggaatttcgtcgtgctatctccgtgctgaaaagccttccgtttgaggtacgtagcctgaaagacacggaaggattgccctggatcggtgatgaagtcaaagggattatggaagaaatcatcgaggtcgggaattcgcgtgaagtgcaggccgtgctcaatgatgagtggtatcaaagcttccaccgctttaagagtgtctttggagtgggggtgaagacagcagacaagtggtaccgtatgggtctgcgcaccctcgaggatgttcgtaatagcaagaccctgaagttgaccccgatgcagaaagcgggtctgtgctattatgaagatcttgctcgcggcgttacgaaagccgaagctgacgcgatttctctgctggttcaggatgcagtcgcaactttcgacccggatgcgctggtggagattgtcggtggatttcgtcgtgggaaacctcagggtcacgacgttgatctgcttatcagttctccgggagctgagaaagagcaagaagaccagctcctgcagaaagtgaccaatctgtggaagaaacaagggttgttgctgtacggtcgtctggaatggacccagtgggaagatgggaaactcccatccggtaaggctgacgtaggtgacgcgggtgcgaaatgctttctgatcctcaaactttatgatcataaagtggacaaaagcaaatgggaaatgccgacgggttcgaacatgggcgaggccaaaccgtggaaagcaattcgcgtagatctgctgcgttgcccctacggcggttttgcgtttgcgatgttgcagtggaccggaagccgcatgttccgccgtgatctgcgctggtacgccactgacgagaagaacatgatgctggacaatcatgcgctgtatgacctgaccaagaaaatctttctcaaagctaaatcggaagaggaaattttcgcacatctggggcttgaatacctggaaccgttcgaacgtaacgca

SEQ ID NO: 2710 - protein, 529 aa, synthetic construct
  REGION 1..529: note = Variant of terminal deoxynucleotidyltransferase
MHHHHHHGGSGSHGIRTIDSDFGKKQQKKMDNHDSSAIYEIKFHEFVLFILEEKMGATRRTFLTDLARKKGFRVENELSDSVTHIVAENLSRSEVLAWLKEHKMEKTKQFELLDISWLIESMKVGKPVDTKGKYQLAESGEMSANPDPTEGRENELPPTMKTVSPYACQRRTTLNNHNQRFTDALEILAENYEFKRNDDTALEFRRAISVLKSLPFEVRSLKDTEGLPWIGDEVKGIMEEIIEVGNSREVQAVLNDEWYQSFHRFKSVFGVGVKTADKWYRMGLRTLEDVRNSKTLKLTPMQKAGLCYYEDLARGVTKAEADAISLLVQDAVATFDPDALVEIVGGFRRGKPQGHDVDLLISSPGAEKEQEDQLLQKVTNLWKKQGLLLYGRLEWTQWEDGKLPSGKADVGDAGAKCFLILKLYDHKVDKSKWEMPTGSNMGEAKPWKAIRVDLLRCPYGGFAFAMLQWTGSRMFRRDLRWYATDEKNMMLDNHALYDLTKKIFLKAKSEEEIFAHLGLEYLEPFERNA

SEQ ID NO: 2711 - DNA, 1587 bp, synthetic construct
  misc_feature 1..1587: note = Variant of terminal deoxynucleotidyltransferase
  source 1..1587: mol_type = other DNA
atgcaccatcatcatcatcatggcggtagcggcagccacggcattcgtaccatcgattcggacttcgggaagaaacagcagaaaaaaatggataaccacgatagttccgccatctatgaaatcaaatttcacgagtttgtgctgttcattctcgaagaaaaaatgggtgcgacgcgtcgtacttttctgacagatttagcccgcaagaaagggttccgcgtcgagaatgaactgtcagacagcgttacccacatcgtggcagaaaatctgtcacgctctgaagtattggcttggctgaaagaacacaagatggagaagaccaagcaattcgaactgctggatattagctggcttatcgaaagcatgaaagttggtaaaccggtggacaccaaggggaaataccagttggcggaatcgggtgagatgagtgcgaacccagatccgacagagggtcgtgaaaacgagctgcctcctactatgaagaccgtttctccgtatgcgtgtcaacgccgcaccaccctgaacaaccataatcaacgttttacggacgcactggaaattcttgcggaaaattacgagttcaaacgcaacgatgatactgcgctggaatttcgtcgtgctatctccgtgctgaaaagccttccgtttgaggtacgtagcctgaaagacacggaaggattgccctggatcggtgatgaagtcaaagggattatggaagaaatcatcgaggtcgggaattcgcgtgaagtgcaggccgtgctcaatgatgagtggtatcaaagcttccaccgctttaagagtgtctttggagtgggggtgaagacagcagacaagtggtaccgtatgggtctgcgcaccctcgaggatgttcgttccagcaagaccctgaagttgaccccgatgcagaaagcgggtctgtgctattatgaagatcttgctcgcggcgttacgaaagccgaagctgacgcgatttctctgctggttcaggatgcagtcgcaactttcgacccggatgcgctggtggagattgtcggtggatttcgtcgtgggaaacctcagggtcacgacgttgatctgcttatcagttctccgggagctgagaaagagcaagaagaccagctcctgcagaaagtgaccaatctgtggaagaaacaagggttgttgctgtacggtcgtctggaatggacccagtgggaagatggggtgctcccatccggtaaggctgacgtaggtgacgcgggtgcgaaatgctttctgatcctcaaactttatgatcataaagtggacaaaagcaaatgggaaatgccgacgggttcgaacatgggcgaggccaaaccgtggaaagcaattcgcgtagatctgctgcgttgcccctacggcggttttgcgtttgcgatgttgcagtggaccggaagccgcatgttccgccgtgatctgcgctggtacgccactgacgagaagaacatgatgctggacaatcatgcgctgtatgacctgaccaagaaaatctttctcaaagctaaatcggaagaggaaattttcgcacatctggggcttgaatacctggaaccgttcgaacgtaacgca

SEQ ID NO: 2712 - protein, 529 aa, synthetic construct
  REGION 1..529: note = Variant of terminal deoxynucleotidyltransferase
MHHHHHHGGSGSHGIRTIDSDFGKKQQKKMDNHDSSAIYEIKFHEFVLFILEEKMGATRRTFLTDLARKKGFRVENELSDSVTHIVAENLSRSEVLAWLKEHKMEKTKQFELLDISWLIESMKVGKPVDTKGKYQLAESGEMSANPDPTEGRENELPPTMKTVSPYACQRRTTLNNHNQRFTDALEILAENYEFKRNDDTALEFRRAISVLKSLPFEVRSLKDTEGLPWIGDEVKGIMEEIIEVGNSREVQAVLNDEWYQSFHRFKSVFGVGVKTADKWYRMGLRTLEDVRSSKTLKLTPMQKAGLCYYEDLARGVTKAEADAISLLVQDAVATFDPDALVEIVGGFRRGKPQGHDVDLLISSPGAEKEQEDQLLQKVTNLWKKQGLLLYGRLEWTQWEDGVLPSGKADVGDAGAKCFLILKLYDHKVDKSKWEMPTGSNMGEAKPWKAIRVDLLRCPYGGFAFAMLQWTGSRMFRRDLRWYATDEKNMMLDNHALYDLTKKIFLKAKSEEEIFAHLGLEYLEPFERNA

SEQ ID NO: 2713 - DNA, 1587 bp, synthetic construct
  misc_feature 1..1587: note = Variant of terminal deoxynucleotidyltransferase
  source 1..1587: mol_type = other DNA
atgcaccatcatcatcatcatggcggtagcggcagccacggcattcgtaccatcgattcggacttcgggaagaaacagcagaaaaaaatggataaccacgatagttccgccatctatgaaatcaaatttcacgagtttgtgctgttcattctcgaagaaaaaatgggtgcgacgcgtcgtacttttctgacagatttagcccgcaagaaagggttccgcgtcgagaatgaactgtcagacagcgttacccacatcgtggcagaaaatctgtcacgctctgaagtattggcttggctgaaagaacacaagatggagaagaccaagcaattcgaactgctggatattagctggcttatcgaaagcatgaaagttggtaaaccggtggacaccaaggggaaataccagttggcggaatcgggtgagatgagtgcgaacccagatccgacagagggtcgtgaaaacgagctgcctcctactatgaagaccgtttctccgtatgcgtgtcaacgccgcaccaccctgaacaaccataatcaacgttttacggacgcactggaaattcttgcggaaaattacgagttcaaacgcaacgatgatactgcgctggaatttcgtcgtgctatctccgtgctgaaaagccttccgtttgaggtacgtagcctgaaagacacggaaggattgccctggatcggtgatgaagtcaaagggattatggaagaaatcatcgaggtcgggaattcgcgtgaagtgcaggccgtgctcaatgatgagtggtatcaaagcttccaccgctttaagagtgtctttggagtgggggtgaagacagcagacaagtggtaccgtatgggtctgcgcaccctcgaggatgttcgttccagcaagaccctgaagttgaccccgatgcagaaagcgggtctgtgctattatgaagatcttgctcgcggcgttacgaaagccgaagctgacgcgatttctctgctggttcaggatgcagtcgcaactttcgacccggatgcgctggtggagattgtcggtggatttcgtcgtgggaaacctcagggtcacgacgttgatctgcttatcagttctccgggagctgagaaagagcaagaagaccagctcctgcagaaagtgaccaatctgtggaagaaacaagggttgttgctgtacggtcgtctggaatggacccagtgggaagatgggaaactcccatccggtaaggctgacgtaggtgacgcgggtgcgaaatgctttctgatcctcaaactttatgatcattgggtggacaaaagcaaatgggaaatgccgacgggttcgaacatgggcgaggccaaaccgtggaaagcaattcgcgtagatctgctgcgttgcccctacggcggttttgcgtttgcgatgttgcagtggaccggaagccgcatgttccgccgtgatctgcgctggtacgccactgacgagaagaacatgatgctggacaatcatgcgctgtatgacctgaccaagaaaatctttctcaaagctaaatcggaagaggaaattttcgcacatctggggcttgaatacctggaaccgttcgaacgtaacgca

SEQ ID NO: 2714 - protein, 529 aa, synthetic construct
  REGION 1..529: note = Variant of terminal deoxynucleotidyltransferase
MHHHHHHGGSGSHGIRTIDSDFGKKQQKKMDNHDSSAIYEIKFHEFVLFILEEKMGATRRTFLTDLARKKGFRVENELSDSVTHIVAENLSRSEVLAWLKEHKMEKTKQFELLDISWLIESMKVGKPVDTKGKYQLAESGEMSANPDPTEGRENELPPTMKTVSPYACQRRTTLNNHNQRFTDALEILAENYEFKRNDDTALEFRRAISVLKSLPFEVRSLKDTEGLPWIGDEVKGIMEEIIEVGNSREVQAVLNDEWYQSFHRFKSVFGVGVKTADKWYRMGLRTLEDVRSSKTLKLTPMQKAGLCYYEDLARGVTKAEADAISLLVQDAVATFDPDALVEIVGGFRRGKPQGHDVDLLISSPGAEKEQEDQLLQKVTNLWKKQGLLLYGRLEWTQWEDGKLPSGKADVGDAGAKCFLILKLYDHWVDKSKWEMPTGSNMGEAKPWKAIRVDLLRCPYGGFAFAMLQWTGSRMFRRDLRWYATDEKNMMLDNHALYDLTKKIFLKAKSEEEIFAHLGLEYLEPFERNA

SEQ ID NO: 2715 - DNA, 1587 bp, synthetic construct
  misc_feature 1..1587: note = Variant of terminal deoxynucleotidyltransferase
  source 1..1587: mol_type = other DNA
atgcaccatcatcatcatcatggcggtagcggcagccacggcattcgtaccatcgattcggacttcgggaagaaacagcagaaaaaaatggataaccacgatagttccgccatctatgaaatcaaatttcacgagtttgtgctgttcattctcgaagaaaaaatgggtgcgacgcgtcgtacttttctgacagatttagcccgcaagaaagggttccgcgtcgagaatgaactgtcagacagcgttacccacatcgtggcagaaaatctgtcacgctctgaagtattggcttggctgaaagaacacaagatggagaagaccaagcaattcgaactgctggatattagctggcttatcgaaagcatgaaagttggtaaaccggtggacaccaaggggaaataccagttggcggaatcgggtgagatgagtgcgaacccagatccgacagagggtcgtgaaaacgagctgcctcctactatgaagaccgtttctccgtatgcgtgtcaacgccgcaccaccctgaacaaccataatcaacgttttacggacgcactggaaattcttgcggaaaattacgagttcaaacgcaacgatgatactgcgctggaatttcgtcgtgctatctccgtgctgaaaagccttccgtttgaggtacgtagcctgaaagacacggaaggattgccctggatcggtgatgaagtcaaagggattatggaagaaatcatcgaggtcgggaattcgcgtgaagtgcaggccgtgctcaatgatgagtggtatcaaagcttccaccgctttaagagtgtctttggagtgggggtgaagacagcagacaagtggtaccgtatgggtctgcgcaccctcgaggatgttcgttccagcaagaccctgaagttgaccccgatgcagaaagcgggtctgtgctattatgaagatcttgctcgcggcgttacgaaagccgaagctgacgcgatttctctgctggttcaggatgcagtcgcaactttcgacccggatgcgattgtggagattgtcggtggatttcgtcgtgggaaacctcagggtcacgacgttgatctgcttatcagttctccgggagctgagaaagagcaagaagaccagctcctgcagaaagtgaccaatctgtggaagaaacaagggttgttgctgtacggtcgtctggaatggacccagtgggaagatgggaaactcccatccggtaaggctgacgtaggtgacgcgggtgcgaaatgctttctgatcctcaaactttatgatcataaagtggacaaaagcaaatgggaaatgccgacgggttcgaacatgggcgaggccaaaccgtggaaagcaattcgcgtagatctgctgcgttgcccctacggcggttttgcgtttgcgatgttgcagtggaccggaagccgcatgttccgccgtgatctgcgctggtacgccactgacgagaagaacatgatgctggacaatcatgcgctgtatgacctgaccaagaaaatctttctcaaagctaaatcggaagaggaaattttcgcacatctggggcttgaatacctggaaccgttcgaacgtaacgca

SEQ ID NO: 2716 - protein, 529 aa, synthetic construct
  REGION 1..529: note = Variant of terminal deoxynucleotidyltransferase
MHHHHHHGGSGSHGIRTIDSDFGKKQQKKMDNHDSSAIYEIKFHEFVLFILEEKMGATRRTFLTDLARKKGFRVENELSDSVTHIVAENLSRSEVLAWLKEHKMEKTKQFELLDISWLIESMKVGKPVDTKGKYQLAESGEMSANPDPTEGRENELPPTMKTVSPYACQRRTTLNNHNQRFTDALEILAENYEFKRNDDTALEFRRAISVLKSLPFEVRSLKDTEGLPWIGDEVKGIMEEIIEVGNSREVQAVLNDEWYQSFHRFKSVFGVGVKTADKWYRMGLRTLEDVRSSKTLKLTPMQKAGLCYYEDLARGVTKAEADAISLLVQDAVATFDPDAIVEIVGGFRRGKPQGHDVDLLISSPGAEKEQEDQLLQKVTNLWKKQGLLLYGRLEWTQWEDGKLPSGKADVGDAGAKCFLILKLYDHKVDKSKWEMPTGSNMGEAKPWKAIRVDLLRCPYGGFAFAMLQWTGSRMFRRDLRWYATDEKNMMLDNHALYDLTKKIFLKAKSEEEIFAHLGLEYLEPFERNA

SEQ ID NO: 2717 - DNA, 1587 bp, synthetic construct
  misc_feature 1..1587: note = Variant of terminal deoxynucleotidyltransferase
  source 1..1587: mol_type = other DNA
atgcaccatcatcatcatcatggcggtagcggcagccacggcattcgtaccatcgattcggacttcgggaagaaacagcagaaaaaaatggataaccacgatagttccgccatctatgaaatcaaatttcacgagtttgtgctgttcattctcgaagaaaaaatgggtgcgacgcgtcgtacttttctgacagatttagcccgcaagaaagggttccgcgtcgagaatgaactgtcagacagcgttacccacatcgtggcagaaaatctgtcacgctctgaagtattggcttggctgaaagaacacaagatggagaagaccaagcaattcgaactgctggatattagctggcttatcgaaagcatgaaagttggtaaaccggtggacaccaaggggaaataccagttggcggaatcgggtgagatgagtgcgaacccagatccgacagagggtcgtgaaaacgagctgcctcctactatgaagaccgtttctccgtatgcgtgtcaacgccgcaccaccctgaacaaccataatcaacgttttacggacgcactggaaattcttgcggaaaattacgagttcaaacgcaacgatgatactgcgctggaatttcgtcgtgctatctccgtgctgaaaagccttccgtttgaggtacgtagcctgaaagacacggaaggattgccctggatcggtgatgaagtcaaagggattatggaagaaatcatcgaggtcgggaattcgcgtgaagtgcaggccgtgctcaatgatgagtggtatcaaagcttccaccgctttaagagtgtctttggagtgggggtgaagacagcagacaagtggtaccgtatgggtctgcgcaccctcgaggatgttcgttccagcaagaccctgaagttgaccccgatgcagaaagcgggtctgtgctattatgaagatcttgctcgcggcgttacgaaagccgaagctgacgcgatttctctgctggttcaggatgcagtcgcaactttcgacccggatgcgctggtggagattgtcggtggatttcgtcgtgggaaacctcagggtcacgacgttgatctgcttatcagttctccgggagctgagaaagagcaagaagaccagctcctgcagaaagtgaccaatctgtggaagaaacaagggttgttgctgtacggtcgtctggaatggacccagtgggaagatgggaaaccgccatccggtaaggctgacgtaggtgacgcgggtgcgaaatgctttctgatcctcaaactttatgatcataaagtggacaaaagcaaatgggaaatgccgacgggttcgaacatgggcgaggccaaaccgtggaaagcaattcgcgtagatctgctgcgttgcccctacggcggttttgcgtttgcgatgttgcagtggaccggaagccgcatgttccgccgtgatctgcgctggtacgccactgacgagaagaacatgatgctggacaatcatgcgctgtatgacctgaccaagaaaatctttctcaaagctaaatcggaagaggaaattttcgcacatctggggcttgaatacctggaaccgttcgaacgtaacgca

SEQ ID NO: 2718 - protein, 529 aa, synthetic construct
  REGION 1..529: note = Variant of terminal deoxynucleotidyltransferase
MHHHHHHGGSGSHGIRTIDSDFGKKQQKKMDNHDSSAIYEIKFHEFVLFILEEKMGATRRTFLTDLARKKGFRVENELSDSVTHIVAENLSRSEVLAWLKEHKMEKTKQFELLDISWLIESMKVGKPVDTKGKYQLAESGEMSANPDPTEGRENELPPTMKTVSPYACQRRTTLNNHNQRFTDALEILAENYEFKRNDDTALEFRRAISVLKSLPFEVRSLKDTEGLPWIGDEVKGIMEEIIEVGNSREVQAVLNDEWYQSFHRFKSVFGVGVKTADKWYRMGLRTLEDVRSSKTLKLTPMQKAGLCYYEDLARGVTKAEADAISLLVQDAVATFDPDALVEIVGGFRRGKPQGHDVDLLISSPGAEKEQEDQLLQKVTNLWKKQGLLLYGRLEWTQWEDGKPPSGKADVGDAGAKCFLILKLYDHKVDKSKWEMPTGSNMGEAKPWKAIRVDLLRCPYGGFAFAMLQWTGSRMFRRDLRWYATDEKNMMLDNHALYDLTKKIFLKAKSEEEIFAHLGLEYLEPFERNA

SEQ ID NO: 2719 - DNA, 1587 bp, synthetic construct
  misc_feature 1..1587: note = Variant of terminal deoxynucleotidyltransferase
  source 1..1587: mol_type = other DNA
atgcaccatcatcatcatcatggcggtagcggcagccacggcattcgtaccatcgattcggacttcgggaagaaacagcagaaaaaaatggataaccacgatagttccgccatctatgaaatcaaatttcacgagtttgtgctgttcattctcgaagaaaaaatgggtgcgacgcgtcgtacttttctgacagatttagcccgcaagaaagggttccgcgtcgagaatgaactgtcagacagcgttacccacatcgtggcagaaaatctgtcacgctctgaagtattggcttggctgaaagaacacaagatggagaagaccaagcaattcgaactgctggatattagctggcttatcgaaagcatgaaagttggtaaaccggtggacaccaaggggaaataccagttggcggaatcgggtgagatgagtgcgaacccagatccgacagagggtcgtgaaaacgagctgcctcctactatgaagaccgtttctccgtatgcgtgtcaacgccgcaccaccctgaacaaccataatcaacgttttacggacgcactggaaattcttgcggaaaattacgagttcaaacgcaacgatgatactgcgctggaatttcgtcgtgctatctccgtgctgaaaagccttccgtttgaggtacgtagcctgaaagacacggaaggattgccctggatcggtgatgaagtcaaagggattatggaagaaatcatcgaggtcgggaattcgcgtgaagtgcaggccgtgctcaatgatgagtggtatcaaagcttccaccgctttaagagtgtctttggagtgggggtgaagacagcagacaagtggtaccgtatgggtctgcgcaccctcgaggatgttcgttccagcaagaccctgaagttgaccccgatgcagaaagcgggtctgtgctattatgaagatcttgctcgcggcgttacgaaagccgaagctgacgcgatttctctgctggttcaggatgcagtcgcaactttcgacccggatgcgctggtggagattgtcggtggatttcgtcgtgggaaacctcagggtcacgacgttgatctgcttatcagttctccgggagctgagaaagagcaagaagaccagctcctgcagaaagtgaccaatctgtggaagaaacaagggttgttgctgtacggtcgtctggaatggacccagtgggaagatgggaaactctcttccggtaaggctgacgtaggtgacgcgggtgcgaaatgctttctgatcctcaaactttatgatcataaagtggacaaaagcaaatgggaaatgccgacgggttcgaacatgggcgaggccaaaccgtggaaagcaattcgcgtagatctgctgcgttgcccctacggcggttttgcgtttgcgatgttgcagtggaccggaagccgcatgttccgccgtgatctgcgctggtacgccactgacgagaagaacatgatgctggacaatcatgcgctgtatgacctgaccaagaaaatctttctcaaagctaaatcggaagaggaaattttcgcacatctggggcttgaatacctggaaccgttcgaacgtaacgca

SEQ ID NO: 2720 - protein, 529 aa, synthetic construct
  REGION 1..529: note = Variant of terminal deoxynucleotidyltransferase
MHHHHHHGGSGSHGIRTIDSDFGKKQQKKMDNHDSSAIYEIKFHEFVLFILEEKMGATRRTFLTDLARKKGFRVENELSDSVTHIVAENLSRSEVLAWLKEHKMEKTKQFELLDISWLIESMKVGKPVDTKGKYQLAESGEMSANPDPTEGRENELPPTMKTVSPYACQRRTTLNNHNQRFTDALEILAENYEFKRNDDTALEFRRAISVLKSLPFEVRSLKDTEGLPWIGDEVKGIMEEIIEVGNSREVQAVLNDEWYQSFHRFKSVFGVGVKTADKWYRMGLRTLEDVRSSKTLKLTPMQKAGLCYYEDLARGVTKAEADAISLLVQDAVATFDPDALVEIVGGFRRGKPQGHDVDLLISSPGAEKEQEDQLLQKVTNLWKKQGLLLYGRLEWTQWEDGKLSSGKADVGDAGAKCFLILKLYDHKVDKSKWEMPTGSNMGEAKPWKAIRVDLLRCPYGGFAFAMLQWTGSRMFRRDLRWYATDEKNMMLDNHALYDLTKKIFLKAKSEEEIFAHLGLEYLEPFERNA

SEQ ID NO: 2721 - DNA, 1587 bp, synthetic construct
  misc_feature 1..1587: note = Variant of terminal deoxynucleotidyltransferase
  source 1..1587: mol_type = other DNA
atgcaccatcatcatcatcatggcggtagcggcagccacggcattcgtaccatcgattcggacttcgggaagaaacagcagaaaaaaatggataaccacgatagttccgccatctatgaaatcaaatttcacgagtttgtgctgttcattctcgaagaaaaaatgggtgcgacgcgtcgtacttttctgacagatttagcccgcaagaaagggttccgcgtcgagaatgaactgtcagacagcgttacccacatcgtggcagaaaatctgtcacgctctgaagtattggcttggctgaaagaacacaagatggagaagaccaagcaattcgaactgctggatattagctggcttatcgaaagcatgaaagttggtaaaccggtggacaccaaggggaaataccagttggcggaatcgggtgagatgagtgcgaacccagatccgacagagggtcgtgaaaacgagctgcctcctactatgaagaccgtttctccgtatgcgtgtcaacgccgcaccaccctgaacaaccataatcaacgttttacggacgcactggaaattcttgcggaaaattacgagttcaaacgcaacgatgatactgcgctggaatttcgtcgtgctatctccgtgctgaaaagccttccgtttgaggtacgtagcctgaaagacacggaaggattgccctggatcggtgatgaagtcaaagggattatggaagaaatcatcgaggtcgggaattcgcgtgaagtgcaggccgtgctcaatgatgagtggtatcaaagcttccaccgctttaagagtgtctttggagtgggggtgaagacagcagacaagtggtaccgtatgggtctgcgcaccctcgaggatgttcgttccagcaagaccctgaagttgaccccgatgcagaaagcgggtctgtgctattatgaagatcttgctcgcggcgttacgaaagccgaagctgacgcgatttctctgctggttcaggatgcagtcgcaactttcgacccggatgcgctggtggagattgtcggtggatttcgtcgtgggaaacctcagggtcacgacgttgatctgcttatcagttctccgggagctgagaaagagcaagaagaccagctcctgcagaaagtgaccaatctgtggaagaaacaagggttgttgctgtacggtcgtctggaatggacccagtgggaagatgggaaactcccatccggtaaggctgacgtaggtgacgcgggtgcgaaatgctttctgatcctcaaactttatgatcatcgggtggacaaaagcaaatgggaaatgccgacgggttcgaacatgggcgaggccaaaccgtggaaagcaattcgcgtagatctgctgcgttgcccctacggcggttttgcgtttgcgatgttgcagtggaccggaagccgcatgttccgccgtgatctgcgctggtacgccactgacgagaagaacatgatgctggacaatcatgcgctgtatgacctgaccaagaaaatctttctcaaagctaaatcggaagaggaaattttcgcacatctggggcttgaatacctggaaccgttcgaacgtaacgca

SEQ ID NO: 2722 - protein, 529 aa, synthetic construct
  REGION 1..529: note = Variant of terminal deoxynucleotidyltransferase
MHHHHHHGGSGSHGIRTIDSDFGKKQQKKMDNHDSSAIYEIKFHEFVLFILEEKMGATRRTFLTDLARKKGFRVENELSDSVTHIVAENLSRSEVLAWLKEHKMEKTKQFELLDISWLIESMKVGKPVDTKGKYQLAESGEMSANPDPTEGRENELPPTMKTVSPYACQRRTTLNNHNQRFTDALEILAENYEFKRNDDTALEFRRAISVLKSLPFEVRSLKDTEGLPWIGDEVKGIMEEIIEVGNSREVQAVLNDEWYQSFHRFKSVFGVGVKTADKWYRMGLRTLEDVRSSKTLKLTPMQKAGLCYYEDLARGVTKAEADAISLLVQDAVATFDPDALVEIVGGFRRGKPQGHDVDLLISSPGAEKEQEDQLLQKVTNLWKKQGLLLYGRLEWTQWEDGKLPSGKADVGDAGAKCFLILKLYDHRVDKSKWEMPTGSNMGEAKPWKAIRVDLLRCPYGGFAFAMLQWTGSRMFRRDLRWYATDEKNMMLDNHALYDLTKKIFLKAKSEEEIFAHLGLEYLEPFERNA

SEQ ID NO: 2723 - DNA, 1587 bp, synthetic construct
  misc_feature 1..1587: note = Variant of terminal deoxynucleotidyltransferase
  source 1..1587: mol_type = other DNA
atgcaccatcatcatcatcatggcggtagcggcagccacggcattcgtaccatcgattcggacttcgggaagaaacagcagaaaaaaatggataaccacgatagttccgccatctatgaaatcaaatttcacgagtttgtgctgttcattctcgaagaaaaaatgggtgcgacgcgtcgtacttttctgacagatttagcccgcaagaaagggttccgcgtcgagaatgaactgtcagacagcgttacccacatcgtggcagaaaatctgtcacgctctgaagtattggcttggctgaaagaacacaagatggagaagaccaagcaattcgaactgctggatattagctggcttatcgaaagcatgaaagttggtaaaccggtggacaccaaggggaaataccagttggcggaatcgggtgagatgagtgcgaacccagatccgacagagggtcgtgaaaacgagctgcctcctactatgaagaccgtttctccgtatgcgtgtcaacgccgcaccaccctgaacaaccataatcaacgttttacggacgcactggaaattcttgcggaaaattacgagttcaaacgcaacgatgatactgcgctggaatttcgtcgtgctatctccgtgctgaaaagccttccgtttgaggtacgtagcctgaaagacacggaaggattgccctggatcggtgatgaagtcaaagggattatggaagaaatcatcgaggtcgggaattcgcgtgaagtgcaggccgtgctcaatgatgagtggtatcaaagcttccaccgctttaagagtgtctttggagtgggggtgaagacagcagacaagtggtaccgtatgggtctgcgcaccctcgaggatgttcgttccagcaagaccctgaagttgaccccgatgcagaaagcgggtctgtgctattatgaagatcttgctcgcggcgttacgaaagccgaagctgacgcgatttctctgctggttcaggatgcagtcgcaactttcgacccggatgcgctggtggagattgtcggtggatttcgtcgtgggaaacctcagggtcacgacgttgatctgcttatcagttctccgggagctgagaaagagcaagaagacgggctcctgcagaaagtgaccaatctgtggaagaaacaagggttgttgctgtacggtcgtctggaatggacccagtgggaagatgggaaactcccatccggtaaggctgacgtaggtgacgcgggtgcgaaatgctttctgatcctcaaactttatgatcataaagtggacaaaagcaaatgggaaatgccgacgggttcgaacatgggcgaggccaaaccgtggaaagcaattcgcgtagatctgctgcgttgcccctacggcggttttgcgtttgcgatgttgcagtggaccggaagccgcatgttccgccgtgatctgcgctggtacgccactgacgagaagaacatgatgctggacaatcatgcgctgtatgacctgaccaagaaaatctttctcaaagctaaatcggaagaggaaattttcgcacatctggggcttgaatacctggaaccgttcgaacgtaacgca

SEQ ID NO: 2724 - protein, 529 aa, synthetic construct
  REGION 1..529: note = Variant of terminal deoxynucleotidyltransferase
MHHHHHHGGSGSHGIRTIDSDFGKKQQKKMDNHDSSAIYEIKFHEFVLFILEEKMGATRRTFLTDLARKKGFRVENELSDSVTHIVAENLSRSEVLAWLKEHKMEKTKQFELLDISWLIESMKVGKPVDTKGKYQLAESGEMSANPDPTEGRENELPPTMKTVSPYACQRRTTLNNHNQRFTDALEILAENYEFKRNDDTALEFRRAISVLKSLPFEVRSLKDTEGLPWIGDEVKGIMEEIIEVGNSREVQAVLNDEWYQSFHRFKSVFGVGVKTADKWYRMGLRTLEDVRSSKTLKLTPMQKAGLCYYEDLARGVTKAEADAISLLVQDAVATFDPDALVEIVGGFRRGKPQGHDVDLLISSPGAEKEQEDGLLQKVTNLWKKQGLLLYGRLEWTQWEDGKLPSGKADVGDAGAKCFLILKLYDHKVDKSKWEMPTGSNMGEAKPWKAIRVDLLRCPYGGFAFAMLQWTGSRMFRRDLRWYATDEKNMMLDNHALYDLTKKIFLKAKSEEEIFAHLGLEYLEPFERNA

SEQ ID NO: 2725 - DNA, 1587 bp, synthetic construct
  misc_feature 1..1587: note = Variant of terminal deoxynucleotidyltransferase
  source 1..1587: mol_type = other DNA
atgcaccatcatcatcatcatggcggtagcggcagccacggcattcgtaccatcgattcggacttcgggaagaaacagcagaaaaaaatggataaccacgatagttccgccatctatgaaatcaaatttcacgagtttgtgctgttcattctcgaagaaaaaatgggtgcgacgcgtcgtacttttctgacagatttagcccgcaagaaagggttccgcgtcgagaatgaactgtcagacagcgttacccacatcgtggcagaaaatctgtcacgctctgaagtattggcttggctgaaagaacacaagatggagaagaccaagcaattcgaactgctggatattagctggcttatcgaaagcatgaaagttggtaaaccggtggacaccaaggggaaataccagttggcggaatcgggtgagatgagtgcgaacccagatccgacagagggtcgtgaaaacgagctgcctcctactatgaagaccgtttctccgtatgcgtgtcaacgccgcaccaccctgaacaaccataatcaacgttttacggacgcactggaaattcttgcggaaaattacgagttcaaacgcaacgatgatactgcgctggaatttcgtcgtgctatctccgtgctgaaaagccttccgtttgaggtacgtagcctgaaagacacggaaggattgccctggatcggtgatgaagtcaaagggattatggaagaaatcatcgaggtcgggaattcgcgtgaagtgcaggccgtgctcaatgatgagtggtatcaaagcttccaccgctttaagagtgtctttggagtgggggtgaagacagcagacaagtggtaccgtatgggtctgcgcaccctcgaggatgttcgttccagcaagaccctgaagttgaccccgatgcagaaagcgggtctgtgctattatgaagatcttgctcgcggcgttacgaaagccgaagctgacgcgatttctctgctggttcaggatgcagtcgcaactttcgacccggatgcgctggtggagattgtcggtggatttcgtcgtgggaaacctcagggtcacgacgttgatctgcttatcagttctccgggagctgagaaagagcaagaagaccagctcctgcagaaagtgaccaatctgtggaagaaacaagggttgttgctgtacggtcgtctggaatggacccagtgggaagatgggaaactcccatccggtaaggctgacgtaggtgacgcgggtgcgaaatgctttctgatcctcaaactttatgatcataaagtgcggaaaagcaaatgggaaatgccgacgggttcgaacatgggcgaggccaaaccgtggaaagcaattcgcgtagatctgctgcgttgcccctacggcggttttgcgtttgcgatgttgcagtggaccggaagccgcatgttccgccgtgatctgcgctggtacgccactgacgagaagaacatgatgctggacaatcatgcgctgtatgacctgaccaagaaaatctttctcaaagctaaatcggaagaggaaattttcgcacatctggggcttgaatacctggaaccgttcgaacgtaacgca

SEQ ID NO: 2726 - protein, 529 aa, synthetic construct
  REGION 1..529: note = Variant of terminal deoxynucleotidyltransferase
MHHHHHHGGSGSHGIRTIDSDFGKKQQKKMDNHDSSAIYEIKFHEFVLFILEEKMGATRRTFLTDLARKKGFRVENELSDSVTHIVAENLSRSEVLAWLKEHKMEKTKQFELLDISWLIESMKVGKPVDTKGKYQLAESGEMSANPDPTEGRENELPPTMKTVSPYACQRRTTLNNHNQRFTDALEILAENYEFKRNDDTALEFRRAISVLKSLPFEVRSLKDTEGLPWIGDEVKGIMEEIIEVGNSREVQAVLNDEWYQSFHRFKSVFGVGVKTADKWYRMGLRTLEDVRSSKTLKLTPMQKAGLCYYEDLARGVTKAEADAISLLVQDAVATFDPDALVEIVGGFRRGKPQGHDVDLLISSPGAEKEQEDQLLQKVTNLWKKQGLLLYGRLEWTQWEDGKLPSGKADVGDAGAKCFLILKLYDHKVRKSKWEMPTGSNMGEAKPWKAIRVDLLRCPYGGFAFAMLQWTGSRMFRRDLRWYATDEKNMMLDNHALYDLTKKIFLKAKSEEEIFAHLGLEYLEPFERNA

SEQ ID NO: 2727 - DNA, 1587 bp, synthetic construct
  misc_feature 1..1587: note = Variant of terminal deoxynucleotidyltransferase
  source 1..1587: mol_type = other DNA
atgcaccatcatcatcatcatggcggtagcggcagccacggcattcgtaccatcgattcggacttcgggaagaaacagcagaaaaaaatggataaccacgatagttccgccatctatgaaatcaaatttcacgagtttgtgctgttcattctcgaagaaaaaatgggtgcgacgcgtcgtacttttctgacagatttagcccgcaagaaagggttccgcgtcgagaatgaactgtcagacagcgttacccacatcgtggcagaaaatctgtcacgctctgaagtattggcttggctgaaagaacacaagatggagaagaccaagcaattcgaactgctggatattagctggcttatcgaaagcatgaaagttggtaaaccggtggacaccaaggggaaataccagttggcggaatcgggtgagatgagtgcgaacccagatccgacagagggtcgtgaaaacgagctgcctcctactatgaagaccgtttctccgtatgcgtgtcaacgccgcaccaccctgaacaaccataatcaacgttttacggacgcactggaaattcttgcggaagtgtacgagttcaaacgcaacgatgatactgcgctggaatttcgtcgtgctatctccgtgctgaaaagccttccgtttgaggtacgtagcctgaaagacacggaaggattgccctggatcggtgatgaagtcaaagggattatggaagaaatcatcgaggtcgggaattcgcgtgaagtgcaggccgtgctcaatgatgagtggtatcaaagcttccaccgctttaagagtgtctttggagtgggggtgaagacagcagacaagtggtaccgtatgggtctgcgcaccctcgaggatgttcgttccagcaagaccctgaagttgaccccgatgcagaaagcgggtctgtgctattatgaagatcttgctcgcggcgttacgaaagccgaagctgacgcgatttctctgctggttcaggatgcagtcgcaactttcgacccggatgcgctggtggagattgtcggtggatttcgtcgtgggaaacctcagggtcacgacgttgatctgcttatcagttctccgggagctgagaaagagcaagaagaccagctcctgcagaaagtgaccaatctgtggaagaaacaagggttgttgctgtacggtcgtctggaatggacccagtgggaagatgggaaactcccatccggtaaggctgacgtaggtgacgtgggtgcgaaatgctttctgatcctcaaactttatgatcataaagtggacaaaagcaaatgggaaatgccgacgggttcgaacatgggcgaggccaaaccgtggaaagcaattcgcgtagatctgctgcgttgcccctacggcggttttgcgtttgcgatgttgcagtggaccggaagccgcatgttccgccgtgatctgcgctggtacgccactgacgagaagaacatgatgctggacaatcatgcgctgtatgacctgaccaagaaaatctttctcaaagctaaatcggaagaggaaattttcgcacatctggggcttgaatacctggaaccgttcgaacgtaacgca

SEQ ID NO: 2728 - protein, 529 aa, synthetic construct
  REGION 1..529: note = Variant of terminal deoxynucleotidyltransferase
MHHHHHHGGSGSHGIRTIDSDFGKKQQKKMDNHDSSAIYEIKFHEFVLFILEEKMGATRRTFLTDLARKKGFRVENELSDSVTHIVAENLSRSEVLAWLKEHKMEKTKQFELLDISWLIESMKVGKPVDTKGKYQLAESGEMSANPDPTEGRENELPPTMKTVSPYACQRRTTLNNHNQRFTDALEILAEVYEFKRNDDTALEFRRAISVLKSLPFEVRSLKDTEGLPWIGDEVKGIMEEIIEVGNSREVQAVLNDEWYQSFHRFKSVFGVGVKTADKWYRMGLRTLEDVRSSKTLKLTPMQKAGLCYYEDLARGVTKAEADAISLLVQDAVATFDPDALVEIVGGFRRGKPQGHDVDLLISSPGAEKEQEDQLLQKVTNLWKKQGLLLYGRLEWTQWEDGKLPSGKADVGDVGAKCFLILKLYDHKVDKSKWEMPTGSNMGEAKPWKAIRVDLLRCPYGGFAFAMLQWTGSRMFRRDLRWYATDEKNMMLDNHALYDLTKKIFLKAKSEEEIFAHLGLEYLEPFERNA

SEQ ID NO: 2729 - DNA, 1587 bp, synthetic construct
  misc_feature 1..1587: note = Variant of terminal deoxynucleotidyltransferase
  source 1..1587: mol_type = other DNA
atgcaccatcatcatcatcatggcggtagcggcagccacggcattcgtaccatcgattcggacttcgggaagaaacagcagaaaaaaatggataaccacgatagttccgccatctatgaaatcaaatttcacgagtttgtgctgttcattctcgaagaaaaaatgggtgcgacgcgtcgtacttttctgacagatttagcccgcaagaaagggttccgcgtcgagaatgaactgtcagacagcgttacccacatcgtggcagaaaatctgtcacgctctgaagtattggcttggctgaaagaacacaagatggagaagaccaagcaattcgaactgctggatattagctggcttatcgaaagcatgaaagttggtaaaccggtggacaccaaggggaaataccagttggcggaatcgggtgagatgagtgcgaacccagatccgacagagggtcgtgaaaacgagctgcctcctactatgaagaccgtttctccgtatgcgtgtcaacgccgcaccaccctgaacaaccataatcaacgttttacggacgcactggaaattcttgcggaaaattacgagttcaaacgcaacgatgatactgcgctggaatttcgtcgtgctatctccgtgctgaaaagccttccgtttgaggtacgtagcctgaaagacacggaaggattgccctggatcggtgatgaagtcaaagggattatggaagaaatcatcgaggtcgggaattcgcgtgaagtgcaggccgtgctcaatgatgagtggtatcaaagcttccaccgctttaagagtgtctttggagtgggggtgaagacagcagacaagtggtaccgtatgggtctgcgcaccctcgaggatgttcgttccagcaagaccctgaagttgaccccgatgcagaaagcgggtctgtgctattatgaagatcttgctcgcggcgttacgaaagccgaagctgacgcgatttctctgctggttcaggatgcagtcgcaactttcgacccggatgcgctggtggagattgtcggtggatttcgtcgtgggaaacctcagggtcacgacgttgatctgcttatcagttctccgggagctgagaaagagcaagaagaccagctcctgcagaaagtgaccaatctgtggaagaaacaagggttgttgctgtacggtcgtctggaatggacccagtgggaagatgggaaactcccatccggtaaggctgacgtaggtgacgcgggtgcgaaatgctttctgatcctcaaactttatgatcataaagtggacaaaagcaaatgggaaatgccgacgggttcgaacatgggcgaggccaaaccgtggaaagcaattcgcgtagatctgctgcgttgcccctacggcggttttgcgtttgcgatgttgcagtggaccggaagccgcatgttccgccgtgatctgcgctggtacgccactgacgagaagaacatgaggctggacaatcatgcgctgtatgacctgaccaagaaaatctttctcaaagctaaatcggaagaggaaattttcgcacatctggggcttgaatacctggaaccgttcgaacgtaacgca

SEQ ID NO: 2730 - protein, 529 aa, synthetic construct
  REGION 1..529: note = Variant of terminal deoxynucleotidyltransferase
MHHHHHHGGSGSHGIRTIDSDFGKKQQKKMDNHDSSAIYEIKFHEFVLFILEEKMGATRRTFLTDLARKKGFRVENELSDSVTHIVAENLSRSEVLAWLKEHKMEKTKQFELLDISWLIESMKVGKPVDTKGKYQLAESGEMSANPDPTEGRENELPPTMKTVSPYACQRRTTLNNHNQRFTDALEILAENYEFKRNDDTALEFRRAISVLKSLPFEVRSLKDTEGLPWIGDEVKGIMEEIIEVGNSREVQAVLNDEWYQSFHRFKSVFGVGVKTADKWYRMGLRTLEDVRSSKTLKLTPMQKAGLCYYEDLARGVTKAEADAISLLVQDAVATFDPDALVEIVGGFRRGKPQGHDVDLLISSPGAEKEQEDQLLQKVTNLWKKQGLLLYGRLEWTQWEDGKLPSGKADVGDAGAKCFLILKLYDHKVDKSKWEMPTGSNMGEAKPWKAIRVDLLRCPYGGFAFAMLQWTGSRMFRRDLRWYATDEKNMRLDNHALYDLTKKIFLKAKSEEEIFAHLGLEYLEPFERNA

SEQ ID NO: 2731 - DNA, 1587 bp, synthetic construct
  misc_feature 1..1587: note = Variant of terminal deoxynucleotidyltransferase
  source 1..1587: mol_type = other DNA
atgcaccatcatcatcatcatggcggtagcggcagccacggcattcgtaccatcgattcggacttcgggaagaaacagcagaaaaaaatggataaccacgatagttccgccatctatgaaatcaaatttcacgagtttgtgctgttcattctcgaagaaaaaatgggtgcgacgcgtcgtacttttctgacagatttagcccgcaagaaagggttccgcgtcgagaatgaactgtcagacagcgttacccacatcgtggcagaaaatctgtcacgctctgaagtattggcttggctgaaagaacacaagatggagaagaccaagcaattcgaactgctggatattagctggcttatcgaaagcatgaaagttggtaaaccggtggacaccaaggggaaataccagttggcggaatcgggtgagatgagtgcgaacccagatccgacagagggtcgtgaaaacgagctgcctcctactatgaagaccgtttctccgtatgcgtgtcaacgccgcaccaccctgaacaaccataatcaacgttttacggacgcactggaaattcttgcggaaaattacgagttcaaacgcaacgatgatactgcgctggaatttcgtcgtgctatctccgtgctgaaaagccttccgtttgaggtacgtagcctgaaagacacggaaggattgccctggatcggtgatgaagtcaaagggattatggaagaaatcatcgaggtcgggaattcgcgtgaagtgcaggccgtgctcaatgatgagtggtatcaaagcttccaccgctttaagagtgtctttggagtgggggtgaagacagcagacaagtggtaccgtatgggtctgcgcaccctcgaggatgttcgttccagcaagaccctgaagttgaccccgatgcagaaagcgggtctgtgctattatgaagatcttgctcgcggcgttacgaaagccgaagctgacgcgatttctctgctggttcaggatgcagtcgcaactttcgacccggatgcgctggtggagattgtcggtggatttcgtcgtgggaaacctcagggtcacgacgttgatctgcttatcagttctccgggagctgagaaagagcaagaagaccagctcctgcagaaagtgaccaatctgtggaagaaacaagggttgttgctgtacggtcgtctggaatggacccagtgggaagatgggaaactcccatccggtaaggctgacgtaggtgacgcgggtgcgaaatgctttctgatcctcaaactttatgatcataaagtggacaaaagcaaatgggaaatgccgacgggttcgaacatgggcgaggccaaaccgtggaaagcaattcgcgtagatctgctgcgttgcccctacggcggttttgcgtttgcgatgttgcagtggaccggaagccgcatgttccgccgtgatctgcgctggtacgccactgacgagaagaacatgatgctggacaatcatagtctgtatgacctgaccaagaaaatctttctcaaagctaaatcggaagaggaaattttcgcacatctggggcttgaatacctggaaccgttcgaacgtaacgca

SEQ ID NO: 2732 - protein, 529 aa, synthetic construct
  REGION 1..529: note = Variant of terminal deoxynucleotidyltransferase
MHHHHHHGGSGSHGIRTIDSDFGKKQQKKMDNHDSSAIYEIKFHEFVLFILEEKMGATRRTFLTDLARKKGFRVENELSDSVTHIVAENLSRSEVLAWLKEHKMEKTKQFELLDISWLIESMKVGKPVDTKGKYQLAESGEMSANPDPTEGRENELPPTMKTVSPYACQRRTTLNNHNQRFTDALEILAENYEFKRNDDTALEFRRAISVLKSLPFEVRSLKDTEGLPWIGDEVKGIMEEIIEVGNSREVQAVLNDEWYQSFHRFKSVFGVGVKTADKWYRMGLRTLEDVRSSKTLKLTPMQKAGLCYYEDLARGVTKAEADAISLLVQDAVATFDPDALVEIVGGFRRGKPQGHDVDLLISSPGAEKEQEDQLLQKVTNLWKKQGLLLYGRLEWTQWEDGKLPSGKADVGDAGAKCFLILKLYDHKVDKSKWEMPTGSNMGEAKPWKAIRVDLLRCPYGGFAFAMLQWTGSRMFRRDLRWYATDEKNMMLDNHSLYDLTKKIFLKAKSEEEIFAHLGLEYLEPFERNA

SEQ ID NO: 2733 - DNA, 1587 bp, synthetic construct
  misc_feature 1..1587: note = Variant of terminal deoxynucleotidyltransferase
  source 1..1587: mol_type = other DNA
atgcaccatcatcatcatcatggcggtagcggcagccacggcattcgtaccatcgattcggacttcgggaagaaacagcagaaaaaaatggataaccacgatagttccgccatctatgaaatcaaatttcacgagtttgtgctgttcattctcgaagaaaaaatgggtgcgacgcgtcgtacttttctgacagatttagcccgcaagaaagggttccgcgtcgagaatgaactgtcagacagcgttacccacatcgtggcagaaaatctgtcacgctctgaagtattggcttggctgaaagaacacaagatggagaagaccaagcaattcgaactgctggatattagctggcttatcgaaagcatgaaagttggtaaaccggtggacaccaaggggaaataccagttggcggaatcgggtgagatgagtgcgaacccagatccgacagagggtcgtgaaaacgagctgcctcctactatgaagaccgtttctccgtatgcgtgtcaacgccgcaccaccctgaacaaccataatcaacgttttacggacgcactggaaattcttgcggaaaattacgagttcaaacgcaacgatgatactgcgctggaatttcgtcgtgctatctccgtgctgaaaagccttccgtttgaggtacgtagcctgaaagacacggaaggattgccctggatcggtgatgaagtcaaagggattatggaagaaatcatcgaggtcgggaattcgcgtgaagtgcaggccgtgctcaatgatgagtggtatcaaagcttccaccgctttaagagtgtctttggagtgggggtgaagacagcagacaagtggtaccgtatgggtctgcgcaccctcgaggatgttcgttccagcaagaccctgaagttgaccccgatgcagaaagcgggtctgtgctattatgaagatcttgctcgcggcgttacgaaagccgaagctgacgcgatttctctgctggttcaggatgcagtcgcaactttcgacccggatgcgctggtggagattgtcggtggatttcgtcgtgggaaacctcagggtcacgacgttgatctgcttatcagttctccgggagctgagaaagagcaagaagaccagctcctgcagaaagtgaccaatctgtggaagaaacaagggttgttgctgtacggtcgtctggaatggacccagtgggaagatgggaaactcccatccggtaaggctgacgtaggtgacgcgggtgcgaaatgctttctgatcctcaaactttatgatcataaagtggacaaaagcaaatgggaaatgccgacgggttcgaacatgggcgaggccaaaccgtggaaagcaattcgcgtagatctgctgcgttgcccctacggcggttttgcgtttgcgatgttgcagtggaccggaagccgcatgttccgccgtgatctgcgctggtacgccactgacgagaagaacatgatgctggacaatcatgggctgtatgacctgaccaagaaaatctttctcaaagctaaatcggaagaggaaattttcgcacatctggggcttgaatacctggaaccgttcgaacgtaacgca

SEQ ID NO: 2734 - protein, 529 aa, synthetic construct
  REGION 1..529: note = Variant of terminal deoxynucleotidyltransferase
MHHHHHHGGSGSHGIRTIDSDFGKKQQKKMDNHDSSAIYEIKFHEFVLFILEEKMGATRRTFLTDLARKKGFRVENELSDSVTHIVAENLSRSEVLAWLKEHKMEKTKQFELLDISWLIESMKVGKPVDTKGKYQLAESGEMSANPDPTEGRENELPPTMKTVSPYACQRRTTLNNHNQRFTDALEILAENYEFKRNDDTALEFRRAISVLKSLPFEVRSLKDTEGLPWIGDEVKGIMEEIIEVGNSREVQAVLNDEWYQSFHRFKSVFGVGVKTADKWYRMGLRTLEDVRSSKTLKLTPMQKAGLCYYEDLARGVTKAEADAISLLVQDAVATFDPDALVEIVGGFRRGKPQGHDVDLLISSPGAEKEQEDQLLQKVTNLWKKQGLLLYGRLEWTQWEDGKLPSGKADVGDAGAKCFLILKLYDHKVDKSKWEMPTGSNMGEAKPWKAIRVDLLRCPYGGFAFAMLQWTGSRMFRRDLRWYATDEKNMMLDNHGLYDLTKKIFLKAKSEEEIFAHLGLEYLEPFERNA

SEQ ID NO: 2735 - DNA, 1587 bp, synthetic construct
  misc_feature 1..1587: note = Variant of terminal deoxynucleotidyltransferase
  source 1..1587: mol_type = other DNA
atgcaccatcatcatcatcatggcggtagcggcagccacggcattcgtaccatcgattcggacttcgggaagaaacagcagaaaaaaatggataaccacgatagttccgccatctatgaaatcaaatttcacgagtttgtgctgttcattctcgaagaaaaaatgggtgcgacgcgtcgtacttttctgacagatttagcccgcaagaaagggttccgcgtcgagaatgaactgtcagacagcgttacccacatcgtggcagaaaatctgtcacgctctgaagtattggcttggctgaaagaacacaagatggagaagaccaagcaattcgaactgctggatattagctggcttatcgaaagcatgaaagttggtaaaccggtggacaccaaggggaaataccagttggcggaatcgggtgagatgagtgcgaacccagatccgacagagggtcgtgaaaacgagctgcctcctactatgaagaccgtttctccgtatgcgtgtcaacgccgcaccaccctgaacaaccataatcaacgttttacggacgcactggaaattcttgcggaaaattacgagttcaaacgcaacgatgatactgcgctggaatttcgtcgtgctatctccgtgctgaaaagccttccgtttgaggtacgtagcctgaaagacacggaaggattgccctggatcggtgatgaagtcaaagggattatggaagaaatcatcgaggtcgggaattcgcgtgaagtgcaggccgtgctcaatgatgagtggtatcaaagcttccaccgctttaagagtgtctttggagtgggggtgaagacagcagacaagtggtaccgtatgggtctgcgcaccctcgaggatgttcgttccagcaagaccctgaagttgaccccgatgcagaaagcgggtctgtgctattatgaagatcttgctcgcggcgttacgaaagccgaagctgacgcgatttctctgctggttcaggatgcagtcgcaactttcgacccggatgcgctggtggagattgtcggtggatttcgtcgtgggaaacctcagggtcacgacgttgatctgcttatcagttctccgggagctgagaaagagcaagaagaccagctcctgcagaaagtgaccaatctgtggaagaaacaagggttgttgctgtacggtcgtctggaatggacccagtgggaagatgggaaagagccatccggtaaggctgacgtaggtgacgcgggtgcgaaatgctttctgatcctcaaactttatgatcataaagtggacaaaagcaaatgggaaatgccgacgggttcgaacatgggcgaggccaaaccgtggaaagcaattcgcgtagatctgctgcgttgcccctacggcggttttgcgtttgcgatgttgcagtggaccggaagccgcatgttccgccgtgatctgcgctggtacgccactgacgagaagaacatgatgctggacaatcatgcgctgtatgacctgaccaagaaaatctttctcaaagctaaatcggaagaggaaattttcgcacatctggggcttgaatacctggaaccgttcgaacgtaacgca

SEQ ID NO: 2736 - protein, 529 aa, synthetic construct
  REGION 1..529: note = Variant of terminal deoxynucleotidyltransferase
MHHHHHHGGSGSHGIRTIDSDFGKKQQKKMDNHDSSAIYEIKFHEFVLFILEEKMGATRRTFLTDLARKKGFRVENELSDSVTHIVAENLSRSEVLAWLKEHKMEKTKQFELLDISWLIESMKVGKPVDTKGKYQLAESGEMSANPDPTEGRENELPPTMKTVSPYACQRRTTLNNHNQRFTDALEILAENYEFKRNDDTALEFRRAISVLKSLPFEVRSLKDTEGLPWIGDEVKGIMEEIIEVGNSREVQAVLNDEWYQSFHRFKSVFGVGVKTADKWYRMGLRTLEDVRSSKTLKLTPMQKAGLCYYEDLARGVTKAEADAISLLVQDAVATFDPDALVEIVGGFRRGKPQGHDVDLLISSPGAEKEQEDQLLQKVTNLWKKQGLLLYGRLEWTQWEDGKEPSGKADVGDAGAKCFLILKLYDHKVDKSKWEMPTGSNMGEAKPWKAIRVDLLRCPYGGFAFAMLQWTGSRMFRRDLRWYATDEKNMMLDNHALYDLTKKIFLKAKSEEEIFAHLGLEYLEPFERNA

SEQ ID NO: 2737 - DNA, 1587 bp, synthetic construct
  misc_feature 1..1587: note = Variant of terminal deoxynucleotidyltransferase
  source 1..1587: mol_type = other DNA
atgcaccatcatcatcatcatggcggtagcggcagccacggcattcgtaccatcgattcggacttcgggaagaaacagcagaaaaaaatggataaccacgatagttccgccatctatgaaatcaaatttcacgagtttgtgctgttcattctcgaagaaaaaatgggtgcgacgcgtcgtacttttctgacagatttagcccgcaagaaagggttccgcgtcgagaatgaactgtcagacagcgttacccacatcgtggcagaaaatctgtcacgctctgaagtattggcttggctgaaagaacacaagatggagaagaccaagcaattcgaactgctggatattagctggcttatcgaaagcatgaaagttggtaaaccggtggacaccaaggggaaataccagttggcggaatcgggtgagatgagtgcgaacccagatccgacagagggtcgtgaaaacgagctgcctcctactatgaagaccgtttctccgtatgcgtgtcaacgccgcaccaccctgaacaaccataatcaacgttttacggacgcactggaaattcttgcggaaaattacgagttcaaacgcaacgatgatactgcgctggaatttcgtcgtgctatctccgtgctgaaaagccttccgtttgaggtacgtagcctgaaagacacggaaggattgccctggatcggtgatgaagtcaaagggattatggaagaaatcatcgaggtcgggaattcgcgtgaagtgcaggccgtgctcaatgatgagtggtatcaaagcttccaccgctttaagagtgtctttggagtgggggtgaagacagcagacaagtggtaccgtatgggtctgcgcaccctcgaggatgttcgttccagcaagaccctgaagttgaccccgatgcagaaagcgggtctgtgctattatgaagatcttgctcgcggcgttacgaaagccgaagctgacgcgatttctctgctggttcaggatgcagtcgcaactttcgacccggatgcgctggtggagattgtcggtggatttcgtcgtgggaaacctcatggtcacgacgttgatctgcttatcagttctccgggagctgagaaagagcaagaagaccagctcctgcagaaagtgaccaatctgtggaagaaacaagggttgttgctgtacggtcgtctggaatggacccagtgggaagatgggaaactcccatccggtaaggctgacgtaggtgacgcgggtgcgaaatgctttctgatcctcaaactttatgatcataaagtggacaaaagcaaatgggaaatgccgacgggttcgaacatgggcgaggccaaaccgtggaaagcaattcgcgtagatctgctgcgttgccccgtgggcggttttgcgtttgcgatgttgcagtggaccggaagccgcatgttccgccgtgatctgcgctggtacgccactgacgagaagaacatgatgctggacaatcatgcgctgtatgacctgaccaagaaaatctttctcaaagctaaatcggaagaggaaattttcgcacatctggggcttgaatacctggaaccgttcgaacgtaacgca

SEQ ID NO: 2738 - protein, 529 aa, synthetic construct
  REGION 1..529: note = Variant of terminal deoxynucleotidyltransferase
MHHHHHHGGSGSHGIRTIDSDFGKKQQKKMDNHDSSAIYEIKFHEFVLFILEEKMGATRRTFLTDLARKKGFRVENELSDSVTHIVAENLSRSEVLAWLKEHKMEKTKQFELLDISWLIESMKVGKPVDTKGKYQLAESGEMSANPDPTEGRENELPPTMKTVSPYACQRRTTLNNHNQRFTDALEILAENYEFKRNDDTALEFRRAISVLKSLPFEVRSLKDTEGLPWIGDEVKGIMEEIIEVGNSREVQAVLNDEWYQSFHRFKSVFGVGVKTADKWYRMGLRTLEDVRSSKTLKLTPMQKAGLCYYEDLARGVTKAEADAISLLVQDAVATFDPDALVEIVGGFRRGKPHGHDVDLLISSPGAEKEQEDQLLQKVTNLWKKQGLLLYGRLEWTQWEDGKLPSGKADVGDAGAKCFLILKLYDHKVDKSKWEMPTGSNMGEAKPWKAIRVDLLRCPVGGFAFAMLQWTGSRMFRRDLRWYATDEKNMMLDNHALYDLTKKIFLKAKSEEEIFAHLGLEYLEPFERNA

SEQ ID NO: 2739 - DNA, 1587 bp, synthetic construct
  misc_feature 1..1587: note = Variant of terminal deoxynucleotidyltransferase
  source 1..1587: mol_type = other DNA
atgcaccatcatcatcatcatggcggtagcggcagccacggcattcgtaccatcgattcggacttcgggaagaaacagcagaaaaaaatggataaccacgatagttccgccatctatgaaatcaaatttcacgagtttgtgctgttcattctcgaagaaaaaatgggtgcgacgcgtcgtacttttctgacagatttagcccgcaagaaagggttccgcgtcgagaatgaactgtcagacagcgttacccacatcgtggcagaaaatctgtcacgctctgaagtattggcttggctgaaagaacacaagatggagaagaccaagcaattcgaactgctggatattagctggcttatcgaaagcatgaaagttggtaaaccggtggacaccaaggggaaataccagttggcggaatcgggtgagatgagtgcgaacccagatccgacagagggtcgtgaaaacgagctgcctcctactatgaagaccgtttctccgtatgcgtgtcaacgccgcaccaccctgaacaaccataatcaacgttttacggacgcactggaaattcttgcggaaaattacgagttcaaacgcaacgatgatactgcgctggaatttcgtcgtgctatctccgtgctgaaaagccttccgtttgaggtacgtagcctgaaagacacggaaggattgccctggatcggtgatgaagtcaaagggattatggaagaaatcatcgaggtcgggaattcgcgtgaagtgcaggccgtgctcaatgatgagtggtatcaaagcttccaccgctttaagagtgtctttggagtgggggtgaagacagcagacaagtggtaccgtatgggtctgcgcaccctcgaggatgttcgttccagcaagaccctgaagttgaccccgatgcagaaagcgggtctgtgctattatgaagatcttgctcgcggcgttacgaaagccgaagctgacgcgatttctctgctggttcaggatgcagtcgcaactttcgacccggatgcgctggtggagattgtcggtggatttcgtcgtgggaaacctcagggtcacgacgttgatctgcttatcagttctccgggagctgagaaagagcaagaagaccagctcctgcagaaagtgaccaatctgtggaagaaacaagggttgttgctgtacggtcgtctggaatggacccagtgggaagatgggaaactcccatccggtaaggctgacgtaggtgacgcgggtgcgaaatgctttctgatcctcaaactttatgatcataaagtggacaaaagcaaatgggaaatgccgacgggttcgaacatgggcgaggccaaaccgtggaaagcaattcgcgtagatctgctgcgttgccccattggcggttttgcgtttgcgatgttgcagtggaccggaagccgcatgttccgccgtgatctgcgctggtacgccactgacgagaagaacatgatgctggacaatcatgcgctgtatgacctgaccaagaaaatctttctcaaagctaaatcggaagaggaaattttcgcacatctggggcttgaatacctggaaccgttcgaacgtaacgca

SEQ ID NO: 2740 - protein, 529 aa, synthetic construct
  REGION 1..529: note = Variant of terminal deoxynucleotidyltransferase
MHHHHHHGGSGSHGIRTIDSDFGKKQQKKMDNHDSSAIYEIKFHEFVLFILEEKMGATRRTFLTDLARKKGFRVENELSDSVTHIVAENLSRSEVLAWLKEHKMEKTKQFELLDISWLIESMKVGKPVDTKGKYQLAESGEMSANPDPTEGRENELPPTMKTVSPYACQRRTTLNNHNQRFTDALEILAENYEFKRNDDTALEFRRAISVLKSLPFEVRSLKDTEGLPWIGDEVKGIMEEIIEVGNSREVQAVLNDEWYQSFHRFKSVFGVGVKTADKWYRMGLRTLEDVRSSKTLKLTPMQKAGLCYYEDLARGVTKAEADAISLLVQDAVATFDPDALVEIVGGFRRGKPQGHDVDLLISSPGAEKEQEDQLLQKVTNLWKKQGLLLYGRLEWTQWEDGKLPSGKADVGDAGAKCFLILKLYDHKVDKSKWEMPTGSNMGEAKPWKAIRVDLLRCPIGGFAFAMLQWTGSRMFRRDLRWYATDEKNMMLDNHALYDLTKKIFLKAKSEEEIFAHLGLEYLEPFERNA

SEQ ID NO: 2741 - DNA, 1587 bp, synthetic construct
  misc_feature 1..1587: note = Variant of terminal deoxynucleotidyltransferase
  source 1..1587: mol_type = other DNA
atgcaccatcatcatcatcatggcggtagcggcagccacggcattcgtaccatcgattcggacttcgggaagaaacagcagaaaaaaatggataaccacgatagttccgccatctatgaaatcaaatttcacgagtttgtgctgttcattctcgaagaaaaaatgggtgcgacgcgtcgtacttttctgacagatttagcccgcaagaaagggttccgcgtcgagaatgaactgtcagacagcgttacccacatcgtggcagaaaatctgtcacgctctgaagtattggcttggctgaaagaacacaagatggagaagaccaagcaattcgaactgctggatattagctggcttatcgaaagcatgaaagttggtaaaccggtggacaccaaggggaaataccagttggcggaatcgggtgagatgagtgcgaacccagatccgacagagggtcgtgaaaacgagctgcctcctactatgaagaccgtttctccgtatgcgtgtcaacgccgcaccaccctgaacaaccataatcaacgttttacggacgcactggaaattcttgcggaaaattacgagttcaaacgcaacgatgatactgcgctggaatttcgtcgtgctatctccgtgctgaaaagccttccgtttgaggtacgtagcctgaaagacacggaaggattgccctggatcggtgatgaagtcaaagggattatggaagaaatcatcgaggtcgggaattcgcgtgaagtgcaggccgtgctcaatgatgagtggtatcaaagcttccaccgctttaagagtgtctttggagtgggggtgaagacagcagacaagtggtaccgtatgggtctgcgcaccctcgaggatgttcgttccagcaagaccctgaagttgaccccgatgcagaaagcgggtctgtgctattatgaagatcttgctcgcggcgttacgaaagccgaagctgacgcgatttctctgctggttcaggatgcagtcgcaactttcgacccggatgcgctggtggagattgtcggtggatttcgtcgtgggaaacctcagggtcacgacgttgatctgcttatcagttctccgggagctgagaaagagcaagaagaccagctcctgcagaaagtgaccaatctgtggaagaaacaagggttgttgctgtacggtcgtctggaatggacccagtgggaagatgggaaactcccatccggtaaggctgacgtaggtgacgcgggtgcgaaatgctttctgatcctcaaactttatgatcataaagtggacaaaagcaaatgggaaatgccgacgggttcgaacatgggcgaggccaaaccgtggaaagcaattcgcgtagatctgctgcgttgcccctacggcggttttgcgtttgcgatgttgcagtggaccggaagccgcatgttccgccgtgatctgcgctggtacgccactgacgagaagaacatgatgctggacaatcattgtctgtatgacctgaccaagaaaatctttctcaaagctaaatcggaagaggaaattttcgcacatctggggcttgaatacctggaaccgttcgaacgtaacgca

SEQ ID NO: 2742 - protein, 529 aa, synthetic construct
  REGION 1..529: note = Variant of terminal deoxynucleotidyltransferase
MHHHHHHGGSGSHGIRTIDSDFGKKQQKKMDNHDSSAIYEIKFHEFVLFILEEKMGATRRTFLTDLARKKGFRVENELSDSVTHIVAENLSRSEVLAWLKEHKMEKTKQFELLDISWLIESMKVGKPVDTKGKYQLAESGEMSANPDPTEGRENELPPTMKTVSPYACQRRTTLNNHNQRFTDALEILAENYEFKRNDDTALEFRRAISVLKSLPFEVRSLKDTEGLPWIGDEVKGIMEEIIEVGNSREVQAVLNDEWYQSFHRFKSVFGVGVKTADKWYRMGLRTLEDVRSSKTLKLTPMQKAGLCYYEDLARGVTKAEADAISLLVQDAVATFDPDALVEIVGGFRRGKPQGHDVDLLISSPGAEKEQEDQLLQKVTNLWKKQGLLLYGRLEWTQWEDGKLPSGKADVGDAGAKCFLILKLYDHKVDKSKWEMPTGSNMGEAKPWKAIRVDLLRCPYGGFAFAMLQWTGSRMFRRDLRWYATDEKNMMLDNHCLYDLTKKIFLKAKSEEEIFAHLGLEYLEPFERNA

SEQ ID NO: 2743 - DNA, 1587 bp, synthetic construct
  misc_feature 1..1587: note = Variant of terminal deoxynucleotidyltransferase
  source 1..1587: mol_type = other DNA
atgcaccatcatcatcatcatggcggtagcggcagccacggcattcgtaccatcgattcggacttcgggaagaaacagcagaaaaaaatggataaccacgatagttccgccatctatgaaatcaaatttcacgagtttgtgctgttcattctcgaagaaaaaatgggtgcgacgcgtcgtacttttctgacagatttagcccgcaagaaagggttccgcgtcgagaatgaactgtcagacagcgttacccacatcgtggcagaaaatctgtcacgctctgaagtattggcttggctgaaagaacacaagatggagaagaccaagcaattcgaactgctggatattagctggcttatcgaaagcatgaaagttggtaaaccggtggacaccaaggggaaataccagttggcggaatcgggtgagatgagtgcgaacccagatccgacagagggtcgtgaaaacgagctgcctcctactatgaagaccgtttctccgtatgcgtgtcaacgccgcaccaccctgaacaaccataatcaacgttttacggacgcactggaaattcttgcggaaaattacgagttcaaacgcaacgatgatactgcgctggaatttcgtcgtgctatctccgtgctgaaaagccttccgtttgaggtacgtagcctgaaagacacggaaggattgccctggatcggtgatgaagtcaaagggattatggaagaaatcatcgaggtcgggaattcgcgtgaagtgcaggccgtgctcaatgatgagtggtatcaaagcttccaccgctttaagagtgtctttggagtgggggtgaagacagcagacaagtggtaccgtatgggtctgcgcaccctcgaggatgttcgttccagcaagaccctgaagttgaccccgatgcagaaagcgggtctgtgctattatgaagatcttgctcgcggcgttacgaaagccgaagctgacgcgatttctctgctggttcaggatgcagtcgcaactttcgacccggatgcgctggtggagattgtcggtggatttcgtcgtgggaaacctcagggtcacgacgttgatctgcttatcagttctccgggagctgagaaagagcaagaagaccagctcctgcagaaagtgaccaatctgtggaagaaacaagggttgttgctgtacggtcgtctggaatggacccagtgggaagatgggtcgctcccatccggtaaggctgacgtaggtgacgcgggtgcgaaatgctttctgatcctcaaactttatgatcataaagtggacaaaagcaaatgggaaatgccgacgggttcgaacatgggcgaggccaaaccgtggaaagcaattcgcgtagatctgctgcgttgcccctacggcggttttgcgtttgcgatgttgcagtggaccggaagccgcatgttccgccgtgatctgcgctggtacgccactgacgagaagaacatgatgctggacaatcatgcgctgtatgacctgaccaagaaaatctttctcaaagctaaatcggaagaggaaattttcgcacatctggggcttgaatacctggaaccgttcgaacgtaacgca

SEQ ID NO: 2744 - protein, 529 aa, synthetic construct
  REGION 1..529: note = Variant of terminal deoxynucleotidyltransferase
MHHHHHHGGSGSHGIRTIDSDFGKKQQKKMDNHDSSAIYEIKFHEFVLFILEEKMGATRRTFLTDLARKKGFRVENELSDSVTHIVAENLSRSEVLAWLKEHKMEKTKQFELLDISWLIESMKVGKPVDTKGKYQLAESGEMSANPDPTEGRENELPPTMKTVSPYACQRRTTLNNHNQRFTDALEILAENYEFKRNDDTALEFRRAISVLKSLPFEVRSLKDTEGLPWIGDEVKGIMEEIIEVGNSREVQAVLNDEWYQSFHRFKSVFGVGVKTADKWYRMGLRTLEDVRSSKTLKLTPMQKAGLCYYEDLARGVTKAEADAISLLVQDAVATFDPDALVEIVGGFRRGKPQGHDVDLLISSPGAEKEQEDQLLQKVTNLWKKQGLLLYGRLEWTQWEDGSLPSGKADVGDAGAKCFLILKLYDHKVDKSKWEMPTGSNMGEAKPWKAIRVDLLRCPYGGFAFAMLQWTGSRMFRRDLRWYATDEKNMMLDNHALYDLTKKIFLKAKSEEEIFAHLGLEYLEPFERNA

SEQ ID NO: 2745 - DNA, 1587 bp, synthetic construct
  misc_feature 1..1587: note = Variant of terminal deoxynucleotidyltransferase
  source 1..1587: mol_type = other DNA
atgcaccatcatcatcatcatggcggtagcggcagccacggcattcgtaccatcgattcggacttcgggaagaaacagcagaaaaaaatggataaccacgatagttccgccatctatgaaatcaaatttcacgagtttgtgctgttcattctcgaagaaaaaatgggtgcgacgcgtcgtacttttctgacagatttagcccgcaagaaagggttccgcgtcgagaatgaactgtcagacagcgttacccacatcgtggcagaaaatctgtcacgctctgaagtattggcttggctgaaagaacacaagatggagaagaccaagcaattcgaactgctggatattagctggcttatcgaaagcatgaaagttggtaaaccggtggacaccaaggggaaataccagttggcggaatcgggtgagatgagtgcgaacccagatccgacagagggtcgtgaaaacgagctgcctcctactatgaagaccgtttctccgtatgcgtgtcaacgccgcaccaccctgaacaaccataatcaacgttttacggacgcactggaaattcttgcggaaaattacgagttcaaacgcaacgatgatactgcgctggaatttcgtcgtgctatctccgtgctgaaaagccttccgtttgaggtacgtagcctgaaagacacggaaggattgccctggatcggtgatgaagtcaaagggattatggaagaaatcatcgaggtcgggaattcgcgtgaagtgcaggccgtgctcaatgatgagtggtatcaaagcttccaccgctttaagagtgtctttggagtgggggtgaagacagcagacaagtggtaccgtatgggtctgcgcaccctcgaggatgttcgttccagcaagaccctgaagttgaccccgatgcagaaagcgggtctgtgctattatgaagatcttgctcgcggcgttacgaaagccgaagctgacgcgatttctctgctggttcaggatgcagtcgcaactttcgacccggatgcgctggtggagattgtcggtggatttcgtcgtgggaaacctcagggtcacgacgttgatctgcttatcagttctccgggagctgagaaagagcaagaagaccagctcctgcagaaagtgaccaatctgtggaagaaacaagggttgttgctgtacggtcgtctggaatggacccagtgggaagatgggaaactcccatccggtaaggctgacgtaggtgacgcgggtgcgaaatgctttctgatcctcaaactttatgatcataaagtggacaaaagcaaatgggaaatgccgacgggttcgaacatgggcgaggccaaaccgtggaaagcaattcgcgtagatctgctgcgttgcccctacggcagttttgcgtttgcgatgttgcagtggaccggaagccgcatgttccgccgtgatctgcgctggtacgccactgacgagaagaacatgatgctggacaatcatgcgctgtatgacctgaccaagaaaatctttctcaaagctaaatcggaagaggaaattttcgcacatctggggcttgaatacctggaaccgttcgaacgtaacgca

SEQ ID NO: 2746 - protein, 529 aa, synthetic construct
  REGION 1..529: note = Variant of terminal deoxynucleotidyltransferase
MHHHHHHGGSGSHGIRTIDSDFGKKQQKKMDNHDSSAIYEIKFHEFVLFILEEKMGATRRTFLTDLARKKGFRVENELSDSVTHIVAENLSRSEVLAWLKEHKMEKTKQFELLDISWLIESMKVGKPVDTKGKYQLAESGEMSANPDPTEGRENELPPTMKTVSPYACQRRTTLNNHNQRFTDALEILAENYEFKRNDDTALEFRRAISVLKSLPFEVRSLKDTEGLPWIGDEVKGIMEEIIEVGNSREVQAVLNDEWYQSFHRFKSVFGVGVKTADKWYRMGLRTLEDVRSSKTLKLTPMQKAGLCYYEDLARGVTKAEADAISLLVQDAVATFDPDALVEIVGGFRRGKPQGHDVDLLISSPGAEKEQEDQLLQKVTNLWKKQGLLLYGRLEWTQWEDGKLPSGKADVGDAGAKCFLILKLYDHKVDKSKWEMPTGSNMGEAKPWKAIRVDLLRCPYGSFAFAMLQWTGSRMFRRDLRWYATDEKNMMLDNHALYDLTKKIFLKAKSEEEIFAHLGLEYLEPFERNA

SEQ ID NO: 2747 - DNA, 1587 bp, synthetic construct
  misc_feature 1..1587: note = Variant of terminal deoxynucleotidyltransferase
  source 1..1587: mol_type = other DNA
atgcaccatcatcatcatcatggcggtagcggcagccacggcattcgtaccatcgattcggacttcgggaagaaacagcagaaaaaaatggataaccacgatagttccgccatctatgaaatcaaatttcacgagtttgtgctgttcattctcgaagaaaaaatgggtgcgacgcgtcgtacttttctgacagatttagcccgcaagaaagggttccgcgtcgagaatgaactgtcagacagcgttacccacatcgtggcagaaaatctgtcacgctctgaagtattggcttggctgaaagaacacaagatggagaagaccaagcaattcgaactgctggatattagctggcttatcgaaagcatgaaagttggtaaaccggtggacaccaaggggaaataccagttggcggaatcgggtgagatgagtgcgaacccagatccgacagagggtcgtgaaaacgagctgcctcctactatgaagaccgtttctccgtatgcgtgtcaacgccgcaccaccctgaacaaccataatcaacgttttacggacgcactggaaattcttgcggaaaattacgagttcaaacgcaacgatgatactgcgctggaatttcgtcgtgctatctccgtgctgaaaagccttccgtttgaggtacgtagcctgaaagacacggaaggattgccctggatcggtgatgaagtcaaagggattatggaagaaatcatcgaggtcgggaattcgcgtgaagtgcaggccgtgctcaatgatgagtggtatcaaagcttccaccgctttaagagtgtctttggagtgggggtgaagacagcagacaagtggtaccgtatgggtctgcgcaccctcgaggatgttcgttccagcaagaccctgaagttgaccccgatgcagaaagcgggtctgtgctattatgaagatcttgctcgcggcgttacgaaagccgaagctgacgcgatttctctgctggttcaggatgcagtcgcaactttcgacccggatgcgctggtggagattgtcggtggatttcgtcgtgggaaacctcagggtcacgacgttgatctgcttatcagttctccgggagctgagaaagagcaagaagaccagctcctgcagaaagtgaccaatctgtggaagaaacaagggttgttgctgtacggtcgtctggaatggacccagtgggaagatgggaaactcgattccggtaaggctgacgtaggtgacgcgggtgcgaaatgctttctgatcctcaaactttatgatcataaagtggacaaaagcaaatgggaaatgccgacgggttcgaacatgggcgaggccaaaccgtggaaagcaattcgcgtagatctgctgcgttgcccctacggcggttttgcgtttgcgatgttgcagtggaccggaagccgcatgttccgccgtgatctgcgctggtacgccactgacgagaagaacatgatgctggacaatcatgcgctgtatgacctgaccaagaaaatctttctcaaagctaaatcggaagaggaaattttcgcacatctggggcttgaatacctggaaccgttcgaacgtaacgca

SEQ ID NO: 2748 - protein, 529 aa, synthetic construct
  REGION 1..529: note = Variant of terminal deoxynucleotidyltransferase
MHHHHHHGGSGSHGIRTIDSDFGKKQQKKMDNHDSSAIYEIKFHEFVLFILEEKMGATRRTFLTDLARKKGFRVENELSDSVTHIVAENLSRSEVLAWLKEHKMEKTKQFELLDISWLIESMKVGKPVDTKGKYQLAESGEMSANPDPTEGRENELPPTMKTVSPYACQRRTTLNNHNQRFTDALEILAENYEFKRNDDTALEFRRAISVLKSLPFEVRSLKDTEGLPWIGDEVKGIMEEIIEVGNSREVQAVLNDEWYQSFHRFKSVFGVGVKTADKWYRMGLRTLEDVRSSKTLKLTPMQKAGLCYYEDLARGVTKAEADAISLLVQDAVATFDPDALVEIVGGFRRGKPQGHDVDLLISSPGAEKEQEDQLLQKVTNLWKKQGLLLYGRLEWTQWEDGKLDSGKADVGDAGAKCFLILKLYDHKVDKSKWEMPTGSNMGEAKPWKAIRVDLLRCPYGGFAFAMLQWTGSRMFRRDLRWYATDEKNMMLDNHALYDLTKKIFLKAKSEEEIFAHLGLEYLEPFERNA

SEQ ID NO: 2749 - DNA, 1587 bp, synthetic construct
  misc_feature 1..1587: note = Variant of terminal deoxynucleotidyltransferase
  source 1..1587: mol_type = other DNA
atgcaccatcatcatcatcatggcggtagcggcagccacggcattcgtaccatcgattcggacttcgggaagaaacagcagaaaaaaatggataaccacgatagttccgccatctatgaaatcaaatttcacgagtttgtgctgttcattctcgaagaaaaaatgggtgcgacgcgtcgtacttttctgacagatttagcccgcaagaaagggttccgcgtcgagaatgaactgtcagacagcgttacccacatcgtggcagaaaatctgtcacgctctgaagtattggcttggctgaaagaacacaagatggagaagaccaagcaattcgaactgctggatattagctggcttatcgaaagcatgaaagttggtaaaccggtggacaccaaggggaaataccagttggcggaatcgggtgagatgagtgcgaacccagatccgacagagggtcgtgaaaacgagctgcctcctactatgaagaccgtttctccgtatgcgtgtcaacgccgcaccaccctgaacaaccataatcaacgttttacggacgcactggaaattcttgcggaaaattacgagttcaaacgcaacgatgatactgcgctggaatttcgtcgtgctatctccgtgctgaaaagccttccgtttgaggtacgtagcctgaaagacacggaaggattgccctggatcggtgatgaagtcaaagggattatggaagaaatcatcgaggtcgggaattcgcgtgaagtgcaggccgtgctcaatgatgagtggtatcaaagcttccaccgctttaagagtgtctttggagtgggggtgaagacagcagacaagtggtaccgtatgggtctgcgcaccctcgaggatgttcgttccagcaagaccctgaagttgaccccgatgcagaaagcgggtctgtgctattatgaagatcttgctcgcggcgttacgaaagccgaagctgacgcgatttctctgctggttcgggatgcagtcgcaactttcgacccggatgcgctggtggagattgtcggtggatttcgtcgtgggaaacctcagggtcacgacgttgatctgcttatcagttctccgggagctgagaaagagcaagaagaccagctcctgcagaaagtgaccaatctgtggaagaaacaagggttgttgctgtacggtcgtctggaatggacccagtgggaagatgggaaactcccatccggtaaggctgacgtaggtgacgcgggtgcgaaatgctttctgatcctcaaactttatgatcataaagtggacaaaagcaaatgggaaatgccgacgggttcgaacatgggcgaggccaaaccgtggaaagcaattcgcgtagatctgctgcgttgcccctacggcggttttgcgtttgcgatgttgcagtggaccggaagccgcatgttccgccgtgatctgcgctggtacgccactgacgagaagaacatgatgctggacaatcatgcgctgtatgacctgaccaagaaaatctttctcaaagctaaatcggaagaggaaattttcgcacatctggggcttgaatacctggaaccgttcgaacgtaacgca

SEQ ID NO: 2750 - protein, 529 aa, synthetic construct
  REGION 1..529: note = Variant of terminal deoxynucleotidyltransferase
MHHHHHHGGSGSHGIRTIDSDFGKKQQKKMDNHDSSAIYEIKFHEFVLFILEEKMGATRRTFLTDLARKKGFRVENELSDSVTHIVAENLSRSEVLAWLKEHKMEKTKQFELLDISWLIESMKVGKPVDTKGKYQLAESGEMSANPDPTEGRENELPPTMKTVSPYACQRRTTLNNHNQRFTDALEILAENYEFKRNDDTALEFRRAISVLKSLPFEVRSLKDTEGLPWIGDEVKGIMEEIIEVGNSREVQAVLNDEWYQSFHRFKSVFGVGVKTADKWYRMGLRTLEDVRSSKTLKLTPMQKAGLCYYEDLARGVTKAEADAISLLVRDAVATFDPDALVEIVGGFRRGKPQGHDVDLLISSPGAEKEQEDQLLQKVTNLWKKQGLLLYGRLEWTQWEDGKLPSGKADVGDAGAKCFLILKLYDHKVDKSKWEMPTGSNMGEAKPWKAIRVDLLRCPYGGFAFAMLQWTGSRMFRRDLRWYATDEKNMMLDNHALYDLTKKIFLKAKSEEEIFAHLGLEYLEPFERNA

SEQ ID NO: 2751 - DNA, 1587 bp, synthetic construct
  misc_feature 1..1587: note = Variant of terminal deoxynucleotidyltransferase
  source 1..1587: mol_type = other DNA
atgcaccatcatcatcatcatggcggtagcggcagccacggcattcgtaccatcgattcggacttcgggaagaaacagcagaaaaaaatggataaccacgatagttccgccatctatgaaatcaaatttcacgagtttgcgctgttcattctcgaagaaaaaatgggtgcgacgcgtcgtacttttctgacagatttagcccgcaagaaagggttccgcgtcgagaatgaactgtcagacagcgttacccacatcgtggcagaaaatctgtcacgctctgaagtattggcttggctgaaagaacacaagatggagaagaccaagcaattcgaactgctggatattagctggcttatcgaaagcatgaaagttggtaaaccggtggacaccaaggggaaataccagttggcggaatcgggtgagatgagtgcgaacccagatccgacagagggtcgtgaaaacgagctgcctcctactatgaagaccgtttctccgtatgcgtgtcaacgccgcaccaccctgaacaaccataatcaacgttttacggacgcactggaaattcttgcggaaaattacgagttcaaacgcaacgatgatactgcgctggaatttcgtcgtgctatctccgtgctgaaaagccttccgtttgaggtacgtagcctgaaagacacggaaggattgccctggatcggtgatgaagtcaaagggattatggaagaaatcatcgaggtcgggaattcgcgtgaagtgcaggccgtgctcaatgatgagtggtatcaaagcttccaccgctttaagagtgtctttggagtgggggtgaagacagcagacaagtggtaccgtatgggtctgcgcaccctcgaggatgttcgttccagcaagaccctgaagttgaccccgatgcagaaagcgggtctgtgctattatgaagatcttgctcgcggcgttacgaaagccgaagctgacgcgatttctaggctggttcaggatgcagtcgcaactttcgacccggatgcgctggtggagattgtcggtggatttcgtcgtgggaaacctcagggtcacgacgttgatctgcttatcagttctccgggagctgagaaagagcaagaagaccagctcctgcagaaagtgaccaatctgtggaagaaacaagggttgttgctgtacggtcgtctggaatggacccagtgggaagatgggaaactcccatccggtaaggctgacgtaggtgacgcgggtgcgaaatgctttctgatcctcaaactttatgatcataaagtggacaaaagcaaatgggaaatgccgacgggttcgaacatgggcgaggccaaaccgtggaaagcaattcgcgtagatctgctgcgttgcccctacggcggttttgcgtttgcgatgttgcagtggaccggaagccgcatgttccgccgtgatctgcgctggtacgccactgacgagaagaacatgatgctggacaatcatgcgctgtatgacctgaccaagaaaatctttctcaaagctaaatcggaagaggaaattttcgcacatctggggcttgaatacctggaaccgttcgaacgtaacgca

SEQ ID NO: 2752 - protein, 529 aa, synthetic construct
  REGION 1..529: note = Variant of terminal deoxynucleotidyltransferase
MHHHHHHGGSGSHGIRTIDSDFGKKQQKKMDNHDSSAIYEIKFHEFALFILEEKMGATRRTFLTDLARKKGFRVENELSDSVTHIVAENLSRSEVLAWLKEHKMEKTKQFELLDISWLIESMKVGKPVDTKGKYQLAESGEMSANPDPTEGRENELPPTMKTVSPYACQRRTTLNNHNQRFTDALEILAENYEFKRNDDTALEFRRAISVLKSLPFEVRSLKDTEGLPWIGDEVKGIMEEIIEVGNSREVQAVLNDEWYQSFHRFKSVFGVGVKTADKWYRMGLRTLEDVRSSKTLKLTPMQKAGLCYYEDLARGVTKAEADAISRLVQDAVATFDPDALVEIVGGFRRGKPQGHDVDLLISSPGAEKEQEDQLLQKVTNLWKKQGLLLYGRLEWTQWEDGKLPSGKADVGDAGAKCFLILKLYDHKVDKSKWEMPTGSNMGEAKPWKAIRVDLLRCPYGGFAFAMLQWTGSRMFRRDLRWYATDEKNMMLDNHALYDLTKKIFLKAKSEEEIFAHLGLEYLEPFERNA

SEQ ID NO: 2753 - DNA, 1587 bp, synthetic construct
  misc_feature 1..1587: note = Variant of terminal deoxynucleotidyltransferase
  source 1..1587: mol_type = other DNA
atgcaccatcatcatcatcatggcggtagcggcagccacggcattcgtaccatcgattcggacttcgggaagaaacagcagaaaaaaatggataaccacgatagttccgccatctatgaaatcaaatttcacgagtttgtgctgttcattctcgaagaaaaaatgggtgcgacgcgtcgtacttttctgacagatttagcccgcaagaaagggttccgcgtcgagaatgaactgtcagacagcgttacccacatcgtggcagaaaatctgtcacgctctgaagtattggcttggctgaaagaacacaagatggagaagaccaagcaattcgaactgctggatattagctggcttatcgaaagcatgaaagttggtaaaccggtggacaccaaggggaaataccagttggcggaatcgggtgagatgagtgcgaacccagatccgacagagggtcgtgaaaacgagctgcctcctactatgaagaccgtttctccgtatgcgtgtcaacgccgcaccaccctgaacaaccataatcaacgttttacggacgcactggaaattcttgcggaaaattacgagttcaaacgcaacgatgatgtggcgctggaatttcgtcgtgctatctccgtgctgaaaagccttccgtttgaggtacgtagcctgaaagacacggaaggattgccctggatcggtgatgaagtcaaagggattatggaagaaatcatcgaggtcgggaattcgcgtgaagtgcaggccgtgctcaatgatgagtggtatcaaagcttccaccgctttaagagtgtctttggagtgggggtgaagacagcagacaagtggtaccgtatgggtctgcgcaccctcgaggatgttcgttccagcaagaccctgaagttgaccccgatgcagaaagcgggtctgtgctattatgaagatcttgctcgcggcgttacgaaagccgaagctgacgcgatttctctgctggttcaggatgcagtcgcaactttcgacccggatgcgctggtggagattgtcggtggatttcgtcgtgggaaacctcagggtcacgacgttgatctgcttatcagttctccgggagctgagaaagagcaagaagaccagctcctgcagaaagtgaccaatctgtggaagaaacaagggttgttgctgtacggtcgtctggaatggacccagtgggaagatgggaaactcccatccggtaaggctgacgtaggtgacgcgggtgcgaaatgctttctgatcctcaaactttatgatcataaagtggacaaaagcaaatgggaaatgccgacgggttcgaacatgggcgaggccaaaccgtggaaagcaattcgcgtagatctgctgcgttgcccctacggcggttttgcgtttgcgatgttgcagtggaccggaagccgcatgttccgccgtgatctgcgctggtacgccactgacgagaagaacatgatgctggacaatcatgcgctgtatgacctgaccaagaaaatctttctcaaagctaaatcggaagaggaaattttcgcacatctggggcttgaatacctggaaccgttcgaacgtaacgca

SEQ ID NO: 2754 - protein, 529 aa, synthetic construct
  REGION 1..529: note = Variant of terminal deoxynucleotidyltransferase
MHHHHHHGGSGSHGIRTIDSDFGKKQQKKMDNHDSSAIYEIKFHEFVLFILEEKMGATRRTFLTDLARKKGFRVENELSDSVTHIVAENLSRSEVLAWLKEHKMEKTKQFELLDISWLIESMKVGKPVDTKGKYQLAESGEMSANPDPTEGRENELPPTMKTVSPYACQRRTTLNNHNQRFTDALEILAENYEFKRNDDVALEFRRAISVLKSLPFEVRSLKDTEGLPWIGDEVKGIMEEIIEVGNSREVQAVLNDEWYQSFHRFKSVFGVGVKTADKWYRMGLRTLEDVRSSKTLKLTPMQKAGLCYYEDLARGVTKAEADAISLLVQDAVATFDPDALVEIVGGFRRGKPQGHDVDLLISSPGAEKEQEDQLLQKVTNLWKKQGLLLYGRLEWTQWEDGKLPSGKADVGDAGAKCFLILKLYDHKVDKSKWEMPTGSNMGEAKPWKAIRVDLLRCPYGGFAFAMLQWTGSRMFRRDLRWYATDEKNMMLDNHALYDLTKKIFLKAKSEEEIFAHLGLEYLEPFERNA

SEQ ID NO: 2755 - DNA, 1587 bp, synthetic construct
  misc_feature 1..1587: note = Variant of terminal deoxynucleotidyltransferase
  source 1..1587: mol_type = other DNA
atgcaccatcatcatcatcatggcggtagcggcagccacggcattcgtaccatcgattcggacttcgggaagaaacagcagaaaaaaatggataaccacgatagttccgccatctatgaaatcaaatttcacgagtttgtgctgttcattctcgaagaaaaaatgggtgcgacgcgtcgtacttttctgacagatttagcccgcaagaaagggttccgcgtcgagaatgaactgtcagacagcgttacccacatcgtggcagaaaatctgtcacgctctgaagtattggcttggctgaaagaacacaagatggagaagaccaagcaattcgaactgctggatattagctggcttatcgaaagcatgaaagttggtaaaccggtggacaccaaggggaaataccagttggcggaatcgggtgagatgagtgcgaacccagatccgacagagggtcgtgaaaacgagctgcctcctactatgaagaccgtttctccgtatgcgtgtcaacgccgcaccaccctgaacaaccataatcaacgttttacggacgcactggaaattcttgcggaaaattacgagttcaaacgcaacgatgatactgcgctggaatttcgtcgtgctatctccgtgctgaaaagccttccgtttgaggtacgtagcctgaaagacacggaaggattgccctggatcggtgatgaagtcaaagggattatggaagaaatcatcgaggtcgggaattcgcgtgaagtgcaggccgtgctcaatgatgagtggtatcaaagcttccaccgctttaagagtgtctttggagtgggggtgaagacagcagacaagtggtaccgtatgggtctgcgcaccctcgaggatgttcgttccagcaagaccctgaagttgaccccgatgcagaaagcgggtctgtgctattatgaagatcttgctcgcggcgttacgaaagccgaagctgacgcgatttctctgctggttcaggatgcagtcgcaactttcgacccggatgcgctggtggagattgtcggtggatttcgtcgtgggaaacctcagggtcacgacgttgatctgcttatcagttctccgggagctgagaaagagcaagaagaccagctcctgcagaaagtgaccaatctgtggaagaaacaagggttgttgctgtacggtcgtctggaatggacccagtgggaagatgggaaacgtccatccggtaaggctgacgtaggtgacgcgggtgcgaaatgctttctgatcctcaaactttatgatcataaagtggacaaaagcaaatgggaaatgccgacgggttcgaacatgggcgaggccaaaccgtggaaagcaattcgcgtagatctgctgcgttgcccctacggcggttttgcgtttgcgatgttgcagtggaccggaagccgcatgttccgccgtgatctgcgctggtacgccactgacgagaagaacatgatgctggacaatcatgcgctgtatgacctgaccaagaaaatctttctcaaagctaaatcggaagaggaaattttcgcacatctggggcttgaatacctggaaccgttcgaacgtaacgca

SEQ ID NO: 2756 - protein, 529 aa, synthetic construct
  REGION 1..529: note = Variant of terminal deoxynucleotidyltransferase
MHHHHHHGGSGSHGIRTIDSDFGKKQQKKMDNHDSSAIYEIKFHEFVLFILEEKMGATRRTFLTDLARKKGFRVENELSDSVTHIVAENLSRSEVLAWLKEHKMEKTKQFELLDISWLIESMKVGKPVDTKGKYQLAESGEMSANPDPTEGRENELPPTMKTVSPYACQRRTTLNNHNQRFTDALEILAENYEFKRNDDTALEFRRAISVLKSLPFEVRSLKDTEGLPWIGDEVKGIMEEIIEVGNSREVQAVLNDEWYQSFHRFKSVFGVGVKTADKWYRMGLRTLEDVRSSKTLKLTPMQKAGLCYYEDLARGVTKAEADAISLLVQDAVATFDPDALVEIVGGFRRGKPQGHDVDLLISSPGAEKEQEDQLLQKVTNLWKKQGLLLYGRLEWTQWEDGKRPSGKADVGDAGAKCFLILKLYDHKVDKSKWEMPTGSNMGEAKPWKAIRVDLLRCPYGGFAFAMLQWTGSRMFRRDLRWYATDEKNMMLDNHALYDLTKKIFLKAKSEEEIFAHLGLEYLEPFERNA

SEQ ID NO: 2757 - DNA, 1587 bp, synthetic construct
  misc_feature 1..1587: note = Variant of terminal deoxynucleotidyltransferase
  source 1..1587: mol_type = other DNA
atgcaccatcatcatcatcatggcggtagcggcagccacggcattcgtaccatcgattcggacttcgggaagaaacagcagaaaaaaatggataaccacgatagttccgccatctatgaaatcaaatttcacgagtttgtgctgttcattctcgaagaaaaaatgggtgcgacgcgtcgtacttttctgacagatttagcccgcaagaaagggttccgcgtcgagaatgaactgtcagacagcgttacccacatcgtggcagaaaatctgtcacgctctgaagtattggcttggctgaaagaacacaagatggagaagaccaagcaattcgaactgctggatattagctggcttatcgaaagcatgaaagttggtaaaccggtggacaccaaggggaaataccagttggcggaatcgggtgagatgagtgcgaacccagatccgacagagggtcgtgaaaacgagctgcctcctactatgaagaccgtttctccgtatgcgtgtcaacgccgcaccaccctgaacaaccataatcaacgttttacggacgcactggaaattcttgcggaaaattacgagttcaaacgcaacgatgatactgcgctggaatttcgtcgtgctatctccgtgctgaaaagccttccgtttgaggtacgtagcctgaaagacacggaaggattgccctggatcggtgatgaagtcaaagggattatggaagaaatcatcgaggtcgggaattcgcgtgaagtgcaggccgtgctcaatgatgagtggtatcaaagcttccaccgctttaagagtgtctttggagtgggggtgaagacagcagacaagtggtaccgtatgggtctgcgcaccctcgaggatgttcgttccagcaagaccctgaagttgaccccgatgcagaaagcgggtctgtgctattatgaagatcttgctcgcggcgttacgaaagccgaagctgacgcgatttggctgctggttcaggatgcagtcgcaactttcgacccggatgcgctggtggagattgtcggtggatttcgtcgtgggaaacctcagggtcacgacgttgatctgcttatcagttctccgggagctgagaaagagcaagaagaccagctcctgcagaaagtgaccaatctgtggaagaaacaagggttgttgctgtacggtcgtctggaatggacccagtgggaagatgggaaactcccatccggtaaggctgacgtaggtgacgcgggtgcgaaatgctttctgatcctcaaactttatgatcataaagtggacaaaagcaaatgggaaatgccgacgggttcgaacatgggcgaggccaaaccgtggaaagcaattcgcgtagatctgctgcgttgcccctacggcggttttgcgtttgcgatgttgcagtggaccggaagccgcatgttccgccgtgatctgcgctggtacgccactgacgagaagaacatgatgctggacaatcatgcgctgtatgacctgaccaagaaaatctttctcaaagctaaatcggaagaggaaattttcgcacatctggggcttgaatacctggaaccgttcgaacgtaacgca

SEQ ID NO: 2758 - protein, 529 aa, synthetic construct
  REGION 1..529: note = Variant of terminal deoxynucleotidyltransferase
MHHHHHHGGSGSHGIRTIDSDFGKKQQKKMDNHDSSAIYEIKFHEFVLFILEEKMGATRRTFLTDLARKKGFRVENELSDSVTHIVAENLSRSEVLAWLKEHKMEKTKQFELLDISWLIESMKVGKPVDTKGKYQLAESGEMSANPDPTEGRENELPPTMKTVSPYACQRRTTLNNHNQRFTDALEILAENYEFKRNDDTALEFRRAISVLKSLPFEVRSLKDTEGLPWIGDEVKGIMEEIIEVGNSREVQAVLNDEWYQSFHRFKSVFGVGVKTADKWYRMGLRTLEDVRSSKTLKLTPMQKAGLCYYEDLARGVTKAEADAIWLLVQDAVATFDPDALVEIVGGFRRGKPQGHDVDLLISSPGAEKEQEDQLLQKVTNLWKKQGLLLYGRLEWTQWEDGKLPSGKADVGDAGAKCFLILKLYDHKVDKSKWEMPTGSNMGEAKPWKAIRVDLLRCPYGGFAFAMLQWTGSRMFRRDLRWYATDEKNMMLDNHALYDLTKKIFLKAKSEEEIFAHLGLEYLEPFERNA

SEQ ID NO: 2759 - DNA, 1587 bp, synthetic construct
  misc_feature 1..1587: note = Variant of terminal deoxynucleotidyltransferase
  source 1..1587: mol_type = other DNA
atgcaccatcatcatcatcatggcggtagcggcagccacggcattcgtaccatcgattcggacttcgggaagaaacagcagaaaaaaatggataaccacgatagttccgccatctatgaaatcaaatttcacgagtttgtgctgttcattctcgaagaaaaaatgggtgcgacgcgtcgtacttttctgacagatttagcccgcaagaaagggttccgcgtcgagaatgaactgtcagacagcgttacccacatcgtggcagaaaatctgtcacgctctgaagtattggcttggctgaaagaacacaagatggagaagaccaagcaattcgaactgctggatattagctggcttatcgaaagcatgaaagttggtaaaccggtggacaccaaggggaaataccagttggcggaatcgggtgagatgagtgcgaacccagatccgacagagggtcgtgaaaacgagctgcctcctactatgaagaccgtttctccgtatgcgtgtcaacgccgcaccaccctgaacaaccataatcaacgttttacggacgcactggaaattcttgcggaaaattacgagttcaaacgcaacgatgatactgcgctggaatttcgtcgtgctatctccgtgctgaaaagccttccgtttgaggtacgtagcctgaaagacacggaaggattgccctggatcggtgatgaagtcaaagggattatggaagaaatcatcgaggtcgggaattcgcgtgaagtgcaggccgtgctcaatgatgagtggtatcaaagcttccaccgctttaagagtgtctttggagtgggggtgaagacagcagacaagtggtaccgtatgggtctgcgcaccctcgaggatgttcgttccagcaagaccctgaagttgaccccgatgcagaaagcgggtctgtgctattatgaagatcttgctcgcggcgttacgaaagccgaagctgacgcgatttctctgctggttcaggatgcagtcgcaactttcgacccggatgcgctggtggagattgtcggtggatttcgtcgtgggaaacctcagggtcacgacgttgatctgcttatcagttctccgggagctgagaaagagcaagaagaccagctcctgcagaaagtgaccaatctgtggaagaaacaagggttgttgctgtacggtcgtctggaatggacccagtgggaagatgggaaactcccatccggtaaggctgacgtaggtgacgcgggtgcgaaatgctttctgatcctcaaactttatgatcattttgtggacaaaagcaaatgggaaatgccgacgggttcgaacatgggcgaggccaaaccgtggaaagcaattcgcgtagatctgctgcgttgcccctacggcggttttgcgtttgcgatgttgcagtggaccggaagccgcatgttccgccgtgatctgcgctggtacgccactgacgagaagaacatgatgctggacaatcatgcgctgtatgacctgaccaagaaaatctttctcaaagctaaatcggaagaggaaattttcgcacatctggggcttgaatacctggaaccgttcgaacgtaacgca

SEQ ID NO: 2760 - protein, 529 aa, synthetic construct
  REGION 1..529: note = Variant of terminal deoxynucleotidyltransferase
MHHHHHHGGSGSHGIRTIDSDFGKKQQKKMDNHDSSAIYEIKFHEFVLFILEEKMGATRRTFLTDLARKKGFRVENELSDSVTHIVAENLSRSEVLAWLKEHKMEKTKQFELLDISWLIESMKVGKPVDTKGKYQLAESGEMSANPDPTEGRENELPPTMKTVSPYACQRRTTLNNHNQRFTDALEILAENYEFKRNDDTALEFRRAISVLKSLPFEVRSLKDTEGLPWIGDEVKGIMEEIIEVGNSREVQAVLNDEWYQSFHRFKSVFGVGVKTADKWYRMGLRTLEDVRSSKTLKLTPMQKAGLCYYEDLARGVTKAEADAISLLVQDAVATFDPDALVEIVGGFRRGKPQGHDVDLLISSPGAEKEQEDQLLQKVTNLWKKQGLLLYGRLEWTQWEDGKLPSGKADVGDAGAKCFLILKLYDHFVDKSKWEMPTGSNMGEAKPWKAIRVDLLRCPYGGFAFAMLQWTGSRMFRRDLRWYATDEKNMMLDNHALYDLTKKIFLKAKSEEEIFAHLGLEYLEPFERNA

SEQ ID NO: 2761 - DNA, 1587 bp, synthetic construct
  misc_feature 1..1587: note = Variant of terminal deoxynucleotidyltransferase
  source 1..1587: mol_type = other DNA
atgcaccatcatcatcatcatggcggtagcggcagccacggcattcgtaccatcgattcggacttcgggaagaaacagcagaaaaaaatggataaccacgatagttccgccatctatgaaatcaaatttcacgagtttgtgctgttcattctcgaagaaaaaatgggtgcgacgcgtcgtacttttctgacagatttagcccgcaagaaagggttccgcgtcgagaatgaactgtcagacagcgttacccacatcgtggcagaaaatctgtcacgctctgaagtattggcttggctgaaagaacacaagatggagaagaccaagcaattcgaactgctggatattagctggcttatcgaaagcatgaaagttggtaaaccggtggacaccaaggggaaataccagttggcggaatcgggtgagatgagtgcgaacccagatccgacagagggtcgtgaaaacgagctgcctcctactatgaagaccgtttctccgtatgcgtgtcaacgccgcaccaccctgaacaaccataatcaacgttttacggacgcactggaaattcttgcggaaaattacgagttcaaacgcaacgatgatactgcgctggaatttcgtcgtgctatctccgtgctgaaaagccttccgtttgaggtacgtagcctgaaagacacggaaggattgccctggatcggtgatgaagtcaaagggattatggaagaaatcatcgaggtcgggaattcgcgtgaagtgcaggccgtgctcaatgatgagtggtatcaaagcttccaccgctttaagagtgtctttggagtgggggtgaagacagcagacaagtggtaccgtatgggtctgcgcaccctcgaggatgttcgttccagcaagaccctgaagttgaccccgatgcagaaagcgggtctgtgctattatgaagatcttgctcgcggcgttacgaaagccgaagctgacgcgatttctctgctggttcaggatgcagtcgcaactttcgacccggatgcgctggtggagattgtcggtggatttcgtcgtgggaaacctcagggtcacgacgttgatctgcttatcagttctccgggagctgagaaagagcaagaagaccagctcctgcagaaagtgaccaatctgtggaagaaacaagggttgttgctgtacggtcgtctggaatggacccagtgggaagatgggaaactcccatccggtaaggctgacgtaggtgacgcgggtgcgaaatgctttctgatcctcaaactttatgatcataaagtggacaaaagcaaatgggaaatgccgacgggttcgaacatgggcgaggccaaaccgtggaaagcaattcgcgtagatctgctgcgttgcccctacggcggttttgcgtttgcgatgttgcagtggaccggaagccgcatgttccgccgtgatctgcgctggtacgccactgacgagaagaacatgatgctggacaatcatgcgctgtatgacctgaccaagaaaatctttctcacggctaaatcggaagaggaaattttcgcacatctggggcttgaatacctggaaccgttcgaacgtaacgca

SEQ ID NO: 2762 - protein, 529 aa, synthetic construct
  REGION 1..529: note = Variant of terminal deoxynucleotidyltransferase
MHHHHHHGGSGSHGIRTIDSDFGKKQQKKMDNHDSSAIYEIKFHEFVLFILEEKMGATRRTFLTDLARKKGFRVENELSDSVTHIVAENLSRSEVLAWLKEHKMEKTKQFELLDISWLIESMKVGKPVDTKGKYQLAESGEMSANPDPTEGRENELPPTMKTVSPYACQRRTTLNNHNQRFTDALEILAENYEFKRNDDTALEFRRAISVLKSLPFEVRSLKDTEGLPWIGDEVKGIMEEIIEVGNSREVQAVLNDEWYQSFHRFKSVFGVGVKTADKWYRMGLRTLEDVRSSKTLKLTPMQKAGLCYYEDLARGVTKAEADAISLLVQDAVATFDPDALVEIVGGFRRGKPQGHDVDLLISSPGAEKEQEDQLLQKVTNLWKKQGLLLYGRLEWTQWEDGKLPSGKADVGDAGAKCFLILKLYDHKVDKSKWEMPTGSNMGEAKPWKAIRVDLLRCPYGGFAFAMLQWTGSRMFRRDLRWYATDEKNMMLDNHALYDLTKKIFLTAKSEEEIFAHLGLEYLEPFERNA

SEQ ID NO: 2763 - DNA, 1587 bp, synthetic construct
  misc_feature 1..1587: note = Variant of terminal deoxynucleotidyltransferase
  source 1..1587: mol_type = other DNA
atgcaccatcatcatcatcatggcggtagcggcagccacggcattcgtaccatcgattcggacttcgggaagaaacagcagaaaaaaatggataaccacgatagttccgccatctatgaaatcaaatttcacgagtttgtgctgttcattctcgaagaaaaaatgggtgcgacgcgtcgtacttttctgacagatttagcccgcaagaaagggttccgcgtcgagaatgaactgtcagacagcgttacccacatcgtggcagaaaatctgtcacgctctgaagtattggcttggctgaaagaacacaagatggagaagaccaagcaattcgaactgctggatattagctggcttatcgaaagcatgaaagttggtaaaccggtggacaccaaggggaaataccagttggcggaatcgggtgagatgagtgcgaacccagatccgacagagggtcgtgaaaacgagctgcctcctactatgaagaccgtttctccgtatgcgtgtcaacgccgcaccaccctgaacaaccataatcaacgttttacggacgcactggaaattcttgcggaaaattacgagttcaaacgcaacgatgataatgcgctggaatttcgtcgtgctatctccgtgctgaaaagccttccgtttgaggtacgtagcctgaaagacacggaaggattgccctggatcggtgatgaagtcaaagggattatggaagaaatcatcgaggtcgggaattcgcgtgaagtgcaggccgtgctcaatgatgagtggtatcaaagcttccaccgctttaagagtgtctttggagtgggggtgaagacagcagacaagtggtaccgtatgggtctgcgcaccctcgaggatgttcgttccagcaagaccctgaagttgaccccgatgcagaaagcgggtctgtgctattatgaagatcttgctcgcggcgttacgaaagccgaagctgacgcgatttctctgctggttcaggatgcagtcgcaactttcgacccggatgcgctggtggagattgtcggtggatttcgtcgtgggaaacctcagggtcacgacgttgatctgcttatcagttctccgggagctgagaaagagcaagaagaccagctcctgcagaaagtgaccaatctgtggaagaaacaagggttgttgctgtacggtcgtctggaatggacccagtgggaagatgggaaactcccatccggtaaggctgacgtaggtgacgcgggtgcgaaatgctttctgatcctcaaactttatgatcataaagtggacaaaagcaaatgggaaatgccgacgggttcgaacatgggcgaggccaaaccgtggaaagcaattcgcgtagatctgctgcgttgcccctacggcggttttgcgtttgcgatgttgcagtggaccggaagccgcatgttccgccgtgatctgcgctggtacgccactgacgagaagaacatgatgctggacaatcatgcgctgtatgacctgaccaagaaaatctttctcaaagctaaatcggaagaggaaattttcgcacatctggggcttgaatacctggaaccgttcgaacgtaacgca

SEQ ID NO: 2764 - protein, 529 aa, synthetic construct
  REGION 1..529: note = Variant of terminal deoxynucleotidyltransferase
MHHHHHHGGSGSHGIRTIDSDFGKKQQKKMDNHDSSAIYEIKFHEFVLFILEEKMGATRRTFLTDLARKKGFRVENELSDSVTHIVAENLSRSEVLAWLKEHKMEKTKQFELLDISWLIESMKVGKPVDTKGKYQLAESGEMSANPDPTEGRENELPPTMKTVSPYACQRRTTLNNHNQRFTDALEILAENYEFKRNDDNALEFRRAISVLKSLPFEVRSLKDTEGLPWIGDEVKGIMEEIIEVGNSREVQAVLNDEWYQSFHRFKSVFGVGVKTADKWYRMGLRTLEDVRSSKTLKLTPMQKAGLCYYEDLARGVTKAEADAISLLVQDAVATFDPDALVEIVGGFRRGKPQGHDVDLLISSPGAEKEQEDQLLQKVTNLWKKQGLLLYGRLEWTQWEDGKLPSGKADVGDAGAKCFLILKLYDHKVDKSKWEMPTGSNMGEAKPWKAIRVDLLRCPYGGFAFAMLQWTGSRMFRRDLRWYATDEKNMMLDNHALYDLTKKIFLKAKSEEEIFAHLGLEYLEPFERNA

SEQ ID NO: 2765 - DNA, 1587 bp, synthetic construct
  misc_feature 1..1587: note = Variant of terminal deoxynucleotidyltransferase
  source 1..1587: mol_type = other DNA
atgcaccatcatcatcatcatggcggtagcggcagccacggcattcgtaccatcgattcggacttcgggaagaaacagcagaaaaaaatggataaccacgatagttccgccatctatgaaatcaaatttcacgagtttgtgctgttcattctcgaagaaaaaatgggtgcgacgcgtcgtacttttctgacagatttagcccgcaagaaagggttccgcgtcgagaatgaactgtcagacagcgttacccacatcgtggcagaaaatctgtcacgctctgaagtattggcttggctgaaagaacacaagatggagaagaccaagcaattcgaactgctggatattagctggcttatcgaaagcatgaaagttggtaaaccggtggacaccaaggggaaataccagttggcggaatcgggtgagatgagtgcgaacccagatccgacagagggtcgtgaaaacgagctgcctcctactatgaagaccgtttctccgtatgcgtgtcaacgccgcaccaccctgaacaaccataatcaacgttttacggacgcactggaaattcttgcggaaaattacgagttcaaacgcaacgatgatactgcgctggaatttcgtcgtgctatctccgtgctgaaaagccttccgtttgaggtacgtagcctgaaagacacggaaggattgccctggatcggtgatgaagtcaaagggattatggaagaaatcatcgaggtcgggaattcgcgtgaagtgcaggccgtgctcaatgatgagtggtatcaaagcttccaccgctttaagagtgtctttggagtgggggtgaagacagcagacaagtggtaccgtatgggtctgcgcaccctcgaggatgttcgttccagcaagaccctgaagttgaccccgatgcagaaagcgggtctgtgctattatgaagatcttgctcgcggcgttacgaaagccgaagctgacgcgatttctctgctggttcaggatgcagtcgcaactttcgacccggatgcgctggtggagattgtcggtggatttcgtcgtgggaaacctcagggtcacgacgttgatctgcttatcagttctccgggagctgagaaagagcaagaagaccagctcctgcagaaagtgaccaatctgtggaagaaacaagggttgttgctgtacggtcgtctggaatggacccagtgggaagatgggaaactcccatccggtaaggctgacgtaggtgacgcgggtgcgaaatgctttctgatcctcaaactttatgatcattgtgtggacaaaagcaaatgggaaatgccgacgggttcgaacatgggcgaggccaaaccgtggaaagcaattcgcgtagatctgctgcgttgcccctacggcggttttgcgtttgcgatgttgcagtggaccggaagccgcatgttccgccgtgatctgcgctggtacgccactgacgagaagaacatgatgctggacaatcatgcgctgtatgacctgaccaagaaaatctttctcaaagctaaatcggaagaggaaattttcgcacatctggggcttgaatacctggaaccgttcgaacgtaacgca

SEQ ID NO: 2766 - protein, 529 aa, synthetic construct
  REGION 1..529: note = Variant of terminal deoxynucleotidyltransferase
MHHHHHHGGSGSHGIRTIDSDFGKKQQKKMDNHDSSAIYEIKFHEFVLFILEEKMGATRRTFLTDLARKKGFRVENELSDSVTHIVAENLSRSEVLAWLKEHKMEKTKQFELLDISWLIESMKVGKPVDTKGKYQLAESGEMSANPDPTEGRENELPPTMKTVSPYACQRRTTLNNHNQRFTDALEILAENYEFKRNDDTALEFRRAISVLKSLPFEVRSLKDTEGLPWIGDEVKGIMEEIIEVGNSREVQAVLNDEWYQSFHRFKSVFGVGVKTADKWYRMGLRTLEDVRSSKTLKLTPMQKAGLCYYEDLARGVTKAEADAISLLVQDAVATFDPDALVEIVGGFRRGKPQGHDVDLLISSPGAEKEQEDQLLQKVTNLWKKQGLLLYGRLEWTQWEDGKLPSGKADVGDAGAKCFLILKLYDHCVDKSKWEMPTGSNMGEAKPWKAIRVDLLRCPYGGFAFAMLQWTGSRMFRRDLRWYATDEKNMMLDNHALYDLTKKIFLKAKSEEEIFAHLGLEYLEPFERNA

SEQ ID NO: 2767 - DNA, 1587 bp, synthetic construct
  misc_feature 1..1587: note = Variant of terminal deoxynucleotidyltransferase
  source 1..1587: mol_type = other DNA
atgcaccatcatcatcatcatggcggtagcggcagccacggcattcgtaccatcgattcggacttcgggaagaaacagcagaaaaaaatggataaccacgatagttccgccatctatgaaatcaaatttcacgagtttgtgctgttcattctcgaagaaaaaatgggtgcgacgcgtcgtacttttctgacagatttagcccgcaagaaagggttccgcgtcgagaatgaactgtcagacagcgttacccacatcgtggcagaaaatctgtcacgctctgaagtattggcttggctgaaagaacacaagatggagaagaccaagcaattcgaactgctggatattagctggcttatcgaaagcatgaaagttggtaaaccggtggacaccaaggggaaataccagttggcggaatcgggtgagatgagtgcgaacccagatccgacagagggtcgtgaaaacgagctgcctcctactatgaagaccgtttctccgtatgcgtgtcaacgccgcaccaccctgaacaaccataatcaacgttttacggacgcactggaaattcttgcggaaaattacgagttcaaacgcaacgatgatactgcgctggaatttcgtcgtgctatctccgtgctgaaaagccttccgtttgaggtacgtagcctgaaagacacggaaggattgccctggatcggtgatgaagtcaaagggattatggaagaaatcatcgaggtcgggaattcgcgtgaagtgcaggccgtgctcaatgatgagtggtatcaaagcttccaccgctttaagagtgtctttggagtgggggtgaagacagcagacaagtggtaccgtatgggtctgcgcaccctcgaggatgttcgttccagcaagaccctgaagttgaccccgatgcagaaagcgggtctgtgctattatgaagatcttgctcgcggcgttacgaaagccgaagctgacgcgatttctctgctggttcaggatgcagtcgcaactttcgacccggatgcgctggtggagattgtcggtggatttcgtcgtgggaaacctcagggtcacgacgttgatctgcttatcagttctccgggagctgagaaagagcaagaagaccagctcctgcagaaagtgaccaatctgtggaagaaacaagggttgttgctgtacggtcgtctggaatggacccagtgggaagatgggaaactcccatccggtaaggctgacgtaggtgacgcgggtgcgaaatgctttctgatcctcaaactttatgatcataaagtggacaaaagcaaatgggaaatgccgacgggttcgaacatgggcgaggccaaaccgtggaaagcaattcgcgtagatctgctgcgttgcccctacggcggttttgcgtttgcgatgttgcagtggaccggaagccgcatgttccgccgtgatctgcgctggtacgccactgacgagaagaacatgatgctggacaatcatgcgctgtatgacctgaccaagaaaatctttctcaaagcttcttcggaagaggaaattttcgcacatctggggcttgaatacctggaaccgttcgaacgtaacgca

SEQ ID NO: 2768 - protein, 529 aa, synthetic construct
  REGION 1..529: note = Variant of terminal deoxynucleotidyltransferase
MHHHHHHGGSGSHGIRTIDSDFGKKQQKKMDNHDSSAIYEIKFHEFVLFILEEKMGATRRTFLTDLARKKGFRVENELSDSVTHIVAENLSRSEVLAWLKEHKMEKTKQFELLDISWLIESMKVGKPVDTKGKYQLAESGEMSANPDPTEGRENELPPTMKTVSPYACQRRTTLNNHNQRFTDALEILAENYEFKRNDDTALEFRRAISVLKSLPFEVRSLKDTEGLPWIGDEVKGIMEEIIEVGNSREVQAVLNDEWYQSFHRFKSVFGVGVKTADKWYRMGLRTLEDVRSSKTLKLTPMQKAGLCYYEDLARGVTKAEADAISLLVQDAVATFDPDALVEIVGGFRRGKPQGHDVDLLISSPGAEKEQEDQLLQKVTNLWKKQGLLLYGRLEWTQWEDGKLPSGKADVGDAGAKCFLILKLYDHKVDKSKWEMPTGSNMGEAKPWKAIRVDLLRCPYGGFAFAMLQWTGSRMFRRDLRWYATDEKNMMLDNHALYDLTKKIFLKASSEEEIFAHLGLEYLEPFERNA

SEQ ID NO: 2769 - DNA, 1587 bp, synthetic construct
  misc_feature 1..1587: note = Variant of terminal deoxynucleotidyltransferase
  source 1..1587: mol_type = other DNA
atgcaccatcatcatcatcatggcggtagcggcagccacggcattcgtaccatcgattcggacttcgggaagaaacagcagaaaaaaatggataaccacgatagttccgccatctatgaaatcaaatttcacgagtttgtgctgttcattctcgaagaaaaaatgggtgcgacgcgtcgtacttttctgacagatttagcccgcaagaaagggttccgcgtcgagaatgaactgtcagacagcgttacccacatcgtggcagaaaatctgtcacgctctgaagtattggcttggctgaaagaacacaagatggagaagaccaagcaattcgaactgctggatattagctggcttatcgaaagcatgaaagttggtaaaccggtggacaccaaggggaaataccagttggcggaatcgggtgagatgagtgcgaacccagatccgacagagggtcgtgaaaacgagctgcctcctactatgaagaccgtttctccgtatgcgtgtcaacgccgcaccaccctgaacaaccataatcaacgttttacggacgcactggaaattcttgcggaaaattacgagttcaaacgcaacgatgatactgcgctggaatttcgtcgtgctatctccgtgctgaaaagccttccgtttgaggtacgtagcctgaaagacacggaaggattgccctggatcggtgatgaagtcaaagggattatggaagaaatcatcgaggtcgggaattcgcgtgaagtgcaggccgtgctcaatgatgagtggtatcaaagcttccaccgctttaagagtgtctttggagtgggggtgaagacagcagacaagtggtaccgtatgggtctgcgcaccctcgaggatgttcgttccagcaagaccctgaagttgaccccgatgcagaaagcgggtctgtgctattatgaagatcttgctcgcggcgttacgaaagccgaagctgacgcgatttctctgctggttcaggatgcagtcgcaactttcgacccggatgcgctggtggagattgtcggtggatttcgtcgtgggaaacctcagggtcacgacgttgatctgcttatcagttctccgggagctgagaaagagcaagaagaccagctcctgcagaaagtgaccaatctgtggaagaaacaagggttgttgctgtacggtcgtctggaatggacccagtgggaagatgggaaactcccatccggtaaggctgacgtaggtgacgcgggtgcgaaatgctttctgatcctcaaactttatgatcattatgtggacaaaagcaaatgggaaatgccgacgggttcgaacatgggcgaggccaaaccgtggaaagcaattcgcgtagatctgctgcgttgcccctacggcggttttgcgtttgcgatgttgcagtggaccggaagccgcatgttccgccgtgatctgcgctggtacgccactgacgagaagaacatgatgctggacaatcatgcgctgtatgacctgaccaagaaaatctttctcaaagctaaatcggaagaggaaattttcgcacatctggggcttgaatacctggaaccgttcgaacgtaacgca

SEQ ID NO: 2770 - protein, 529 aa, synthetic construct
  REGION 1..529: note = Variant of terminal deoxynucleotidyltransferase
MHHHHHHGGSGSHGIRTIDSDFGKKQQKKMDNHDSSAIYEIKFHEFVLFILEEKMGATRRTFLTDLARKKGFRVENELSDSVTHIVAENLSRSEVLAWLKEHKMEKTKQFELLDISWLIESMKVGKPVDTKGKYQLAESGEMSANPDPTEGRENELPPTMKTVSPYACQRRTTLNNHNQRFTDALEILAENYEFKRNDDTALEFRRAISVLKSLPFEVRSLKDTEGLPWIGDEVKGIMEEIIEVGNSREVQAVLNDEWYQSFHRFKSVFGVGVKTADKWYRMGLRTLEDVRSSKTLKLTPMQKAGLCYYEDLARGVTKAEADAISLLVQDAVATFDPDALVEIVGGFRRGKPQGHDVDLLISSPGAEKEQEDQLLQKVTNLWKKQGLLLYGRLEWTQWEDGKLPSGKADVGDAGAKCFLILKLYDHYVDKSKWEMPTGSNMGEAKPWKAIRVDLLRCPYGGFAFAMLQWTGSRMFRRDLRWYATDEKNMMLDNHALYDLTKKIFLKAKSEEEIFAHLGLEYLEPFERNA

SEQ ID NO: 2771 - DNA, 1587 bp, synthetic construct
  misc_feature 1..1587: note = Variant of terminal deoxynucleotidyltransferase
  source 1..1587: mol_type = other DNA
atgcaccatcatcatcatcatggcggtagcggcagccacggcattcgtaccatcgattcggacttcgggaagaaacagcagaaaaaaatggataaccacgatagttccgccatctatgaaatcaaatttcacgagtttgtgctgttcattctcgaagaaaaaatgggtgcgacgcgtcgtacttttctgacagatttagcccgcaagaaagggttccgcgtcgagaatgaactgtcagacagcgttacccacatcgtggcagaaaatctgtcacgctctgaagtattggcttggctgaaagaacacaagatggagaagaccaagcaattcgaactgctggatattagctggcttatcgaaagcatgaaagttggtaaaccggtggacaccaaggggaaataccagttggcggaatcgggtgagatgagtgcgaacccagatccgacagagggtcgtgaaaacgagctgcctcctactatgaagaccgtttctccgtatgcgtgtcaacgccgcaccaccctgaacaaccataatcaacgttttacggacgcactggaaattcttgcggaaaattacgagttcaaacgcaacgatgatactgcgctggaatttcgtcgtgctatctccgtgctgaaaagccttccgtttgaggtacgtagcctgaaagacacggaaggattgccctggatcggtgatgaagtcaaagggattatggaagaaatcatcgaggtcgggaattcgcgtgaagtgcaggccgtgctcaatgatgagtggtatcaaagcttccaccgctttaagagtgtctttggagtgggggtgaagacagcagacaagtggtaccgtatgggtctgcgcaccctcgaggatgttcgttccagcaagaccctgaagttgaccccgatgcagaaagcgggtctgtgctattatgaagatcttgctcgcggcgttacgaaagccgaagctgacgcgatttctctgctggttcaggatgcagtcgcaactttcgacccggatgcgctggtggagattgtcggtggatttcgtcgtgggaaacctcagggtcacgacgttgatctgcttatcagttctccgggagctgagaaagagcaagaagaccagctcctgcagaaagtgaccaatctgtggaagaaacaagggttgttgctgtacggtcgtctggaatggacccagtgggaagatgggaaactcccatccggtaaggctgacgtaggtgacgcgggtgcgaaatgctttctgatcctcaaactttatgatcataaagtggacaaaagcaaatgggaaatgccgacgggttcgaacatgggcgaggccaaaccgtggaaagcaattcgcgtagatctgctgcgttgcccctacggcggttttgcgtttgcgatgttgcagtggaccggaagccgcatgttccgccgtgatctgcgctggtacgccactgacgagaagaacatgatgctggacaatcatgcgctgtatgacctgaccaagaaaatctttctcagtgctaaatcggaagaggaaattttcgcacatctggggcttgaatacctggaaccgttcgaacgtaacgca

SEQ ID NO: 2772 - protein, 529 aa, synthetic construct
  REGION 1..529: note = Variant of terminal deoxynucleotidyltransferase
MHHHHHHGGSGSHGIRTIDSDFGKKQQKKMDNHDSSAIYEIKFHEFVLFILEEKMGATRRTFLTDLARKKGFRVENELSDSVTHIVAENLSRSEVLAWLKEHKMEKTKQFELLDISWLIESMKVGKPVDTKGKYQLAESGEMSANPDPTEGRENELPPTMKTVSPYACQRRTTLNNHNQRFTDALEILAENYEFKRNDDTALEFRRAISVLKSLPFEVRSLKDTEGLPWIGDEVKGIMEEIIEVGNSREVQAVLNDEWYQSFHRFKSVFGVGVKTADKWYRMGLRTLEDVRSSKTLKLTPMQKAGLCYYEDLARGVTKAEADAISLLVQDAVATFDPDALVEIVGGFRRGKPQGHDVDLLISSPGAEKEQEDQLLQKVTNLWKKQGLLLYGRLEWTQWEDGKLPSGKADVGDAGAKCFLILKLYDHKVDKSKWEMPTGSNMGEAKPWKAIRVDLLRCPYGGFAFAMLQWTGSRMFRRDLRWYATDEKNMMLDNHALYDLTKKIFLSAKSEEEIFAHLGLEYLEPFERNA

SEQ ID NO: 2773 - DNA, 1587 bp, synthetic construct
  misc_feature 1..1587: note = Variant of terminal deoxynucleotidyltransferase
  source 1..1587: mol_type = other DNA
atgcaccatcatcatcatcatggcggtagcggcagccacggcattcgtaccatcgattcggacttcgggaagaaacagcagaaaaaaatggataaccacgatagttccgccatctatgaaatcaaatttcacgagtttgtgctgttcattctcgaagaaaaaatgggtgcgacgcgtcgtacttttctgacagatttagcccgcaagaaagggttccgcgtcgagaatgaactgtcagacagcgttacccacatcgtggcagaaaatctgtcacgctctgaagtattggcttggctgaaagaacacaagatggagaagaccaagcaattcgaactgctggatattagctggcttatcgaaagcatgaaagttggtaaaccggtggacaccaaggggaaataccagttggcggaatcgggtgagatgagtgcgaacccagatccgacagagggtcgtgaaaacgagctgcctcctactatgaagaccgtttctccgtatgcgtgtcaacgccgcaccaccctgaacaaccataatcaacgttttacggacgcactggaaattcttgtggaaaattacgagttcaaacgcaacgatgatactgcgctggaatttcgtcgtgctatctccgtgctgaaaagccttccgtttgaggtacgtagcctgaaagacacggaaggattgccctggatcggtgatgaagtcaaagggattatggaagaaatcatcgaggtcgggaattcgcgtgaagtgcaggccgtgctcaatgatgagtggtatcaaagcttccaccgctttaagagtgtctttggagtgggggtgaagacagcagacaagtggtaccgtatgggtctgcgcaccctcgaggatgttcgttccagcaagaccctgaagttgaccccgatgcagaaagcgggtctgtgctattatgaagatcttgctcgcggcgttacgaaagccgaagctgatgcgatttctctgctggttcaggatgcagtcgcaactttcgacccggatgcgctggtggagattgtcggtggatttcgtcgtgggaaacctcagggtcacgacgttgatctgcttatcagttctccgggagctgagaaagagcaagaagaccagctcctgcagaaagtgaccaatctgtggaagaaacaagggttgttgctgtacggtcgtctggaatggacccagtgggaagatgggaaactcccatccggtaaggctgacgtaggtgacgcgggtgcgaaatgctttctgatcctcaaactttatgatcataaagtggacaaaagcaaatgggaaatgccgacgggttcgaacatgggcgaggccaaaccgtggaaagcaattcgcgtagatctgctgcgttgcccctacggcggttttgcgtttgcgatgttgcagtggaccggaagccgcatgttccgccgtgatctgcgctggtacgccactgacgagaagaacatgatgctggacaatcatgcgctgtatgacctgaccaagaaaatctttctcaaagctaaatcggaagaggaaattttcgcacatctggggcttgaatacctggaaccgttcgaacgtaacgca

SEQ ID NO: 2774 - protein, 529 aa, synthetic construct
  REGION 1..529: note = Variant of terminal deoxynucleotidyltransferase
MHHHHHHGGSGSHGIRTIDSDFGKKQQKKMDNHDSSAIYEIKFHEFVLFILEEKMGATRRTFLTDLARKKGFRVENELSDSVTHIVAENLSRSEVLAWLKEHKMEKTKQFELLDISWLIESMKVGKPVDTKGKYQLAESGEMSANPDPTEGRENELPPTMKTVSPYACQRRTTLNNHNQRFTDALEILVENYEFKRNDDTALEFRRAISVLKSLPFEVRSLKDTEGLPWIGDEVKGIMEEIIEVGNSREVQAVLNDEWYQSFHRFKSVFGVGVKTADKWYRMGLRTLEDVRSSKTLKLTPMQKAGLCYYEDLARGVTKAEADAISLLVQDAVATFDPDALVEIVGGFRRGKPQGHDVDLLISSPGAEKEQEDQLLQKVTNLWKKQGLLLYGRLEWTQWEDGKLPSGKADVGDAGAKCFLILKLYDHKVDKSKWEMPTGSNMGEAKPWKAIRVDLLRCPYGGFAFAMLQWTGSRMFRRDLRWYATDEKNMMLDNHALYDLTKKIFLKAKSEEEIFAHLGLEYLEPFERNA

SEQ ID NO: 2775 - DNA, 1587 bp, synthetic construct
  misc_feature 1..1587: note = Variant of terminal deoxynucleotidyltransferase
  source 1..1587: mol_type = other DNA
atgcaccatcatcatcatcatggcggtagcggcagccacggcattcgtaccatcgattcggacttcgggaagaaacagcagaaaaaaatggataaccacgatagttccgccatctatgaaatcaaatttcacgagtttgtgctgttcattctcgaagaaaaaatgggtgcgacgcgtcgtacttttctgacagatttagcccgcaagaaagggttccgcgtcgagaatgaactgtcagacagcgttacccacatcgtggcagaaaatctgtcacgctctgaagtattggcttggctgaaagaacacaagatggagaagaccaagcaattcgaactgctggatattagctggcttatcgaaagcatgaaagttggtaaaccggtggacaccaaggggaaataccagttggcggaatcgggtgagatgagtgcgaacccagatccgacagagggtcgtgaaaacgagctgcctcctactatgaagaccgtttctccgtatgcgtgtcaacgccgcaccaccctgaacaaccataatcaacgttttacggacgcactggaaattcttgcggaaaattacgagttcaaacgcaacgatgatactgcgctggaatttcgtcgtgctatctccgtgctgaaaagccttccgtttgaggtacgtagcctgaaagacacggaaggattgccctggatcggtgatgaagtcaaagggattatggaagaaatcatcgaggtcgggaattcgcgtgaagtgcaggccgtgctcaatgatgagtggtatcaaagcttccaccgctttaagagtgtctttggagtgggggtgaagacagcagacaagtggtaccgtatgggtctgcgcaccctcgaggatgttcgttccagcaagaccctgaagttgaccccgatgcagaaagcgggtctgtgctattatgaagatcttgctcgcggcgttacgaaagccgaagctgacgcgatttctctgctggttcaggatgcagtcgcaactttcgacccggatgcgctggtggagattgtcggtggatttcgtcgtgggaaacctcagggtcacgacgttgatctgcttatcagttctccgggagctgagaaagagcaagaagaccagctcctgcagaaagtgaccaatctgtggaagaaacaagggttgttgctgtacggtcgtctggaatggacccagtgggaagatgggaaactcgagtccggtaaggctgacgtaggtgacgcgggtgcgaaatgctttctgatcctcaaactttatgatcataaagtggacaaaagcaaatgggaaatgccgacgggttcgaacatgggcgaggccaaaccgtggaaagcaattcgcgtagatctgctgcgttgcccctacggcggttttgcgtttgcgatgttgcagtggaccggaagccgcatgttccgccgtgatctgcgctggtacgccactgacgagaagaacatgatgctggacaatcatgcgctgtatgacctgaccaagaaaatctttctcaaagctaaatcggaagaggaaattttcgcacatctggggcttgaatacctggaaccgttcgaacgtaacgca

SEQ ID NO: 2776 - protein, 529 aa, synthetic construct
  REGION 1..529: note = Variant of terminal deoxynucleotidyltransferase
MHHHHHHGGSGSHGIRTIDSDFGKKQQKKMDNHDSSAIYEIKFHEFVLFILEEKMGATRRTFLTDLARKKGFRVENELSDSVTHIVAENLSRSEVLAWLKEHKMEKTKQFELLDISWLIESMKVGKPVDTKGKYQLAESGEMSANPDPTEGRENELPPTMKTVSPYACQRRTTLNNHNQRFTDALEILAENYEFKRNDDTALEFRRAISVLKSLPFEVRSLKDTEGLPWIGDEVKGIMEEIIEVGNSREVQAVLNDEWYQSFHRFKSVFGVGVKTADKWYRMGLRTLEDVRSSKTLKLTPMQKAGLCYYEDLARGVTKAEADAISLLVQDAVATFDPDALVEIVGGFRRGKPQGHDVDLLISSPGAEKEQEDQLLQKVTNLWKKQGLLLYGRLEWTQWEDGKLESGKADVGDAGAKCFLILKLYDHKVDKSKWEMPTGSNMGEAKPWKAIRVDLLRCPYGGFAFAMLQWTGSRMFRRDLRWYATDEKNMMLDNHALYDLTKKIFLKAKSEEEIFAHLGLEYLEPFERNA

SEQ ID NO: 2777 - DNA, 1587 bp, synthetic construct
  misc_feature 1..1587: note = Variant of terminal deoxynucleotidyltransferase
  source 1..1587: mol_type = other DNA
atgcaccatcatcatcatcatggcggtagcggcagccacggcattcgtaccatcgattcggacttcgggaagaaacagcagaaaaaaatggataaccacgatagttccgccatctatgaaatcaaatttcacgagtttgtgctgttcattctcgaagaaaaaatgggtgcgacgcgtcgtacttttctgacagatttagcccgcaagaaagggttccgcgtcgagaatgaactgtcagacagcgttacccacatcgtggcagaaaatctgtcacgctctgaagtattggcttggctgaaagaacacaagatggagaagaccaagcaattcgaactgctggatattagctggcttatcgaaagcatgaaagttggtaaaccggtggacaccaaggggaaataccagttggcggaatcgggtgagatgagtgcgaacccagatccgacagagggtcgtgaaaacgagctgcctcctactatgaagaccgtttctccgtatgcgtgtcaacgccgcaccaccctgaacaaccataatcaacgttttacggacgcactggaaattcttgcggaaaattacgagttcaaacgcaacgatgatactgcgctggaatttcgtcgtgctatctccgtgctgaaaagccttccgtttgaggtacgtagcctgaaagacacggaaggattgccctggatcggtgatgaagtcaaagggattatggaagaaatcatcgaggtcgggaattcgcgtgaagtgcaggccgtgctcaatgatgagtggtatcaaagcttccaccgctttaagagtgtctttggagtgggggtgaagacagcagacaagtggtaccgtatgggtctgcgcaccctcgaggatgttcgttccagcaagaccctgaagttgaccccgatgcagaaagcgggtctgtgctattatgaagatcttgctcgcggcgttacgaaagccgaagctgacgcgatttctctgctggttcaggatgcagtcgcaactttcgacccggatgcgctggtggagattgtcggtggatttcgtcgtgggaaacctcagggtcacgacgttgatctgcttatcagttctccgggagctgagaaagagcaagaagaccagctcctgcagaaagtgaccaatctgtggaagaaacaagggttgttgctgtacggtcgtctggaatggacccagtgggaagatgggaaactcccatccggtaaggctgacgtaggtgacgcgggtgcgaaatgctttctgatcctcaaactttatgatcataaagtggacaaaagcaaatgggaaatgccgacgggttcgaacatgggcgaggccaaaccgtggaaagcaattcgcgtagatctgctgcgttgcccctacggcggttttgcgtttgcgatgttgcagtggaccggaagccgcatgttccgccgtgatctgcgctggtacgccatggacgagaagaacatgatgctggacaatcatgcgctgtatgacctgaccaagaaaatctttctcaaagctaaatcggaagaggaaattttcgcacatctggggcttgaatacctggaaccgttcgaacgtaacgca

SEQ ID NO: 2778 - protein, 529 aa, synthetic construct
  REGION 1..529: note = Variant of terminal deoxynucleotidyltransferase
MHHHHHHGGSGSHGIRTIDSDFGKKQQKKMDNHDSSAIYEIKFHEFVLFILEEKMGATRRTFLTDLARKKGFRVENELSDSVTHIVAENLSRSEVLAWLKEHKMEKTKQFELLDISWLIESMKVGKPVDTKGKYQLAESGEMSANPDPTEGRENELPPTMKTVSPYACQRRTTLNNHNQRFTDALEILAENYEFKRNDDTALEFRRAISVLKSLPFEVRSLKDTEGLPWIGDEVKGIMEEIIEVGNSREVQAVLNDEWYQSFHRFKSVFGVGVKTADKWYRMGLRTLEDVRSSKTLKLTPMQKAGLCYYEDLARGVTKAEADAISLLVQDAVATFDPDALVEIVGGFRRGKPQGHDVDLLISSPGAEKEQEDQLLQKVTNLWKKQGLLLYGRLEWTQWEDGKLPSGKADVGDAGAKCFLILKLYDHKVDKSKWEMPTGSNMGEAKPWKAIRVDLLRCPYGGFAFAMLQWTGSRMFRRDLRWYAMDEKNMMLDNHALYDLTKKIFLKAKSEEEIFAHLGLEYLEPFERNA

SEQ ID NO: 2779 - DNA, 1587 bp, synthetic construct
  misc_feature 1..1587: note = Variant of terminal deoxynucleotidyltransferase
  source 1..1587: mol_type = other DNA
atgcaccatcatcatcatcatggcggtagcggcagccacggcattcgtaccatcgattcggacttcgggaagaaacagcagaaaaaaatggataaccacgatagttccgccatctatgaaatcaaatttcacgagtttgtgctgttcattctcgaagaaaaaatgggtgcgacgcgtcgtacttttctgacagatttagcccgcaagaaagggttccgcgtcgagaatgaactgtcagacagcgttacccacatcgtggcagaaaatctgtcacgctctgaagtattggcttggctgaaagaacacaagatggagaagaccaagcaattcgaactgctggatattagctggcttatcgaaagcatgaaagttggtaaaccggtggacaccaaggggaaataccagttggcggaatcgggtgagatgagtgcgaacccagatccgacagagggtcgtgaaaacgagctgcctcctactatgaagaccgtttctccgtatgcgtgtcaacgccgcaccaccctgaacaaccataatcaacgttttacggacgcactggaaattcttgcggaaaattacgagttcaaacgcaacgatgatactgcgctggaatttcgtcgtgctatctccgtgctgaaaagccttccgtttgaggtacgtagcctgaaagacacggaaggattgccctggatcggtgatgaagtcaaagggattatggaagaaatcatcgaggtcgggaattcgcgtgaagtgcaggccgtgctcaatgatgagtggtatcaaagcttccaccgctttaagagtgtctttggagtgggggtgaagacagcagacaagtggtaccgtatgggtctgcgcaccctcgaggatgttcgttccagcaagaccctgaagttgaccccgatgcagaaagcgggtctgtgctattatgaagatcttgctcgcggcgttacgaaagccgaagctgacgcgatttctctgctggttcaggatgcagtcgcaactttcgacccggatgcgctggtggagattgtcggtggatttcgtcgtgggaaacctcagggtcacgacgttgatctgcttatcagttctccgggagctgagaaagagcaagaagaccagctcctgcagaaagtgaccaatctgtggaagaaacaagggttgttgctgtacggtcgtctggaatggacccagtgggaagatgggaaactcccatccaataaggctgacgtaggtgacgcgggtgcgaaatgctttctgatcctcaaactttatgatcataaagtggacaaaagcaaatgggaaatgccgacgggttcgaacatgggcgaggccaaaccgtggaaagcaattcgcgtagatctgctgcgttgcccctacggcggttttgcgtttgcgatgttgcagtggaccggaagccgcatgttccgccgtgatctgcgctggtacgccactgacgagaagaacatgatgctggacaatcatgcgctgtatgacctgaccaagaaaatctttctcaaagctaaatcggaagaggaaattttcgcacatctggggcttgaatacctggaaccgttcgaacgtaacgca

SEQ ID NO: 2780 - protein, 529 aa, synthetic construct
  REGION 1..529: note = Variant of terminal deoxynucleotidyltransferase
MHHHHHHGGSGSHGIRTIDSDFGKKQQKKMDNHDSSAIYEIKFHEFVLFILEEKMGATRRTFLTDLARKKGFRVENELSDSVTHIVAENLSRSEVLAWLKEHKMEKTKQFELLDISWLIESMKVGKPVDTKGKYQLAESGEMSANPDPTEGRENELPPTMKTVSPYACQRRTTLNNHNQRFTDALEILAENYEFKRNDDTALEFRRAISVLKSLPFEVRSLKDTEGLPWIGDEVKGIMEEIIEVGNSREVQAVLNDEWYQSFHRFKSVFGVGVKTADKWYRMGLRTLEDVRSSKTLKLTPMQKAGLCYYEDLARGVTKAEADAISLLVQDAVATFDPDALVEIVGGFRRGKPQGHDVDLLISSPGAEKEQEDQLLQKVTNLWKKQGLLLYGRLEWTQWEDGKLPSNKADVGDAGAKCFLILKLYDHKVDKSKWEMPTGSNMGEAKPWKAIRVDLLRCPYGGFAFAMLQWTGSRMFRRDLRWYATDEKNMMLDNHALYDLTKKIFLKAKSEEEIFAHLGLEYLEPFERNA

SEQ ID NO: 2781 - DNA, 1587 bp, synthetic construct
  misc_feature 1..1587: note = Variant of terminal deoxynucleotidyltransferase
  source 1..1587: mol_type = other DNA
atgcaccatcatcatcatcatggcggtagcggcagccacggcattcgtaccatcgattcggacttcgggaagaaacagcagaaaaaaatggataaccacgatagttccgccatctatgaaatcaaatttcacgagtttgtgctgttcattctcgaagaaaaaatgggtgcgacgcgtcgtacttttctgacagatttagcccgcaagaaagggttccgcgtcgagaatgaactgtcagacagcgttacccacatcgtggcagaaaatctgtcacgctctgaagtattggcttggctgaaagaacacaagatggagaagaccaagcaattcgaactgctggatattagctggcttatcgaaagcatgaaagttggtaaaccggtggacaccaaggggaaataccagttggcggaatcgggtgagatgagtgcgaacccagatccgacagagggtcgtgaaaacgagctgcctcctactatgaagaccgtttctccgtatgcgtgtcaacgccgcaccaccctgaacaaccataatcaacgttttacggacgcactggaaattcttgcggaaaattacgagttcaaacgcaacgatgatactgcgctggaatttcgtcgtgctatctccgtgctgaaaagccttccgtttgaggtacgtagcctgaaagacacggaaggattgccctggatcggtgatgaagtcaaagggattatggaagaaatcatcgaggtcgggaattcgcgtgaagtgcaggccgtgctcaatgatgagtggtatcaaagcttccaccgctttaagagtgtctttggagtgggggtgaagacagcagacaagtggtaccgtatgggtctgcgcaccctcgaggatgttcgttccagcaagaccctgaagttgaccccgatgcagaaagcgggtctgtgctattatgaagatcttgctcgcggcgttacgaaagccgaagctgacgcgatttctctgctggttcaggatgcagtcgcaactttcgacccggatgcgctggtggagattgtcggtggatttcgtcgtgggaaacctcagggtcacgacgttgatctgcttatcagttctccgggagctgagaaagagcaagaagaccagctcctgcagaaagtgaccaatctgtggaagaaacaagggttgttgctgtacggtcgtctggaatggacccagtgggaagatgggaaactcccatccggtaaggctgacgtaggtgacgcgggtgcgaaatgctttctgatcctcaaactttatgatcataaagtggacaaaagcaaatgggaaatgccgacgggttcgaacatgggcgaggccaaaccgtggaaagcaattcgcgtagatctgctgcgttgcccctacggcggttttgcgtttgcgatgttgcagtggaccggaagccgcatgttccgccgtgatctgcgctggtacgccactgacgagaagaacatgatgctggacaatcatgcgctgtatgacctgaccaagaaaatctttctcaaagctacttcggaagaggaaattttcgcacatctggggcttgaatacctggaaccgttcgaacgtaacgca

SEQ ID NO: 2782 - protein, 529 aa, synthetic construct
  REGION 1..529: note = Variant of terminal deoxynucleotidyltransferase
MHHHHHHGGSGSHGIRTIDSDFGKKQQKKMDNHDSSAIYEIKFHEFVLFILEEKMGATRRTFLTDLARKKGFRVENELSDSVTHIVAENLSRSEVLAWLKEHKMEKTKQFELLDISWLIESMKVGKPVDTKGKYQLAESGEMSANPDPTEGRENELPPTMKTVSPYACQRRTTLNNHNQRFTDALEILAENYEFKRNDDTALEFRRAISVLKSLPFEVRSLKDTEGLPWIGDEVKGIMEEIIEVGNSREVQAVLNDEWYQSFHRFKSVFGVGVKTADKWYRMGLRTLEDVRSSKTLKLTPMQKAGLCYYEDLARGVTKAEADAISLLVQDAVATFDPDALVEIVGGFRRGKPQGHDVDLLISSPGAEKEQEDQLLQKVTNLWKKQGLLLYGRLEWTQWEDGKLPSGKADVGDAGAKCFLILKLYDHKVDKSKWEMPTGSNMGEAKPWKAIRVDLLRCPYGGFAFAMLQWTGSRMFRRDLRWYATDEKNMMLDNHALYDLTKKIFLKATSEEEIFAHLGLEYLEPFERNA

SEQ ID NO: 2783 - DNA, 1587 bp, synthetic construct
  misc_feature 1..1587: note = Variant of terminal deoxynucleotidyltransferase
  source 1..1587: mol_type = other DNA
atgcaccatcatcatcatcatggcggtagcggcagccacggcattcgtaccatcgattcggacttcgggaagaaacagcagaaaaaaatggataaccacgatagttccgccatctatgaaatcaaatttcacgagtttgtgctgttcattctcgaagaaaaaatgggtgcgacgcgtcgtacttttctgacagatttagcccgcaagaaagggttccgcgtcgagaatgaactgtcagacagcgttacccacatcgtggcagaaaatctgtcacgctctgaagtattggcttggctgaaagaacacaagatggagaagaccaagcaattcgaactgctggatattagctggcttatcgaaagcatgaaagttggtaaaccggtggacaccaaggggaaataccagttggcggaatcgggtgagatgagtgcgaacccagatccgacagagggtcgtgaaaacgagctgcctcctactatgaagaccgtttctccgtatgcgtgtcaacgccgcaccaccctgaacaaccataatcaacgttttacggacgcactggaaattcttgcggaaaattacgagttcaaacgcaacgatgatactgcgctggattttcgtcgtgctatctccgtgctgaaaagccttccgtttgaggtacgtagcctgaaagacacggaaggattgccctggatcggtgatgaagtcaaagggattatggaagaaatcatcgaggtcgggaattcgcgtgaagtgcaggccgtgctcaatgatgagtggtatcaaagcttccaccgctttaagagtgtctttggagtgggggtgaagacagcagacaagtggtaccgtatgggtctgcgcaccctcgaggatgttcgttccagcaagaccctgaagttgaccccgatgcagaaagcgggtctgtgctattatgaagatcttgctcgcggcgttacgaaagccgaagctgacgcgatttctctgctggttcaggatgcagtcgcaactttcgacccggatgcgctggtggagattgtcggtggatttcgtcgtgggaaacctcagggtcacgacgttgatctgcttatcagttctccgggagctgagaaagagcaagaagaccagctcctgcagaaagtgaccaatctgtggaagaaacaagggttgttgctgtacggtcgtctggaatggacccagtgggaagatgggaaactcccatccggtaaggctgacgtaggtgacgcgggtgcgaaatgctttctgatcctcaaactttatgatcataaagtggacaaaagcaaatgggaaatgccgacgggttcgaacatgggcgaggccaaaccgtggaaagcaattcgcgtagatctgctgcgttgcccctacggcggttttgcgtttgcgatgttgcagtggaccggaagccgcatgttccgccgtgatctgcgctggtacgccactgacgagaagaacatgatgctggacaatcatgcgctgtatgacctgaccaagaaaatctttctcaaagctaaatcggaagaggaaattttcgcacatctggggcttgaatacctggaaccgttcgaacgtaacgca

SEQ ID NO: 2784 - protein, 529 aa, synthetic construct
  REGION 1..529: note = Variant of terminal deoxynucleotidyltransferase
MHHHHHHGGSGSHGIRTIDSDFGKKQQKKMDNHDSSAIYEIKFHEFVLFILEEKMGATRRTFLTDLARKKGFRVENELSDSVTHIVAENLSRSEVLAWLKEHKMEKTKQFELLDISWLIESMKVGKPVDTKGKYQLAESGEMSANPDPTEGRENELPPTMKTVSPYACQRRTTLNNHNQRFTDALEILAENYEFKRNDDTALDFRRAISVLKSLPFEVRSLKDTEGLPWIGDEVKGIMEEIIEVGNSREVQAVLNDEWYQSFHRFKSVFGVGVKTADKWYRMGLRTLEDVRSSKTLKLTPMQKAGLCYYEDLARGVTKAEADAISLLVQDAVATFDPDALVEIVGGFRRGKPQGHDVDLLISSPGAEKEQEDQLLQKVTNLWKKQGLLLYGRLEWTQWEDGKLPSGKADVGDAGAKCFLILKLYDHKVDKSKWEMPTGSNMGEAKPWKAIRVDLLRCPYGGFAFAMLQWTGSRMFRRDLRWYATDEKNMMLDNHALYDLTKKIFLKAKSEEEIFAHLGLEYLEPFERNA

SEQ ID NO: 2785 - DNA, 1587 bp, synthetic construct
  misc_feature 1..1587: note = Variant of terminal deoxynucleotidyltransferase
  source 1..1587: mol_type = other DNA
atgcaccatcatcatcatcatggcggtagcggcagccacggcattcgtaccatcgattcggacttcgggaagaaacagcagaaaaaaatggataaccacgatagttccgccatctatgaaatcaaatttcacgagtttgtgctgttcattctcgaagaaaaaatgggtgcgacgcgtcgtacttttctgacagatttagcccgcaagaaagggttccgcgtcgagaatgaactgtcagacagcgttacccacatcgtggcagaaaatctgtcacgctctgaagtattggcttggctgaaagaacacaagatggagaagaccaagcaattcgaactgctggatattagctggcttatcgaaagcatgaaagttggtaaaccggtggacaccaaggggaaataccagttggcggaatcgggtgagatgagtgcgaacccagatccgacagagggtcgtgaaaacgagctgcctcctactatgaagaccgtttctccgtatgcgtgtcaacgccgcaccaccctgaacaaccataatcaacgttttacggacgcactggaaattcttgcggaaaattacgagttcaaacgcaacgatgatactgcgctggaatttcgtcgtgctatctccgtgctgaaaagccttccgtttgaggtacgtagcctgaaagacacggaaggattgccctggatcggtgatgaagtcaaagggattatggaagaaatcatcgaggtcgggaattcgcgtgaagtgcaggccgtgctcaatgatgagtggtatcaaagcttccaccgctttaagagtgtctttggagtgggggtgaagacagcagacaagtggtaccgtatgggtctgcgcaccctcgaggatgttcgttccagcaagaccctgaagttgaccccgatgcagaaagcgggtctgtgctattatgaagatcttgctcgcggcgttacgaaagccgaagctgacgcgatttctctgctggttcaggatgcagtcgcaactttcgacccggatgcgctggtggagattgtcggtggatttcgtcgtgggaaacctcagggtcacgacgttgatctgcttatcagttctccgggagctgagaaagagcaagaagaccagctcctgcagaaagtgaccaatctgtggaagaaacaagggttgttgctgtacggtcgtctggaatggacccagtgggaagatgggaaactcccatccggtaaggctgacgtaggtgacgcgggtgcgaaatgctttctgatcctcaaactttatgatcataatgtggacaaaagcaaatgggaaatgccgacgggttcgaacatgggcgaggccaaaccgtggaaagcaattcgcgtagatctgctgcgttgcccctacggcggttttgcgtttgcgatgttgcagtggaccggaagccgcatgttccgccgtgatctgcgctggtacgccactgacgagaagaacatgatgctggacaatcatgcgctgtatgacctgaccaagaaaatctttctcaaagctaaatcggaagaggaaattttcgcacatctggggcttgaatacctggaaccgttcgaacgtaacgca

SEQ ID NO: 2786 - protein, 529 aa, synthetic construct
  REGION 1..529: note = Variant of terminal deoxynucleotidyltransferase
MHHHHHHGGSGSHGIRTIDSDFGKKQQKKMDNHDSSAIYEIKFHEFVLFILEEKMGATRRTFLTDLARKKGFRVENELSDSVTHIVAENLSRSEVLAWLKEHKMEKTKQFELLDISWLIESMKVGKPVDTKGKYQLAESGEMSANPDPTEGRENELPPTMKTVSPYACQRRTTLNNHNQRFTDALEILAENYEFKRNDDTALEFRRAISVLKSLPFEVRSLKDTEGLPWIGDEVKGIMEEIIEVGNSREVQAVLNDEWYQSFHRFKSVFGVGVKTADKWYRMGLRTLEDVRSSKTLKLTPMQKAGLCYYEDLARGVTKAEADAISLLVQDAVATFDPDALVEIVGGFRRGKPQGHDVDLLISSPGAEKEQEDQLLQKVTNLWKKQGLLLYGRLEWTQWEDGKLPSGKADVGDAGAKCFLILKLYDHNVDKSKWEMPTGSNMGEAKPWKAIRVDLLRCPYGGFAFAMLQWTGSRMFRRDLRWYATDEKNMMLDNHALYDLTKKIFLKAKSEEEIFAHLGLEYLEPFERNA

SEQ ID NO: 2787 - DNA, 1587 bp, synthetic construct
  misc_feature 1..1587: note = Variant of terminal deoxynucleotidyltransferase
  source 1..1587: mol_type = other DNA
atgcaccatcatcatcatcatggcggtagcggcagccacggcattcgtaccatcgattcggacttcgggaagaaacagcagaaaaaaatggataaccacgatagttccgccatctatgaaatcaaatttcacgagtttgtgctgttcattctcgaagaaaaaatgggtgcgacgcgtcgtacttttctgacagatttagcccgcaagaaagggttccgcgtcgagaatgaactgtcagacagcgttacccacatcgtggcagaaaatctgtcacgctctgaagtattggcttggctgaaagaacacaagatggagaagaccaagcaattcgaactgctggatattagctggcttatcgaaagcatgaaagttggtaaaccggtggacaccaaggggaaataccagttggcggaatcgggtgagatgagtgcgaacccagatccgacagagggtcgtgaaaacgagctgcctcctactatgaagaccgtttctccgtatgcgtgtcaacgccgcaccaccctgctgaaccataatcaacgttttacggacgcactggaaattcttgcggaaaattacgagttcaaacgcaacgatgatactgcgctggaatttcgtcgtgctatctccgtgctgaaaagccttccgtttgaggtacgtagcctgaaagacacggaaggattgccctggatcggtgatgaagtcaaagggattatggaagaaatcatcgaggtcgggaattcgcgtgaagtgcaggccgtgctcaatgatgagtggtatcaaagcttccaccgctttaagagtgtctttggagtgggggtgaagacagcagacaagtggtaccgtatgggtctgcgcaccctcgaggatgttcgttccagcaagaccctgaagttgaccccgatgcagaaagcgggtctgtgctattatgaagatcttgctcgcggcgttacgaaagccgaagctgacgcgatttctctgctggttcaggatgcagtcgcaactttcgacccggatgcgctggtggagattgtcggtggatttcgtcgtgggaaacctcagggtcacgacgttgatctgcttatcagttctccgggagctgagaaagagcaagaagaccagctcctgcagaaagtgaccaatctgtggaagaaacaagggttgttgctgtacggtcgtctggaatggacccagtgggaagatgggaaactcccatccggtaaggctgacgtaggtgacgcgggtgcgaaatgctttctgatcctcaaactttatgatcataaagtggacaaaagcaaatgggaaatgccgacgggttcgaacatgggcgaggccaaaccgtggaaagcaattcgcgtagatctgctgcgttgcccctacggcggttttgcgtttgcgatgttgcagtggaccggaagccgcatgttccgccgtgatctgcgctggtacgccactgacgagaagaacatgatgctggacaatcatgcgctgtatgacctgaccaagaaaatctttctcaaagctaaatcggaagaggaaattttcgcacatctggggcttgaatacctggaaccgttcgaacgtaacgca

SEQ ID NO: 2788 - protein, 529 aa, synthetic construct
  REGION 1..529: note = Variant of terminal deoxynucleotidyltransferase
MHHHHHHGGSGSHGIRTIDSDFGKKQQKKMDNHDSSAIYEIKFHEFVLFILEEKMGATRRTFLTDLARKKGFRVENELSDSVTHIVAENLSRSEVLAWLKEHKMEKTKQFELLDISWLIESMKVGKPVDTKGKYQLAESGEMSANPDPTEGRENELPPTMKTVSPYACQRRTTLLNHNQRFTDALEILAENYEFKRNDDTALEFRRAISVLKSLPFEVRSLKDTEGLPWIGDEVKGIMEEIIEVGNSREVQAVLNDEWYQSFHRFKSVFGVGVKTADKWYRMGLRTLEDVRSSKTLKLTPMQKAGLCYYEDLARGVTKAEADAISLLVQDAVATFDPDALVEIVGGFRRGKPQGHDVDLLISSPGAEKEQEDQLLQKVTNLWKKQGLLLYGRLEWTQWEDGKLPSGKADVGDAGAKCFLILKLYDHKVDKSKWEMPTGSNMGEAKPWKAIRVDLLRCPYGGFAFAMLQWTGSRMFRRDLRWYATDEKNMMLDNHALYDLTKKIFLKAKSEEEIFAHLGLEYLEPFERNA

SEQ ID NO: 2789 - DNA, 1587 bp, synthetic construct
  misc_feature 1..1587: note = Variant of terminal deoxynucleotidyltransferase
  source 1..1587: mol_type = other DNA
atgcaccatcatcatcatcatggcggtagcggcagccacggcattcgtaccatcgattcggacttcgggaagaaacagcagaaaaaaatggataaccacgatagttccgccatctatgaaatcaaatttcacgagtttgtgctgttcattctcgaagaaaaaatgggtgcgacgcgtcgtacttttctgacagatttagcccgcaagaaagggttccgcgtcgagaatgaactgtcagacagcgttacccacatcgtggcagaaaatctgtcacgctctgaagtattggcttggctgaaagaacacaagatggagaagaccaagcaattcgaactgctggatattagctggcttatcgaaagcatgaaagttggtaaaccggtggacaccaaggggaaataccagttggcggaatcgggtgagatgagtgcgaacccagatccgacagagggtcgtgaaaacgagctgcctcctactatgaagaccgtttctccgtatgcgtgtcaacgccgcaccaccctgaacaaccataatcaacgttttacggacgcactggaaattcttgcggaaaattacgagttcaaacgcaacgatgatactgcgctggaatttcgtcgtgctatctccgtgctgaaaagccttccgtttgaggtacgtagcctgaaagacacggaaggattgccctggatcggtgatgaagtcaaagggattatggaagaaatcatcgaggtcgggaattcgcgtgaagtgcaggccgtgctcaatgatgagtggtatcaaagcttccaccgctttaagagtgtctttggagtgggggtgaagacagcagacaagtggtaccgtatgggtctgcgcaccctcgaggatgttcgttccagcaagaccctgaagttgaccccgatgcagaaagcgggtctgtgctattatgaagatcttgctcgcggcgttacgaaagccgaagctgacgcgatttctctgctggttcaggatgcagtcgcaactttcgacccggatgcgctggtggagattgtcggtggatttcgtcgtgggaaacctcagggtcacgacgttgatctgcttatcagttctccgggagctgagaaagagcaagaagaccagctcctgcagaaagtgaccaatctgtggaagaaacaagggttgttgctgtacggtcgtctggaatggacccagtgggaagatgggaaactcccatccggtaaggctgacgtaggtgacgcgggtgcgaaatgctttctgatcctcaaactttatgatcataaagtggacaaaagcaaatgggaaatgccgacgggttcgaacatgggcgaggccaaaccgtggaaagcaattcgcgtagatctgctgcgttgcccctacggcggttttgcgtttgcgatgttgcagtggaccggaagccgcatgttccgccgtgatctgcgctggtacgcccatgacgagaagaacatgatgctggacaatcatgcgctgtatgacctgaccaagaaaatctttctcaaagctaaatcggaagaggaaattttcgcacatctggggcttgaatacctggaaccgttcgaacgtaacgca

SEQ ID NO: 2790 - protein, 529 aa, synthetic construct
  REGION 1..529: note = Variant of terminal deoxynucleotidyltransferase
MHHHHHHGGSGSHGIRTIDSDFGKKQQKKMDNHDSSAIYEIKFHEFVLFILEEKMGATRRTFLTDLARKKGFRVENELSDSVTHIVAENLSRSEVLAWLKEHKMEKTKQFELLDISWLIESMKVGKPVDTKGKYQLAESGEMSANPDPTEGRENELPPTMKTVSPYACQRRTTLNNHNQRFTDALEILAENYEFKRNDDTALEFRRAISVLKSLPFEVRSLKDTEGLPWIGDEVKGIMEEIIEVGNSREVQAVLNDEWYQSFHRFKSVFGVGVKTADKWYRMGLRTLEDVRSSKTLKLTPMQKAGLCYYEDLARGVTKAEADAISLLVQDAVATFDPDALVEIVGGFRRGKPQGHDVDLLISSPGAEKEQEDQLLQKVTNLWKKQGLLLYGRLEWTQWEDGKLPSGKADVGDAGAKCFLILKLYDHKVDKSKWEMPTGSNMGEAKPWKAIRVDLLRCPYGGFAFAMLQWTGSRMFRRDLRWYAHDEKNMMLDNHALYDLTKKIFLKAKSEEEIFAHLGLEYLEPFERNA

SEQ ID NO: 2791 - DNA, 1587 bp, synthetic construct
  misc_feature 1..1587: note = Variant of terminal deoxynucleotidyltransferase
  source 1..1587: mol_type = other DNA
atgcaccatcatcatcatcatggcggtagcggcagccacggcattcgtaccatcgattcggacttcgggaagaaacagcagaaaaaaatggataaccacgatagttccgccatctatgaaatcaaatttcacgagtttgtgctgttcattctcgaagaaaaaatgggtgcgacgcgtcgtacttttctgacagatttagcccgcaagaaagggttccgcgtcgagaatgaactgtcagacagcgttacccacatcgtggcagaaaatctgtcacgctctgaagtattggcttggctgaaagaacacaagatggagaagaccaagcaattcgaactgctggatattagctggcttatcgaaagcatgaaagttggtaaaccggtggacaccaaggggaaataccagttggcggaatcgggtgagatgagtgcgaacccagatccgacagagggtcgtgaaaacgagctgcctcctactatgaagaccgtttctccgtatgcgtgtcaacgccgcaccaccctgaacaaccataatcaacgttttacggacgcactggaaattcttgcggaaaattacgagttcaaacgcaacgatgatactgcgctggaatttcgtcgtgctatctccgtgctgaaaagccttccgtttgaggtacgtagcctgaaagacacggaaggattgccctggatcggtgatgaagtcaaagggattatggaagaaatcatcgaggtcgggaattcgcgtgaagtgcaggccgtgctcaatgatgagtggtatcaaagcttccaccgctttaagagtgtctttggagtgggggtgaagacagcagacaagtggtaccgtatgggtctgcgcaccctcgaggatgttcgttccagcaagaccctgaagttgaccccgatgcagaaagcgggtctgtgctattatgaagatcttgctcgcggcgttacgaaagccgaagctgacgcgatttctctgctggttcaggatgcagtcgcaactttcgacccggatgcgctggtggagattgtcggtggatttcgtcgtgggaaacctcagggtcacgacgttgatctgcttatcagttctccgggagctgagaaagagcaagaagaccagctcctgcagaaagtgaccaatctgtggaagaaacaagggttgttgctgtacggtcgtctggaatggacccagtgggaagatggggagctcccatccggtaaggctgacgtaggtgacgcgggtgcgaaatgctttctgatcctcaaactttatgatcataaagtggacaaaagcaaatgggaaatgccgacgggttcgaacatgggcgaggccaaaccgtggaaagcaattcgcgtagatctgctgcgttgcccctacggcggttttgcgtttgcgatgttgcagtggaccggaagccgcatgttccgccgtgatctgcgctggtacgccactgacgagaagaacatgatgctggacaatcatgcgctgtatgacctgaccaagaaaatctttctcaaagctaaatcggaagaggaaattttcgcacatctggggcttgaatacctggaaccgttcgaacgtaacgca

SEQ ID NO: 2792 - protein, 529 aa, synthetic construct
  REGION 1..529: note = Variant of terminal deoxynucleotidyltransferase
MHHHHHHGGSGSHGIRTIDSDFGKKQQKKMDNHDSSAIYEIKFHEFVLFILEEKMGATRRTFLTDLARKKGFRVENELSDSVTHIVAENLSRSEVLAWLKEHKMEKTKQFELLDISWLIESMKVGKPVDTKGKYQLAESGEMSANPDPTEGRENELPPTMKTVSPYACQRRTTLNNHNQRFTDALEILAENYEFKRNDDTALEFRRAISVLKSLPFEVRSLKDTEGLPWIGDEVKGIMEEIIEVGNSREVQAVLNDEWYQSFHRFKSVFGVGVKTADKWYRMGLRTLEDVRSSKTLKLTPMQKAGLCYYEDLARGVTKAEADAISLLVQDAVATFDPDALVEIVGGFRRGKPQGHDVDLLISSPGAEKEQEDQLLQKVTNLWKKQGLLLYGRLEWTQWEDGELPSGKADVGDAGAKCFLILKLYDHKVDKSKWEMPTGSNMGEAKPWKAIRVDLLRCPYGGFAFAMLQWTGSRMFRRDLRWYATDEKNMMLDNHALYDLTKKIFLKAKSEEEIFAHLGLEYLEPFERNA

SEQ ID NO: 2793 - DNA, 1587 bp, synthetic construct
  misc_feature 1..1587: note = Variant of terminal deoxynucleotidyltransferase
  source 1..1587: mol_type = other DNA
atgcaccatcatcatcatcatggcggtagcggcagccacggcattcgtaccatcgattcggacttcgggaagaaacagcagaaaaaaatggataaccacgatagttccgccatctatgaaatcaaatttcacgagtttgtgctgttcattctcgaagaaaaaatgggtgcgacgcgtcgtacttttctgacagatttagcccgcaagaaagggttccgcgtcgagaatgaactgtcagacagcgttacccacatcgtggcagaaaatctgtcacgctctgaagtattggcttggctgaaagaacacaagatggagaagaccaagcaattcgaactgctggatattagctggcttatcgaaagcatgaaagttggtaaaccggtggacaccaaggggaaataccagttggcggaatcgggtgagatgagtgcgaacccagatccgacagagggtcgtgaaaacgagctgcctcctactatgaagaccgtttctccgtatgcgtgtcaacgccgcaccaccctgaacaaccataatcaacgttttacggacgcactggaaattcttgcggaaaattacgagttcaaacgcaacgatgatactgcgctggaatttcgtcgtgctatctccgtgctgaaaagccttccgtttgaggtacgtagcctgaaagacacggaaggattgccctggatcggtgatgaagtcaaagggattatggaagaaatcatcgaggtcgggaattcgcgtgaagtgcaggccgtgctcaatgatgagtggtatcaaagcttccaccgctttaagagtgtctttggagtgggggtgaagacagcagacaagtggtaccgtatgggtctgcgcaccctcgaggatgttcgttccagcaagaccctgaagttgaccccgatgcagaaagcgggtctgtgctattatgaagatcttgctcgcggcgttacgaaagccgaagctgacgcgatttctctgctggttcaggatgcagtcgcaactttcgacccggatgcgctggtggagattgtcggtggatttcgtcgtgggaaacctcagggtcacgacgttgatctgcttatcagttctccgggagctgagaaagagcaagaagactgtctcctgcagaaagtgaccaatctgtggaagaaacaagggttgttgctgtacggtcgtctggaatggacccagtgggaagatgggaaactcccatccggtaaggctgacgtaggtgacgcgggtgcgaaatgctttctgatcctcaaactttatgatcataaagtggacaaaagcaaatgggaaatgccgacgggttcgaacatgggcgaggccaaaccgtggaaagcaattcgcgtagatctgctgcgttgcccctacggcggttttgcgtttgcgatgttgcagtggaccggaagccgcatgttccgccgtgatctgcgctggtacgccactgacgagaagaacatgatgctggacaatcatgcgctgtatgacctgaccaagaaaatctttctcaaagctaaatcggaagaggaaattttcgcacatctggggcttgaatacctggaaccgttcgaacgtaacgca

SEQ ID NO: 2794 - protein, 529 aa, synthetic construct
  REGION 1..529: note = Variant of terminal deoxynucleotidyltransferase
MHHHHHHGGSGSHGIRTIDSDFGKKQQKKMDNHDSSAIYEIKFHEFVLFILEEKMGATRRTFLTDLARKKGFRVENELSDSVTHIVAENLSRSEVLAWLKEHKMEKTKQFELLDISWLIESMKVGKPVDTKGKYQLAESGEMSANPDPTEGRENELPPTMKTVSPYACQRRTTLNNHNQRFTDALEILAENYEFKRNDDTALEFRRAISVLKSLPFEVRSLKDTEGLPWIGDEVKGIMEEIIEVGNSREVQAVLNDEWYQSFHRFKSVFGVGVKTADKWYRMGLRTLEDVRSSKTLKLTPMQKAGLCYYEDLARGVTKAEADAISLLVQDAVATFDPDALVEIVGGFRRGKPQGHDVDLLISSPGAEKEQEDCLLQKVTNLWKKQGLLLYGRLEWTQWEDGKLPSGKADVGDAGAKCFLILKLYDHKVDKSKWEMPTGSNMGEAKPWKAIRVDLLRCPYGGFAFAMLQWTGSRMFRRDLRWYATDEKNMMLDNHALYDLTKKIFLKAKSEEEIFAHLGLEYLEPFERNA

SEQ ID NO: 2795 - DNA, 1587 bp, synthetic construct
  misc_feature 1..1587: note = Variant of terminal deoxynucleotidyltransferase
  source 1..1587: mol_type = other DNA
atgcaccatcatcatcatcatggcggtagcggcagccacggcattcgtaccatcgattcggacttcgggaagaaacagcagaaaaaaatggataaccacgatagttccgccatctatgaaatcaaatttcacgagtttgtgctgttcattctcgaagaaaaaatgggtgcgacgcgtcgtacttttctgacagatttagcccgcaagaaagggttccgcgtcgagaatgaactgtcagacagcgttacccacatcgtggcagaaaatctgtcacgctctgaagtattggcttggctgaaagaacacaagatggagaagaccaagcaattcgaactgctggatattagctggcttatcgaaagcatgaaagttggtaaaccggtggacaccaaggggaaataccagttggcggaatcgggtgagatgagtgcgaacccagatccgacagagggtcgtgaaaacgagctgcctcctactatgaagaccgtttctccgtatgcgtgtcaacgccgcaccaccctgaacaaccataatcaacgttttacggacgcactggaaattcttgcggaaaattacgagttcaaacgcaacgatgatactgcgctggaatttcgtcgtgctatctccgtgctgaaaagccttccgtttgaggtacgtagcctgaaagacacggaaggattgccctggatcggtgatgaagtcaaagggattatggaagaaatcatcgaggtcgggaattcgcgtgaagtgcaggccgtgctcaatgatgagtggtatcaaagcttccaccgctttaagagtgtctttggagtgggggtgaagacagcagacaagtggtaccgtatgggtctgcgcaccctcgaggatgttcgttccagcaagaccctgaagttgaccccgatgcagaaagcgggtctgtgctattatgaagatcttgctcgcggcgttacgaaagccgaagctgacgcgatttctctgctggttcaggatgcagtcgcaactttcgacccggatgcgctggtggagattgtcggtggatttcgtcgtgggaaacctcagggtcacgacgttgatctgcttatcagttctccgggagctgagaaagagcaagaagaccagctcctgcagaaagtgaccaatctgtggaagaaacaagggttgttgctgtacggtcgtctggaatggacccagtgggaagatgggaaagggccatccggtaaggctgacgtaggtgacgcgggtgcgaaatgctttctgatcctcaaactttatgatcataaagtggacaaaagcaaatgggaaatgccgacgggttcgaacatgggcgaggccaaaccgtggaaagcaattcgcgtagatctgctgcgttgcccctacggcggttttgcgtttgcgatgttgcagtggaccggaagccgcatgttccgccgtgatctgcgctggtacgccactgacgagaagaacatgatgctggacaatcatgcgctgtatgacctgaccaagaaaatctttctcaaagctaaatcggaagaggaaattttcgcacatctggggcttgaatacctggaaccgttcgaacgtaacgca

SEQ ID NO: 2796 - protein, 529 aa, synthetic construct
  REGION 1..529: note = Variant of terminal deoxynucleotidyltransferase
MHHHHHHGGSGSHGIRTIDSDFGKKQQKKMDNHDSSAIYEIKFHEFVLFILEEKMGATRRTFLTDLARKKGFRVENELSDSVTHIVAENLSRSEVLAWLKEHKMEKTKQFELLDISWLIESMKVGKPVDTKGKYQLAESGEMSANPDPTEGRENELPPTMKTVSPYACQRRTTLNNHNQRFTDALEILAENYEFKRNDDTALEFRRAISVLKSLPFEVRSLKDTEGLPWIGDEVKGIMEEIIEVGNSREVQAVLNDEWYQSFHRFKSVFGVGVKTADKWYRMGLRTLEDVRSSKTLKLTPMQKAGLCYYEDLARGVTKAEADAISLLVQDAVATFDPDALVEIVGGFRRGKPQGHDVDLLISSPGAEKEQEDQLLQKVTNLWKKQGLLLYGRLEWTQWEDGKGPSGKADVGDAGAKCFLILKLYDHKVDKSKWEMPTGSNMGEAKPWKAIRVDLLRCPYGGFAFAMLQWTGSRMFRRDLRWYATDEKNMMLDNHALYDLTKKIFLKAKSEEEIFAHLGLEYLEPFERNA

SEQ ID NO: 2797 - DNA, 1587 bp, synthetic construct
  misc_feature 1..1587: note = Variant of terminal deoxynucleotidyltransferase
  source 1..1587: mol_type = other DNA
atgcaccatcatcatcatcatggcggtagcggcagccacggcattcgtaccatcgattcggacttcgggaagaaacagcagaaaaaaatggataaccacgatagttccgccatctatgaaatcaaatttcacgagtttgtgctgttcattctcgaagaaaaaatgggtgcgacgcgtcgtacttttctgacagatttagcccgcaagaaagggttccgcgtcgagaatgaactgtcagacagcgttacccacatcgtggcagaaaatctgtcacgctctgaagtattggcttggctgaaagaacacaagatggagaagaccaagcaattcgaactgctggatattagctggcttatcgaaagcatgaaagttggtaaaccggtggacaccaaggggaaataccagttggcggaatcgggtgagatgagtgcgaacccagatccgacagagggtcgtgaaaacgagctgcctcctactatgaagaccgtttctccgtatgcgtgtcaacgccgcaccaccctgaacaaccataatcaacgttttacggacgcactggaaattcttgcggaaaattacgagttcaaacgcaacgatgatactgcgctgatgtttcgtcgtgctatctccgtgctgaaaagccttccgtttgaggtacgtagcctgaaagacacggaaggattgccctggatcggtgatgaagtcaaagggattatggaagaaatcatcgaggtcgggaattcgcgtgaagtgcaggccgtgctcaatgatgagtggtatcaaagcttccaccgctttaagagtgtctttggagtgggggtgaagacagcagacaagtggtaccgtatgggtctgcgcaccctcgaggatgttcgttccagcaagaccctgaagttgaccccgatgcagaaagcgggtctgtgctattatgaagatcttgctcgcggcgttacgaaagccgaagctgacgcgatttctctgctggttcaggatgcagtcgcaactttcgacccggatgcgctggtggagattgtcggtggatttcgtcgtgggaaacctcagggtcacgacgttgatctgcttatcagttctccgggagctgagaaagagcaagaagaccagctcctgcagaaagtgaccaatctgtggaagaaacaagggttgttgctgtacggtcgtctggaatggacccagtgggaagatgggaaactcccatccggtaaggctgacgtaggtgacgcgggtgcgaaatgctttctgatcctcaaactttatgatcataaagtggacaaaagcaaatgggaaatgccgacgggttcgaacatgggcgaggccaaaccgtggaaagcaattcgcgtagatctgctgcgttgcccctacggcggttttgcgtttgcgatgttgcagtggaccggaagccgcatgttccgccgtgatctgcgctggtacgccactgacgagaagaacatgatgctggacaatcatgcgctgtatgacctgaccaagaaaatctttctcaaagctaaatcggaagaggaaattttcgcacatctggggcttgaatacctggaaccgttcgaacgtaacgca

SEQ ID NO: 2798 - protein, 529 aa, synthetic construct
  REGION 1..529: note = Variant of terminal deoxynucleotidyltransferase
MHHHHHHGGSGSHGIRTIDSDFGKKQQKKMDNHDSSAIYEIKFHEFVLFILEEKMGATRRTFLTDLARKKGFRVENELSDSVTHIVAENLSRSEVLAWLKEHKMEKTKQFELLDISWLIESMKVGKPVDTKGKYQLAESGEMSANPDPTEGRENELPPTMKTVSPYACQRRTTLNNHNQRFTDALEILAENYEFKRNDDTALMFRRAISVLKSLPFEVRSLKDTEGLPWIGDEVKGIMEEIIEVGNSREVQAVLNDEWYQSFHRFKSVFGVGVKTADKWYRMGLRTLEDVRSSKTLKLTPMQKAGLCYYEDLARGVTKAEADAISLLVQDAVATFDPDALVEIVGGFRRGKPQGHDVDLLISSPGAEKEQEDQLLQKVTNLWKKQGLLLYGRLEWTQWEDGKLPSGKADVGDAGAKCFLILKLYDHKVDKSKWEMPTGSNMGEAKPWKAIRVDLLRCPYGGFAFAMLQWTGSRMFRRDLRWYATDEKNMMLDNHALYDLTKKIFLKAKSEEEIFAHLGLEYLEPFERNA

SEQ ID NO: 2799 - DNA, 1587 bp, synthetic construct
  misc_feature 1..1587: note = Variant of terminal deoxynucleotidyltransferase
  source 1..1587: mol_type = other DNA
atgcaccatcatcatcatcatggcggtagcggcagccacggcattcgtaccatcgattcggacttcgggaagaaacagcagaaaaaaatggataaccacgatagttccgccatctatgaaatcaaatttcacgagtttgtgctgttcattctcgaagaaaaaatgggtgcgacgcgtcgtacttttctgacagatttagcccgcaagaaagggttccgcgtcgagaatgaactgtcagacagcgttacccacatcgtggcagaaaatctgtcacgctctgaagtattggcttggctgaaagaacacaagatggagaagaccaagcaattcgaactgctggatattagctggcttatcgaaagcatgaaagttggtaaaccggtggacaccaaggggaaataccagttggcggaatcgggtgagatgagtgcgaacccagatccgacagagggtcgtgaaaacgagctgcctcctactatgaagaccgtttctccgtatgcgtgtcaacgccgcaccaccctgaacaaccataatctgcgttttacggacgcactggaaattcttgcggaaaattacgagttcaaacgcaacgatgatactgcgctggaatttcgtcgtgctatctccgtgctgaaaagccttccgtttgaggtacgtagcctgaaagacacggaaggattgccctggatcggtgatgaagtcaaagggattatggaagaaatcatcgaggtcgggaattcgcgtgaagtgcaggccgtgctcaatgatgagtggtatcaaagcttccaccgctttaagagtgtctttggagtgggggtgaagacagcagacaagtggtaccgtatgggtctgcgcaccctcgaggatgttcgttccagcaagaccctgaagttgaccccgatgcagaaagcgggtctgtgctattatgaagatcttgctcgcggcgttacgaaagccgaagctgacgcgatttctctgctggttcaggatgcagtcgcaactttcgacccggatgcgctggtggagattgtcggtggatttcgtcgtgggaaacctcagggtcacgacgttgatctgcttatcagttctccgggagctgagaaagagcaagaagaccagctcctgcagaaagtgaccaatctgtggaagaaacaagggttgttgctgtacggtcgtctggaatggacccagtgggaagatgggaaactcccatccggtaaggctgacgtaggtgacgcgggtgcgaaatgctttctgatcctcaaactttatgatcataaagtggacaaaagcaaatgggaaatgccgacgggttcgaacatgggcgaggccaaaccgtggaaagcaattcgcgtagatctgctgcgttgcccctacggcggttttgcgtttgcgatgttgcagtggaccggaagccgcatgttccgccgtgatctgcgctggtacgccactgacgagaagaacatgatgctggacaatcatgcgctgtatgacctgaccaagaaaatctttctcaaagctaaatcggaagaggaaattttcgcacatctggggcttgaatacctggaaccgttcgaacgtaacgca

SEQ ID NO: 2800 - protein, 529 aa, synthetic construct
  REGION 1..529: note = Variant of terminal deoxynucleotidyltransferase
MHHHHHHGGSGSHGIRTIDSDFGKKQQKKMDNHDSSAIYEIKFHEFVLFILEEKMGATRRTFLTDLARKKGFRVENELSDSVTHIVAENLSRSEVLAWLKEHKMEKTKQFELLDISWLIESMKVGKPVDTKGKYQLAESGEMSANPDPTEGRENELPPTMKTVSPYACQRRTTLNNHNLRFTDALEILAENYEFKRNDDTALEFRRAISVLKSLPFEVRSLKDTEGLPWIGDEVKGIMEEIIEVGNSREVQAVLNDEWYQSFHRFKSVFGVGVKTADKWYRMGLRTLEDVRSSKTLKLTPMQKAGLCYYEDLARGVTKAEADAISLLVQDAVATFDPDALVEIVGGFRRGKPQGHDVDLLISSPGAEKEQEDQLLQKVTNLWKKQGLLLYGRLEWTQWEDGKLPSGKADVGDAGAKCFLILKLYDHKVDKSKWEMPTGSNMGEAKPWKAIRVDLLRCPYGGFAFAMLQWTGSRMFRRDLRWYATDEKNMMLDNHALYDLTKKIFLKAKSEEEIFAHLGLEYLEPFERNA

SEQ ID NO: 2801 - DNA, 1587 bp, synthetic construct
  misc_feature 1..1587: note = Variant of terminal deoxynucleotidyltransferase
  source 1..1587: mol_type = other DNA
atgcaccatcatcatcatcatggcggtagcggcagccacggcattcgtaccatcgattcggacttcgggaagaaacagcagaaaaaaatggataaccacgatagttccgccatctatgaaatcaaatttcacgagtttgtgctgttcattctcgaagaaaaaatgggtgcgacgcgtcgtacttttctgacagatttagcccgcaagaaagggttccgcgtcgagaatgaactgtcagacagcgttacccacatcgtggcagaaaatctgtcacgctctgaagtattggcttggctgaaagaacacaagatggagaagaccaagcaattcgaactgctggatattagctggcttatcgaaagcatgaaagttggtaaaccggtggacaccaaggggaaataccagttggcggaatcgggtgagatgagtgcgaacccagatccgacagagggtcgtgaaaacgagctgcctcctactatgaagaccgtttctccgtatgcgtgtcaacgccgcaccaccctgaacaaccataatcaacgttttacggacgcactggaaattcttgcggaaaattacgagttcaaacgcaacgatgatactgcgctggaatttcgtcgtgctatctccgtgctgaaaagccttccgtttgaggtacgtagcctgaaagacacggaaggattgccctggatcggtgatgaagtcaaagggattatggaagaaatcatcgaggtcgggaattcgcgtgaagtgcaggccgtgctcaatgatgagtggtatcaaagcttccaccgctttaagagtgtctttggagtgggggtgaagacagcagacaagtggtaccgtatgggtctgcgcaccctcgaggatgttcgttcccagaagaccctgaagttgaccccgatgcagaaagcgggtctgtgctattatgaagatcttgctcgcggcgttacgaaagccgaagctgacgcgatttctctgctggttcaggatgcagtcgcaactttcgacccggatgcgctggtggagattgtcggtggatttcgtcgtgggaaacctcagggtcacgacgttgatctgcttatcagttctccgggagctgagaaagagcaagaagaccagctcctgcagaaagtgaccaatctgtggaagaaacaagggttgttgctgtacggtcgtctggaatggacccagtgggaagatgggaaactcccatccggtaaggctgacgtaggtgacgcgggtgcgaaatgctttctgatcctcaaactttatgatcataaagtggacaaaagcaaatgggaaatgccgacgggttcgaacatgggcgaggccaaaccgtggaaagcaattcgcgtagatctgctgcgttgcccctacggcggttttgcgtttgcgatgttgcagtggaccggaagccgcatgttccgccgtgatctgcgctggtacgccactgacgagaagaacatgatgctggacaatcatgcgctgtatgacctgaccaagaaaatctttctcaaagctaaatcggaagaggaaattttcgcacatctggggcttgaatacctggaaccgttcgaacgtaacgca

SEQ ID NO: 2802 - protein, 529 aa, synthetic construct
  REGION 1..529: note = Variant of terminal deoxynucleotidyltransferase
MHHHHHHGGSGSHGIRTIDSDFGKKQQKKMDNHDSSAIYEIKFHEFVLFILEEKMGATRRTFLTDLARKKGFRVENELSDSVTHIVAENLSRSEVLAWLKEHKMEKTKQFELLDISWLIESMKVGKPVDTKGKYQLAESGEMSANPDPTEGRENELPPTMKTVSPYACQRRTTLNNHNQRFTDALEILAENYEFKRNDDTALEFRRAISVLKSLPFEVRSLKDTEGLPWIGDEVKGIMEEIIEVGNSREVQAVLNDEWYQSFHRFKSVFGVGVKTADKWYRMGLRTLEDVRSQKTLKLTPMQKAGLCYYEDLARGVTKAEADAISLLVQDAVATFDPDALVEIVGGFRRGKPQGHDVDLLISSPGAEKEQEDQLLQKVTNLWKKQGLLLYGRLEWTQWEDGKLPSGKADVGDAGAKCFLILKLYDHKVDKSKWEMPTGSNMGEAKPWKAIRVDLLRCPYGGFAFAMLQWTGSRMFRRDLRWYATDEKNMMLDNHALYDLTKKIFLKAKSEEEIFAHLGLEYLEPFERNA

SEQ ID NO: 2803 - DNA, 1587 bp, synthetic construct
  misc_feature 1..1587: note = Variant of terminal deoxynucleotidyltransferase
  source 1..1587: mol_type = other DNA
atgcaccatcatcatcatcatggcggtagcggcagccacggcattcgtaccatcgattcggacttcgggaagaaacagcagaaaaaaatggataaccacgatagttccgccacttatgaaatcaaatttcacgagtttgtgctgttcattctcgaagaaaaaatgggtgcgacgcgtcgtacttttctgacagatttagcccgcaagaaagggttccgcgtcgagaatgaactgaccgacgaagttacccacatcgtggcagaaaatctgtcacgctctgaagtattggcttggctgaaagaacacaagatggagaagaccaagcaattcgaactgctggatattagctggcttatcgaaagcatgaaagttggtaaaccggtggacaccaaggggaaataccagttggcggaatcgggtgagatgagtgcgaacccagatccgacagagggtcgtgaaaacgagctgcctcctactatgaagaccgtttctccgtatgcgtgtcaacgccgcaccaccctgaacaaccataatcaacgttttacggacgcactggaaattcttcgtgaaaattacgagttcaaacgcaacgatgatactgcgctggaatttcgtcgtgctatctccgtgctgaaaagccttccgtttgaggtacgtagcctgaaagacacggaaggattgccctggatcggtgatgaagtcaaagggattatggaagaaatcatcgaggtcgggaattcgcgtgaagtgcaggccgtgctcaatgatgagtggtatcaaagcttccaccgctttaagagtgtctttggagtgggggtgaagacagcagacaagtggtaccgtatgggtctgcgcaccctcgaggatgttcgttccagcaagaccctgaagttgaccccgatgcagaaagcgggtctgctgtattatgaagatcttgctcgcggcgttacgcgtgccgaagctgacgcgatttctctgctggttcaggatgcagtcgcaactttcgacccggatgcgctggtggagattgtcggtggatttcgtcgtgggaaacctcagggtcacgacgttgatctgcttatcagttctccgggagctgagaaagagcaagaagaccagctcctgcagaaagtgaccaatctgtggaagaaacaagggttgttgctgtacggtcgtctggaatggacccagtgggaagatgggaaactcccatccggtaaggctgacgagggtgacgcgggtgcgaaatgctttctgatcctcaaactttatgatcataaagtggacaaaagcaaatgggaaatgccgacgggttcgaacatgggcgaggccaaaccgtggaaagcaattcgcgtagatctgctgcgttgcccctacggcggttttgcgtttgcgatgttgcagtggaccggaagccgcatgttccgtcgtgatctgcgttggtacgccactgacgagaagaacatgatgctggacaatcatgcgctgtatgacctgaccaagaaaatctttctcaaagctaaatcggaagaggaaattttcgcacatctggggcttgaatacctggaaccgttcgaacgtaacgca

SEQ ID NO: 2804 - protein, 529 aa, synthetic construct
  REGION 1..529: note = Variant of terminal deoxynucleotidyltransferase
MHHHHHHGGSGSHGIRTIDSDFGKKQQKKMDNHDSSATYEIKFHEFVLFILEEKMGATRRTFLTDLARKKGFRVENELTDEVTHIVAENLSRSEVLAWLKEHKMEKTKQFELLDISWLIESMKVGKPVDTKGKYQLAESGEMSANPDPTEGRENELPPTMKTVSPYACQRRTTLNNHNQRFTDALEILRENYEFKRNDDTALEFRRAISVLKSLPFEVRSLKDTEGLPWIGDEVKGIMEEIIEVGNSREVQAVLNDEWYQSFHRFKSVFGVGVKTADKWYRMGLRTLEDVRSSKTLKLTPMQKAGLLYYEDLARGVTRAEADAISLLVQDAVATFDPDALVEIVGGFRRGKPQGHDVDLLISSPGAEKEQEDQLLQKVTNLWKKQGLLLYGRLEWTQWEDGKLPSGKADEGDAGAKCFLILKLYDHKVDKSKWEMPTGSNMGEAKPWKAIRVDLLRCPYGGFAFAMLQWTGSRMFRRDLRWYATDEKNMMLDNHALYDLTKKIFLKAKSEEEIFAHLGLEYLEPFERNA

SEQ ID NO: 2805 - DNA, 1587 bp, synthetic construct
  misc_feature 1..1587: note = Variant of terminal deoxynucleotidyltransferase
  source 1..1587: mol_type = other DNA
atgcaccatcatcatcatcatggcggtagcggtagccacggcattcgtaccatcgattcggacttcgggaagaaacagcagaaaaaaggggataaccacgatagttccgccacttatgaaatcaaatttcacgagtttgtgctgttcattctcgaagaaaaaatgggtgcgaaccgtcgtacttttctgacagatttagcccgcaagaaagggttccgcgtcgagaatgaactgaccgacgaagttacccacatcgtggcagaaaatctgtcacgctctgaagtattggcttggctgaaagaacacaagatggagaagaccaagcaattcgaactgctggatattagctggcttatcgaaagcatgaaagttggtaaaccggtggacaccaaggggaaataccagttggcggaatcgggtgagatgagtgcgaacccagatccgacagagggtcgtgaaaacgagctgcctcctactatgaagaccgtttctccgtatgcgtgtcaacgccgcaccaccctgaacaaccataatcaacgttttacggacgcactggaaattcttcgtgaaaattacgagttcaaacgcaacgatgatactgcgctggaatttcgtcgtgctatctccgtgctgaaaagccttccgtttgaggtacgtagcctgaaagacacggaaggattgccctggatcggtgatgaagtcaaagggattatggaagaaatcatcgaggtcgggaattcgcgtgaagtgcaggccgtgctcaatgatgagtggtatcaaagcttccaccgctttaagagtgtctttggagtgggggtgaagacagcagacaagtggtaccgtatgggtctgcgcaccctcgaggatgttcgttccagcaagaccctgaagttgaccccgatgcagaaagcgggtctgctgtattatgaagatcttgctcgcggcgttacgcgtgccgaagctgacgcgatttctctgctggttcaggatgcagtcgcaactttcgacccggatgcgctggtggagattgtcggtggatttcgtcgtgggaaacctcaaggtcacgacgttgatctgcttatcagttctccgggagctgagaaagagcaagaagaccagctcctgcagaaagtgaccaatctgtggaagaaacaagggttgttgctgtacggtcgtctggaatggacccagtgggaagatgggaaactcccatccggtaaggctgacgtgggtgacgcgggtgcgaaatgctttctgatcctcaaactttatgatcataaagtggacaaaagcaaatgggaaatgccgacgggttcgaacatgggcgaggccaaaccgtggaaagcaattcgcgtagatctgctgcgttgcccctacggcggttttgcgtttgcgatgttgcagtggaccggaagccgcatgttccgtcgtgatctggagtggtacgccactgacgagaagaacatgatgctggacaatcatgcgctgtatgacctgaccaagaaaatctttctcaaagctaaatcggaagaggaaattttcgcacatctggggcttgaatacctggaaccgttcgaacgtaacgca

SEQ ID NO: 2806 - protein, 529 aa, synthetic construct
  REGION 1..529: note = Variant of terminal deoxynucleotidyltransferase
MHHHHHHGGSGSHGIRTIDSDFGKKQQKKGDNHDSSATYEIKFHEFVLFILEEKMGANRRTFLTDLARKKGFRVENELTDEVTHIVAENLSRSEVLAWLKEHKMEKTKQFELLDISWLIESMKVGKPVDTKGKYQLAESGEMSANPDPTEGRENELPPTMKTVSPYACQRRTTLNNHNQRFTDALEILRENYEFKRNDDTALEFRRAISVLKSLPFEVRSLKDTEGLPWIGDEVKGIMEEIIEVGNSREVQAVLNDEWYQSFHRFKSVFGVGVKTADKWYRMGLRTLEDVRSSKTLKLTPMQKAGLLYYEDLARGVTRAEADAISLLVQDAVATFDPDALVEIVGGFRRGKPQGHDVDLLISSPGAEKEQEDQLLQKVTNLWKKQGLLLYGRLEWTQWEDGKLPSGKADVGDAGAKCFLILKLYDHKVDKSKWEMPTGSNMGEAKPWKAIRVDLLRCPYGGFAFAMLQWTGSRMFRRDLEWYATDEKNMMLDNHALYDLTKKIFLKAKSEEEIFAHLGLEYLEPFERNA

SEQ ID NO: 2807 - DNA, 1587 bp, synthetic construct
  misc_feature 1..1587: note = Variant of terminal deoxynucleotidyltransferase
  source 1..1587: mol_type = other DNA
atgcaccatcatcatcatcatggcggtagcggtagccacggcattcgtaccatcgattcggacttcgggaagaaacagcagaaaaaaatggataaccacgatagttccgccacttatgaaatcaaatttcacgagtttgtgctgttcattctcgaagaaaaaatgggtgcgacgcgtcgtacttttctgacagatttagcccgcaagaaagggttccgcgtcgagaatgaactgaccgacgaagttacccacatcgtggcagaaaatctgtcacgctctgaagtattggcttggctgaaagaacacaagatggagaagaccaagcaattcgaactgctggatattagctggcttatcgaaagcatgaaagttggtaaaccggtggacaccaaggggaaataccagttggcggaatcgggtgagatgagtgcgaacccagatccgacagagggtcgtgaaaacgagctgcctcctactatgaagaccgtttctccgtatgcgtgtcaacgccgcaccaccctgaacaaccataatcaacgttttacggacgcactggaaattcttgctgaaaattacgagttcaaacgcaacgatgatactgcgctggaatttcgtcgtgctatctccgtgctgaaaagccttccgtttgaggtacgtagcctgaaagacacggaaggattgccctggatcggtgatgaagtcaaagggattatggaagaaatcatcgaggtcgggaattcgcgtgaagtgcaggccgtgctcaatgatgagtggtatcaaagcttccaccgctttaagagtgtctttggagtgggggtgaagacagcagacaagtggtaccgtatgggtctgcgcaccctcgaggatgttcgttccagcaagaccctgaagttgaccccgatgcagaaagcgggtctgctgtattatgaagatcttgctcgcggcgttacgcgtgccgaagctgacgcgatttctctgctggttcaggatgcagtcgcaactttcgacccggatgcgctggtggagattgtcggtggatttcgtcgtgggaaacctcagggtcacgacgttgatctgcttatcagttctccgggagctgagaaagagcaagaagaccagctcctgcagaaagtgaccaatctgtggaagaaacaagggttgttgctgtacggtcgtctggaatggacccagtgggaagatgggaaactcccatccggtaaggctgacgtaggtgacgcgggtgcgaaatgctttctgatcctcaaactttatgatcataaagtggacaaaagcaaatgggaaatgccgacgggttcgaacatgggcgaggccaaaccgtggaaagcaattcgcgtagatctgctgcgttgcccctacggcggttttgcgtttgcgatgttgcagtggaccggaagccgcatgttccgtcgtgatctgcgttggtacgccactgacgagaagaacatgatgctggacaatcatgcgctgtatgacctgaccaagaaaatctttctcaaagctaaatcggaagaggaaattttcgcacatctggggcttgaatacctggaaccgttcgaacgtaacgca

SEQ ID NO: 2808 - protein, 529 aa, synthetic construct
  REGION 1..529: note = Variant of terminal deoxynucleotidyltransferase
MHHHHHHGGSGSHGIRTIDSDFGKKQQKKMDNHDSSATYEIKFHEFVLFILEEKMGATRRTFLTDLARKKGFRVENELTDEVTHIVAENLSRSEVLAWLKEHKMEKTKQFELLDISWLIESMKVGKPVDTKGKYQLAESGEMSANPDPTEGRENELPPTMKTVSPYACQRRTTLNNHNQRFTDALEILAENYEFKRNDDTALEFRRAISVLKSLPFEVRSLKDTEGLPWIGDEVKGIMEEIIEVGNSREVQAVLNDEWYQSFHRFKSVFGVGVKTADKWYRMGLRTLEDVRSSKTLKLTPMQKAGLLYYEDLARGVTRAEADAISLLVQDAVATFDPDALVEIVGGFRRGKPQGHDVDLLISSPGAEKEQEDQLLQKVTNLWKKQGLLLYGRLEWTQWEDGKLPSGKADVGDAGAKCFLILKLYDHKVDKSKWEMPTGSNMGEAKPWKAIRVDLLRCPYGGFAFAMLQWTGSRMFRRDLRWYATDEKNMMLDNHALYDLTKKIFLKAKSEEEIFAHLGLEYLEPFERNA

SEQ ID NO: 2809 - DNA, 1587 bp, synthetic construct
  misc_feature 1..1587: note = Variant of terminal deoxynucleotidyltransferase
  source 1..1587: mol_type = other DNA
atgcaccatcatcatcatcatggcggtagcagtagccacggcattcgtaccatcgattcggacttcgggaagaaacagcagaaaaaaggggataaccacgatagttccgccacttatgaaatcaaatttcacgagtttgtgctgttcattctcgaagaaaaaatgggtgcgacgcgtcgtacttttctgacagatttagcccgcaagaaagggttccgcgtcgagaatgaactgaccgacgaagttacccacatcgtggcagaaaatctgtcacgctctgaagtattggcttggctgaaagaacacaagatggagaagaccaagcaattcgaactgctggatattagctggcttatcgaaagcatgaaagttggtaaaccggtggacaccaaggggaaataccagttggcggaatcgggtgagatgagtgcgaacccagatccgacagagggtcgtgaaaacgagctgcctcctactatgaagaccgtttctccgtatgcgtgtcaacgccgcaccaccctgaacaaccataatcaacgttttacggacgcactggaaattcttcgtgaaaattacgagttcaaacgcaacgatgatactgcgctggaatttcgtcgtgctatctccgtgctgaaaagccttccgtttgaggtacgtagcctgaaagacacggaaggattgccctggatcggtgatgaagtcaaagggattatggaagaaatcatcgaggtcgggaattcgcgtgaagtgcaggccgtgctcaatgatgagtggtatcaaagcttccaccgctttaagagtgtctttggagtgggggtgaagacagcagacaagtggtaccgtatgggtctgcgcaccctcgaggatgttcgttccagcaagaccctgaagttgaccccgatgcagaaagcgggtctgtgctattatgaagatcttgctcgcggcgttacgcgtgccgaagctgacgcgatttctctgctggttcaggatgcagtcgcaactttcgacccggatgcgctggtggagattgtcggtggatttcgtcgtgggaaacctcaaggtcacgacgttgatctgcttatcagttctccgggagctgagaaagagcaagaagaccagctcctgcagaaagtgaccaatctgtggaagaaacaagggttgttgctgtacggtcgtctggaatggacccagtgggaagatgggaaactcccatccggtaaggctgacgtaggtgacgcgggtgcgaaatgctttctgatcctcaaactttatgatcataaagtggacaaaagcaaatgggaaatgccgacgggttcgaacatgggcgaggccaaaccgtggaaagcaattcgcgtagatctgctgcgttgcccctacggcggttttgcgtttgcaatgttgcagtggaccggaagccgcatgttccgtcgtgatctggagtggtacgccactgacgagaagaacatgatgctggacaatcatgcgctgtatgacctgaccaagaaaatctttctcaaagctaaatcggaagaggaaattttcgcacatctggggcttgaatacctggaaccgttcgaacgtaacgca

SEQ ID NO: 2810 - protein, 529 aa, synthetic construct
  REGION 1..529: note = Variant of terminal deoxynucleotidyltransferase
MHHHHHHGGSSSHGIRTIDSDFGKKQQKKGDNHDSSATYEIKFHEFVLFILEEKMGATRRTFLTDLARKKGFRVENELTDEVTHIVAENLSRSEVLAWLKEHKMEKTKQFELLDISWLIESMKVGKPVDTKGKYQLAESGEMSANPDPTEGRENELPPTMKTVSPYACQRRTTLNNHNQRFTDALEILRENYEFKRNDDTALEFRRAISVLKSLPFEVRSLKDTEGLPWIGDEVKGIMEEIIEVGNSREVQAVLNDEWYQSFHRFKSVFGVGVKTADKWYRMGLRTLEDVRSSKTLKLTPMQKAGLCYYEDLARGVTRAEADAISLLVQDAVATFDPDALVEIVGGFRRGKPQGHDVDLLISSPGAEKEQEDQLLQKVTNLWKKQGLLLYGRLEWTQWEDGKLPSGKADVGDAGAKCFLILKLYDHKVDKSKWEMPTGSNMGEAKPWKAIRVDLLRCPYGGFAFAMLQWTGSRMFRRDLEWYATDEKNMMLDNHALYDLTKKIFLKAKSEEEIFAHLGLEYLEPFERNA

SEQ ID NO: 2811 - DNA, 1587 bp, synthetic construct
  misc_feature 1..1587: note = Variant of terminal deoxynucleotidyltransferase
  source 1..1587: mol_type = other DNA
atgcaccatcatcatcatcatggcggtagcggcagccacggcattcgtaccatcgattcggacttcgggaagaaacagcagaaaaaaatggataaccacgatagttccgccacttatgaaatcaaatttcacgagtttgtgctgttcattctcgaagaaaaaatgggtgcgacgcgtcgtacttttctgacagatttagcccgcaagaaagggttccgcgtcgagaatgaactgaccgacgaagttacccacatcgtggcagaaaatctgtcacgctctgaagtattggcttggctgaaagaacacaagatggagaagaccaagcaattcgaactgctggatattagctggcttatcgaaagcatgaaagttggtaaaccggtggacaccaaggggaaataccagttggcggaatcgggtgagatgagtgcgaacccagatccgacagagggtcgtgaaaacgagctgcctcctactatgaagaccgtttctccgtatgcgtgtcaacgccgcaccaccctgaacaaccataatcaacgttttacggacgcactggaaattcttcgtgaaaattacgagttcaaacgcaacgatgatactgcgctggaatttcgtcgtgctatctccgtgctgaaaagccttccgtttgaggtacgtagcctgaaagacacggaaggattgccctggatcggtgatgaagtcaaagggattatggaagaaatcatcgaggtcgggaattcgcgtgaagtgcaggccgtgctcaatgatgagtggtatcaaagcttccaccgctttaagagtgtctttggagtgggggtgaagacagcagacaagtggtaccgtatgggtctgcgcaccctcgaggatgttcgttccagcaagaccctgaagttgaccccgatgcagaaagtaggtctgctgtattatgaagatcttgctcgcggcgttacgcgtgccgaagctgacgcgatttctctgctggttcaggatgcagtcgcaactttcgacccggatgcgatcgtggagattgtcggtggatttcgtcgtgggaaacctcagggtcacgacgttgatctgcttatcagttctccgggagctgagaaagagcaagaagaccagctcctgcagaaagtgaccaatctgtggaagaaacaagggttgttgctgtacggtcgtctggaatggacccagtgggaagatgggggttcgccatccggtaaggctgacgagggtgacgcgggtgcgaaatgctttctgatcctcaaactttatgatcataaagtggacaaaagcaaatgggaaatgccgacgggttcgaacatgggcgaggccaaaccgtggaaagcaattcgcgtagatctgctgcgttgcccctacggcggttttgcgtttgcgatgttgcagtggaccggaagccgcatgttccgtcgtgatctgcgttggtacgccactgacgagaagaacatgatgctggacaatcatgcgctgtatgacctgaccaagaaaatcttcctccctgctaaatcggaagaggaaattttcgcacatctggggcttgaatacctggaaccgttcgaacgtaacgca

SEQ ID NO: 2812 - protein, 529 aa, synthetic construct
  REGION 1..529: note = Variant of terminal deoxynucleotidyltransferase
MHHHHHHGGSGSHGIRTIDSDFGKKQQKKMDNHDSSATYEIKFHEFVLFILEEKMGATRRTFLTDLARKKGFRVENELTDEVTHIVAENLSRSEVLAWLKEHKMEKTKQFELLDISWLIESMKVGKPVDTKGKYQLAESGEMSANPDPTEGRENELPPTMKTVSPYACQRRTTLNNHNQRFTDALEILRENYEFKRNDDTALEFRRAISVLKSLPFEVRSLKDTEGLPWIGDEVKGIMEEIIEVGNSREVQAVLNDEWYQSFHRFKSVFGVGVKTADKWYRMGLRTLEDVRSSKTLKLTPMQKVGLLYYEDLARGVTRAEADAISLLVQDAVATFDPDAIVEIVGGFRRGKPQGHDVDLLISSPGAEKEQEDQLLQKVTNLWKKQGLLLYGRLEWTQWEDGGSPSGKADEGDAGAKCFLILKLYDHKVDKSKWEMPTGSNMGEAKPWKAIRVDLLRCPYGGFAFAMLQWTGSRMFRRDLRWYATDEKNMMLDNHALYDLTKKIFLPAKSEEEIFAHLGLEYLEPFERNA

SEQ ID NO: 2813 - DNA, 1587 bp, synthetic construct
  misc_feature 1..1587: note = Variant of terminal deoxynucleotidyltransferase
  source 1..1587: mol_type = other DNA
atgcaccatcatcatcatcatggcggtagcggcagccacggcattcgtaccatcgattcggacttcgggaagaaacagcagaaaaaaatggataaccacgatagttccgccacttatgaaatcaaatttcacgagtttgtgctgttcattctcgaagaaaaaatgggtgcgacgcgtcgtacttttctgacagatttagcccgcaagaaagggttccgcgtcgagaatgaactgaccgacgaagttacccacatcgtggcagaaaatctgtcacgctctgaagtattggcttggctgaaagaacacaagatggagaagaccaagcaattcgaactgctggatattagctggcttatcgaaagcatgaaagttggtaaaccggtggacaccaaggggaaataccagttggcggaatcgggtgagatgagtgcgaacccagatccgacagagggtcgtgaaaacgagctgcctcctactatgaagaccgtttctccgtatgcgtgtcaacgccgcaccaccctgaacaaccataatcaacgttttacggacgcactggaaattcttcgtgaaaattacgagttcaaacgcaacgatgatactgcgctggaatttcgtcgtgctatctccgtgctgaaaagccttccgtttgaggtacgtagcctgaaagacacggaaggattgccctggatcggtgatgaagtcaaagggattatggaagaaatcatcgaggtcgggaattcgcgtgaagtgcaggccgtgctcaatgatgagtggtatcaaagcttccaccgctttaagagtgtctttggagtgggggtgaagacagcagacaagtggtaccgtatgggtctgcgcaccctcgaggatgttcgttccagcaagaccctgaagttgaccccgatgcagaaagtaggtctgctgtattatgaagatcttgctcgcggcgttacgcgtgccgaagctgacgcgatttctctgctggttcaggatgcagtcgcaactttcgacccggatgcgatcgtggagattgtcggtggatttcgtcgtgggaaacctcagggtcacgacgttgatctgcttatcagttctccgggagctgagaaagagcaagaagaccagctcctgcagaaagtgaccaatctgtggaagaaacaagggttgttgctgtacggtcgtctggaatggacccagtgggaagatgggggtctgccatccggtaaggctgacgagggtgacgcgggtgcgaaatgctttctgatcctcaaactttatgatcataaagtggacaaaagcaaatgggaaatgccgacgggttcgaacatgggcgaggccaaaccgtggaaagcaattcgcgtagatctgctgcgttgcccctacggcggttttgcgtttgcgatgttgcagtggaccggaagccgcatgttccgtcgtgatctgcgttggtacgccactgacgagaagaacatgatgctggacaatcatgcgctgtatgacctgaccaagaaaatcttcctccctgctaaatcggaagaggaaattttcgcacatctggggcttgaatacctggaaccgttcgaacgtaacgca

SEQ ID NO: 2814 - protein, 529 aa, synthetic construct
  REGION 1..529: note = Variant of terminal deoxynucleotidyltransferase
MHHHHHHGGSGSHGIRTIDSDFGKKQQKKMDNHDSSATYEIKFHEFVLFILEEKMGATRRTFLTDLARKKGFRVENELTDEVTHIVAENLSRSEVLAWLKEHKMEKTKQFELLDISWLIESMKVGKPVDTKGKYQLAESGEMSANPDPTEGRENELPPTMKTVSPYACQRRTTLNNHNQRFTDALEILRENYEFKRNDDTALEFRRAISVLKSLPFEVRSLKDTEGLPWIGDEVKGIMEEIIEVGNSREVQAVLNDEWYQSFHRFKSVFGVGVKTADKWYRMGLRTLEDVRSSKTLKLTPMQKVGLLYYEDLARGVTRAEADAISLLVQDAVATFDPDAIVEIVGGFRRGKPQGHDVDLLISSPGAEKEQEDQLLQKVTNLWKKQGLLLYGRLEWTQWEDGGLPSGKADEGDAGAKCFLILKLYDHKVDKSKWEMPTGSNMGEAKPWKAIRVDLLRCPYGGFAFAMLQWTGSRMFRRDLRWYATDEKNMMLDNHALYDLTKKIFLPAKSEEEIFAHLGLEYLEPFERNA

SEQ ID NO: 2815 - DNA, 1587 bp, synthetic construct
  misc_feature 1..1587: note = Variant of terminal deoxynucleotidyltransferase
  source 1..1587: mol_type = other DNA
atgcaccatcatcatcatcatggcggtagcggcagccacggcattcgtaccatcgattcggacttcgggaagaaacagcagaaaaaaatggataaccacgatagttccgccacttatgaaatcaaatttcacgagtttgtgctgttcattctcgaagaaaaaatgggtgcgacgcgtcgtacttttctgacagatttagcccgcaagaaagggttccgcgtcgagaatgaactgaccgacgaagttacccacatcgtggcagaaaatctgtcacgctctgaagtattggcttggctgaaagaacacaagatggagaagaccaagcaattcgaactgctggatattagctggcttatcgaaagcatgaaagttggtaaaccggtggacaccaaggggaaataccagttggcggaatcgggtgagatgagtgcgaacccagatccgacagagggtcgtgaaaacgagctgcctcctactatgaagaccgtttctccgtatgcgtgtcaacgccgcaccaccctgaacaaccataatcaacgttttacggacgcactggaaattcttcgtgaaaattacgagttcaaacgcaacgatgatactgcgctggaatttcgtcgtgctatctccgtgctgaaaagccttccgtttgaggtacgtagcctgaaagacacggaaggattgccctggatcggtgatgaagtcaaagggattatggaagaaatcatcgaggtcgggaattcgcgtgaagtgcaggccgtgctcaatgatgagtggtatcaaagcttccaccgctttaagagtgtctttggagtgggggtgaagacagcagacaagtggtaccgtatgggtctgcgcaccctcgaggatgttcgttccagcaagaccctgaagttgaccccgatgcagaaagtaggtctgctgtattatgaagatcttgctcgcggcgttacgcgtgccgaagctgacgcgatttctctgctggttcaggatgcagtcgcaactttcgacccggatgcggtcgtggagattgtcggtggatttcgtcgtgggaaacctcagggtcacgacgttgatctgcttatcagttctccgggagctgagaaagagcaagaagaccagctcctgcagaaagtgaccaatctgtggaagaaacaagggttgttgctgtacggtcgtctggaatggacccagtgggaagatgggggttcgccatccggtaaggctgacgagggtgacgcgggtgcgaaatgctttctgatcctcaaactttatgatcataaagtggacaaaagcaaatgggaaatgccgacgggttcgaacatgggcgaggccaaaccgtggaaagcaattcgcgtagatctgctgcgttgcccctacggcggttttgcgtttgcgatgttgcagtggaccggaagccgcatgttccgtcgtgatctgcgttggtacgccactgacgagaagaacatgatgctggacaatcatgcgctgtatgacctgaccaagaaaatcaaactccctgctaaatcggaagaggaaattttcgcacatctggggcttgaatacctggaaccgttcgaacgtaacgca

SEQ ID NO: 2816 - protein, 529 aa, synthetic construct
  REGION 1..529: note = Variant of terminal deoxynucleotidyltransferase
MHHHHHHGGSGSHGIRTIDSDFGKKQQKKMDNHDSSATYEIKFHEFVLFILEEKMGATRRTFLTDLARKKGFRVENELTDEVTHIVAENLSRSEVLAWLKEHKMEKTKQFELLDISWLIESMKVGKPVDTKGKYQLAESGEMSANPDPTEGRENELPPTMKTVSPYACQRRTTLNNHNQRFTDALEILRENYEFKRNDDTALEFRRAISVLKSLPFEVRSLKDTEGLPWIGDEVKGIMEEIIEVGNSREVQAVLNDEWYQSFHRFKSVFGVGVKTADKWYRMGLRTLEDVRSSKTLKLTPMQKVGLLYYEDLARGVTRAEADAISLLVQDAVATFDPDAVVEIVGGFRRGKPQGHDVDLLISSPGAEKEQEDQLLQKVTNLWKKQGLLLYGRLEWTQWEDGGSPSGKADEGDAGAKCFLILKLYDHKVDKSKWEMPTGSNMGEAKPWKAIRVDLLRCPYGGFAFAMLQWTGSRMFRRDLRWYATDEKNMMLDNHALYDLTKKIKLPAKSEEEIFAHLGLEYLEPFERNA

SEQ ID NO: 2817 - DNA, 1587 bp, synthetic construct
  misc_feature 1..1587: note = Variant of terminal deoxynucleotidyltransferase
  source 1..1587: mol_type = other DNA
atgcaccatcatcatcatcatggcggtagcggcagccacggcattcgtaccatcgattcggacttcgggaagaaacagcagaaaaaaatggataaccacgatagttccgccacttatgaaatcaaatttcacgagtttgtgctgttcattctcgaagaaaaaatgggtgcgacgcgtcgtacttttctgacagatttagcccgcaagaaagggttccgcgtcgagaatgaactgaccgacgaagttacccacatcgtggcagaaaatctgtcacgctctgaagtattggcttggctgaaagaacacaagatggagaagaccaagcaattcgaactgctggatattagctggcttatcgaaagcatgaaagttggtaaaccggtggacaccaaggggaaataccagttggcggaatcgggtgagatgagtgcgaacccagatccgacagagggtcgtgaaaacgagctgcctcctactatgaagaccgtttctccgtatgcgtgtatgcgccgcaccaccctgaacaaccataatcaacgttttacggacgcactggaaattcttcgtgaaaattacgagttcaaacgcaacgatgatactgcgctggaatttcgtcgtgctatctccgtgctgaaaagccttccgtttgaggtacgtagcctgaaagacacggaaggattgccctggatcggtgatgaagtcaaagggattatggaagaaatcatcgaggtcgggaattcgcgtgaagtgcaggccgtgctcaatgatgagtggtatcaaagcttccaccgctttaagagtgtctttggagtgggggtgaagacagcagacaagtggtaccgtatgggtctgcgcaccctcgaggatgttcgttccagcaagaccctgaagttgaccccgatgcagaaagtaggtctgctgtattatgaagatcttgctcgcggcgttacgcgtgccgaagctgacgcgatttctctgctggttcaggatgcagtcgcaactttcgacccggatgcgctggtggagattgtcggtggatttcgtcgtgggaaacctcagggtcacgacgttgatctgcttatcagttctccgggagctgagaaagagcaagaagaccagctcctgcagaaagtgaccaatctgtggaagaaacaagggttgttgctgtacggtcgtctggaatggacccagtgggaagatgggggttcgccatccggtaaggctgacgagggtgacgcgggtgcgaaatgctttctgatcctcaaactttatgatcatctggtggacaaaagcaaatgggaaatgccgacgggttcgaacatgggcgaggccaaaccgtggaaagcaattcgcgtagatctgctgcgttgcccctacggcggttttgcgtttgcgatgttgcagtggaccggaagccgcatgttccgtcgtgatctgcgttggtacgccactgacgagaagaacatgatgctggacaatcatgcgctgtatgacctgaccaagaaaatcttcctccctgctaaatcggaagaggaaattttcgcacatctggggcttgaatacctggaaccgttcgaacgtaacgca

SEQ ID NO: 2818 - protein, 529 aa, synthetic construct
  REGION 1..529: note = Variant of terminal deoxynucleotidyltransferase
MHHHHHHGGSGSHGIRTIDSDFGKKQQKKMDNHDSSATYEIKFHEFVLFILEEKMGATRRTFLTDLARKKGFRVENELTDEVTHIVAENLSRSEVLAWLKEHKMEKTKQFELLDISWLIESMKVGKPVDTKGKYQLAESGEMSANPDPTEGRENELPPTMKTVSPYACMRRTTLNNHNQRFTDALEILRENYEFKRNDDTALEFRRAISVLKSLPFEVRSLKDTEGLPWIGDEVKGIMEEIIEVGNSREVQAVLNDEWYQSFHRFKSVFGVGVKTADKWYRMGLRTLEDVRSSKTLKLTPMQKVGLLYYEDLARGVTRAEADAISLLVQDAVATFDPDALVEIVGGFRRGKPQGHDVDLLISSPGAEKEQEDQLLQKVTNLWKKQGLLLYGRLEWTQWEDGGSPSGKADEGDAGAKCFLILKLYDHLVDKSKWEMPTGSNMGEAKPWKAIRVDLLRCPYGGFAFAMLQWTGSRMFRRDLRWYATDEKNMMLDNHALYDLTKKIFLPAKSEEEIFAHLGLEYLEPFERNA

SEQ ID NO: 2819 - DNA, 1587 bp, synthetic construct
  misc_feature 1..1587: note = Variant of terminal deoxynucleotidyltransferase
  source 1..1587: mol_type = other DNA
atgcaccatcatcatcatcatggcggtagcggcagccacggcattcgtaccatcgattcggacttcgggaagaaacagcagaaaaaaatggataaccacgatagttccgccacttatgaaatcaaatttcacgagtttgtgctgttcattctcgaagaaaaaatgggtgcgacgcgtcgtacttttctgacagatttagcccgcaagaaagggttccgcgtcgagaatgaactgaccgacgaagttacccacatcgtggcagaaaatctgtcacgctctgaagtattggcttggctgaaagaacacaagatggagaagaccaagcaattcgaactgctggatattagctggcttatcgaaagcatgaaagttggtaaaccggtggacaccaaggggaaataccagttggcggaatcgggtgagatgagtgcgaacccagatccgacagagggtcgtgaaaacgagctgcctcctactatgaagaccgtttctccgtatgcgtgtcaacgccgcaccaccctgaacaaccataatcaacgttttacggacgcactggaaattcttcgtgaaaattacgagttcaaacgcaacgatgatactgcgctggaatttcgtcgtgctatctccgtgctgaaaagccttccgtttgaggtacgtagcctgaaagacacggaaggattgccctggatcggtgatgaagtcaaagggattatggaagaaatcatcgaggtcgggaattcgcgtgaagtgcaggccgtgctcaatgatgagtggtatcaaagcttccaccgctttaagagtgtctttggagtgggggtgaagacagcagacaagtggtaccgtatgggtctgcgcaccctcgaggatgttcgttccagcaagaccctgaagttgaccccgatgcagaaagtaggtctgctgtattatgaagatcttgctcgcggcgttacgcgtgccgaagctgacgcgatttctctgctggttcaggatgcagtcgcaactttcgacccggatgcggtcgtggagattgtcggtggatttcgtcgtgggaaacctcagggtcacgacgttgatctgcttatcagttctccgggagctgagaaagagcaagaagaccagctcctgcagaaagtgaccaatctgtggaagaaacaagggttgttgctgtacggtcgtctggaatggacccagtgggaagatgggggtctgccatccggtaaggctgacgagggtgacgcgggtgcgaaatgctttctgatcctcaaactttatgatcatctggtggacaaaagcaaatgggaaatgccgacgggttcgaacatgggcgaggccaaaccgtggaaagcaattcgcgtagatctgctgcgttgcccctacggcggttttgcgtttgcgatgttgcagtggaccggaagccgcatgttccgtcgtgatctgcgttggtacgccactgacgagaagaacatgatgctggacaatcatgcgctgtatgacctgaccaagaaaatcaaactccctgctaaatcggaagaggaaattttcgcacatctggggcttgaatacctggaaccgttcgaacgtaacgca

SEQ ID NO: 2820 - protein, 529 aa, synthetic construct
  REGION 1..529: note = Variant of terminal deoxynucleotidyltransferase
MHHHHHHGGSGSHGIRTIDSDFGKKQQKKMDNHDSSATYEIKFHEFVLFILEEKMGATRRTFLTDLARKKGFRVENELTDEVTHIVAENLSRSEVLAWLKEHKMEKTKQFELLDISWLIESMKVGKPVDTKGKYQLAESGEMSANPDPTEGRENELPPTMKTVSPYACQRRTTLNNHNQRFTDALEILRENYEFKRNDDTALEFRRAISVLKSLPFEVRSLKDTEGLPWIGDEVKGIMEEIIEVGNSREVQAVLNDEWYQSFHRFKSVFGVGVKTADKWYRMGLRTLEDVRSSKTLKLTPMQKVGLLYYEDLARGVTRAEADAISLLVQDAVATFDPDAVVEIVGGFRRGKPQGHDVDLLISSPGAEKEQEDQLLQKVTNLWKKQGLLLYGRLEWTQWEDGGLPSGKADEGDAGAKCFLILKLYDHLVDKSKWEMPTGSNMGEAKPWKAIRVDLLRCPYGGFAFAMLQWTGSRMFRRDLRWYATDEKNMMLDNHALYDLTKKIKLPAKSEEEIFAHLGLEYLEPFERNA

SEQ ID NO: 2821 - DNA, 1587 bp, synthetic construct
  misc_feature 1..1587: note = Variant of terminal deoxynucleotidyltransferase
  source 1..1587: mol_type = other DNA
atgcaccatcatcatcatcatggcggtagcggcagccacggcattcgtaccatcgattcggacttcgggaagaaacagcagaaaaaaatggataaccacgatagttccgccacttatgaaatcaaatttcacgagtttgtgctgttcattctcgaagaaaaaatgggtgcgacgcgtcgtacttttctgacagatttagcccgcaagaaagggttccgcgtcgagaatgaactgaccgacgaagttacccacatcgtggcagaaaatctgtcacgctctgaagtattggcttggctgaaagaacacaagatggagaagaccaagcaattcgaactgctggatattagctggcttatcgaaagcatgaaagttggtaaaccggtggacaccaaggggaaataccagttggcggaatcgggtgagatgagtgcgaacccagatccgacagagggtcgtgaaaacgagctgcctcctactatgaagaccgtttctccgtatgcgtgtcaacgccgcaccaccctgaacaaccataatcaacgttttacggacgcactggaaattcttcgtgaaaattacgagttcaaacgcaacgatgatactgcgctggaatttcgtcgtgctatctccgtgctgaaaagccttccgtttgaggtacgtagcctgaaagacacggaaggattgccctggatcggtgatgaagtcaaagggattatggaagaaatcatcgaggtcgggaattcgcgtgaagtgcaggccgtgctcaatgatgagtggtatcaaagcttccaccgctttaagagtgtctttggagtgggggtgaagacagcagacaagtggtaccgtatgggtctgcgcaccctcgaggatgttcgttccagcaagaccctgaagttgaccccgatgcagaaagtaggtctgctgtattatgaagatcttgctcgcggcgttacgcgtgccgaagctgacgcgatttctctgctggttcaggatgcagtcgcaactttcgacccggatgcgatcgtggagattgtcggtggatttcgtcgtgggaaacctcagggtcacgacgttgatctgcttatcagttctccgggagctgagaaagagcaagaagaccagctcctgcagaaagtgaccaatctgtggaagaaacaagggttgttgctgtacggtcgtctggaatggacccagtgggaagatgggggtgcgccatccggtaaggctgacgagggtgacgcgggtgcgaaatgctttctgatcctcaaactttatgatcatctggtgcgcaaaagcaaatgggaaatgccgacgggttcgaacatgggcgaggccaaaccgtggaaagcaattcgcgtagatctgctgcgttgcccctacggcggttttgcgtttgcgatgttgcagtggaccggaagccgcatgttccgtcgtgatctgcgttggtacgccactgacgagaagaacatgatgctggacaatcatgcgctgtatgacctgaccaagaaaatcaaactccctgctaaatcggaagaggaaattttcgcacatctggggcttgaatacctggaaccgttcgaacgtaacgca

SEQ ID NO: 2822 - protein, 529 aa, synthetic construct
  REGION 1..529: note = Variant of terminal deoxynucleotidyltransferase
MHHHHHHGGSGSHGIRTIDSDFGKKQQKKMDNHDSSATYEIKFHEFVLFILEEKMGATRRTFLTDLARKKGFRVENELTDEVTHIVAENLSRSEVLAWLKEHKMEKTKQFELLDISWLIESMKVGKPVDTKGKYQLAESGEMSANPDPTEGRENELPPTMKTVSPYACQRRTTLNNHNQRFTDALEILRENYEFKRNDDTALEFRRAISVLKSLPFEVRSLKDTEGLPWIGDEVKGIMEEIIEVGNSREVQAVLNDEWYQSFHRFKSVFGVGVKTADKWYRMGLRTLEDVRSSKTLKLTPMQKVGLLYYEDLARGVTRAEADAISLLVQDAVATFDPDAIVEIVGGFRRGKPQGHDVDLLISSPGAEKEQEDQLLQKVTNLWKKQGLLLYGRLEWTQWEDGGAPSGKADEGDAGAKCFLILKLYDHLVRKSKWEMPTGSNMGEAKPWKAIRVDLLRCPYGGFAFAMLQWTGSRMFRRDLRWYATDEKNMMLDNHALYDLTKKIKLPAKSEEEIFAHLGLEYLEPFERNA

SEQ ID NO: 2823 - DNA, 1587 bp, synthetic construct
  misc_feature 1..1587: note = Variant of terminal deoxynucleotidyltransferase
  source 1..1587: mol_type = other DNA
atgcaccatcatcatcatcatggcggtagcggcagccacggcattcgtaccatcgattcggacttcgggaagaaacagcagaaaaaaatggataaccacgatagttccgccacttatgaaatcaaatttcacgagtttgtgctgttcattctcgaagaaaaaatgggtgcgacgcgtcgtacttttctgacagatttagcccgcaagaaagggttccgcgtcgagaatgaactgaccgacgaagttacccacatcgtggcagaaaatctgtcacgctctgaagtattggcttggctgaaagaacacaagatggagaagaccaagcaattcgaactgctggatattagctggcttatcgaaagcatgaaagttggtaaaccggtggacaccaaggggaaataccagttggcggaatcgggtgagatgagtgcgaacccagatccgacagagggtcgtgaaaacgagctgcctcctactatgaagaccgtttctccgtatgcgtgtcaacgccgcaccaccctgaacaaccataatcaacgttttacggacgcactggaaattcttcgtgaaaattacgagttcaaacgcaacgatgatactgcgctggaatttcgtcgtgctatctccgtgctgaaaagccttccgtttgaggtacgtagcctgaaagacacggaaggattgccctggatcggtgatgaagtcaaagggattatggaagaaatcatcgaggtcgggaattcgcgtgaagtgcaggccgtgctcaatgatgagtggtatcaaagcttccaccgctttaagagtgtctttggagtgggggtgaagacagcagacaagtggtaccgtatgggtctgcgcaccctcgaggatgttcgttccagcaagaccctgaagttgaccccgatgcagaaagtaggtctgctgtattatgaagatcttgctcgcggcgttacgcgtgccgaagctgacgcgatttctctgctggttcaggatgcagtcgcaactttcgacccggatgcgctggtggagattgtcggtggatttcgtcgtgggaaacctcagggtcacgacgttgatctgcttatcagttctccgggagctgagaaagagcaagaagaccagctcctgcagaaagtgaccaatctgtggaagaaacaagggttgttgctgtacggtcgtctggaatggacccagtgggaagatgggggtgcgccatccggtaaggctgacgagggtgacgcgggtgcgaaatgctttctgatcctcaaactttatgatcataaggtggacaaaagcaaatgggaaatgccgacgggttcgaacatgggcgaggccaaaccgtggaaagcaattcgcgtagatctgctgcgttgcccctacggcggttttgcgtttgcgatgttgcagtggaccggaagccgcatgttccgtcgtgatctgcgttggtacgccactgacgagaagaacatgatgctggacaatcatgcgctgtatgacctgaccaagaaaatcaaactccctgctaaatcggaagaggaaattttcgcacatctggggcttgaatacctggaaccgttcgaacgtaacgca

SEQ ID NO: 2824 - protein, 529 aa, synthetic construct
  REGION 1..529: note = Variant of terminal deoxynucleotidyltransferase
MHHHHHHGGSGSHGIRTIDSDFGKKQQKKMDNHDSSATYEIKFHEFVLFILEEKMGATRRTFLTDLARKKGFRVENELTDEVTHIVAENLSRSEVLAWLKEHKMEKTKQFELLDISWLIESMKVGKPVDTKGKYQLAESGEMSANPDPTEGRENELPPTMKTVSPYACQRRTTLNNHNQRFTDALEILRENYEFKRNDDTALEFRRAISVLKSLPFEVRSLKDTEGLPWIGDEVKGIMEEIIEVGNSREVQAVLNDEWYQSFHRFKSVFGVGVKTADKWYRMGLRTLEDVRSSKTLKLTPMQKVGLLYYEDLARGVTRAEADAISLLVQDAVATFDPDALVEIVGGFRRGKPQGHDVDLLISSPGAEKEQEDQLLQKVTNLWKKQGLLLYGRLEWTQWEDGGAPSGKADEGDAGAKCFLILKLYDHKVDKSKWEMPTGSNMGEAKPWKAIRVDLLRCPYGGFAFAMLQWTGSRMFRRDLRWYATDEKNMMLDNHALYDLTKKIKLPAKSEEEIFAHLGLEYLEPFERNA

SEQ ID NO: 2825 - DNA, 1587 bp, synthetic construct
  misc_feature 1..1587: note = Variant of terminal deoxynucleotidyltransferase
  source 1..1587: mol_type = other DNA
atgcaccatcatcatcatcatggcggtagcggcagccacggcattcgtaccatcgattcggacttcgggaagaaacagcagaaaaaaatggataaccacgatagttccgccacttatgaaatcaaatttcacgagtttgtgctgttcattctcgaagaaaaaatgggtgcgacgcgtcgtacttttctgacagatttagcccgcaagaaagggttccgcgtcgagaatgaactgaccgacgaagttacccacatcgtggcagaaaatctgtcacgctctgaagtattggcttggctgaaagaacacaagatggagaagaccaagcaattcgaactgctggatattagctggcttatcgaaagcatgaaagttggtaaaccggtggacaccaaggggaaataccagttggcggaatcgggtgagatgagtgcgaacccagatccgacagagggtcgtgaaaacgagctgcctcctactatgaagaccgtttctccgtatgcgtgtcaacgccgcaccaccctgaacaaccataatcaacgttttacggacgcactggaaattcttcgtgaaaattacgagttcaaacgcaacgatgatactgcgctggaatttcgtcgtgctatctccgtgctgaaaagccttccgtttgaggtacgtagcctgaaagacacggaaggattgccctggatcggtgatgaagtcaaagggattatggaagaaatcatcgaggtcgggaattcgcgtgaagtgcaggccgtgctcaatgatgagtggtatcaaagcttccaccgctttaagagtgtctttggagtgggggtgaagacagcagacaagtggtaccgtatgggtctgcgcaccctcgaggatgttcgttccagcaagaccctgaagttgaccccgatgcagaaagcaggtctgctgtattatgaagatcttgctcgcggcgttacgcgtgccgaagctgacgcgatttctctgctggttcaggatgcagtcgcaactttcgacccggatgcggtcgtggagattgtcggtggatttcgtcgtgggaaacctcagggtcacgacgttgatctgcttatcagttctccgggagctgagaaagagcaagaagaccagctcctgcagaaagtgaccaatctgtggaagaaacaagggttgttgctgtacggtcgtctggaatggacccagtgggaagatgggggtctgccatccggtaaggctgacgagggtgacgcgggtgcgaaatgctttctgatcctcaaactttatgatcatctggtgcgcaaaagcaaatgggaaatgccgacgggttcgaacatgggcgaggccaaaccgtggaaagcaattcgcgtagatctgctgcgttgcccctacggcggttttgcgtttgcgatgttgcagtggaccggaagccgcatgttccgtcgtgatctgcgttggtacgccactgacgagaagaacatgatgctggacaatcatgcgctgtatgacctgaccaagaaaatcttcctccctgctaaatcggaagaggaaattttcgcacatctggggcttgaatacctggaaccgttcgaacgtaacgca

SEQ ID NO: 2826 - protein, 529 aa, synthetic construct
  REGION 1..529: note = Variant of terminal deoxynucleotidyltransferase
MHHHHHHGGSGSHGIRTIDSDFGKKQQKKMDNHDSSATYEIKFHEFVLFILEEKMGATRRTFLTDLARKKGFRVENELTDEVTHIVAENLSRSEVLAWLKEHKMEKTKQFELLDISWLIESMKVGKPVDTKGKYQLAESGEMSANPDPTEGRENELPPTMKTVSPYACQRRTTLNNHNQRFTDALEILRENYEFKRNDDTALEFRRAISVLKSLPFEVRSLKDTEGLPWIGDEVKGIMEEIIEVGNSREVQAVLNDEWYQSFHRFKSVFGVGVKTADKWYRMGLRTLEDVRSSKTLKLTPMQKAGLLYYEDLARGVTRAEADAISLLVQDAVATFDPDAVVEIVGGFRRGKPQGHDVDLLISSPGAEKEQEDQLLQKVTNLWKKQGLLLYGRLEWTQWEDGGLPSGKADEGDAGAKCFLILKLYDHLVRKSKWEMPTGSNMGEAKPWKAIRVDLLRCPYGGFAFAMLQWTGSRMFRRDLRWYATDEKNMMLDNHALYDLTKKIFLPAKSEEEIFAHLGLEYLEPFERNA

SEQ ID NO: 2827 - DNA, 1587 bp, synthetic construct
  misc_feature 1..1587: note = Variant of terminal deoxynucleotidyltransferase
  source 1..1587: mol_type = other DNA
atgcaccatcatcatcatcatggcggtagcggcagccacggcattcgtaccatcgattcggacttcgggaagaaacagcagaaaaaaatggataaccacgatagttccgccacttatgaaatcaaatttcacgagtttgtgctgttcattctcgaagaaaaaatgggtgcgacgcgtcgtacttttctgacagatttagcccgcaagaaagggttccgcgtcgagaatgaactgaccgacgaagttacccacatcgtggcagaaaatctgtcacgctctgaagtattggcttggctgaaagaacacaagatggagaagaccaagcaattcgaactgctggatattagctggcttatcgaaagcatgaaagttggtaaaccggtggacaccaaggggaaataccagttggcggaatcgggtgagatgagtgcgaacccagatccgacagagggtcgtgaaaacgagctgcctcctactatgaagaccgtttctccgtatgcgtgtcaacgccgcaccaccctgaacaaccataatcaacgttttacggacgcactggaaattcttcgtgaaaattacgagttcaaacgcaacgatgatactgcgctggaatttcgtcgtgctatctccgtgctgaaaagccttccgtttgaggtacgtagcctgaaagacacggaaggattgccctggatcggtgatgaagtcaaagggattatggaagaaatcatcgaggtcgggaattcgcgtgaagtgcaggccgtgctcaatgatgagtggtatcaaagcttccaccgctttaagagtgtctttggagtgggggtgaagacagcagacaagtggtaccgtatgggtctgcgcaccctcgaggatgttcgttccagcaagaccctgaagttgaccccgatgcagaaagtaggtctgctgtattatgaagatcttgctcgcggcgttacgcgtgccgaagctgacgcgatttctctgctggttcaggatgcagtcgcaactttcgacccggatgcgctggtggagattgtcggtggatttcgtcgtgggaaacctcagggtcacgacgttgatctgcttatcagttctccgggagctgagaaagagcaagaagaccagctcctgcagaaagtgaccaatctgtggaagaaacaagggttgttgctgtacggtcgtctggaatggacccagtgggaagatgggggtccgccatccggtaaggctgacgagggtgacgcgggtgcgaaatgctttctgatcctcaaactttatgatcataaagtggacaaaagcaaatgggaaatgccgacgggttcgaacatgggcgaggccaaaccgtggaaagcaattcgcgtagatctgctgcgttgcccctacggcggttttgcgtttgcgatgttgcagtggaccggaagccgcatgttccgtcgtgatctgcgttggtacgccactgacgagaagaacatgatgctggacaatcatgcgctgtatgacctgaccaagaaaatcttcctccctgctaaatcggaagaggaaattttcgcacatctggggcttgaatacctggaaccgttcgaacgtaacgca

SEQ ID NO: 2828 - protein, 529 aa, synthetic construct
  REGION 1..529: note = Variant of terminal deoxynucleotidyltransferase
MHHHHHHGGSGSHGIRTIDSDFGKKQQKKMDNHDSSATYEIKFHEFVLFILEEKMGATRRTFLTDLARKKGFRVENELTDEVTHIVAENLSRSEVLAWLKEHKMEKTKQFELLDISWLIESMKVGKPVDTKGKYQLAESGEMSANPDPTEGRENELPPTMKTVSPYACQRRTTLNNHNQRFTDALEILRENYEFKRNDDTALEFRRAISVLKSLPFEVRSLKDTEGLPWIGDEVKGIMEEIIEVGNSREVQAVLNDEWYQSFHRFKSVFGVGVKTADKWYRMGLRTLEDVRSSKTLKLTPMQKVGLLYYEDLARGVTRAEADAISLLVQDAVATFDPDALVEIVGGFRRGKPQGHDVDLLISSPGAEKEQEDQLLQKVTNLWKKQGLLLYGRLEWTQWEDGGPPSGKADEGDAGAKCFLILKLYDHKVDKSKWEMPTGSNMGEAKPWKAIRVDLLRCPYGGFAFAMLQWTGSRMFRRDLRWYATDEKNMMLDNHALYDLTKKIFLPAKSEEEIFAHLGLEYLEPFERNA

SEQ ID NO: 2829 - DNA, 1587 bp, synthetic construct
  misc_feature 1..1587: note = Variant of terminal deoxynucleotidyltransferase
  source 1..1587: mol_type = other DNA
atgcaccatcatcatcatcatggcggtagcggcagccacggcattcgtaccatcgattcggacttcgggaagaaacagcagaaaaaaatggataaccacgatagttccgccacttatgaaatcaaatttcacgagtttgtgctgttcattctcgaagaaaaaatgggtgcgacgcgtcgtacttttctgacagatttagcccgcaagaaagggttccgcgtcgagaatgaactgaccgacgaagttacccacatcgtggcagaaaatctgtcacgctctgaagtattggcttggctgaaagaacacaagatggagaagaccaagcaattcgaactgctggatattagctggcttatcgaaagcatgaaagttggtaaaccggtggacaccaaggggaaataccagttggcggaatcgggtgagatgagtgcgaacccagatccgacagagggtcgtgaaaacgagctgcctcctactatgaagaccgtttctccgtatgcgtgtatgcgccgcaccaccctgaacaaccataatcaacgttttacggacgcactggaaattcttcgtgaaaattacgagttcaaacgcaacgatgatactgcgctggaatttcgtcgtgctatctccgtgctgaaaagccttccgtttgaggtacgtagcctgaaagacacggaaggattgccctggatcggtgatgaagtcaaagggattatggaagaaatcatcgaggtcgggaattcgcgtgaagtgcaggccgtgctcaatgatgagtggtatcaaagcttccaccgctttaagagtgtctttggagtgggggtgaagacagcagacaagtggtaccgtatgggtctgcgcaccctcgaggatgttcgttccagcaagaccctgaagttgaccccgatgcagaaagtaggtctgctgtattatgaagatcttgctcgcggcgttacgcgtgccgaagctgacgcgatttctctgctggttcaggatgcagtcgcaactttcgacccggatgcgatcgtggagattgtcggtggatttcgtcgtgggaaacctcagggtcacgacgttgatctgcttatcagttctccgggagctgagaaagagcaagaagaccagctcctgcagaaagtgaccaatctgtggaagaaacaagggttgttgctgtacggtcgtctggaatggacccagtgggaagatgggaagctgccatccggtaaggctgacgagggtgacgcgggtgcgaaatgctttctgatcctcaaactttatgatcataaggtgcgcaaaagcaaatgggaaatgccgacgggttcgaacatgggcgaggccaaaccgtggaaagcaattcgcgtagatctgctgcgttgcccctacggcggttttgcgtttgcgatgttgcagtggaccggaagccgcatgttccgtcgtgatctgcgttggtacgccactgacgagaagaacatgatgctggacaatcatgcgctgtatgacctgaccaagaaaatcttcctccctgctaaatcggaagaggaaattttcgcacatctggggcttgaatacctggaaccgttcgaacgtaacgca

SEQ ID NO: 2830 - protein, 529 aa, synthetic construct
  REGION 1..529: note = Variant of terminal deoxynucleotidyltransferase
MHHHHHHGGSGSHGIRTIDSDFGKKQQKKMDNHDSSATYEIKFHEFVLFILEEKMGATRRTFLTDLARKKGFRVENELTDEVTHIVAENLSRSEVLAWLKEHKMEKTKQFELLDISWLIESMKVGKPVDTKGKYQLAESGEMSANPDPTEGRENELPPTMKTVSPYACMRRTTLNNHNQRFTDALEILRENYEFKRNDDTALEFRRAISVLKSLPFEVRSLKDTEGLPWIGDEVKGIMEEIIEVGNSREVQAVLNDEWYQSFHRFKSVFGVGVKTADKWYRMGLRTLEDVRSSKTLKLTPMQKVGLLYYEDLARGVTRAEADAISLLVQDAVATFDPDAIVEIVGGFRRGKPQGHDVDLLISSPGAEKEQEDQLLQKVTNLWKKQGLLLYGRLEWTQWEDGKLPSGKADEGDAGAKCFLILKLYDHKVRKSKWEMPTGSNMGEAKPWKAIRVDLLRCPYGGFAFAMLQWTGSRMFRRDLRWYATDEKNMMLDNHALYDLTKKIFLPAKSEEEIFAHLGLEYLEPFERNA

SEQ ID NO: 2831 - DNA, 1587 bp, synthetic construct
  misc_feature 1..1587: note = Variant of terminal deoxynucleotidyltransferase
  source 1..1587: mol_type = other DNA
atgcaccatcatcatcatcatggcggtagcggcagccacggcattcgtaccatcgattcggacttcgggaagaaacagcagaaaaaaatggataaccacgatagttccgccacttatgaaatcaaatttcacgagtttgtgctgttcattctcgaagaaaaaatgggtgcgacgcgtcgtacttttctgacagatttagcccgcaagaaagggttccgcgtcgagaatgaactgaccgacgaagttacccacatcgtggcagaaaatctgtcacgctctgaagtattggcttggctgaaagaacacaagatggagaagaccaagcaattcgaactgctggatattagctggcttatcgaaagcatgaaagttggtaaaccggtggacaccaaggggaaataccagttggcggaatcgggtgagatgagtgcgaacccagatccgacagagggtcgtgaaaacgagctgcctcctactatgaagaccgtttctccgtatgcgtgtatgcgccgcaccaccctgaacaaccataatcaacgttttacggacgcactggaaattcttcgtgaaaattacgagttcaaacgcaacgatgatactgcgctggaatttcgtcgtgctatctccgtgctgaaaagccttccgtttgaggtacgtagcctgaaagacacggaaggattgccctggatcggtgatgaagtcaaagggattatggaagaaatcatcgaggtcgggaattcgcgtgaagtgcaggccgtgctcaatgatgagtggtatcaaagcttccaccgctttaagagtgtctttggagtgggggtgaagacagcagacaagtggtaccgtatgggtctgcgcaccctcgaggatgttcgttccagcaagaccctgaagttgaccccgatgcagaaagtaggtctgctgtattatgaagatcttgctcgcggcgttacgcgtgccgaagctgacgcgatttctctgctggttcaggatgcagtcgcaactttcgacccggatgcggtcgtggagattgtcggtggatttcgtcgtgggaaacctcagggtcacgacgttgatctgcttatcagttctccgggagctgagaaagagcaagaagaccagctcctgcagaaagtgaccaatctgtggaagaaacaagggttgttgctgtacggtcgtctggaatggacccagtgggaagatgggggtctgccatccggtaaggctgacgagggtgacgcgggtgcgaaatgctttctgatcctcaaactttatgatcatctggtggacaaaagcaaatgggaaatgccgacgggttcgaacatgggcgaggccaaaccgtggaaagcaattcgcgtagatctgctgcgttgcccctacggcggttttgcgtttgcgatgttgcagtggaccggaagccgcatgttccgtcgtgatctgcgttggtacgccactgacgagaagaacatgatgctggacaatcatgcgctgtatgacctgaccaagaaaatctttctcaaagctaaatcggaagaggaaattttcgcacatctggggcttgaatacctggaaccgttcgaacgtaacgca

SEQ ID NO: 2832 - protein, 529 aa, synthetic construct
  REGION 1..529: note = Variant of terminal deoxynucleotidyltransferase
MHHHHHHGGSGSHGIRTIDSDFGKKQQKKMDNHDSSATYEIKFHEFVLFILEEKMGATRRTFLTDLARKKGFRVENELTDEVTHIVAENLSRSEVLAWLKEHKMEKTKQFELLDISWLIESMKVGKPVDTKGKYQLAESGEMSANPDPTEGRENELPPTMKTVSPYACMRRTTLNNHNQRFTDALEILRENYEFKRNDDTALEFRRAISVLKSLPFEVRSLKDTEGLPWIGDEVKGIMEEIIEVGNSREVQAVLNDEWYQSFHRFKSVFGVGVKTADKWYRMGLRTLEDVRSSKTLKLTPMQKVGLLYYEDLARGVTRAEADAISLLVQDAVATFDPDAVVEIVGGFRRGKPQGHDVDLLISSPGAEKEQEDQLLQKVTNLWKKQGLLLYGRLEWTQWEDGGLPSGKADEGDAGAKCFLILKLYDHLVDKSKWEMPTGSNMGEAKPWKAIRVDLLRCPYGGFAFAMLQWTGSRMFRRDLRWYATDEKNMMLDNHALYDLTKKIFLKAKSEEEIFAHLGLEYLEPFERNA

SEQ ID NO: 2833 - DNA, 1587 bp, synthetic construct
  misc_feature 1..1587: note = Variant of terminal deoxynucleotidyltransferase
  source 1..1587: mol_type = other DNA
atgcaccatcatcatcatcatggcggtagcggcagccacggcattcgtaccatcgattcggacttcgggaagaaacagcagaaaaaaatggataaccacgatagttccgccacttatgaaatcaaatttcacgagtttgtgctgttcattctcgaagaaaaaatgggtgcgacgcgtcgtacttttctgacagatttagcccgcaagaaagggttccgcgtcgagaatgaactgaccgacgaagttacccacatcgtggcagaaaatctgtcacgctctgaagtattggcttggctgaaagaacacaagatggagaagaccaagcaattcgaactgctggatattagctggcttatcgaaagcatgaaagttggtaaaccggtggacaccaaggggaaataccagttggcggaatcgggtgagatgagtgcgaacccagatccgacagagggtcgtgaaaacgagctgcctcctactatgaagaccgtttctccgtatgcgtgtcaacgccgcaccaccctgaacaaccataatcaacgttttacggacgcactggaaattcttcgtgaaaattacgagttcaaacgcaacgatgatactgcgctggaatttcgtcgtgctatctccgtgctgaaaagccttccgtttgaggtacgtagcctgaaagacacggaaggattgccctggatcggtgatgaagtcaaagggattatggaagaaatcatcgaggtcgggaattcgcgtgaagtgcaggccgtgctcaatgatgagtggtatcaaagcttccaccgctttaagagtgtctttggagtgggggtgaagacagcagacaagtggtaccgtatgggtctgcgcaccctcgaggatgttcgttccagcaagaccctgaagttgaccccgatgcagaaagcaggtctgctgtattatgaagatcttgctcgcggcgttacgcgtgccgaagctgacgcgatttctctgctggttcaggatgcagtcgcaactttcgacccggatgcgctggtggagattgtcggtggatttcgtcgtgggaaacctcagggtcacgacgttgatctgcttatcagttctccgggagctgagaaagagcaagaagaccagctcctgcagaaagtgaccaatctgtggaagaaacaagggttgttgctgtacggtcgtctggaatggacccagtgggaagatgggggtgcgccatccggtaaggctgacgagggtgacgcgggtgcgaaatgctttctgatcctcaaactttatgatcatatggtggacaaaagcaaatgggaaatgccgacgggttcgaacatgggcgaggccaaaccgtggaaagcaattcgcgtagatctgctgcgttgcccctacggcggttttgcgtttgcgatgttgcagtggaccggaagccgcatgttccgtcgtgatctgcgttggtacgccactgacgagaagaacatgatgctggacaatcatgcgctgtatgacctgaccaagaaaatcaaactccctgctaaatcggaagaggaaattttcgcacatctggggcttgaatacctggaaccgttcgaacgtaacgca

SEQ ID NO: 2834 - protein, 529 aa, synthetic construct
  REGION 1..529: note = Variant of terminal deoxynucleotidyltransferase
MHHHHHHGGSGSHGIRTIDSDFGKKQQKKMDNHDSSATYEIKFHEFVLFILEEKMGATRRTFLTDLARKKGFRVENELTDEVTHIVAENLSRSEVLAWLKEHKMEKTKQFELLDISWLIESMKVGKPVDTKGKYQLAESGEMSANPDPTEGRENELPPTMKTVSPYACQRRTTLNNHNQRFTDALEILRENYEFKRNDDTALEFRRAISVLKSLPFEVRSLKDTEGLPWIGDEVKGIMEEIIEVGNSREVQAVLNDEWYQSFHRFKSVFGVGVKTADKWYRMGLRTLEDVRSSKTLKLTPMQKAGLLYYEDLARGVTRAEADAISLLVQDAVATFDPDALVEIVGGFRRGKPQGHDVDLLISSPGAEKEQEDQLLQKVTNLWKKQGLLLYGRLEWTQWEDGGAPSGKADEGDAGAKCFLILKLYDHMVDKSKWEMPTGSNMGEAKPWKAIRVDLLRCPYGGFAFAMLQWTGSRMFRRDLRWYATDEKNMMLDNHALYDLTKKIKLPAKSEEEIFAHLGLEYLEPFERNA

SEQ ID NO: 2835 - DNA, 1587 bp, synthetic construct
  misc_feature 1..1587: note = Variant of terminal deoxynucleotidyltransferase
  source 1..1587: mol_type = other DNA
atgcaccatcatcatcatcatggcggtagcggcagccacggcattcgtaccatcgattcggacttcgggaagaaacagcagaaaaaaatggataaccacgatagttccgccacttatgaaatcaaatttcacgagtttgtgctgttcattctcgaagaaaaaatgggtgcgacgcgtcgtacttttctgacagatttagcccgcaagaaagggttccgcgtcgagaatgaactgaccgacgaagttacccacatcgtggcagaaaatctgtcacgctctgaagtattggcttggctgaaagaacacaagatggagaagaccaagcaattcgaactgctggatattagctggcttatcgaaagcatgaaagttggtaaaccggtggacaccaaggggaaataccagttggcggaatcgggtgagatgagtgcgaacccagatccgacagagggtcgtgaaaacgagctgcctcctactatgaagaccgtttctccgtatgcgtgtcaacgccgcaccaccctgaacaaccataatcaacgttttacggacgcactggaaattcttcgtgaaaattacgagttcaaacgcaacgatgatactgcgctggaatttcgtcgtgctatctccgtgctgaaaagccttccgtttgaggtacgtagcctgaaagacacggaaggattgccctggatcggtgatgaagtcaaagggattatggaagaaatcatcgaggtcgggaattcgcgtgaagtgcaggccgtgctcaatgatgagtggtatcaaagcttccaccgctttaagagtgtctttggagtgggggtgaagacagcagacaagtggtaccgtatgggtctgcgcaccctcgaggatgttcgttccagcaagaccctgaagttgaccccgatgcagaaagtaggtctgctgtattatgaagatcttgctcgcggcgttacgcgtgccgaagctgacgcgatttctctgctggttcaggatgcagtcgcaactttcgacccggatgcgctggtggagattgtcggtggatttcgtcgtgggaaacctcagggtcacgacgttgatctgcttatcagttctccgggagctgagaaagagcaagaagaccagctcctgcagaaagtgaccaatctgtggaagaaacaagggttgttgctgtacggtcgtctggaatggacccagtgggaagatgggaagctgccatccggtaaggctgacgagggtgacgcgggtgcgaaatgctttctgatcctcaaactttatgatcataaagtggacaaaagcaaatgggaaatgccgacgggttcgaacatgggcgaggccaaaccgtggaaagcaattcgcgtagatctgctgcgttgcccctacggcggttttgcgtttgcgatgttgcagtggaccggaagccgcatgttccgtcgtgatctgcgttggtacgccactgacgagaagaacatgatgctggacaatcatgcgctgtatgacctgaccaagaaaatcaaactccctgctaaatcggaagaggaaattttcgcacatctggggcttgaatacctggaaccgttcgaacgtaacgca

SEQ ID NO: 2836 - protein, 529 aa, synthetic construct
  REGION 1..529: note = Variant of terminal deoxynucleotidyltransferase
MHHHHHHGGSGSHGIRTIDSDFGKKQQKKMDNHDSSATYEIKFHEFVLFILEEKMGATRRTFLTDLARKKGFRVENELTDEVTHIVAENLSRSEVLAWLKEHKMEKTKQFELLDISWLIESMKVGKPVDTKGKYQLAESGEMSANPDPTEGRENELPPTMKTVSPYACQRRTTLNNHNQRFTDALEILRENYEFKRNDDTALEFRRAISVLKSLPFEVRSLKDTEGLPWIGDEVKGIMEEIIEVGNSREVQAVLNDEWYQSFHRFKSVFGVGVKTADKWYRMGLRTLEDVRSSKTLKLTPMQKVGLLYYEDLARGVTRAEADAISLLVQDAVATFDPDALVEIVGGFRRGKPQGHDVDLLISSPGAEKEQEDQLLQKVTNLWKKQGLLLYGRLEWTQWEDGKLPSGKADEGDAGAKCFLILKLYDHKVDKSKWEMPTGSNMGEAKPWKAIRVDLLRCPYGGFAFAMLQWTGSRMFRRDLRWYATDEKNMMLDNHALYDLTKKIKLPAKSEEEIFAHLGLEYLEPFERNA

SEQ ID NO: 2837 - DNA, 1587 bp, synthetic construct
  misc_feature 1..1587: note = Variant of terminal deoxynucleotidyltransferase
  source 1..1587: mol_type = other DNA
atgcaccatcatcatcatcatggcggtagcggcagccacggcattcgtaccatcgattcggacttcgggaagaaacagcagaaaaaaatggataaccacgatagttccgccacttatgaaatcaaatttcacgagtttgtgctgttcattctcgaagaaaaaatgggtgcgacgcgtcgtacttttctgacagatttagcccgcaagaaagggttccgcgtcgagaatgaactgaccgacgaagttacccacatcgtggcagaaaatctgtcacgctctgaagtattggcttggctgaaagaacacaagatggagaagaccaagcaattcgaactgctggatattagctggcttatcgaaagcatgaaagttggtaaaccggtggacaccaaggggaaataccagttggcggaatcgggtgagatgagtgcgaacccagatccgacagagggtcgtgaaaacgagctgcctcctactatgaagaccgtttctccgtatgcgtgtcaacgccgcaccaccctgaacaaccataatcaacgttttacggacgcactggaaattcttcgtgaaaattacgagttcaaacgcaacgatgatactgcgctggaatttcgtcgtgctatctccgtgctgaaaagccttccgtttgaggtacgtagcctgaaagacacggaaggattgccctggatcggtgatgaagtcaaagggattatggaagaaatcatcgaggtcgggaattcgcgtgaagtgcaggccgtgctcaatgatgagtggtatcaaagcttccaccgctttaagagtgtctttggagtgggggtgaagacagcagacaagtggtaccgtatgggtctgcgcaccctcgaggatgttcgttccagcaagaccctgaagttgaccccgatgcagaaagtaggtctgctgtattatgaagatcttgctcgcggcgttacgcgtgccgaagctgacgcgatttctctgctggttcaggatgcagtcgcaactttcgacccggatgcgatcgtggagattgtcggtggatttcgtcgtgggaaacctcagggtcacgacgttgatctgcttatcagttctccgggagctgagaaagagcaagaagaccagctcctgcagaaagtgaccaatctgtggaagaaacaagggttgttgctgtacggtcgtctggaatggacccagtgggaagatgggaagctgccatccggtaaggctgacgagggtgacgcgggtgcgaaatgctttctgatcctcaaactttatgatcatatggtggacaaaagcaaatgggaaatgccgacgggttcgaacatgggcgaggccaaaccgtggaaagcaattcgcgtagatctgctgcgttgcccctacggcggttttgcgtttgcgatgttgcagtggaccggaagccgcatgttccgtcgtgatctgcgttggtacgccactgacgagaagaacatgatgctggacaatcatgcgctgtatgacctgaccaagaaaatctttctcaaagctaaatcggaagaggaaattttcgcacatctggggcttgaatacctggaaccgttcgaacgtaacgca

SEQ ID NO: 2838 - protein, 529 aa, synthetic construct
  REGION 1..529: note = Variant of terminal deoxynucleotidyltransferase
MHHHHHHGGSGSHGIRTIDSDFGKKQQKKMDNHDSSATYEIKFHEFVLFILEEKMGATRRTFLTDLARKKGFRVENELTDEVTHIVAENLSRSEVLAWLKEHKMEKTKQFELLDISWLIESMKVGKPVDTKGKYQLAESGEMSANPDPTEGRENELPPTMKTVSPYACQRRTTLNNHNQRFTDALEILRENYEFKRNDDTALEFRRAISVLKSLPFEVRSLKDTEGLPWIGDEVKGIMEEIIEVGNSREVQAVLNDEWYQSFHRFKSVFGVGVKTADKWYRMGLRTLEDVRSSKTLKLTPMQKVGLLYYEDLARGVTRAEADAISLLVQDAVATFDPDAIVEIVGGFRRGKPQGHDVDLLISSPGAEKEQEDQLLQKVTNLWKKQGLLLYGRLEWTQWEDGKLPSGKADEGDAGAKCFLILKLYDHMVDKSKWEMPTGSNMGEAKPWKAIRVDLLRCPYGGFAFAMLQWTGSRMFRRDLRWYATDEKNMMLDNHALYDLTKKIFLKAKSEEEIFAHLGLEYLEPFERNA

SEQ ID NO: 2839 - DNA, 1587 bp, synthetic construct
  misc_feature 1..1587: note = Variant of terminal deoxynucleotidyltransferase
  source 1..1587: mol_type = other DNA
atgcaccatcatcatcatcatggcggtagcggcagccacggcattcgtaccatcgattcggacttcgggaagaaacagcagaaaaaaatggataaccacgatagttccgccacttatgaaatcaaatttcacgagtttgtgctgttcattctcgaagaaaaaatgggtgcgacgcgtcgtacttttctgacagatttagcccgcaagaaagggttccgcgtcgagaatgaactgaccgacgaagttacccacatcgtggcagaaaatctgtcacgctctgaagtattggcttggctgaaagaacacaagatggagaagaccaagcaattcgaactgctggatattagctggcttatcgaaagcatgaaagttggtaaaccggtggacaccaaggggaaataccagttggcggaatcgggtgagatgagtgcgaacccagatccgacagagggtcgtgaaaacgagctgcctcctactatgaagaccgtttctccgtatgcgtgtcaacgccgcaccaccctgaacaaccataatcaacgttttacggacgcactggaaattcttcgtgaaaattacgagttcaaacgcaacgatgatactgcgctggaatttcgtcgtgctatctccgtgctgaaaagccttccgtttgaggtacgtagcctgaaagacacggaaggattgccctggatcggtgatgaagtcaaagggattatggaagaaatcatcgaggtcgggaattcgcgtgaagtgcaggccgtgctcaatgatgagtggtatcaaagcttccaccgctttaagagtgtctttggagtgggggtgaagacagcagacaagtggtaccgtatgggtctgcgcaccctcgaggatgttcgttccagcaagaccctgaagttgaccccgatgcagaaagcaggtctgctgtattatgaagatcttgctcgcggcgttacgcgtgccgaagctgacgcgatttctctgctggttcaggatgcagtcgcaactttcgacccggatgcgatcgtggagattgtcggtggatttcgtcgtgggaaacctcagggtcacgacgttgatctgcttatcagttctccgggagctgagaaagagcaagaagaccagctcctgcagaaagtgaccaatctgtggaagaaacaagggttgttgctgtacggtcgtctggaatggacccagtgggaagatgggggtctgccatccggtaaggctgacgagggtgacgcgggtgcgaaatgctttctgatcctcaaactttatgatcataaggtgcgcaaaagcaaatgggaaatgccgacgggttcgaacatgggcgaggccaaaccgtggaaagcaattcgcgtagatctgctgcgttgcccctacggcggttttgcgtttgcgatgttgcagtggaccggaagccgcatgttccgtcgtgatctgcgttggtacgccactgacgagaagaacatgatgctggacaatcatgcgctgtatgacctgaccaagaaaatcaaactccctgctaaatcggaagaggaaattttcgcacatctggggcttgaatacctggaaccgttcgaacgtaacgca

SEQ ID NO: 2840 - protein, 529 aa, synthetic construct
  REGION 1..529: note = Variant of terminal deoxynucleotidyltransferase
MHHHHHHGGSGSHGIRTIDSDFGKKQQKKMDNHDSSATYEIKFHEFVLFILEEKMGATRRTFLTDLARKKGFRVENELTDEVTHIVAENLSRSEVLAWLKEHKMEKTKQFELLDISWLIESMKVGKPVDTKGKYQLAESGEMSANPDPTEGRENELPPTMKTVSPYACQRRTTLNNHNQRFTDALEILRENYEFKRNDDTALEFRRAISVLKSLPFEVRSLKDTEGLPWIGDEVKGIMEEIIEVGNSREVQAVLNDEWYQSFHRFKSVFGVGVKTADKWYRMGLRTLEDVRSSKTLKLTPMQKAGLLYYEDLARGVTRAEADAISLLVQDAVATFDPDAIVEIVGGFRRGKPQGHDVDLLISSPGAEKEQEDQLLQKVTNLWKKQGLLLYGRLEWTQWEDGGLPSGKADEGDAGAKCFLILKLYDHKVRKSKWEMPTGSNMGEAKPWKAIRVDLLRCPYGGFAFAMLQWTGSRMFRRDLRWYATDEKNMMLDNHALYDLTKKIKLPAKSEEEIFAHLGLEYLEPFERNA

SEQ ID NO: 2841 - DNA, 1587 bp, synthetic construct
  misc_feature 1..1587: note = Variant of terminal deoxynucleotidyltransferase
  source 1..1587: mol_type = other DNA
atgcaccatcatcatcatcatggcggtagcggcagccacggcattcgtaccatcgattcggacttcgggaagaaacagcagaaaaaaatggataaccacgatagttccgccacttatgaaatcaaatttcacgagtttgtgctgttcattctcgaagaaaaaatgggtgcgacgcgtcgtacttttctgacagatttagcccgcaagaaagggttccgcgtcgagaatgaactgaccgacgaagttacccacatcgtggcagaaaatctgtcacgctctgaagtattggcttggctgaaagaacacaagatggagaagaccaagcaattcgaactgctggatattagctggcttatcgaaagcatgaaagttggtaaaccggtggacaccaaggggaaataccagttggcggaatcgggtgagatgagtgcgaacccagatccgacagagggtcgtgaaaacgagctgcctcctactatgaagaccgtttctccgtatgcgtgtatgcgccgcaccaccctgaacaaccataatcaacgttttacggacgcactggaaattcttcgtgaaaattacgagttcaaacgcaacgatgatactgcgctggaatttcgtcgtgctatctccgtgctgaaaagccttccgtttgaggtacgtagcctgaaagacacggaaggattgccctggatcggtgatgaagtcaaagggattatggaagaaatcatcgaggtcgggaattcgcgtgaagtgcaggccgtgctcaatgatgagtggtatcaaagcttccaccgctttaagagtgtctttggagtgggggtgaagacagcagacaagtggtaccgtatgggtctgcgcaccctcgaggatgttcgttccagcaagaccctgaagttgaccccgatgcagaaagcaggtctgctgtattatgaagatcttgctcgcggcgttacgcgtgccgaagctgacgcgatttctctgctggttcaggatgcagtcgcaactttcgacccggatgcgctggtggagattgtcggtggatttcgtcgtgggaaacctcagggtcacgacgttgatctgcttatcagttctccgggagctgagaaagagcaagaagaccagctcctgcagaaagtgaccaatctgtggaagaaacaagggttgttgctgtacggtcgtctggaatggacccagtgggaagatgggaaggcgccatccggtaaggctgacgagggtgacgcgggtgcgaaatgctttctgatcctcaaactttatgatcatctggtggacaaaagcaaatgggaaatgccgacgggttcgaacatgggcgaggccaaaccgtggaaagcaattcgcgtagatctgctgcgttgcccctacggcggttttgcgtttgcgatgttgcagtggaccggaagccgcatgttccgtcgtgatctgcgttggtacgccactgacgagaagaacatgatgctggacaatcatgcgctgtatgacctgaccaagaaaatcttcctccctgctaaatcggaagaggaaattttcgcacatctggggcttgaatacctggaaccgttcgaacgtaacgca

SEQ ID NO: 2842 - protein, 529 aa, synthetic construct
  REGION 1..529: note = Variant of terminal deoxynucleotidyltransferase
MHHHHHHGGSGSHGIRTIDSDFGKKQQKKMDNHDSSATYEIKFHEFVLFILEEKMGATRRTFLTDLARKKGFRVENELTDEVTHIVAENLSRSEVLAWLKEHKMEKTKQFELLDISWLIESMKVGKPVDTKGKYQLAESGEMSANPDPTEGRENELPPTMKTVSPYACMRRTTLNNHNQRFTDALEILRENYEFKRNDDTALEFRRAISVLKSLPFEVRSLKDTEGLPWIGDEVKGIMEEIIEVGNSREVQAVLNDEWYQSFHRFKSVFGVGVKTADKWYRMGLRTLEDVRSSKTLKLTPMQKAGLLYYEDLARGVTRAEADAISLLVQDAVATFDPDALVEIVGGFRRGKPQGHDVDLLISSPGAEKEQEDQLLQKVTNLWKKQGLLLYGRLEWTQWEDGKAPSGKADEGDAGAKCFLILKLYDHLVDKSKWEMPTGSNMGEAKPWKAIRVDLLRCPYGGFAFAMLQWTGSRMFRRDLRWYATDEKNMMLDNHALYDLTKKIFLPAKSEEEIFAHLGLEYLEPFERNA

SEQ ID NO: 2843 - DNA, 1587 bp, synthetic construct
  misc_feature 1..1587: note = Variant of terminal deoxynucleotidyltransferase
  source 1..1587: mol_type = other DNA
atgcaccatcatcatcatcatggcggtagcggcagccacggcattcgtaccatcgattcggacttcgggaagaaacagcagaaaaaaatggataaccacgatagttccgccacttatgaaatcaaatttcacgagtttgtgctgttcattctcgaagaaaaaatgggtgcgacgcgtcgtacttttctgacagatttagcccgcaagaaagggttccgcgtcgagaatgaactgaccgacgaagttacccacatcgtggcagaaaatctgtcacgctctgaagtattggcttggctgaaagaacacaagatggagaagaccaagcaattcgaactgctggatattagctggcttatcgaaagcatgaaagttggtaaaccggtggacaccaaggggaaataccagttggcggaatcgggtgagatgagtgcgaacccagatccgacagagggtcgtgaaaacgagctgcctcctactatgaagaccgtttctccgtatgcgtgtatgcgccgcaccaccctgaacaaccataatcaacgttttacggacgcactggaaattcttcgtgaaaattacgagttcaaacgcaacgatgatactgcgctggaatttcgtcgtgctatctccgtgctgaaaagccttccgtttgaggtacgtagcctgaaagacacggaaggattgccctggatcggtgatgaagtcaaagggattatggaagaaatcatcgaggtcgggaattcgcgtgaagtgcaggccgtgctcaatgatgagtggtatcaaagcttccaccgctttaagagtgtctttggagtgggggtgaagacagcagacaagtggtaccgtatgggtctgcgcaccctcgaggatgttcgttccagcaagaccctgaagttgaccccgatgcagaaagtaggtctgctgtattatgaagatcttgctcgcggcgttacgcgtgccgaagctgacgcgatttctctgctggttcaggatgcagtcgcaactttcgacccggatgcgctggtggagattgtcggtggatttcgtcgtgggaaacctcagggtcacgacgttgatctgcttatcagttctccgggagctgagaaagagcaagaagaccagctcctgcagaaagtgaccaatctgtggaagaaacaagggttgttgctgtacggtcgtctggaatggacccagtgggaagatgggaagctgccatccggtaaggctgacgagggtgacgcgggtgcgaaatgctttctgatcctcaaactttatgatcatatggtggacaaaagcaaatgggaaatgccgacgggttcgaacatgggcgaggccaaaccgtggaaagcaattcgcgtagatctgctgcgttgcccctacggcggttttgcgtttgcgatgttgcagtggaccggaagccgcatgttccgtcgtgatctgcgttggtacgccactgacgagaagaacatgatgctggacaatcatgcgctgtatgacctgaccaagaaaatcaaactccctgctaaatcggaagaggaaattttcgcacatctggggcttgaatacctggaaccgttcgaacgtaacgca

SEQ ID NO: 2844 - protein, 529 aa, synthetic construct
  REGION 1..529: note = Variant of terminal deoxynucleotidyltransferase
MHHHHHHGGSGSHGIRTIDSDFGKKQQKKMDNHDSSATYEIKFHEFVLFILEEKMGATRRTFLTDLARKKGFRVENELTDEVTHIVAENLSRSEVLAWLKEHKMEKTKQFELLDISWLIESMKVGKPVDTKGKYQLAESGEMSANPDPTEGRENELPPTMKTVSPYACMRRTTLNNHNQRFTDALEILRENYEFKRNDDTALEFRRAISVLKSLPFEVRSLKDTEGLPWIGDEVKGIMEEIIEVGNSREVQAVLNDEWYQSFHRFKSVFGVGVKTADKWYRMGLRTLEDVRSSKTLKLTPMQKVGLLYYEDLARGVTRAEADAISLLVQDAVATFDPDALVEIVGGFRRGKPQGHDVDLLISSPGAEKEQEDQLLQKVTNLWKKQGLLLYGRLEWTQWEDGKLPSGKADEGDAGAKCFLILKLYDHMVDKSKWEMPTGSNMGEAKPWKAIRVDLLRCPYGGFAFAMLQWTGSRMFRRDLRWYATDEKNMMLDNHALYDLTKKIKLPAKSEEEIFAHLGLEYLEPFERNA

SEQ ID NO: 2845 - DNA, 1587 bp, synthetic construct
  misc_feature 1..1587: note = Variant of terminal deoxynucleotidyltransferase
  source 1..1587: mol_type = other DNA
atgcaccatcatcatcatcatggcggtagcggcagccacggcattcgtaccatcgattcggacttcgggaagaaacagcagaaaaaaatggataaccacgatagttccgccacttatgaaatcaaatttcacgagtttgtgctgttcattctcgaagaaaaaatgggtgcgacgcgtcgtacttttctgacagatttagcccgcaagaaagggttccgcgtcgagaatgaactgaccgacgaagttacccacatcgtggcagaaaatctgtcacgctctgaagtattggcttggctgaaagaacacaagatggagaagaccaagcaattcgaactgctggatattagctggcttatcgaaagcatgaaagttggtaaaccggtggacaccaaggggaaataccagttggcggaatcgggtgagatgagtgcgaacccagatccgacagagggtcgtgaaaacgagctgcctcctactatgaagaccgtttctccgtatgcgtgtcaacgccgcaccaccctgaacaaccataatcaacgttttacggacgcactggaaattcttcgtgaaaattacgagttcaaacgcaacgatgatactgcgctggaatttcgtcgtgctatctccgtgctgaaaagccttccgtttgaggtacgtagcctgaaagacacggaaggattgccctggatcggtgatgaagtcaaagggattatggaagaaatcatcgaggtcgggaattcgcgtgaagtgcaggccgtgctcaatgatgagtggtatcaaagcttccaccgctttaagagtgtctttggagtgggggtgaagacagcagacaagtggtaccgtatgggtctgcgcaccctcgaggatgttcgttccagcaagaccctgaagttgaccccgatgcagaaagtaggtctgctgtattatgaagatcttgctcgcggcgttacgcgtgccgaagctgacgcgatttctctgctggttcaggatgcagtcgcaactttcgacccggatgcgctggtggagattgtcggtggatttcgtcgtgggaaacctcagggtcacgacgttgatctgcttatcagttctccgggagctgagaaagagcaagaagaccagctcctgcagaaagtgaccaatctgtggaagaaacaagggttgttgctgtacggtcgtctggaatggacccagtgggaagatgggggttcgccatccggtaaggctgacgagggtgacgcgggtgcgaaatgctttctgatcctcaaactttatgatcataaagtggacaaaagcaaatgggaaatgccgacgggttcgaacatgggcgaggccaaaccgtggaaagcaattcgcgtagatctgctgcgttgcccctacggcggttttgcgtttgcgatgttgcagtggaccggaagccgcatgttccgtcgtgatctgcgttggtacgccactgacgagaagaacatgatgctggacaatcatgcgctgtatgacctgaccaagaaaatctttctcaaagctaaatcggaagaggaaattttcgcacatctggggcttgaatacctggaaccgttcgaacgtaacgca

SEQ ID NO: 2846 - protein, 529 aa, synthetic construct
  REGION 1..529: note = Variant of terminal deoxynucleotidyltransferase
MHHHHHHGGSGSHGIRTIDSDFGKKQQKKMDNHDSSATYEIKFHEFVLFILEEKMGATRRTFLTDLARKKGFRVENELTDEVTHIVAENLSRSEVLAWLKEHKMEKTKQFELLDISWLIESMKVGKPVDTKGKYQLAESGEMSANPDPTEGRENELPPTMKTVSPYACQRRTTLNNHNQRFTDALEILRENYEFKRNDDTALEFRRAISVLKSLPFEVRSLKDTEGLPWIGDEVKGIMEEIIEVGNSREVQAVLNDEWYQSFHRFKSVFGVGVKTADKWYRMGLRTLEDVRSSKTLKLTPMQKVGLLYYEDLARGVTRAEADAISLLVQDAVATFDPDALVEIVGGFRRGKPQGHDVDLLISSPGAEKEQEDQLLQKVTNLWKKQGLLLYGRLEWTQWEDGGSPSGKADEGDAGAKCFLILKLYDHKVDKSKWEMPTGSNMGEAKPWKAIRVDLLRCPYGGFAFAMLQWTGSRMFRRDLRWYATDEKNMMLDNHALYDLTKKIFLKAKSEEEIFAHLGLEYLEPFERNA

SEQ ID NO: 2847 - DNA, 1587 bp, synthetic construct
  misc_feature 1..1587: note = Variant of terminal deoxynucleotidyltransferase
  source 1..1587: mol_type = other DNA
atgcaccatcatcatcatcatggcggtagcggcagccacggcattcgtaccatcgattcggacttcgggaagaaacagcagaaaaaaatggataaccacgatagttccgccacttatgaaatcaaatttcacgagtttgtgctgttcattctcgaagaaaaaatgggtgcgacgcgtcgtacttttctgacagatttagcccgcaagaaagggttccgcgtcgagaatgaactgaccgacgaagttacccacatcgtggcagaaaatctgtcacgctctgaagtattggcttggctgaaagaacacaagatggagaagaccaagcaattcgaactgctggatattagctggcttatcgaaagcatgaaagttggtaaaccggtggacaccaaggggaaataccagttggcggaatcgggtgagatgagtgcgaacccagatccgacagagggtcgtgaaaacgagctgcctcctactatgaagaccgtttctccgtatgcgtgtcaacgccgcaccaccctgaacaaccataatcaacgttttacggacgcactggaaattcttcgtgaaaattacgagttcaaacgcaacgatgatactgcgctggaatttcgtcgtgctatctccgtgctgaaaagccttccgtttgaggtacgtagcctgaaagacacggaaggattgccctggatcggtgatgaagtcaaagggattatggaagaaatcatcgaggtcgggaattcgcgtgaagtgcaggccgtgctcaatgatgagtggtatcaaagcttccaccgctttaagagtgtctttggagtgggggtgaagacagcagacaagtggtaccgtatgggtctgcgcaccctcgaggatgttcgttccagcaagaccctgaagttgaccccgatgcagaaagtaggtctgctgtattatgaagatcttgctcgcggcgttacgcgtgccgaagctgacgcgatttctctgctggttcaggatgcagtcgcaactttcgacccggatgcgctggtggagattgtcggtggatttcgtcgtgggaaacctcagggtcacgacgttgatctgcttatcagttctccgggagctgagaaagagcaagaagaccagctcctgcagaaagtgaccaatctgtggaagaaacaagggttgttgctgtacggtcgtctggaatggacccagtgggaagatgggaagtcgccatccggtaaggctgacgagggtgacgcgggtgcgaaatgctttctgatcctcaaactttatgatcataaagtggacaaaagcaaatgggaaatgccgacgggttcgaacatgggcgaggccaaaccgtggaaagcaattcgcgtagatctgctgcgttgcccctacggcggttttgcgtttgcgatgttgcagtggaccggaagccgcatgttccgtcgtgatctgcgttggtacgccactgacgagaagaacatgatgctggacaatcatgcgctgtatgacctgaccaagaaaatcaaactcaaagctaaatcggaagaggaaattttcgcacatctggggcttgaatacctggaaccgttcgaacgtaacgca

SEQ ID NO: 2848 - protein, 529 aa, synthetic construct
  REGION 1..529: note = Variant of terminal deoxynucleotidyltransferase
MHHHHHHGGSGSHGIRTIDSDFGKKQQKKMDNHDSSATYEIKFHEFVLFILEEKMGATRRTFLTDLARKKGFRVENELTDEVTHIVAENLSRSEVLAWLKEHKMEKTKQFELLDISWLIESMKVGKPVDTKGKYQLAESGEMSANPDPTEGRENELPPTMKTVSPYACQRRTTLNNHNQRFTDALEILRENYEFKRNDDTALEFRRAISVLKSLPFEVRSLKDTEGLPWIGDEVKGIMEEIIEVGNSREVQAVLNDEWYQSFHRFKSVFGVGVKTADKWYRMGLRTLEDVRSSKTLKLTPMQKVGLLYYEDLARGVTRAEADAISLLVQDAVATFDPDALVEIVGGFRRGKPQGHDVDLLISSPGAEKEQEDQLLQKVTNLWKKQGLLLYGRLEWTQWEDGKSPSGKADEGDAGAKCFLILKLYDHKVDKSKWEMPTGSNMGEAKPWKAIRVDLLRCPYGGFAFAMLQWTGSRMFRRDLRWYATDEKNMMLDNHALYDLTKKIKLKAKSEEEIFAHLGLEYLEPFERNA

SEQ ID NO: 2849 - DNA, 1587 bp, synthetic construct
  misc_feature 1..1587: note = Variant of terminal deoxynucleotidyltransferase
  source 1..1587: mol_type = other DNA
atgcaccatcatcatcatcatggcggtagcggcagccacggcattcgtaccatcgattcggacttcgggaagaaacagcagaaaaaaatggataaccacgatagttccgccacttatgaaatcaaatttcacgagtttgtgctgttcattctcgaagaaaaaatgggtgcgacgcgtcgtacttttctgacagatttagcccgcaagaaagggttccgcgtcgagaatgaactgaccgacgaagttacccacatcgtggcagaaaatctgtcacgctctgaagtattggcttggctgaaagaacacaagatggagaagaccaagcaattcgaactgctggatattagctggcttatcgaaagcatgaaagttggtaaaccggtggacaccaaggggaaataccagttggcggaatcgggtgagatgagtgcgaacccagatccgacagagggtcgtgaaaacgagctgcctcctactatgaagaccgtttctccgtatgcgtgtcaacgccgcaccaccctgaacaaccataatcaacgttttacggacgcactggaaattcttcgtgaaaattacgagttcaaacgcaacgatgatactgcgctggaatttcgtcgtgctatctccgtgctgaaaagccttccgtttgaggtacgtagcctgaaagacacggaaggattgccctggatcggtgatgaagtcaaagggattatggaagaaatcatcgaggtcgggaattcgcgtgaagtgcaggccgtgctcaatgatgagtggtatcaaagcttccaccgctttaagagtgtctttggagtgggggtgaagacagcagacaagtggtaccgtatgggtctgcgcaccctcgaggatgttcgttccagcaagaccctgaagttgaccccgatgcagaaagtaggtctgctgtattatgaagatcttgctcgcggcgttacgcgtgccgaagctgacgcgatttctctgctggttcaggatgcagtcgcaactttcgacccggatgcgatcgtggagattgtcggtggatttcgtcgtgggaaacctcagggtcacgacgttgatctgcttatcagttctccgggagctgagaaagagcaagaagaccagctcctgcagaaagtgaccaatctgtggaagaaacaagggttgttgctgtacggtcgtctggaatggacccagtgggaagatgggggtctgccatccggtaaggctgacgagggtgacgcgggtgcgaaatgctttctgatcctcaaactttatgatcataaagtggacaaaagcaaatgggaaatgccgacgggttcgaacatgggcgaggccaaaccgtggaaagcaattcgcgtagatctgctgcgttgcccctacggcggttttgcgtttgcgatgttgcagtggaccggaagccgcatgttccgtcgtgatctgcgttggtacgccactgacgagaagaacatgatgctggacaatcatgcgctgtatgacctgaccaagaaaatcttcctcaaagctaaatcggaagaggaaattttcgcacatctggggcttgaatacctggaaccgttcgaacgtaacgca

SEQ ID NO: 2850 - protein, 529 aa, synthetic construct
  REGION 1..529: note = Variant of terminal deoxynucleotidyltransferase
MHHHHHHGGSGSHGIRTIDSDFGKKQQKKMDNHDSSATYEIKFHEFVLFILEEKMGATRRTFLTDLARKKGFRVENELTDEVTHIVAENLSRSEVLAWLKEHKMEKTKQFELLDISWLIESMKVGKPVDTKGKYQLAESGEMSANPDPTEGRENELPPTMKTVSPYACQRRTTLNNHNQRFTDALEILRENYEFKRNDDTALEFRRAISVLKSLPFEVRSLKDTEGLPWIGDEVKGIMEEIIEVGNSREVQAVLNDEWYQSFHRFKSVFGVGVKTADKWYRMGLRTLEDVRSSKTLKLTPMQKVGLLYYEDLARGVTRAEADAISLLVQDAVATFDPDAIVEIVGGFRRGKPQGHDVDLLISSPGAEKEQEDQLLQKVTNLWKKQGLLLYGRLEWTQWEDGGLPSGKADEGDAGAKCFLILKLYDHKVDKSKWEMPTGSNMGEAKPWKAIRVDLLRCPYGGFAFAMLQWTGSRMFRRDLRWYATDEKNMMLDNHALYDLTKKIFLKAKSEEEIFAHLGLEYLEPFERNA

SEQ ID NO: 2851 - DNA, 1587 bp, synthetic construct
  misc_feature 1..1587: note = Variant of terminal deoxynucleotidyltransferase
  source 1..1587: mol_type = other DNA
atgcaccatcatcatcatcatggcggtagcggcagccacggcattcgtaccatcgattcggacttcgggaagaaacagcagaaaaaaatggataaccacgatagttccgccacttatgaaatcaaatttcacgagtttgtgctgttcattctcgaagaaaaaatgggtgcgacgcgtcgtacttttctgacagatttagcccgcaagaaagggttccgcgtcgagaatgaactgaccgacgaagttacccacatcgtggcagaaaatctgtcacgctctgaagtattggcttggctgaaagaacacaagatggagaagaccaagcaattcgaactgctggatattagctggcttatcgaaagcatgaaagttggtaaaccggtggacaccaaggggaaataccagttggcggaatcgggtgagatgagtgcgaacccagatccgacagagggtcgtgaaaacgagctgcctcctactatgaagaccgtttctccgtatgcgtgtcaacgccgcaccaccctgaacaaccataatcaacgttttacggacgcactggaaattcttcgtgaaaattacgagttcaaacgcaacgatgatactgcgctggaatttcgtcgtgctatctccgtgctgaaaagccttccgtttgaggtacgtagcctgaaagacacggaaggattgccctggatcggtgatgaagtcaaagggattatggaagaaatcatcgaggtcgggaattcgcgtgaagtgcaggccgtgctcaatgatgagtggtatcaaagcttccaccgctttaagagtgtctttggagtgggggtgaagacagcagacaagtggtaccgtatgggtctgcgcaccctcgaggatgttcgttccagcaagaccctgaagttgaccccgatgcagaaagtaggtctgctgtattatgaagatcttgctcgcggcgttacgcgtgccgaagctgacgcgatttctctgctggttcaggatgcagtcgcaactttcgacccggatgcgctggtggagattgtcggtggatttcgtcgtgggaaacctcagggtcacgacgttgatctgcttatcagttctccgggagctgagaaagagcaagaagaccagctcctgcagaaagtgaccaatctgtggaagaaacaagggttgttgctgtacggtcgtctggaatggacccagtgggaagatgggggtgcgccatccggtaaggctgacgagggtgacgcgggtgcgaaatgctttctgatcctcaaactttatgatcataaggtgcgcaaaagcaaatgggaaatgccgacgggttcgaacatgggcgaggccaaaccgtggaaagcaattcgcgtagatctgctgcgttgcccctacggcggttttgcgtttgcgatgttgcagtggaccggaagccgcatgttccgtcgtgatctgcgttggtacgccactgacgagaagaacatgatgctggacaatcatgcgctgtatgacctgaccaagaaaatcttcctcaaagctaaatcggaagaggaaattttcgcacatctggggcttgaatacctggaaccgttcgaacgtaacgca

SEQ ID NO: 2852 - protein, 529 aa, synthetic construct
  REGION 1..529: note = Variant of terminal deoxynucleotidyltransferase
MHHHHHHGGSGSHGIRTIDSDFGKKQQKKMDNHDSSATYEIKFHEFVLFILEEKMGATRRTFLTDLARKKGFRVENELTDEVTHIVAENLSRSEVLAWLKEHKMEKTKQFELLDISWLIESMKVGKPVDTKGKYQLAESGEMSANPDPTEGRENELPPTMKTVSPYACQRRTTLNNHNQRFTDALEILRENYEFKRNDDTALEFRRAISVLKSLPFEVRSLKDTEGLPWIGDEVKGIMEEIIEVGNSREVQAVLNDEWYQSFHRFKSVFGVGVKTADKWYRMGLRTLEDVRSSKTLKLTPMQKVGLLYYEDLARGVTRAEADAISLLVQDAVATFDPDALVEIVGGFRRGKPQGHDVDLLISSPGAEKEQEDQLLQKVTNLWKKQGLLLYGRLEWTQWEDGGAPSGKADEGDAGAKCFLILKLYDHKVRKSKWEMPTGSNMGEAKPWKAIRVDLLRCPYGGFAFAMLQWTGSRMFRRDLRWYATDEKNMMLDNHALYDLTKKIFLKAKSEEEIFAHLGLEYLEPFERNA

SEQ ID NO: 2853 - DNA, 1587 bp, synthetic construct
  misc_feature 1..1587: note = Variant of terminal deoxynucleotidyltransferase
  source 1..1587: mol_type = other DNA
atgcaccatcatcatcatcatggcggtagcggcagccacggcattcgtaccatcgattcggacttcgggaagaaacagcagaaaaaaatggataaccacgatagttccgccacttatgaaatcaaatttcacgagtttgtgctgttcattctcgaagaaaaaatgggtgcgacgcgtcgtacttttctgacagatttagcccgcaagaaagggttccgcgtcgagaatgaactgaccgacgaagttacccacatcgtggcagaaaatctgtcacgctctgaagtattggcttggctgaaagaacacaagatggagaagaccaagcaattcgaactgctggatattagctggcttatcgaaagcatgaaagttggtaaaccggtggacaccaaggggaaataccagttggcggaatcgggtgagatgagtgcgaacccagatccgacagagggtcgtgaaaacgagctgcctcctactatgaagaccgtttctccgtatgcgtgtcaacgccgcaccaccctgaacaaccataatcaacgttttacggacgcactggaaattcttcgtgaaaattacgagttcaaacgcaacgatgatactgcgctggaatttcgtcgtgctatctccgtgctgaaaagccttccgtttgaggtacgtagcctgaaagacacggaaggattgccctggatcggtgatgaagtcaaagggattatggaagaaatcatcgaggtcgggaattcgcgtgaagtgcaggccgtgctcaatgatgagtggtatcaaagcttccaccgctttaagagtgtctttggagtgggggtgaagacagcagacaagtggtaccgtatgggtctgcgcaccctcgaggatgttcgttccagcaagaccctgaagttgaccccgatgcagaaagtaggtctgctgtattatgaagatcttgctcgcggcgttacgcgtgccgaagctgacgcgatttctctgctggttcaggatgcagtcgcaactttcgacccggatgcgctggtggagattgtcggtggatttcgtcgtgggaaacctcagggtcacgacgttgatctgcttatcagttctccgggagctgagaaagagcaagaagaccagctcctgcagaaagtgaccaatctgtggaagaaacaagggttgttgctgtacggtcgtctggaatggacccagtgggaagatgggggtccgccatccggtaaggctgacgagggtgacgcgggtgcgaaatgctttctgatcctcaaactttatgatcatatggtggacaaaagcaaatgggaaatgccgacgggttcgaacatgggcgaggccaaaccgtggaaagcaattcgcgtagatctgctgcgttgcccctacggcggttttgcgtttgcgatgttgcagtggaccggaagccgcatgttccgtcgtgatctgcgttggtacgccactgacgagaagaacatgatgctggacaatcatgcgctgtatgacctgaccaagaaaatcaaactcaaagctaaatcggaagaggaaattttcgcacatctggggcttgaatacctggaaccgttcgaacgtaacgca

SEQ ID NO: 2854 - protein, 529 aa, synthetic construct
  REGION 1..529: note = Variant of terminal deoxynucleotidyltransferase
MHHHHHHGGSGSHGIRTIDSDFGKKQQKKMDNHDSSATYEIKFHEFVLFILEEKMGATRRTFLTDLARKKGFRVENELTDEVTHIVAENLSRSEVLAWLKEHKMEKTKQFELLDISWLIESMKVGKPVDTKGKYQLAESGEMSANPDPTEGRENELPPTMKTVSPYACQRRTTLNNHNQRFTDALEILRENYEFKRNDDTALEFRRAISVLKSLPFEVRSLKDTEGLPWIGDEVKGIMEEIIEVGNSREVQAVLNDEWYQSFHRFKSVFGVGVKTADKWYRMGLRTLEDVRSSKTLKLTPMQKVGLLYYEDLARGVTRAEADAISLLVQDAVATFDPDALVEIVGGFRRGKPQGHDVDLLISSPGAEKEQEDQLLQKVTNLWKKQGLLLYGRLEWTQWEDGGPPSGKADEGDAGAKCFLILKLYDHMVDKSKWEMPTGSNMGEAKPWKAIRVDLLRCPYGGFAFAMLQWTGSRMFRRDLRWYATDEKNMMLDNHALYDLTKKIKLKAKSEEEIFAHLGLEYLEPFERNA

SEQ ID NO: 2855 - DNA, 1587 bp, synthetic construct
  misc_feature 1..1587: note = Variant of terminal deoxynucleotidyltransferase
  source 1..1587: mol_type = other DNA
atgcaccatcatcatcatcatggcggtagcggcagccacggcattcgtaccatcgattcggacttcgggaagaaacagcagaaaaaaatggataaccacgatagttccgccacttatgaaatcaaatttcacgagtttgtgctgttcattctcgaagaaaaaatgggtgcgacgcgtcgtacttttctgacagatttagcccgcaagaaagggttccgcgtcgagaatgaactgaccgacgaagttacccacatcgtggcagaaaatctgtcacgctctgaagtattggcttggctgaaagaacacaagatggagaagaccaagcaattcgaactgctggatattagctggcttatcgaaagcatgaaagttggtaaaccggtggacaccaaggggaaataccagttggcggaatcgggtgagatgagtgcgaacccagatccgacagagggtcgtgaaaacgagctgcctcctactatgaagaccgtttctccgtatgcgtgtcaacgccgcaccaccctgaacaaccataatcaacgttttacggacgcactggaaattcttcgtgaaaattacgagttcaaacgcaacgatgatactgcgctggaatttcgtcgtgctatctccgtgctgaaaagccttccgtttgaggtacgtagcctgaaagacacggaaggattgccctggatcggtgatgaagtcaaagggattatggaagaaatcatcgaggtcgggaattcgcgtgaagtgcaggccgtgctcaatgatgagtggtatcaaagcttccaccgctttaagagtgtctttggagtgggggtgaagacagcagacaagtggtaccgtatgggtctgcgcaccctcgaggatgttcgttccagcaagaccctgaagttgaccccgatgcagaaagcaggtctgctgtattatgaagatcttgctcgcggcgttacgcgtgccgaagctgacgcgatttctctgctggttcaggatgcagtcgcaactttcgacccggatgcgctggtggagattgtcggtggatttcgtcgtgggaaacctcagggtcacgacgttgatctgcttatcagttctccgggagctgagaaagagcaagaagaccagctcctgcagaaagtgaccaatctgtggaagaaacaagggttgttgctgtacggtcgtctggaatggacccagtgggaagatgggggttcgccatccggtaaggctgacgagggtgacgcgggtgcgaaatgctttctgatcctcaaactttatgatcatatggtggacaaaagcaaatgggaaatgccgacgggttcgaacatgggcgaggccaaaccgtggaaagcaattcgcgtagatctgctgcgttgcccctacggcggttttgcgtttgcgatgttgcagtggaccggaagccgcatgttccgtcgtgatctgcgttggtacgccactgacgagaagaacatgatgctggacaatcatgcgctgtatgacctgaccaagaaaatcaaactccctgctaaatcggaagaggaaattttcgcacatctggggcttgaatacctggaaccgttcgaacgtaacgca

SEQ ID NO: 2856 - protein, 529 aa, synthetic construct
  REGION 1..529: note = Variant of terminal deoxynucleotidyltransferase
MHHHHHHGGSGSHGIRTIDSDFGKKQQKKMDNHDSSATYEIKFHEFVLFILEEKMGATRRTFLTDLARKKGFRVENELTDEVTHIVAENLSRSEVLAWLKEHKMEKTKQFELLDISWLIESMKVGKPVDTKGKYQLAESGEMSANPDPTEGRENELPPTMKTVSPYACQRRTTLNNHNQRFTDALEILRENYEFKRNDDTALEFRRAISVLKSLPFEVRSLKDTEGLPWIGDEVKGIMEEIIEVGNSREVQAVLNDEWYQSFHRFKSVFGVGVKTADKWYRMGLRTLEDVRSSKTLKLTPMQKAGLLYYEDLARGVTRAEADAISLLVQDAVATFDPDALVEIVGGFRRGKPQGHDVDLLISSPGAEKEQEDQLLQKVTNLWKKQGLLLYGRLEWTQWEDGGSPSGKADEGDAGAKCFLILKLYDHMVDKSKWEMPTGSNMGEAKPWKAIRVDLLRCPYGGFAFAMLQWTGSRMFRRDLRWYATDEKNMMLDNHALYDLTKKIKLPAKSEEEIFAHLGLEYLEPFERNA

SEQ ID NO: 2857 - DNA, 1587 bp, synthetic construct
  misc_feature 1..1587: note = Variant of terminal deoxynucleotidyltransferase
  source 1..1587: mol_type = other DNA
atgcaccatcatcatcatcatggcggtagcggcagccacggcattcgtaccatcgattcggacttcgggaagaaacagcagaaaaaaatggataaccacgatagttccgccacttatgaaatcaaatttcacgagtttgtgctgttcattctcgaagaaaaaatgggtgcgacgcgtcgtacttttctgacagatttagcccgcaagaaagggttccgcgtcgagaatgaactgaccgacgaagttacccacatcgtggcagaaaatctgtcacgctctgaagtattggcttggctgaaagaacacaagatggagaagaccaagcaattcgaactgctggatattagctggcttatcgaaagcatgaaagttggtaaaccggtggacaccaaggggaaataccagttggcggaatcgggtgagatgagtgcgaacccagatccgacagagggtcgtgaaaacgagctgcctcctactatgaagaccgtttctccgtatgcgtgtcaacgccgcaccaccctgaacaaccataatcaacgttttacggacgcactggaaattcttcgtgaaaattacgagttcaaacgcaacgatgatactgcgctggaatttcgtcgtgctatctccgtgctgaaaagccttccgtttgaggtacgtagcctgaaagacacggaaggattgccctggatcggtgatgaagtcaaagggattatggaagaaatcatcgaggtcgggaattcgcgtgaagtgcaggccgtgctcaatgatgagtggtatcaaagcttccaccgctttaagagtgtctttggagtgggggtgaagacagcagacaagtggtaccgtatgggtctgcgcaccctcgaggatgttcgttccagcaagaccctgaagttgaccccgatgcagaaagtaggtctgctgtattatgaagatcttgctcgcggcgttacgcgtgccgaagctgacgcgatttctctgctggttcaggatgcagtcgcaactttcgacccggatgcgatcgtggagattgtcggtggatttcgtcgtgggaaacctcagggtcacgacgttgatctgcttatcagttctccgggagctgagaaagagcaagaagaccagctcctgcagaaagtgaccaatctgtggaagaaacaagggttgttgctgtacggtcgtctggaatggacccagtgggaagatgggaaggcgccatccggtaaggctgacgagggtgacgcgggtgcgaaatgctttctgatcctcaaactttatgatcatctggtgcgcaaaagcaaatgggaaatgccgacgggttcgaacatgggcgaggccaaaccgtggaaagcaattcgcgtagatctgctgcgttgcccctacggcggttttgcgtttgcgatgttgcagtggaccggaagccgcatgttccgtcgtgatctgcgttggtacgccactgacgagaagaacatgatgctggacaatcatgcgctgtatgacctgaccaagaaaatcaaactccctgctaaatcggaagaggaaattttcgcacatctggggcttgaatacctggaaccgttcgaacgtaacgca

SEQ ID NO: 2858 - protein, 529 aa, synthetic construct
  REGION 1..529: note = Variant of terminal deoxynucleotidyltransferase
MHHHHHHGGSGSHGIRTIDSDFGKKQQKKMDNHDSSATYEIKFHEFVLFILEEKMGATRRTFLTDLARKKGFRVENELTDEVTHIVAENLSRSEVLAWLKEHKMEKTKQFELLDISWLIESMKVGKPVDTKGKYQLAESGEMSANPDPTEGRENELPPTMKTVSPYACQRRTTLNNHNQRFTDALEILRENYEFKRNDDTALEFRRAISVLKSLPFEVRSLKDTEGLPWIGDEVKGIMEEIIEVGNSREVQAVLNDEWYQSFHRFKSVFGVGVKTADKWYRMGLRTLEDVRSSKTLKLTPMQKVGLLYYEDLARGVTRAEADAISLLVQDAVATFDPDAIVEIVGGFRRGKPQGHDVDLLISSPGAEKEQEDQLLQKVTNLWKKQGLLLYGRLEWTQWEDGKAPSGKADEGDAGAKCFLILKLYDHLVRKSKWEMPTGSNMGEAKPWKAIRVDLLRCPYGGFAFAMLQWTGSRMFRRDLRWYATDEKNMMLDNHALYDLTKKIKLPAKSEEEIFAHLGLEYLEPFERNA

SEQ ID NO: 2859 - DNA, 1587 bp, synthetic construct
  misc_feature 1..1587: note = Variant of terminal deoxynucleotidyltransferase
  source 1..1587: mol_type = other DNA
atgcaccatcatcatcatcatggcggtagcggcagccacggcattcgtaccatcgattcggacttcgggaagaaacagcagaaaaaaatggataaccacgatagttccgccacttatgaaatcaaatttcacgagtttgtgctgttcattctcgaagaaaaaatgggtgcgacgcgtcgtacttttctgacagatttagcccgcaagaaagggttccgcgtcgagaatgaactgaccgacgaagttacccacatcgtggcagaaaatctgtcacgctctgaagtattggcttggctgaaagaacacaagatggagaagaccaagcaattcgaactgctggatattagctggcttatcgaaagcatgaaagttggtaaaccggtggacaccaaggggaaataccagttggcggaatcgggtgagatgagtgcgaacccagatccgacagagggtcgtgaaaacgagctgcctcctactatgaagaccgtttctccgtatgcgtgtcaacgccgcaccaccctgaacaaccataatcaacgttttacggacgcactggaaattcttcgtgaaaattacgagttcaaacgcaacgatgatactgcgctggaatttcgtcgtgctatctccgtgctgaaaagccttccgtttgaggtacgtagcctgaaagacacggaaggattgccctggatcggtgatgaagtcaaagggattatggaagaaatcatcgaggtcgggaattcgcgtgaagtgcaggccgtgctcaatgatgagtggtatcaaagcttccaccgctttaagagtgtctttggagtgggggtgaagacagcagacaagtggtaccgtatgggtctgcgcaccctcgaggatgttcgttccagcaagaccctgaagttgaccccgatgcagaaagcgggtctgctgtattatgaagatcttgctcgcggcgttacgcgtgccgaagctgacgcgatttctctgctggttcaggatgcagtcgcaactttcgacccggatgcgctggtggagattgtcggtggatttcgtcgtgggaaacctcagggtcacgacgttgatctgcttatcagttctccgggagctgagaaagagcaagaagaccagctcctgcagaaagtgaccaatctgtggaagaaacaagggttgttgctgtacggtcgtctggaatggacccagtgggaagatgggaagtcgccatccggtaaggctgacgagggtgacgcgggtgcgaaatgctttctgatcctcaaactttatgatcatctggtggacaaaagcaaatgggaaatgccgacgggttcgaacatgggcgaggccaaaccgtggaaagcaattcgcgtagatctgctgcgttgcccctacggcggttttgcgtttgcgatgttgcagtggaccggaagccgcatgttccgtcgtgatctgcgttggtacgccactgacgagaagaacatgatgctggacaatcatgcgctgtatgacctgaccaagaaaatctttctcaaagctaaatcggaagaggaaattttcgcacatctggggcttgaatacctggaaccgttcgaacgtaacgca

SEQ ID NO: 2860 - protein, 529 aa, synthetic construct
  REGION 1..529: note = Variant of terminal deoxynucleotidyltransferase
MHHHHHHGGSGSHGIRTIDSDFGKKQQKKMDNHDSSATYEIKFHEFVLFILEEKMGATRRTFLTDLARKKGFRVENELTDEVTHIVAENLSRSEVLAWLKEHKMEKTKQFELLDISWLIESMKVGKPVDTKGKYQLAESGEMSANPDPTEGRENELPPTMKTVSPYACQRRTTLNNHNQRFTDALEILRENYEFKRNDDTALEFRRAISVLKSLPFEVRSLKDTEGLPWIGDEVKGIMEEIIEVGNSREVQAVLNDEWYQSFHRFKSVFGVGVKTADKWYRMGLRTLEDVRSSKTLKLTPMQKAGLLYYEDLARGVTRAEADAISLLVQDAVATFDPDALVEIVGGFRRGKPQGHDVDLLISSPGAEKEQEDQLLQKVTNLWKKQGLLLYGRLEWTQWEDGKSPSGKADEGDAGAKCFLILKLYDHLVDKSKWEMPTGSNMGEAKPWKAIRVDLLRCPYGGFAFAMLQWTGSRMFRRDLRWYATDEKNMMLDNHALYDLTKKIFLKAKSEEEIFAHLGLEYLEPFERNA

SEQ ID NO: 2861 - DNA, 1587 bp, synthetic construct
  misc_feature 1..1587: note = Variant of terminal deoxynucleotidyltransferase
  source 1..1587: mol_type = other DNA
atgcaccatcatcatcatcatggcggtagcggcagccacggcattcgtaccatcgattcggacttcgggaagaaacagcagaaaaaaatggataaccacgatagttccgccacttatgaaatcaaatttcacgagtttgtgctgttcattctcgaagaaaaaatgggtgcgacgcgtcgtacttttctgacagatttagcccgcaagaaagggttccgcgtcgagaatgaactgaccgacgaagttacccacatcgtggcagaaaatctgtcacgctctgaagtattggcttggctgaaagaacacaagatggagaagaccaagcaattcgaactgctggatattagctggcttatcgaaagcatgaaagttggtaaaccggtggacaccaaggggaaataccagttggcggaatcgggtgagatgagtgcgaacccagatccgacagagggtcgtgaaaacgagctgcctcctactatgaagaccgtttctccgtatgcgtgtcaacgccgcaccaccctgaacaaccataatcaacgttttacggacgcactggaaattcttcgtgaaaattacgagttcaaacgcaacgatgatactgcgctggaatttcgtcgtgctatctccgtgctgaaaagccttccgtttgaggtacgtagcctgaaagacacggaaggattgccctggatcggtgatgaagtcaaagggattatggaagaaatcatcgaggtcgggaattcgcgtgaagtgcaggccgtgctcaatgatgagtggtatcaaagcttccaccgctttaagagtgtctttggagtgggggtgaagacagcagacaagtggtaccgtatgggtctgcgcaccctcgaggatgttcgttccagcaagaccctgaagttgaccccgatgcagaaagtaggtctgctgtattatgaagatcttgctcgcggcgttacgcgtgccgaagctgacgcgatttctctgctggttcaggatgcagtcgcaactttcgacccggatgcgctggtggagattgtcggtggatttcgtcgtgggaaacctcagggtcacgacgttgatctgcttatcagttctccgggagctgagaaagagcaagaagaccagctcctgcagaaagtgaccaatctgtggaagaaacaagggttgttgctgtacggtcgtctggaatggacccagtgggaagatgggaagctgccatccggtaaggctgacgagggtgacgcgggtgcgaaatgctttctgatcctcaaactttatgatcataaggtggacaaaagcaaatgggaaatgccgacgggttcgaacatgggcgaggccaaaccgtggaaagcaattcgcgtagatctgctgcgttgcccctacggcggttttgcgtttgcgatgttgcagtggaccggaagccgcatgttccgtcgtgatctgcgttggtacgccactgacgagaagaacatgatgctggacaatcatgcgctgtatgacctgaccaagaaaatcaaactcaaagctaaatcggaagaggaaattttcgcacatctggggcttgaatacctggaaccgttcgaacgtaacgca

SEQ ID NO: 2862 - protein, 529 aa, synthetic construct
  REGION 1..529: note = Variant of terminal deoxynucleotidyltransferase
MHHHHHHGGSGSHGIRTIDSDFGKKQQKKMDNHDSSATYEIKFHEFVLFILEEKMGATRRTFLTDLARKKGFRVENELTDEVTHIVAENLSRSEVLAWLKEHKMEKTKQFELLDISWLIESMKVGKPVDTKGKYQLAESGEMSANPDPTEGRENELPPTMKTVSPYACQRRTTLNNHNQRFTDALEILRENYEFKRNDDTALEFRRAISVLKSLPFEVRSLKDTEGLPWIGDEVKGIMEEIIEVGNSREVQAVLNDEWYQSFHRFKSVFGVGVKTADKWYRMGLRTLEDVRSSKTLKLTPMQKVGLLYYEDLARGVTRAEADAISLLVQDAVATFDPDALVEIVGGFRRGKPQGHDVDLLISSPGAEKEQEDQLLQKVTNLWKKQGLLLYGRLEWTQWEDGKLPSGKADEGDAGAKCFLILKLYDHKVDKSKWEMPTGSNMGEAKPWKAIRVDLLRCPYGGFAFAMLQWTGSRMFRRDLRWYATDEKNMMLDNHALYDLTKKIKLKAKSEEEIFAHLGLEYLEPFERNA

SEQ ID NO: 2863 - DNA, 1587 bp, synthetic construct
  misc_feature 1..1587: note = Variant of terminal deoxynucleotidyltransferase
  source 1..1587: mol_type = other DNA
atgcaccatcatcatcatcatggcggtagcggcagccacggcattcgtaccatcgattcggacttcgggaagaaacagcagaaaaaaatggataaccacgatagttccgccacttatgaaatcaaatttcacgagtttgtgctgttcattctcgaagaaaaaatgggtgcgacgcgtcgtacttttctgacagatttagcccgcaagaaagggttccgcgtcgagaatgaactgaccgacgaagttacccacatcgtggcagaaaatctgtcacgctctgaagtattggcttggctgaaagaacacaagatggagaagaccaagcaattcgaactgctggatattagctggcttatcgaaagcatgaaagttggtaaaccggtggacaccaaggggaaataccagttggcggaatcgggtgagatgagtgcgaacccagatccgacagagggtcgtgaaaacgagctgcctcctactatgaagaccgtttctccgtatgcgtgtatgcgccgcaccaccctgaacaaccataatcaacgttttacggacgcactggaaattcttcgtgaaaattacgagttcaaacgcaacgatgatactgcgctggaatttcgtcgtgctatctccgtgctgaaaagccttccgtttgaggtacgtagcctgaaagacacggaaggattgccctggatcggtgatgaagtcaaagggattatggaagaaatcatcgaggtcgggaattcgcgtgaagtgcaggccgtgctcaatgatgagtggtatcaaagcttccaccgctttaagagtgtctttggagtgggggtgaagacagcagacaagtggtaccgtatgggtctgcgcaccctcgaggatgttcgttccagcaagaccctgaagttgaccccgatgcagaaagtaggtctgctgtattatgaagatcttgctcgcggcgttacgcgtgccgaagctgacgcgatttctctgctggttcaggatgcagtcgcaactttcgacccggatgcgatcgtggagattgtcggtggatttcgtcgtgggaaacctcagggtcacgacgttgatctgcttatcagttctccgggagctgagaaagagcaagaagaccagctcctgcagaaagtgaccaatctgtggaagaaacaagggttgttgctgtacggtcgtctggaatggacccagtgggaagatgggaagctgccatccggtaaggctgacgagggtgacgcgggtgcgaaatgctttctgatcctcaaactttatgatcataaggtggacaaaagcaaatgggaaatgccgacgggttcgaacatgggcgaggccaaaccgtggaaagcaattcgcgtagatctgctgcgttgcccctacggcggttttgcgtttgcgatgttgcagtggaccggaagccgcatgttccgtcgtgatctgcgttggtacgccactgacgagaagaacatgatgctggacaatcatgcgctgtatgacctgaccaagaaaatcaaactcaaagctaaatcggaagaggaaattttcgcacatctggggcttgaatacctggaaccgttcgaacgtaacgca

SEQ ID NO: 2864 - protein, 529 aa, synthetic construct
  REGION 1..529: note = Variant of terminal deoxynucleotidyltransferase
MHHHHHHGGSGSHGIRTIDSDFGKKQQKKMDNHDSSATYEIKFHEFVLFILEEKMGATRRTFLTDLARKKGFRVENELTDEVTHIVAENLSRSEVLAWLKEHKMEKTKQFELLDISWLIESMKVGKPVDTKGKYQLAESGEMSANPDPTEGRENELPPTMKTVSPYACMRRTTLNNHNQRFTDALEILRENYEFKRNDDTALEFRRAISVLKSLPFEVRSLKDTEGLPWIGDEVKGIMEEIIEVGNSREVQAVLNDEWYQSFHRFKSVFGVGVKTADKWYRMGLRTLEDVRSSKTLKLTPMQKVGLLYYEDLARGVTRAEADAISLLVQDAVATFDPDAIVEIVGGFRRGKPQGHDVDLLISSPGAEKEQEDQLLQKVTNLWKKQGLLLYGRLEWTQWEDGKLPSGKADEGDAGAKCFLILKLYDHKVDKSKWEMPTGSNMGEAKPWKAIRVDLLRCPYGGFAFAMLQWTGSRMFRRDLRWYATDEKNMMLDNHALYDLTKKIKLKAKSEEEIFAHLGLEYLEPFERNA

SEQ ID NO: 2865 - DNA, 1587 bp, synthetic construct
  misc_feature 1..1587: note = Variant of terminal deoxynucleotidyltransferase
  source 1..1587: mol_type = other DNA
atgcaccatcatcatcatcatggcggtagcggcagccacggcattcgtaccatcgattcggacttcgggaagaaacagcagaaaaaaatggataaccacgatagttccgccacttatgaaatcaaatttcacgagtttgtgctgttcattctcgaagaaaaaatgggtgcgacgcgtcgtacttttctgacagatttagcccgcaagaaagggttccgcgtcgagaatgaactgaccgacgaagttacccacatcgtggcagaaaatctgtcacgctctgaagtattggcttggctgaaagaacacaagatggagaagaccaagcaattcgaactgctggatattagctggcttatcgaaagcatgaaagttggtaaaccggtggacaccaaggggaaataccagttggcggaatcgggtgagatgagtgcgaacccagatccgacagagggtcgtgaaaacgagctgcctcctactatgaagaccgtttctccgtatgcgtgtatgcgccgcaccaccctgaacaaccataatcaacgttttacggacgcactggaaattcttcgtgaaaattacgagttcaaacgcaacgatgatactgcgctggaatttcgtcgtgctatctccgtgctgaaaagccttccgtttgaggtacgtagcctgaaagacacggaaggattgccctggatcggtgatgaagtcaaagggattatggaagaaatcatcgaggtcgggaattcgcgtgaagtgcaggccgtgctcaatgatgagtggtatcaaagcttccaccgctttaagagtgtctttggagtgggggtgaagacagcagacaagtggtaccgtatgggtctgcgcaccctcgaggatgttcgttccagcaagaccctgaagttgaccccgatgcagaaagtaggtctgctgtattatgaagatcttgctcgcggcgttacgcgtgccgaagctgacgcgatttctctgctggttcaggatgcagtcgcaactttcgacccggatgcgctggtggagattgtcggtggatttcgtcgtgggaaacctcagggtcacgacgttgatctgcttatcagttctccgggagctgagaaagagcaagaagaccagctcctgcagaaagtgaccaatctgtggaagaaacaagggttgttgctgtacggtcgtctggaatggacccagtgggaagatgggaagctgccatccggtaaggctgacgagggtgacgcgggtgcgaaatgctttctgatcctcaaactttatgatcataaagtggacaaaagcaaatgggaaatgccgacgggttcgaacatgggcgaggccaaaccgtggaaagcaattcgcgtagatctgctgcgttgcccctacggcggttttgcgtttgcgatgttgcagtggaccggaagccgcatgttccgtcgtgatctgcgttggtacgccactgacgagaagaacatgatgctggacaatcatgcgctgtatgacctgaccaagaaaatcaaactcaaagctaaatcggaagaggaaattttcgcacatctggggcttgaatacctggaaccgttcgaacgtaacgca

SEQ ID NO: 2866 - protein, 529 aa, synthetic construct
  REGION 1..529: note = Variant of terminal deoxynucleotidyltransferase
MHHHHHHGGSGSHGIRTIDSDFGKKQQKKMDNHDSSATYEIKFHEFVLFILEEKMGATRRTFLTDLARKKGFRVENELTDEVTHIVAENLSRSEVLAWLKEHKMEKTKQFELLDISWLIESMKVGKPVDTKGKYQLAESGEMSANPDPTEGRENELPPTMKTVSPYACMRRTTLNNHNQRFTDALEILRENYEFKRNDDTALEFRRAISVLKSLPFEVRSLKDTEGLPWIGDEVKGIMEEIIEVGNSREVQAVLNDEWYQSFHRFKSVFGVGVKTADKWYRMGLRTLEDVRSSKTLKLTPMQKVGLLYYEDLARGVTRAEADAISLLVQDAVATFDPDALVEIVGGFRRGKPQGHDVDLLISSPGAEKEQEDQLLQKVTNLWKKQGLLLYGRLEWTQWEDGKLPSGKADEGDAGAKCFLILKLYDHKVDKSKWEMPTGSNMGEAKPWKAIRVDLLRCPYGGFAFAMLQWTGSRMFRRDLRWYATDEKNMMLDNHALYDLTKKIKLKAKSEEEIFAHLGLEYLEPFERNA

SEQ ID NO: 2867 - DNA, 1587 bp, synthetic construct
  misc_feature 1..1587: note = Variant of terminal deoxynucleotidyltransferase
  source 1..1587: mol_type = other DNA
atgcaccatcatcatcatcatggcggtagcggcagccacggcattcgtaccatcgattcggacttcgggaagaaacagcagaaaaaaatggataaccacgatagttccgccacttatgaaatcaaatttcacgagtttgtgctgttcattctcgaagaaaaaatgggtgcgacgcgtcgtacttttctgacagatttagcccgcaagaaagggttccgcgtcgagaatgaactgaccgacgaagttacccacatcgtggcagaaaatctgtcacgctctgaagtattggcttggctgaaagaacacaagatggagaagaccaagcaattcgaactgctggatattagctggcttatcgaaagcatgaaagttggtaaaccggtggacaccaaggggaaataccagttggcggaatcgggtgagatgagtgcgaacccagatccgacagagggtcgtgaaaacgagctgcctcctactatgaagaccgtttctccgtatgcgtgtatgcgccgcaccaccctgaacaaccataatcaacgttttacggacgcactggaaattcttcgtgaaaattacgagttcaaacgcaacgatgatactgcgctggaatttcgtcgtgctatctccgtgctgaaaagccttccgtttgaggtacgtagcctgaaagacacggaaggattgccctggatcggtgatgaagtcaaagggattatggaagaaatcatcgaggtcgggaattcgcgtgaagtgcaggccgtgctcaatgatgagtggtatcaaagcttccaccgctttaagagtgtctttggagtgggggtgaagacagcagacaagtggtaccgtatgggtctgcgcaccctcgaggatgttcgttccagcaagaccctgaagttgaccccgatgcagaaagcaggtctgctgtattatgaagatcttgctcgcggcgttacgcgtgccgaagctgacgcgatttctctgctggttcaggatgcagtcgcaactttcgacccggatgcgctggtggagattgtcggtggatttcgtcgtgggaaacctcagggtcacgacgttgatctgcttatcagttctccgggagctgagaaagagcaagaagaccagctcctgcagaaagtgaccaatctgtggaagaaacaagggttgttgctgtacggtcgtctggaatggacccagtgggaagatgggggtctgccatccggtaaggctgacgagggtgacgcgggtgcgaaatgctttctgatcctcaaactttatgatcataaggtggacaaaagcaaatgggaaatgccgacgggttcgaacatgggcgaggccaaaccgtggaaagcaattcgcgtagatctgctgcgttgcccctacggcggttttgcgtttgcgatgttgcagtggaccggaagccgcatgttccgtcgtgatctgcgttggtacgccactgacgagaagaacatgatgctggacaatcatgcgctgtatgacctgaccaagaaaatcaaactccctgctaaatcggaagaggaaattttcgcacatctggggcttgaatacctggaaccgttcgaacgtaacgca

SEQ ID NO: 2868 - protein, 529 aa, synthetic construct
  REGION 1..529: note = Variant of terminal deoxynucleotidyltransferase
MHHHHHHGGSGSHGIRTIDSDFGKKQQKKMDNHDSSATYEIKFHEFVLFILEEKMGATRRTFLTDLARKKGFRVENELTDEVTHIVAENLSRSEVLAWLKEHKMEKTKQFELLDISWLIESMKVGKPVDTKGKYQLAESGEMSANPDPTEGRENELPPTMKTVSPYACMRRTTLNNHNQRFTDALEILRENYEFKRNDDTALEFRRAISVLKSLPFEVRSLKDTEGLPWIGDEVKGIMEEIIEVGNSREVQAVLNDEWYQSFHRFKSVFGVGVKTADKWYRMGLRTLEDVRSSKTLKLTPMQKAGLLYYEDLARGVTRAEADAISLLVQDAVATFDPDALVEIVGGFRRGKPQGHDVDLLISSPGAEKEQEDQLLQKVTNLWKKQGLLLYGRLEWTQWEDGGLPSGKADEGDAGAKCFLILKLYDHKVDKSKWEMPTGSNMGEAKPWKAIRVDLLRCPYGGFAFAMLQWTGSRMFRRDLRWYATDEKNMMLDNHALYDLTKKIKLPAKSEEEIFAHLGLEYLEPFERNA

SEQ ID NO: 2869 - DNA, 1587 bp, synthetic construct
  misc_feature 1..1587: note = Variant of terminal deoxynucleotidyltransferase
  source 1..1587: mol_type = other DNA
atgcaccatcatcatcatcatggcggtagcggcagccacggcattcgtaccatcgattcggacttcgggaagaaacagcagaaaaaaatggataaccacgatagttccgccacttatgaaatcaaatttcacgagtttgtgctgttcattctcgaagaaaaaatgggtgcgacgcgtcgtacttttctgacagatttagcccgcaagaaagggttccgcgtcgagaatgaactgaccgacgaagttacccacatcgtggcagaaaatctgtcacgctctgaagtattggcttggctgaaagaacacaagatggagaagaccaagcaattcgaactgctggatattagctggcttatcgaaagcatgaaagttggtaaaccggtggacaccaaggggaaataccagttggcggaatcgggtgagatgagtgcgaacccagatccgacagagggtcgtgaaaacgagctgcctcctactatgaagaccgtttctccgtatgcgtgtatgcgccgcaccaccctgaacaaccataatcaacgttttacggacgcactggaaattcttcgtgaaaattacgagttcaaacgcaacgatgatactgcgctggaatttcgtcgtgctatctccgtgctgaaaagccttccgtttgaggtacgtagcctgaaagacacggaaggattgccctggatcggtgatgaagtcaaagggattatggaagaaatcatcgaggtcgggaattcgcgtgaagtgcaggccgtgctcaatgatgagtggtatcaaagcttccaccgctttaagagtgtctttggagtgggggtgaagacagcagacaagtggtaccgtatgggtctgcgcaccctcgaggatgttcgttccagcaagaccctgaagttgaccccgatgcagaaagcaggtctgctgtattatgaagatcttgctcgcggcgttacgcgtgccgaagctgacgcgatttctctgctggttcaggatgcagtcgcaactttcgacccggatgcgctggtggagattgtcggtggatttcgtcgtgggaaacctcagggtcacgacgttgatctgcttatcagttctccgggagctgagaaagagcaagaagaccagctcctgcagaaagtgaccaatctgtggaagaaacaagggttgttgctgtacggtcgtctggaatggacccagtgggaagatgggggggcgccatccggtaaggctgacgagggtgacgcgggtgcgaaatgctttctgatcctcaaactttatgatcataaggtggacaaaagcaaatgggaaatgccgacgggttcgaacatgggcgaggccaaaccgtggaaagcaattcgcgtagatctgctgcgttgcccctacggcggttttgcgtttgcgatgttgcagtggaccggaagccgcatgttccgtcgtgatctgcgttggtacgccactgacgagaagaacatgatgctggacaatcatgcgctgtatgacctgaccaagaaaatcaaactcccagctaaatcggaagaggaaattttcgcacatctggggcttgaatacctggaaccgttcgaacgtaacgca

SEQ ID NO: 2870 - protein, 529 aa, synthetic construct
  REGION 1..529: note = Variant of terminal deoxynucleotidyltransferase
MHHHHHHGGSGSHGIRTIDSDFGKKQQKKMDNHDSSATYEIKFHEFVLFILEEKMGATRRTFLTDLARKKGFRVENELTDEVTHIVAENLSRSEVLAWLKEHKMEKTKQFELLDISWLIESMKVGKPVDTKGKYQLAESGEMSANPDPTEGRENELPPTMKTVSPYACMRRTTLNNHNQRFTDALEILRENYEFKRNDDTALEFRRAISVLKSLPFEVRSLKDTEGLPWIGDEVKGIMEEIIEVGNSREVQAVLNDEWYQSFHRFKSVFGVGVKTADKWYRMGLRTLEDVRSSKTLKLTPMQKAGLLYYEDLARGVTRAEADAISLLVQDAVATFDPDALVEIVGGFRRGKPQGHDVDLLISSPGAEKEQEDQLLQKVTNLWKKQGLLLYGRLEWTQWEDGGAPSGKADEGDAGAKCFLILKLYDHKVDKSKWEMPTGSNMGEAKPWKAIRVDLLRCPYGGFAFAMLQWTGSRMFRRDLRWYATDEKNMMLDNHALYDLTKKIKLPAKSEEEIFAHLGLEYLEPFERNA

SEQ ID NO: 2871 - DNA, 1587 bp, synthetic construct
  misc_feature 1..1587: note = Variant of terminal deoxynucleotidyltransferase
  source 1..1587: mol_type = other DNA
atgcaccatcatcatcatcatggcggtagcggcagccacggcattcgtaccatcgattcggacttcgggaagaaacagcagaaaaaaatggataaccacgatagttccgccacttatgaaatcaaatttcacgagtttgtgctgttcattctcgaagaaaaaatgggtgcgacgcgtcgtacttttctgacagatttagcccgcaagaaagggttccgcgtcgagaatgaactgaccgacgaagttacccacatcgtggcagaaaatctgtcacgctctgaagtattggcttggctgaaagaacacaagatggagaagaccaagcaattcgaactgctggatattagctggcttatcgaaagcatgaaagttggtaaaccggtggacaccaaggggaaataccagttggcggaatcgggtgagatgagtgcgaacccagatccgacagagggtcgtgaaaacgagctgcctcctactatgaagaccgtttctccgtatgcgtgtcaacgccgcaccaccctgaacaaccataatcaacgttttacggacgcactggaaattcttcgtgaaaattacgagttcaaacgcaacgatgatactgcgctggaatttcgtcgtgctatctccgtgctgaaaagccttccgtttgaggtacgtagcctgaaagacacggaaggattgccctggatcggtgatgaagtcaaagggattatggaagaaatcatcgaggtcgggaattcgcgtgaagtgcaggccgtgctcaatgatgagtggtatcaaagcttccaccgctttaagagtgtctttggagtgggggtgaagacagcagacaagtggtaccgtatgggtctgcgcaccctcgaggatgttcgttccagcaagaccctgaagttgaccccgatgcagaaagcgggtctgctgtattatgaagatcttgctcgcggcgttacgcgtgccgaagctgacgcgatttctctgctggttcaggatgcagtcgcaactttcgacccggatgcgctggtggagattgtcggtggatttcgtcgtgggaaacctcagggtcacgacgttgatctgcttatcagttctccgggagctgagaaagagcaagaagaccagctcctgcagaaagtgatgaatctgtggaagaaacaagggttgttgctgtacggtcgtctggaatggacccagtgggaagatgggaaactcccatccggtaaggctgacgagggtgacgcgggtgcgaaatgctttctgatcctcaaactttatgatcataaagtggacaaaagcaaatgggaaatgccgacgggttcgaacatgggcgaggccaaaccgtggaaagcaattcgcgtagatctgctgcgttgcccctacggcggttttgcgtttgcaatgttgagttggaccggaagccgcatgttccgtcgtgatctgcgttggtacgccactgacgagaagaacatgatgctggacaatcatgcgctgtatgacctgaccaagaaaatctttctcaaagctaaatcggaagaggaaattttcgcacatctggggcttgaatacctggaaccgttcgaacgtaacgca

SEQ ID NO: 2872 - protein, 529 aa, synthetic construct
  REGION 1..529: note = Variant of terminal deoxynucleotidyltransferase
MHHHHHHGGSGSHGIRTIDSDFGKKQQKKMDNHDSSATYEIKFHEFVLFILEEKMGATRRTFLTDLARKKGFRVENELTDEVTHIVAENLSRSEVLAWLKEHKMEKTKQFELLDISWLIESMKVGKPVDTKGKYQLAESGEMSANPDPTEGRENELPPTMKTVSPYACQRRTTLNNHNQRFTDALEILRENYEFKRNDDTALEFRRAISVLKSLPFEVRSLKDTEGLPWIGDEVKGIMEEIIEVGNSREVQAVLNDEWYQSFHRFKSVFGVGVKTADKWYRMGLRTLEDVRSSKTLKLTPMQKAGLLYYEDLARGVTRAEADAISLLVQDAVATFDPDALVEIVGGFRRGKPQGHDVDLLISSPGAEKEQEDQLLQKVMNLWKKQGLLLYGRLEWTQWEDGKLPSGKADEGDAGAKCFLILKLYDHKVDKSKWEMPTGSNMGEAKPWKAIRVDLLRCPYGGFAFAMLSWTGSRMFRRDLRWYATDEKNMMLDNHALYDLTKKIFLKAKSEEEIFAHLGLEYLEPFERNA

SEQ ID NO: 2873 - DNA, 1587 bp, synthetic construct
  misc_feature 1..1587: note = Variant of terminal deoxynucleotidyltransferase
  source 1..1587: mol_type = other DNA
atgcaccatcatcatcatcatggcggtagcggcagccacggcattcgtaccatcgattcggacttcgggaagaaacagcagaaaaaaatggataaccacgatagttccgccacttatgaaatcaaatttcacgagtttgtgctgttcattctcgaagaaaaaatgggtgcgacgcgtcgtacttttctgacagatttagcccgcaagaaagggttccgcgtcgagaatgaactgaccgacgaagttacccacatcgtggcagaaaatctgtcacgctctgaagtattggcttggctgaaagaacacaagatggagaagaccaagcaattcgaactgctggatattagctggcttatcgaaagcatgaaagttggtaaaccggtggacaccaaggggaaataccagttggcggaatcgggtgagatgagtgcgaacccagatccgacagagggtcgtgaaaacgagctgcctcctactatgaagaccgtttctccgtatgcgtgtcaacgccgcaccaccctgaacaaccataatcaacgttttacggacgcactggaaattcttcgtgaaaattacgagttcaaacgcaacgatgatactgcgctggaatttcgtcgtgctatctccgtgctgaaaagccttccgtttgaggtacgtagcctgaaagacacggaaggattgccctggatcggtgatgaagtcaaagggattatggaagaaatcatcgaggtcgggaattcgcgtgaagtgcaggccgtgctcaatgatgagtggtatcaaagcttccaccgctttaagagtgtctttggagtgggggtgaagacagcagacaagtggtaccgtatgggtctgcgcaccctcgaggatgttcgttccagcaagaccctgaagttgaccccgatgcagaaagcaggtctgctgtattatgaagatcttgctcgcggcgttacgcgtgccgaagctgacgcgatttctctgctggttcaggatgcagtcgcaactttcgacccggatgcgctggtggagattgtcggtggatttcgtcgtgggaaacctcagggtcacgacgttgatctgcttatcagttctccgggagctgagaaagagcaagaagaccagctcctgcagaaagtgaccaatctgtggaagaaacaagggttgttgctgtacggtcgtctggaatggacccagtgggaagatgggggtctgccatccggtaaggctgacgagggtgacgcgggtgcgaaatgctttctgatcctcaaactttatgatcatctggtggacaaaagcaaatgggaaatgccgacgggttcgaacatgggcgaggccaaaccgtggaaagcaattcgcgtagatctgctgcgttgcccctacggcggttttgcgtttgcgatgttgcagtggaccggaagccgcatgttccgtcgtgatctgcgttggtacgccactgacgagaagaacatgatgctggacaatcatgcgctgtatgacctgaccaagaaaatcaaactcaaagctaaatcggaagaggaaattttcgcacatctggggcttgaatacctggaaccgttcgaacgtaacgca

SEQ ID NO: 2874 - protein, 529 aa, synthetic construct
  REGION 1..529: note = Variant of terminal deoxynucleotidyltransferase
MHHHHHHGGSGSHGIRTIDSDFGKKQQKKMDNHDSSATYEIKFHEFVLFILEEKMGATRRTFLTDLARKKGFRVENELTDEVTHIVAENLSRSEVLAWLKEHKMEKTKQFELLDISWLIESMKVGKPVDTKGKYQLAESGEMSANPDPTEGRENELPPTMKTVSPYACQRRTTLNNHNQRFTDALEILRENYEFKRNDDTALEFRRAISVLKSLPFEVRSLKDTEGLPWIGDEVKGIMEEIIEVGNSREVQAVLNDEWYQSFHRFKSVFGVGVKTADKWYRMGLRTLEDVRSSKTLKLTPMQKAGLLYYEDLARGVTRAEADAISLLVQDAVATFDPDALVEIVGGFRRGKPQGHDVDLLISSPGAEKEQEDQLLQKVTNLWKKQGLLLYGRLEWTQWEDGGLPSGKADEGDAGAKCFLILKLYDHLVDKSKWEMPTGSNMGEAKPWKAIRVDLLRCPYGGFAFAMLQWTGSRMFRRDLRWYATDEKNMMLDNHALYDLTKKIKLKAKSEEEIFAHLGLEYLEPFERNA

SEQ ID NO: 2875 - DNA, 1587 bp, synthetic construct
  misc_feature 1..1587: note = Variant of terminal deoxynucleotidyltransferase
  source 1..1587: mol_type = other DNA
atgcaccatcatcatcatcatggcggtagcggcagccacggcattcgtaccatcgattcggacttcgggaagaaacagcagaaaaaaatggataaccacgatagttccgccacttatgaaatcaaatttcacgagtttgtgctgttcattctcgaagaaaaaatgggtgcgacgcgtcgtacttttctgacagatttagcccgcaagaaagggttccgcgtcgagaatgaactgaccgacgaagttacccacatcgtggcagaaaatctgtcacgctctgaagtattggcttggctgaaagaacacaagatggagaagaccaagcaattcgaactgctggatattagctggcttatcgaaagcatgaaagttggtaaaccggtggacaccaaggggaaataccagttggcggaatcgggtgagatgagtgcgaacccagatccgacagagggtcgtgaaaacgagctgcctcctactatgaagaccgtttctccgtatgcgtgtcaacgccgcaccaccctgaacaaccataatcaacgttttacggacgcactggaaattcttcgtgaaaattacgagttcaaacgcaacgatgatactgcgctggaatttcgtcgtgctatctccgtgctgaaaagccttccgtttgaggtacgtagcctgaaagacacggaaggattgccctggatcggtgatgaagtcaaagggattatggaagaaatcatcgaggtcgggaattcgcgtgaagtgcaggccgtgctcaatgatgagtggtatcaaagcttccaccgctttgtaagtgtctttggagtgggggtgaagacagcagacaagtggtaccgtatgggtctgcgcaccctcgaggatgttcgttccagcaagaccctgaagttgaccccgatgcagaaagcgggtctgctgtattatgaagatcttgctcgcggcgttacgcgtgccgaagctgacgcgatttctctgatggttcgcgatgcagtcgcaactttcgacccggatgcgctggtggagattgtcggtggatttcgtcgtgggaaacctcagggtcacgacgttgatctgcttatcagttctccgggagctgagaaagagcaagaagaccagctcctgcagaaagtgacgaatctgtggaagaaacaagggttgttgctgtacggtcgtctggaatggacccagtgggaagatgggaaactctcgtccgggaaggctgacgtaggtgacgcgggtgcgaaatgctttctgatcctcaaactttatgatcataaagtggacaaaagcaaatgggaaatgccgacgggttcgaacatgggcgaggccaaaccgtggaaagcaattcgcgtagatctgctgcgttgcccctacggcggttttgcgtttgcaatgttgcagtggaccggaagccgcatgttccgtcgtgatctgcgttggtacgccacggacgagaagaacatgatgctggacaatcatgcgctgtatgacctgaccaagaaaatctttctcaaagctaaatcggaagaggaaattttcgcacatctggggcttgaatacctggaaccgttcgaacgtaacgca

SEQ ID NO: 2876 - protein, 529 aa, synthetic construct
  REGION 1..529: note = Variant of terminal deoxynucleotidyltransferase
MHHHHHHGGSGSHGIRTIDSDFGKKQQKKMDNHDSSATYEIKFHEFVLFILEEKMGATRRTFLTDLARKKGFRVENELTDEVTHIVAENLSRSEVLAWLKEHKMEKTKQFELLDISWLIESMKVGKPVDTKGKYQLAESGEMSANPDPTEGRENELPPTMKTVSPYACQRRTTLNNHNQRFTDALEILRENYEFKRNDDTALEFRRAISVLKSLPFEVRSLKDTEGLPWIGDEVKGIMEEIIEVGNSREVQAVLNDEWYQSFHRFVSVFGVGVKTADKWYRMGLRTLEDVRSSKTLKLTPMQKAGLLYYEDLARGVTRAEADAISLMVRDAVATFDPDALVEIVGGFRRGKPQGHDVDLLISSPGAEKEQEDQLLQKVTNLWKKQGLLLYGRLEWTQWEDGKLSSGKADVGDAGAKCFLILKLYDHKVDKSKWEMPTGSNMGEAKPWKAIRVDLLRCPYGGFAFAMLQWTGSRMFRRDLRWYATDEKNMMLDNHALYDLTKKIFLKAKSEEEIFAHLGLEYLEPFERNA

SEQ ID NO: 2877 - DNA, 1587 bp, synthetic construct
  misc_feature 1..1587: note = Variant of terminal deoxynucleotidyltransferase
  source 1..1587: mol_type = other DNA
atgcaccatcatcatcatcatggcggtagcggcagccacggcattcgtaccatcgattcggacttcgggaagaaacagcagaaaaaaatggataaccacgatagttccgccacttatgaaatcaaatttcacgagtttgtgctgttcattctcgaagaaaaaatgggtgcgacgcgtcgtacttttctgacagatttagcccgcaagaaagggttccgcgtcgagaatgaactgaccgacgaagttacccacatcgtggcagaaaatctgtcacgctctgaagtattggcttggctgaaagaacacaagatggagaagaccaagcaattcgaactgctggatattagctggcttatcgaaagcatgaaagttggtaaaccggtggacaccaaggggaaataccagttggcggaatcgggtgagatgagtgcgaacccagatccgacagagggtcgtgaaaacgagctgcctcctactatgaagaccgtttctccgtatgcgtgtatgcgccgcaccaccctgaacaaccataatcaacgttttacggacgcactggaaattcttcgtgaaaattacgagttcaaacgcaacgatgatactgcgctggaatttcgtcgtgctatctccgtgctgaaaagccttccgtttgaggtacgtagcctgaaagacacggaaggattgccctggatcggtgatgaagtcaaagggattatggaagaaatcatcgaggtcgggaattcgcgtgaagtgcaggccgtgctcaatgatgagtggtatcaaagcttccaccgctttaagagtgtctttggagtgggggtgaagacagcagacaagtggtaccgtatgggtctgcgcaccctcgaggatgttcgttccagcaagaccctgaagttgaccccgatgcagaaagcaggtctgctgtattatgaagatcttgctcgcggcgttacgcgcgccgaagctgacgcgatttctctgctggttcaggatgcagtcgcaactttcgacccggatgcgctggtggagattgtcggtggatttcgtcgtgggaaacctcagggtcacgacgttgatctgcttatcagttctccgggagctgagaaagagcaagaagaccagctcctgcagaaagtgaccaatctgtggaagaaacaagggttgttgctgtacggtcgtctggaatggacccagtgggaagatgggggtctgccatccggtaaggctgacgagggtgacgcgggtgcgaaatgctttctgatcctcaaactttatgatcatctggtgcgcaaaagcaaatgggaaatgccgacgggttcgaacatgggcgaggccaaaccgtggaaagcaattcgcgtagatctgctgcgttgcccctacggcggttttgcgtttgcgatgttgcagtggaccggaagccgcatgttccgtcgtgatctgcgttggtacgccactgacgagaagaacatgatgctggacaatcatgcgctgtatgacctgaccaagaaaatcaaactcaaagctaaatcggaagaggaaattttcgcacatctggggcttgaatacctggaaccgttcgaacgtaacgca

SEQ ID NO: 2878 - protein, 529 aa, synthetic construct
  REGION 1..529: note = Variant of terminal deoxynucleotidyltransferase
MHHHHHHGGSGSHGIRTIDSDFGKKQQKKMDNHDSSATYEIKFHEFVLFILEEKMGATRRTFLTDLARKKGFRVENELTDEVTHIVAENLSRSEVLAWLKEHKMEKTKQFELLDISWLIESMKVGKPVDTKGKYQLAESGEMSANPDPTEGRENELPPTMKTVSPYACMRRTTLNNHNQRFTDALEILRENYEFKRNDDTALEFRRAISVLKSLPFEVRSLKDTEGLPWIGDEVKGIMEEIIEVGNSREVQAVLNDEWYQSFHRFKSVFGVGVKTADKWYRMGLRTLEDVRSSKTLKLTPMQKAGLLYYEDLARGVTRAEADAISLLVQDAVATFDPDALVEIVGGFRRGKPQGHDVDLLISSPGAEKEQEDQLLQKVTNLWKKQGLLLYGRLEWTQWEDGGLPSGKADEGDAGAKCFLILKLYDHLVRKSKWEMPTGSNMGEAKPWKAIRVDLLRCPYGGFAFAMLQWTGSRMFRRDLRWYATDEKNMMLDNHALYDLTKKIKLKAKSEEEIFAHLGLEYLEPFERNA

SEQ ID NO: 2879 - DNA, 1587 bp, synthetic construct
  misc_feature 1..1587: note = Variant of terminal deoxynucleotidyltransferase
  source 1..1587: mol_type = other DNA
atgcaccatcatcatcatcatggcggtagcggcagccacggcattcgtaccatcgattcggacttcgggaagaaacagcagaaaaaaatggataaccacgatagttccgccacttatgaaatcaaatttcacgagtttgtgctgttcattctcgaagaaaaaatgggtgcgacgcgtcgtacttttctgacagatttagcccgcaagaaagggttccgcgtcgagaatgaactgaccgacgaagttacccacatcgtggcagaaaatctgtcacgctctgaagtattggcttggctgaaagaacacaagatggagaagaccaagcaattcgaactgctggatattagctggcttatcgaaagcatgaaagttggtaaaccggtggacaccaaggggaaataccagttggcggaatcgggtgagatgagtgcgaacccagatccgacagagggtcgtgaaaacgagctgcctcctactatgaagaccgtttctccgtatgcgtgtcaacgccgcaccaccctgaacaaccataatcaacgttttacggacgcactggaaattcttcgtgaaaattacgagttcaaacgcaacgatgatactgcgctggaatttcgtcgtgctatctccgtgctgaaaagccttccgtttgaggtacgtagcctgaaagacacggaaggattgccctggatcggtgatgaagtcaaagggattatggaagaaatcatcgaggtcgggaattcgcgtgaagtgcaggccgtgctcaatgatgagtggtatcaaagcttccaccgctttaagagtgtctttggagtgggggtgaagacagcagacaagtggtaccgtatgggtctgcgcaccctcgaggatgttcgttccagcaagaccctgaagttgaccccgatgcagaaagcgggtctgctgtattatgaagatcttgctcgcggcgttacgcgtgccgaagctgacgcgatttctctgctggttcaggatgcagtcgcaactttcgacccggatgcgctggtggagattgtcggtggatttcgtcgtgggaaacctcagggtcacgacgttgatctgcttatcagttctccgggagctgagaaagagcaagaagaccagctcctgcagaaagtgaccaatctgtggaagaaacaagggttgttgctgtacggtcgtctggaatggacccagtgggaagatgggaaactcccatccggtaaggctgacgagggtgacgcgggtgcgaaatgctttctgatcctcaaactttatgatcatctggtggacaaaagcaaatgggaaatgccgacgggttcgaacatgggcgaggccaaaccgtggaaagcaattcgcgtagatctgctgcgttgcccctacggcggttttgcgtttgcgatgttgcagtggaccggaagccgcatgttccgtcgtgatctgcgttggtacgccactgacgagaagaacatgatgctggacaatcatgcgctgtatgacctgaccaagaaaatcttcctcaaagctaaatcggaagaggaaattttcgcacatctggggcttgaatacctggaaccgttcgaacgtaacgca

SEQ ID NO: 2880 - protein, 529 aa, synthetic construct
  REGION 1..529: note = Variant of terminal deoxynucleotidyltransferase
MHHHHHHGGSGSHGIRTIDSDFGKKQQKKMDNHDSSATYEIKFHEFVLFILEEKMGATRRTFLTDLARKKGFRVENELTDEVTHIVAENLSRSEVLAWLKEHKMEKTKQFELLDISWLIESMKVGKPVDTKGKYQLAESGEMSANPDPTEGRENELPPTMKTVSPYACQRRTTLNNHNQRFTDALEILRENYEFKRNDDTALEFRRAISVLKSLPFEVRSLKDTEGLPWIGDEVKGIMEEIIEVGNSREVQAVLNDEWYQSFHRFKSVFGVGVKTADKWYRMGLRTLEDVRSSKTLKLTPMQKAGLLYYEDLARGVTRAEADAISLLVQDAVATFDPDALVEIVGGFRRGKPQGHDVDLLISSPGAEKEQEDQLLQKVTNLWKKQGLLLYGRLEWTQWEDGKLPSGKADEGDAGAKCFLILKLYDHLVDKSKWEMPTGSNMGEAKPWKAIRVDLLRCPYGGFAFAMLQWTGSRMFRRDLRWYATDEKNMMLDNHALYDLTKKIFLKAKSEEEIFAHLGLEYLEPFERNA

SEQ ID NO: 2881 - DNA, 1587 bp, synthetic construct
  misc_feature 1..1587: note = Variant of terminal deoxynucleotidyltransferase
  source 1..1587: mol_type = other DNA
atgcaccatcatcatcatcatggcggtagcggcagccacggcattcgtaccatcgattcggacttcgggaagaaacagcagaaaaaaatggataaccacgatagttccgccacttatgaaatcaaatttcacgagtttgtgctgttcattctcgaagaaaaaatgggtgcgacgcgtcgtacttttctgacagatttagcccgcaagaaagggttccgcgtcgagaatgaactgaccgacgaagttacccacatcgtggcagaaaatctgtcacgctctgaagtattggcttggctgaaagaacacaagatggagaagaccaagcaattcgaactgctggatattagctggcttatcgaaagcatgaaagttggtaaaccggtggacaccaaggggaaataccagttggcggaatcgggtgagatgagtgcgaacccagatccgacagagggtcgtgaaaacgagctgcctcctactatgaagaccgtttctccgtatgcgtgtcaacgccgcaccaccctgaacaaccataatcaacgttttacggacgcactggaaattcttcgtgaaaattacgagttcaaacgcaacgatgatactgcgctggaatttcgtcgtgctatctccgtgctgaaaagccttccgtttgaggtacgtagcctgaaagacacggaaggattgccctggatcggtgatgaagtcaaagggattatggaagaaatcatcgaggtcgggaattcgcgtgaagtgcaggccgtgctcaatgatgagtggtatcaaagcttccaccgctttaagagtgtctttggagtgggggtgaagacagcagacaagtggtaccgtatgggtctgcgcaccctcgaggatgttcgttccagcaagaccctgaagttgaccccgatgcagaaagcaggtctgctgtattatgaagatcttgctcgcggcgttacgcgtgccgaagctgacgcgatttctctgctggttcaggatgcagtcgcaactttcgacccggatgcggtcgtggagattgtcggtggatttcgtcgtgggaaacctcagggtcacgacgttgatctgcttatcagttctccgggagctgagaaagagcaagaagaccagctcctgcagaaagtgaccaatctgtggaagaaacaagggttgttgctgtacggtcgtctggaatggacccagtgggaagatgggggtgcgccatccggtaaggctgacgagggtgacgcgggtgcgaaatgctttctgatcctcaaactttatgatcataaagtggacaaaagcaaatgggaaatgccgacgggttcgaacatgggcgaggccaaaccgtggaaagcaattcgcgtagatctgctgcgttgcccctacggcggttttgcgtttgcgatgttgcagtggaccggaagccgcatgttccgtcgtgatctgcgttggtacgccactgacgagaagaacatgatgctggacaatcatgcgctgtatgacctgaccaagaaaatctttctcaaagctaaatcggaagaggaaattttcgcacatctggggcttgaatacctggaaccgttcgaacgtaacgca

SEQ ID NO: 2882 - protein, 529 aa, synthetic construct
  REGION 1..529: note = Variant of terminal deoxynucleotidyltransferase
MHHHHHHGGSGSHGIRTIDSDFGKKQQKKMDNHDSSATYEIKFHEFVLFILEEKMGATRRTFLTDLARKKGFRVENELTDEVTHIVAENLSRSEVLAWLKEHKMEKTKQFELLDISWLIESMKVGKPVDTKGKYQLAESGEMSANPDPTEGRENELPPTMKTVSPYACQRRTTLNNHNQRFTDALEILRENYEFKRNDDTALEFRRAISVLKSLPFEVRSLKDTEGLPWIGDEVKGIMEEIIEVGNSREVQAVLNDEWYQSFHRFKSVFGVGVKTADKWYRMGLRTLEDVRSSKTLKLTPMQKAGLLYYEDLARGVTRAEADAISLLVQDAVATFDPDAVVEIVGGFRRGKPQGHDVDLLISSPGAEKEQEDQLLQKVTNLWKKQGLLLYGRLEWTQWEDGGAPSGKADEGDAGAKCFLILKLYDHKVDKSKWEMPTGSNMGEAKPWKAIRVDLLRCPYGGFAFAMLQWTGSRMFRRDLRWYATDEKNMMLDNHALYDLTKKIFLKAKSEEEIFAHLGLEYLEPFERNA

SEQ ID NO: 2883 - DNA, 1587 bp, synthetic construct
  misc_feature 1..1587: note = Variant of terminal deoxynucleotidyltransferase
  source 1..1587: mol_type = other DNA
atgcaccatcatcatcatcatggcggtagcggcagccacggcattcgtaccatcgattcggacttcgggaagaaacagcagaaaaaaatggataaccacgatagttccgccacttatgaaatcaaatttcacgagtttgtgctgttcattctcgaagaaaaaatgggtgcgacgcgtcgtacttttctgacagatttagcccgcaagaaagggttccgcgtcgagaatgaactgaccgacgaagttacccacatcgtggcagaaaatctgtcacgctctgaagtattggcttggctgaaagaacacaagatggagaagaccaagcaattcgaactgctggatattagctggcttatcgaaagcatgaaagttggtaaaccggtggacaccaaggggaaataccagttggcggaatcgggtgagatgagtgcgaacccagatccgacagagggtcgtgaaaacgagctgcctcctactatgaagaccgtttctccgtatgcgtgtatgcgccgcaccaccctgaacaaccataatcaacgttttacggacgcactggaaattcttcgtgaaaattacgagttcaaacgcaacgatgatactgcgctggaatttcgtcgtgctatctccgtgctgaaaagccttccgtttgaggtacgtagcctgaaagacacggaaggattgccctggatcggtgatgaagtcaaagggattatggaagaaatcatcgaggtcgggaattcgcgtgaagtgcaggccgtgctcaatgatgagtggtatcaaagcttccaccgctttaagagtgtctttggagtgggggtgaagacagcagacaagtggtaccgtatgggtctgcgcaccctcgaggatgttcgttccagcaagaccctgaagttgaccccgatgcagaaagcaggtctgctgtattatgaagatcttgctcgcggcgttacgcgtgccgaagctgacgcgatttctctgctggttcaggatgcagtcgcaactttcgacccggatgcgatcgtggagattgtcggtggatttcgtcgtgggaaacctcagggtcacgacgttgatctgcttatcagttctccgggagctgagaaagagcaagaagaccagctcctgcagaaagtgaccaatctgtggaagaaacaagggttgttgctgtacggtcgtctggaatggacccagtgggaagatgggaagctgccatccggtaaggctgacgagggtgacgcgggtgcgaaatgctttctgatcctcaaactttatgatcatctggtggacaaaagcaaatgggaaatgccgacgggttcgaacatgggcgaggccaaaccgtggaaagcaattcgcgtagatctgctgcgttgcccctacggcggttttgcgtttgcgatgttgcagtggaccggaagccgcatgttccgtcgtgatctgcgttggtacgccactgacgagaagaacatgatgctggacaatcatgcgctgtatgacctgaccaagaaaatctttctcaaagctaaatcggaagaggaaattttcgcacatctggggcttgaatacctggaaccgttcgaacgtaacgca

SEQ ID NO: 2884 - protein, 529 aa, synthetic construct
  REGION 1..529: note = Variant of terminal deoxynucleotidyltransferase
MHHHHHHGGSGSHGIRTIDSDFGKKQQKKMDNHDSSATYEIKFHEFVLFILEEKMGATRRTFLTDLARKKGFRVENELTDEVTHIVAENLSRSEVLAWLKEHKMEKTKQFELLDISWLIESMKVGKPVDTKGKYQLAESGEMSANPDPTEGRENELPPTMKTVSPYACMRRTTLNNHNQRFTDALEILRENYEFKRNDDTALEFRRAISVLKSLPFEVRSLKDTEGLPWIGDEVKGIMEEIIEVGNSREVQAVLNDEWYQSFHRFKSVFGVGVKTADKWYRMGLRTLEDVRSSKTLKLTPMQKAGLLYYEDLARGVTRAEADAISLLVQDAVATFDPDAIVEIVGGFRRGKPQGHDVDLLISSPGAEKEQEDQLLQKVTNLWKKQGLLLYGRLEWTQWEDGKLPSGKADEGDAGAKCFLILKLYDHLVDKSKWEMPTGSNMGEAKPWKAIRVDLLRCPYGGFAFAMLQWTGSRMFRRDLRWYATDEKNMMLDNHALYDLTKKIFLKAKSEEEIFAHLGLEYLEPFERNA

SEQ ID NO: 2885 - DNA, 1587 bp, synthetic construct
  misc_feature 1..1587: note = Variant of terminal deoxynucleotidyltransferase
  source 1..1587: mol_type = other DNA
atgcaccatcatcatcatcatggcggtagcggcagccacggcattcgtaccatcgattcggacttcgggaagaaacagcagaaaaaaatggataaccacgatagttccgccacttatgaaatcaaatttcacgagtttgtgctgttcattctcgaagaaaaaatgggtgcgacgcgtcgtacttttctgacagatttagcccgcaagaaagggttccgcgtcgagaatgaactgaccgacgaagttacccacatcgtggcagaaaatctgtcacgctctgaagtattggcttggctgaaagaacacaagatggagaagaccaagcaattcgaactgctggatattagctggcttatcgaaagcatgaaagttggtaaaccggtggacaccaaggggaaataccagttggcggaatcgggtgagatgagtgcgaacccagatccgacagagggtcgtgaaaacgagctgcctcctactatgaagaccgtttctccgtatgcgtgtcaacgccgcaccaccctgaacaaccataatcaacgttttacggacgcactggaaattcttcgtgaaaattacgagttcaaacgcaacgatgatactgcgctggaatttcgtcgtgctatctccgtgctgaaaagccttccgtttgaggtacgtagcctgaaagacacggaaggattgccctggatcggtgatgaagtcaaagggattatggaagaaatcatcgaggtcgggaattcgcgtgaagtgcaggccgtgctcaatgatgagtggtatcaaagcttccaccgctttaagagtgtctttggagtgggggtgaagacagcagacaagtggtaccgtatgggtctgcgcaccctcgaggatgttcgttccagcaagaccctgaagttgaccccgatgcagaaagcgggtctgctgtattatgaagatcttgctcgcggcgttacgcgtgccgaagctgacgcgatttctctgctggttcaggatgcagtcgcaactttcgacccggatgcgctggtggagattgtcggtggatttcgtcgtgggaaacctcagggtcacgacgttgatctgcttatcagttctccgggagctgagaaagagcaagaagaccagctcctgcagaaagtgaccaatctgtggaagaaacaagggttgttgctgtacggtcgtctggaatggacccagtgggaagatgggggtctgccatccggtaaggctgacgagggtgacgcgggtgcgaaatgctttctgatcctcaaactttatgatcataaagtggacaaaagcaaatgggaaatgccgacgggttcgaacatgggcgaggccaaaccgtggaaagcaattcgcgtagatctgctgcgttgcccctacggcggttttgcgtttgcgatgttgcagtggaccggaagccgcatgttccgtcgtgatctgcgttggtacgccactgacgagaagaacatgatgctggacaatcatgcgctgtatgacctgaccaagaaaatcaaactcaaagctaaatcggaagaggaaattttcgcacatctggggcttgaatacctggaaccgttcgaacgtaacgca

SEQ ID NO: 2886 - protein, 529 aa, synthetic construct
  REGION 1..529: note = Variant of terminal deoxynucleotidyltransferase
MHHHHHHGGSGSHGIRTIDSDFGKKQQKKMDNHDSSATYEIKFHEFVLFILEEKMGATRRTFLTDLARKKGFRVENELTDEVTHIVAENLSRSEVLAWLKEHKMEKTKQFELLDISWLIESMKVGKPVDTKGKYQLAESGEMSANPDPTEGRENELPPTMKTVSPYACQRRTTLNNHNQRFTDALEILRENYEFKRNDDTALEFRRAISVLKSLPFEVRSLKDTEGLPWIGDEVKGIMEEIIEVGNSREVQAVLNDEWYQSFHRFKSVFGVGVKTADKWYRMGLRTLEDVRSSKTLKLTPMQKAGLLYYEDLARGVTRAEADAISLLVQDAVATFDPDALVEIVGGFRRGKPQGHDVDLLISSPGAEKEQEDQLLQKVTNLWKKQGLLLYGRLEWTQWEDGGLPSGKADEGDAGAKCFLILKLYDHKVDKSKWEMPTGSNMGEAKPWKAIRVDLLRCPYGGFAFAMLQWTGSRMFRRDLRWYATDEKNMMLDNHALYDLTKKIKLKAKSEEEIFAHLGLEYLEPFERNA

SEQ ID NO: 2887 - DNA, 1587 bp, synthetic construct
  misc_feature 1..1587: note = Variant of terminal deoxynucleotidyltransferase
  source 1..1587: mol_type = other DNA
atgcaccatcatcatcatcatggcggtagcggcagccacggcattcgtaccatcgattcggacttcgggaagaaacagcagaaaaaaatggataaccacgatagttccgccacttatgaaatcaaatttcacgagtttgtgctgttcattctcgaagaaaaaatgggtgcgacgcgtcgtacttttctgacagatttagcccgcaagaaagggttccgcgtcgagaatgaactgaccgacgaagttacccacatcgtggcagaaaatctgtcacgctctgaagtattggcttggctgaaagaacacaagatggagaagaccaagcaattcgaactgctggatattagctggcttatcgaaagcatgaaagttggtaaaccggtggacaccaaggggaaataccagttggcggaatcgggtgagatgagtgcgaacccagatccgacagagggtcgtgaaaacgagctgcctcctactatgaagaccgtttctccgtatgcgtgtcaacgccgcaccaccctgaacaaccataatcaacgttttacggacgcactggaaattcttcgtgaaaattacgagttcaaacgcaacgatgatactgcgctggaatttcgtcgtgctatctccgtgctgaaaagccttccgtttgaggtacgtagcctgaaagacacggaaggattgccctggatcggtgatgaagtcaaagggattatggaagaaatcatcgaggtcgggaattcgcgtgaagtgcaggccgtgctcaatgatgagtggtatcaaagcttccaccgctttaagagtgtctttggagtgggggtgaagacagcagacaagtggtaccgtatgggtctgcgcaccctcgaggatgttcgttccagcaagaccctgaagttgaccccgatgcagaaagcgggtctgctgtattatgaagatcttgctcgcggcgttacgcgtgccgaagctgacgcgatttctctgctggttcaggatgcagtcgcaactttcgacccggatgcgctggtggagattgtcggtggatttcgtcgtgggaaacctcagggtcacgacgttgatctgcttatcagttctccgggagctgagaaagagcaagaagaccagctcctgcagaaagtgaccaatctgtggaagaaacaagggttgttgctgtacggtcgtctggaatggacccagtgggaagatgggggttcgccatccggtaaggctgacgagggtgacgcgggtgcgaaatgctttctgatcctcaaactttatgatcataaggtgcgcaaaagcaaatgggaaatgccgacgggttcgaacatgggcgaggccaaaccgtggaaagcaattcgcgtagatctgctgcgttgcccctacggcggttttgcgtttgcgatgttgcagtggaccggaagccgcatgttccgtcgtgatctgcgttggtacgccactgacgagaagaacatgatgctggacaatcatgcgctgtatgacctgaccaagaaaatcaaactcaaagctaaatcggaagaggaaattttcgcacatctggggcttgaatacctggaaccgttcgaacgtaacgca

SEQ ID NO: 2888 - protein, 529 aa, synthetic construct
  REGION 1..529: note = Variant of terminal deoxynucleotidyltransferase
MHHHHHHGGSGSHGIRTIDSDFGKKQQKKMDNHDSSATYEIKFHEFVLFILEEKMGATRRTFLTDLARKKGFRVENELTDEVTHIVAENLSRSEVLAWLKEHKMEKTKQFELLDISWLIESMKVGKPVDTKGKYQLAESGEMSANPDPTEGRENELPPTMKTVSPYACQRRTTLNNHNQRFTDALEILRENYEFKRNDDTALEFRRAISVLKSLPFEVRSLKDTEGLPWIGDEVKGIMEEIIEVGNSREVQAVLNDEWYQSFHRFKSVFGVGVKTADKWYRMGLRTLEDVRSSKTLKLTPMQKAGLLYYEDLARGVTRAEADAISLLVQDAVATFDPDALVEIVGGFRRGKPQGHDVDLLISSPGAEKEQEDQLLQKVTNLWKKQGLLLYGRLEWTQWEDGGSPSGKADEGDAGAKCFLILKLYDHKVRKSKWEMPTGSNMGEAKPWKAIRVDLLRCPYGGFAFAMLQWTGSRMFRRDLRWYATDEKNMMLDNHALYDLTKKIKLKAKSEEEIFAHLGLEYLEPFERNA

SEQ ID NO: 2889 - DNA, 1587 bp, synthetic construct
  misc_feature 1..1587: note = Variant of terminal deoxynucleotidyltransferase
  source 1..1587: mol_type = other DNA
atgcaccatcatcatcatcatggcggtagcggcagccacggcattcgtaccatcgattcggacttcgggaagaaacagcagaaaaaaatggataaccacgatagttccgccacttatgaaatcaaatttcacgagtttgtgctgttcattctcgaagaaaaaatgggtgcgacgcgtcgtacttttctgacagatttagcccgcaagaaagggttccgcgtcgagaatgaactgaccgacgaagttacccacatcgtggcagaaaatctgtcacgctctgaagtattggcttggctgaaagaacacaagatggagaagaccaagcaattcgaactgctggatattagctggcttatcgaaagcatgaaagttggtaaaccggtggacaccaaggggaaataccagttggcggaatcgggtgagatgagtgcgaacccagatccgacagagggtcgtgaaaacgagctgcctcctactatgaagaccgtttctccgtatgcgtgtatgcgccgcaccaccctgaacaaccataatcaacgttttacggacgcactggaaattcttcgtgaaaattacgagttcaaacgcaacgatgatactgcgctggaatttcgtcgtgctatctccgtgctgaaaagccttccgtttgaggtacgtagcctgaaagacacggaaggattgccctggatcggtgatgaagtcaaagggattatggaagaaatcatcgaggtcgggaattcgcgtgaagtgcaggccgtgctcaatgatgagtggtatcaaagcttccaccgctttaagagtgtctttggagtgggggtgaagacagcagacaagtggtaccgtatgggtctgcgcaccctcgaggatgttcgttccagcaagaccctgaagttgaccccgatgcagaaagcaggtctgctgtattatgaagatcttgctcgcggcgttacgcgtgccgaagctgacgcgatttctctgctggttcaggatgcagtcgcaactttcgacccggatgcggtcgtggagattgtcggtggatttcgtcgtgggaaacctcagggtcacgacgttgatctgcttatcagttctccgggagctgagaaagagcaagaagaccagctcctgcagaaagtgaccaatctgtggaagaaacaagggttgttgctgtacggtcgtctggaatggacccagtgggaagatgggggtctgccatccggtaaggctgacgagggtgacgcgggtgcgaaatgctttctgatcctcaaactttatgatcataaggtggacaaaagcaaatgggaaatgccgacgggttcgaacatgggcgaggccaaaccgtggaaagcaattcgcgtagatctgctgcgttgcccctacggcggttttgcgtttgcgatgttgcagtggaccggaagccgcatgttccgtcgtgatctgcgttggtacgccactgacgagaagaacatgatgctggacaatcatgcgctgtatgacctgaccaagaaaatcaaactcaaagctaaatcggaagaggaaattttcgcacatctggggcttgaatacctggaaccgttcgaacgtaacgca

SEQ ID NO: 2890 - protein, 529 aa, synthetic construct
  REGION 1..529: note = Variant of terminal deoxynucleotidyltransferase
MHHHHHHGGSGSHGIRTIDSDFGKKQQKKMDNHDSSATYEIKFHEFVLFILEEKMGATRRTFLTDLARKKGFRVENELTDEVTHIVAENLSRSEVLAWLKEHKMEKTKQFELLDISWLIESMKVGKPVDTKGKYQLAESGEMSANPDPTEGRENELPPTMKTVSPYACMRRTTLNNHNQRFTDALEILRENYEFKRNDDTALEFRRAISVLKSLPFEVRSLKDTEGLPWIGDEVKGIMEEIIEVGNSREVQAVLNDEWYQSFHRFKSVFGVGVKTADKWYRMGLRTLEDVRSSKTLKLTPMQKAGLLYYEDLARGVTRAEADAISLLVQDAVATFDPDAVVEIVGGFRRGKPQGHDVDLLISSPGAEKEQEDQLLQKVTNLWKKQGLLLYGRLEWTQWEDGGLPSGKADEGDAGAKCFLILKLYDHKVDKSKWEMPTGSNMGEAKPWKAIRVDLLRCPYGGFAFAMLQWTGSRMFRRDLRWYATDEKNMMLDNHALYDLTKKIKLKAKSEEEIFAHLGLEYLEPFERNA

SEQ ID NO: 2891 - DNA, 1587 bp, synthetic construct
  misc_feature 1..1587: note = Variant of terminal deoxynucleotidyltransferase
  source 1..1587: mol_type = other DNA
atgcaccatcatcatcatcatggcggtagcggcagccacggcattcgtaccatcgattcggacttcgggaagaaacagcagaaaaaaatggataaccacgatagttccgccacttatgaaatcaaatttcacgagtttgtgctgttcattctcgaagaaaaaatgggtgcgacgcgtcgtacttttctgacagatttagcccgcaagaaagggttccgcgtcgagaatgaactgaccgacgaagttacccacatcgtggcagaaaatctgtcacgctctgaagtattggcttggctgaaagaacacaagatggagaagaccaagcaattcgaactgctggatattagctggcttatcgaaagcatgaaagttggtaaaccggtggacaccaaggggaaataccagttggcggaatcgggtgagatgagtgcgaacccagatccgacagagggtcgtgaaaacgagctgcctcctactatgaagaccgtttctccgtatgcgtgtcaacgccgcaccaccctgaacaaccataatcaacgttttacggacgcactggaaattcttcgtgaaaattacgagttcaaacgcaacgatgatactgcgctggaatttcgtcgtgctatctccgtgctgaaaagccttccgtttgaggtacgtagcctgaaagacacggaaggattgccctggatcggtgatgaagtcaaagggattatggaagaaatcatcgaggtcgggaattcgcgtgaagtgcaggccgtgctcaatgatgagtggtatcaaagcttccaccgctttaagagtgtctttggagtgggggtgaagacagcagacaagtggtaccgtatgggtctgcgcaccctcgaggatgttcgttccagcaagaccctgaagttgaccccgatgcagaaagcgggtctgctgtattatgaagatcttgctcgcggcgttacgcgtgccgaagctgacgcgatttctctgatggttcgcgatgcagtcgcaactttcgacccggatgcgctggtggagattgtcggtggatttcgtcgtgggaaacctcagggtcacgacgttgatctgcttatcagttctccgggagctgagaaagagcaagaagaccagctcctgcagaaagtgacgaatctgtggaagaaacaagggttgttgctgtacggtcgtctggaatggacccagtgggaagatgggaaactcccatccggtaaggctgacgagggtgacgcgggtgcgaaatgctttctgatcctcaaactttatgatcataaagtggacaaaagcaaatgggaaatgccgacgggttcgaacatgggcgaggccaaaccgtggaaagcaattcgcgtagatctgctgcgttgcccctacggcggttttgcgtttgcaatgttgcagtggaccggaagccgcatgttccgtcgtgatctgcgttggtacgccactgacgagaagaacatgatgctggacaatcatgcgctgtatgacctgaccaagaaaatctttctcaaagctaaatcggaagaggaaattttcgcacatctggggcttgaatacctggaaccgttcgaacgtaacgca

SEQ ID NO: 2892 - protein, 529 aa, synthetic construct
  REGION 1..529: note = Variant of terminal deoxynucleotidyltransferase
MHHHHHHGGSGSHGIRTIDSDFGKKQQKKMDNHDSSATYEIKFHEFVLFILEEKMGATRRTFLTDLARKKGFRVENELTDEVTHIVAENLSRSEVLAWLKEHKMEKTKQFELLDISWLIESMKVGKPVDTKGKYQLAESGEMSANPDPTEGRENELPPTMKTVSPYACQRRTTLNNHNQRFTDALEILRENYEFKRNDDTALEFRRAISVLKSLPFEVRSLKDTEGLPWIGDEVKGIMEEIIEVGNSREVQAVLNDEWYQSFHRFKSVFGVGVKTADKWYRMGLRTLEDVRSSKTLKLTPMQKAGLLYYEDLARGVTRAEADAISLMVRDAVATFDPDALVEIVGGFRRGKPQGHDVDLLISSPGAEKEQEDQLLQKVTNLWKKQGLLLYGRLEWTQWEDGKLPSGKADEGDAGAKCFLILKLYDHKVDKSKWEMPTGSNMGEAKPWKAIRVDLLRCPYGGFAFAMLQWTGSRMFRRDLRWYATDEKNMMLDNHALYDLTKKIFLKAKSEEEIFAHLGLEYLEPFERNA

SEQ ID NO: 2893 - DNA, 1587 bp, synthetic construct
  misc_feature 1..1587: note = Variant of terminal deoxynucleotidyltransferase
  source 1..1587: mol_type = other DNA
atgcaccatcatcatcatcatggcggtagcggcagccacggcattcgtaccatcgattcggacttcgggaagaaacagcagaaaaaaatggataaccacgatagttccgccacttatgaaatcaaatttcacgagtttgtgctgttcattctcgaagaaaaaatgggtgcgacgcgtcgtacttttctgacagatttagcccgcaagaaagggttccgcgtcgagaatgaactgaccgacgaagttacccacatcgtggcagaaaatctgtcacgctctgaagtattggcttggctgaaagaacacaagatggagaagaccaagcaattcgaactgctggatattagctggcttatcgaaagcatgaaagttggtaaaccggtggacaccaaggggaaataccagttggcggaatcgggtgagatgagtgcgaacccagatccgacagagggtcgtgaaaacgagctgcctcctactatgaagaccgtttctccgtatgcgtgtatgcgccgcaccaccctgaacaaccataatcaacgttttacggacgcactggaaattcttcgtgaaaattacgagttcaaacgcaacgatgatactgcgctggaatttcgtcgtgctatctccgtgctgaaaagccttccgtttgaggtacgtagcctgaaagacacggaaggattgccctggatcggtgatgaagtcaaagggattatggaagaaatcatcgaggtcgggaattcgcgtgaagtgcaggccgtgctcaatgatgagtggtatcaaagcttccaccgctttaagagtgtctttggagtgggggtgaagacagcagacaagtggtaccgtatgggtctgcgcaccctcgaggatgttcgttccagcaagaccctgaagttgaccccgatgcagaaagcgggtctgctgtattatgaagatcttgctcgcggcgttacgcgtgccgaagctgacgcgatttctctgctggttcaggatgcagtcgcaactttcgacccggatgcgatcgtggagattgtcggtggatttcgtcgtgggaaacctcagggtcacgacgttgatctgcttatcagttctccgggagctgagaaagagcaagaagaccagctcctgcagaaagtgaccaatctgtggaagaaacaagggttgttgctgtacggtcgtctggaatggacccagtgggaagatgggaagctgccatccggtaaggctgacgagggtgacgcgggtgcgaaatgctttctgatcctcaaactttatgatcataaagtggacaaaagcaaatgggaaatgccgacgggttcgaacatgggcgaggccaaaccgtggaaagcaattcgcgtagatctgctgcgttgcccctacggcggttttgcgtttgcgatgttgcagtggaccggaagccgcatgttccgtcgtgatctgcgttggtacgccactgacgagaagaacatgatgctggacaatcatgcgctgtatgacctgaccaagaaaatcttcctccctgctaaatcggaagaggaaattttcgcacatctggggcttgaatacctggaaccgttcgaacgtaacgca

SEQ ID NO: 2894 - protein, 529 aa, synthetic construct
  REGION 1..529: note = Variant of terminal deoxynucleotidyltransferase
MHHHHHHGGSGSHGIRTIDSDFGKKQQKKMDNHDSSATYEIKFHEFVLFILEEKMGATRRTFLTDLARKKGFRVENELTDEVTHIVAENLSRSEVLAWLKEHKMEKTKQFELLDISWLIESMKVGKPVDTKGKYQLAESGEMSANPDPTEGRENELPPTMKTVSPYACMRRTTLNNHNQRFTDALEILRENYEFKRNDDTALEFRRAISVLKSLPFEVRSLKDTEGLPWIGDEVKGIMEEIIEVGNSREVQAVLNDEWYQSFHRFKSVFGVGVKTADKWYRMGLRTLEDVRSSKTLKLTPMQKAGLLYYEDLARGVTRAEADAISLLVQDAVATFDPDAIVEIVGGFRRGKPQGHDVDLLISSPGAEKEQEDQLLQKVTNLWKKQGLLLYGRLEWTQWEDGKLPSGKADEGDAGAKCFLILKLYDHKVDKSKWEMPTGSNMGEAKPWKAIRVDLLRCPYGGFAFAMLQWTGSRMFRRDLRWYATDEKNMMLDNHALYDLTKKIFLPAKSEEEIFAHLGLEYLEPFERNA

SEQ ID NO: 2895 - DNA, 1587 bp, synthetic construct
  misc_feature 1..1587: note = Variant of terminal deoxynucleotidyltransferase
  source 1..1587: mol_type = other DNA
atgcaccatcatcatcatcatggcggtagcggcagccacggcattcgtaccatcgattcggacttcgggaagaaacagcagaaaaaaatggataaccacgatagttccgccacttatgaaatcaaatttcacgagtttgtgctgttcattctcgaagaaaaaatgggtgcgacgcgtcgtacttttctgacagatttagcccgcaagaaagggttccgcgtcgagaatgaactgaccgacgaagttacccacatcgtggcagaaaatctgtcacgctctgaagtattggcttggctgaaagaacacaagatggagaagaccaagcaattcgaactgctggatattagctggcttatcgaaagcatgaaagttggtaaaccggtggacaccaaggggaaataccagttggcggaatcgggtgagatgagtgcgaacccagatccgacagagggtcgtgaaaacgagctgcctcctactatgaagaccgtttctccgtatgcgtgtcaacgccgcaccaccctgaacaaccataatcaacgttttacggacgcactggaaattcttcgtgaaaattacgagttcaaacgcaacgatgatactgcgctggaatttcgtcgtgctatctccgtgctgaaaagccttccgtttgaggtacgtagcctgaaagacacggaaggattgccctggatcggtgatgaagtcaaagggattatggaagaaatcatcgaggtcgggaattcgcgtgaagtgcaggccgtgctcaatgatgagtggtatcaaagcttccaccgctttaagagtgtctttggagtgggggtgaagacagcagacaagtggtaccgtatgggtctgcgcaccctcgaggatgttcgttccagcaagaccctgaagttgaccccgatgcagaaagcgggtctgctgtattatgaagatcttgctcgcggcgttacgcgtgccgaagctgacgcgatttctctgctggttcaggatgcagtcgcaactttcgacccggatgcgctggtggagattgtcggtggatttcgtcgtgggaaacctcagggtcacgacgttgatctgcttatcagttctccgggagctgagaaagagcaagaagaccagctcctgcagaaagtgaccaatctgtggaagaaacaagggttgttgctgtacggtcgtctggaatggacccagtgggaagatgggaaactcccatccggtaaggctgacgagggtgacgcgggtgcgaaatgctttctgatcctcaaactttatgatcatatggtggacaaaagcaaatgggaaatgccgacgggttcgaacatgggcgaggccaaaccgtggaaagcaattcgcgtagatctgctgcgttgcccctacggcggttttgcgtttgcgatgttgcagtggaccggaagccgcatgttccgtcgtgatctgcgttggtacgccactgacgagaagaacatgatgctggacaatcatgcgctgtatgacctgaccaagaaaatctttctcaaagctaaatcggaagaggaaattttcgcacatctggggcttgaatacctggaaccgttcgaacgtaacgca

SEQ ID NO: 2896 - protein, 529 aa, synthetic construct
  REGION 1..529: note = Variant of terminal deoxynucleotidyltransferase
MHHHHHHGGSGSHGIRTIDSDFGKKQQKKMDNHDSSATYEIKFHEFVLFILEEKMGATRRTFLTDLARKKGFRVENELTDEVTHIVAENLSRSEVLAWLKEHKMEKTKQFELLDISWLIESMKVGKPVDTKGKYQLAESGEMSANPDPTEGRENELPPTMKTVSPYACQRRTTLNNHNQRFTDALEILRENYEFKRNDDTALEFRRAISVLKSLPFEVRSLKDTEGLPWIGDEVKGIMEEIIEVGNSREVQAVLNDEWYQSFHRFKSVFGVGVKTADKWYRMGLRTLEDVRSSKTLKLTPMQKAGLLYYEDLARGVTRAEADAISLLVQDAVATFDPDALVEIVGGFRRGKPQGHDVDLLISSPGAEKEQEDQLLQKVTNLWKKQGLLLYGRLEWTQWEDGKLPSGKADEGDAGAKCFLILKLYDHMVDKSKWEMPTGSNMGEAKPWKAIRVDLLRCPYGGFAFAMLQWTGSRMFRRDLRWYATDEKNMMLDNHALYDLTKKIFLKAKSEEEIFAHLGLEYLEPFERNA

SEQ ID NO: 2897 - DNA, 1587 bp, synthetic construct
  misc_feature 1..1587: note = Variant of terminal deoxynucleotidyltransferase
  source 1..1587: mol_type = other DNA
atgcaccatcatcatcatcatggcggtagcggcagccacggcattcgtaccatcgattcggacttcgggaagaaacagcagaaaaaaatggataaccacgatagttccgccacttatgaaatcaaatttcacgagtttgtgctgttcattctcgaagaaaaaatgggtgcgacgcgtcgtacttttctgacagatttagcccgcaagaaagggttccgcgtcgagaatgaactgaccgacgaagttacccacatcgtggcagaaaatctgtcacgctctgaagtattggcttggctgaaagaacacaagatggagaagaccaagcaattcgaactgctggatattagctggcttatcgaaagcatgaaagttggtaaaccggtggacaccaaggggaaataccagttggcggaatcgggtgagatgagtgcgaacccagatccgacagagggtcgtgaaaacgagctgcctcctactatgaagaccgtttctccgtatgcgtgtcaacgccgcaccaccctgaacaaccataatcaacgttttacggacgcactggaaattcttcgtgaaaattacgagttcaaacgcaacgatgatactgcgctggaatttcgtcgtgctatctccgtgctgaaaagccttccgtttgaggtacgtagcctgaaagacacggaaggattgccctggatcggtgatgaagtcaaagggattatggaagaaatcatcgaggtcgggaattcgcgtgaagtgcaggccgtgctcaatgatgagtggtatcaaagcttccaccgctttaagagtgtctttggagtgggggtgaagacagcagacaagtggtaccgtatgggtctgcgcaccctcgaggatgttcgtagcagcaagaccctgaagttgaccccgatgcagaaagcgggtctgctgtattatgaagatcttgctcgcggcgttacgcgtgccgaagctgacgcgatttctctgatggttcgcgatgcagtcgcaactttcgacccggatgcgctggtggagattgtcggtggatttcgtcgtgggaaacctcagggtcacgacgttgatctgcttatcagttctccgggagctgagaaagagcaagaagaccagctcctgcagaaagtgacgaatctgtggaagaaacaagggttgttgctgtacggtcgtctggaatggacccagtgggaagatgggaaactcgattccgggaaggctgacgtaggtgacgcgggtgcgaaatgctttctgatcctcaaactttatgatcataaagtggacaaaagcaaatgggaaatgccgacgggttcgaacatgggcgaggccaaaccgtggaaagcaattcgcgtagatctgctgcgttgcccctacggcggttttgcgtttgcaatgttgcagtggaccggaagccgcatgttccgccgtgatctgcgttggtacgccacggacgagaagaacatgatgctggacaatcatgcgctgtatgacctgaccaagaaaatctttctcaaagctaaatcggaagaggaaattttcgcacatctggggcttgaatacctggaaccgttcgaacgtaacgca

SEQ ID NO: 2898 - protein, 529 aa, synthetic construct
  REGION 1..529: note = Variant of terminal deoxynucleotidyltransferase
MHHHHHHGGSGSHGIRTIDSDFGKKQQKKMDNHDSSATYEIKFHEFVLFILEEKMGATRRTFLTDLARKKGFRVENELTDEVTHIVAENLSRSEVLAWLKEHKMEKTKQFELLDISWLIESMKVGKPVDTKGKYQLAESGEMSANPDPTEGRENELPPTMKTVSPYACQRRTTLNNHNQRFTDALEILRENYEFKRNDDTALEFRRAISVLKSLPFEVRSLKDTEGLPWIGDEVKGIMEEIIEVGNSREVQAVLNDEWYQSFHRFKSVFGVGVKTADKWYRMGLRTLEDVRSSKTLKLTPMQKAGLLYYEDLARGVTRAEADAISLMVRDAVATFDPDALVEIVGGFRRGKPQGHDVDLLISSPGAEKEQEDQLLQKVTNLWKKQGLLLYGRLEWTQWEDGKLDSGKADVGDAGAKCFLILKLYDHKVDKSKWEMPTGSNMGEAKPWKAIRVDLLRCPYGGFAFAMLQWTGSRMFRRDLRWYATDEKNMMLDNHALYDLTKKIFLKAKSEEEIFAHLGLEYLEPFERNA

SEQ ID NO: 2899 - DNA, 1587 bp, synthetic construct
  misc_feature 1..1587: note = Variant of terminal deoxynucleotidyltransferase
  source 1..1587: mol_type = other DNA
atgcaccatcatcatcatcatggcggtagcggcagccacggcattcgtaccatcgattcggacttcgggaagaaacagcagaaaaaaatggataaccacgatagttccgccacttatgaaatcaaatttcacgagtttgtgctgttcattctcgaagaaaaaatgggtgcgacgcgtcgtacttttctgacagatttagcccgcaagaaagggttccgcgtcgagaatgaactgaccgacgaagttacccacatcgtggcagaaaatctgtcacgctctgaagtattggcttggctgaaagaacacaagatggagaagaccaagcaattcgaactgctggatattagctggcttatcgaaagcatgaaagttggtaaaccggtggacaccaaggggaaataccagttggcggaatcgggtgagatgagtgcgaacccagatccgacagagggtcgtgaaaacgagctgcctcctactatgaagaccgtttctccgtatgcgtgtcaacgccgcaccaccctgaacaaccataatcaacgttttacggacgcactggaaattcttcgtgaaaattacgagttcaaacgcaacgatgatactgcgctggaatttcgtcgtgctatctccgtgctgaaaagccttccgtttgaggtacgtagcctgaaagacacggaaggattgccctggatcggtgatgaagtcaaagggattatggaagaaatcatcgaggtcgggaattcgcgtgaagtgcaggccgtgctcaatgatgagtggtatcaaagcttccaccgctttaagagtgtctttggagtgggggtgaagacagcagacaagtggtaccgtatgggtctgcgcaccctcgaggatgttcgttccagcaagaccctgaagttgaccccgatgcagaaagcgggtctgctgtattatgaagatcttgctcgcggcgttacgcgtgccgaagctgacgcgatttctctgctggttcaggatgcagtcgcaactttcgacccggatgcgatcgtggagattgtcggtggatttcgtcgtgggaaacctcagggtcacgacgttgatctgcttatcagttctccgggagctgagaaagagcaagaagaccagctcctgcagaaagtgaccaatctgtggaagaaacaagggttgttgctgtacggtcgtctggaatggacccagtgggaagatgggggtctgccatccggtaaggctgacgagggtgacgcgggtgcgaaatgctttctgatcctcaaactttatgatcataaagtggacaaaagcaaatgggaaatgccgacgggttcgaacatgggcgaggccaaaccgtggaaagcaattcgcgtagatctgctgcgttgcccctacggcggttttgcgtttgcgatgttgcagtggaccggaagccgcatgttccgtcgtgatctgcgttggtacgccactgacgagaagaacatgatgctggacaatcatgcgctgtatgacctgaccaagaaaatcaaactcaaagctaaatcggaagaggaaattttcgcacatctggggcttgaatacctggaaccgttcgaacgtaacgca

SEQ ID NO: 2900 - protein, 529 aa, synthetic construct
  REGION 1..529: note = Variant of terminal deoxynucleotidyltransferase
MHHHHHHGGSGSHGIRTIDSDFGKKQQKKMDNHDSSATYEIKFHEFVLFILEEKMGATRRTFLTDLARKKGFRVENELTDEVTHIVAENLSRSEVLAWLKEHKMEKTKQFELLDISWLIESMKVGKPVDTKGKYQLAESGEMSANPDPTEGRENELPPTMKTVSPYACQRRTTLNNHNQRFTDALEILRENYEFKRNDDTALEFRRAISVLKSLPFEVRSLKDTEGLPWIGDEVKGIMEEIIEVGNSREVQAVLNDEWYQSFHRFKSVFGVGVKTADKWYRMGLRTLEDVRSSKTLKLTPMQKAGLLYYEDLARGVTRAEADAISLLVQDAVATFDPDAIVEIVGGFRRGKPQGHDVDLLISSPGAEKEQEDQLLQKVTNLWKKQGLLLYGRLEWTQWEDGGLPSGKADEGDAGAKCFLILKLYDHKVDKSKWEMPTGSNMGEAKPWKAIRVDLLRCPYGGFAFAMLQWTGSRMFRRDLRWYATDEKNMMLDNHALYDLTKKIKLKAKSEEEIFAHLGLEYLEPFERNA

SEQ ID NO: 2901 - DNA, 1587 bp, synthetic construct
  misc_feature 1..1587: note = Variant of terminal deoxynucleotidyltransferase
  source 1..1587: mol_type = other DNA
atgcaccatcatcatcatcatggcggtagcggcagccacggcattcgtaccatcgattcggacttcgggaagaaacagcagaaaaaaatggataaccacgatagttccgccacttatgaaatcaaatttcacgagtttgtgctgttcattctcgaagaaaaaatgggtgcgacgcgtcgtacttttctgacagatttagcccgcaagaaagggttccgcgtcgagaatgaactgaccgacgaagttacccacatcgtggcagaaaatctgtcacgctctgaagtattggcttggctgaaagaacacaagatggagaagaccaagcaattcgaactgctggatattagctggcttatcgaaagcatgaaagttggtaaaccggtggacaccaaggggaaataccagttggcggaatcgggtgagatgagtgcgaacccagatccgacagagggtcgtgaaaacgagctgcctcctactatgaagaccgtttctccgtatgcgtgtcaacgccgcaccaccctgaacaaccataatcaacgttttacggacgcactggaaattcttcgtgaaaattacgagttcaaacgcaacgatgatactgcgctggaatttcgtcgtgctatctccgtgctgaaaagccttccgtttgaggtacgtagcctgaaagacacggaaggattgccctggatcggtgatgaagtcaaagggattatggaagaaatcatcgaggtcgggaattcgcgtgaagtgcaggccgtgctcaatgatgagtggtatcaaagcttccaccgctttaagagtgtctttggagtgggggtgaagacagcagacaagtggtaccgtatgggtctgcgcaccctcgaggatgttcgttccagcaagaccctgaagttgaccccgatgcagaaagcaggtctgctgtattatgaagatcttgctcgcggcgttacgcgtgccgaagctgacgcgatttctctgctggttcaggatgcagtcgcaactttcgacccggatgcgatcgtggagattgtcggtggatttcgtcgtgggaaacctcagggtcacgacgttgatctgcttatcagttctccgggagctgagaaagagcaagaagaccagctcctgcagaaagtgaccaatctgtggaagaaacaagggttgttgctgtacggtcgtctggaatggacccagtgggaagatgggaagctgccatccggtaaggctgacgagggtgacgcgggtgcgaaatgctttctgatcctcaaactttatgatcataaagtggacaaaagcaaatgggaaatgccgacgggttcgaacatgggcgaggccaaaccgtggaaagcaattcgcgtagatctgctgcgttgcccctacggcggttttgcgtttgcgatgttgcagtggaccggaagccgcatgttccgtcgtgatctgcgttggtacgccactgacgagaagaacatgatgctggacaatcatgcgctgtatgacctgaccaagaaaatcttcctccctgctaaatcggaagaggaaattttcgcacatctggggcttgaatacctggaaccgttcgaacgtaacgca

SEQ ID NO: 2902 - protein, 529 aa, synthetic construct
  REGION 1..529: note = Variant of terminal deoxynucleotidyltransferase
MHHHHHHGGSGSHGIRTIDSDFGKKQQKKMDNHDSSATYEIKFHEFVLFILEEKMGATRRTFLTDLARKKGFRVENELTDEVTHIVAENLSRSEVLAWLKEHKMEKTKQFELLDISWLIESMKVGKPVDTKGKYQLAESGEMSANPDPTEGRENELPPTMKTVSPYACQRRTTLNNHNQRFTDALEILRENYEFKRNDDTALEFRRAISVLKSLPFEVRSLKDTEGLPWIGDEVKGIMEEIIEVGNSREVQAVLNDEWYQSFHRFKSVFGVGVKTADKWYRMGLRTLEDVRSSKTLKLTPMQKAGLLYYEDLARGVTRAEADAISLLVQDAVATFDPDAIVEIVGGFRRGKPQGHDVDLLISSPGAEKEQEDQLLQKVTNLWKKQGLLLYGRLEWTQWEDGKLPSGKADEGDAGAKCFLILKLYDHKVDKSKWEMPTGSNMGEAKPWKAIRVDLLRCPYGGFAFAMLQWTGSRMFRRDLRWYATDEKNMMLDNHALYDLTKKIFLPAKSEEEIFAHLGLEYLEPFERNA

SEQ ID NO: 2903 - DNA, 1587 bp, synthetic construct
  misc_feature 1..1587: note = Variant of terminal deoxynucleotidyltransferase
  source 1..1587: mol_type = other DNA
atgcaccatcatcatcatcatggcggtagcggcagccacggcattcgtaccatcgattcggacttcgggaagaaacagcagaaaaaaatggataaccacgatagttccgccacttatgaaatcaaatttcacgagtttgtgctgttcattctcgaagaaaaaatgggtgcgacgcgtcgtacttttctgacagatttagcccgcaagaaagggttccgcgtcgagaatgaactgaccgacgaagttacccacatcgtggcagaaaatctgtcacgctctgaagtattggcttggctgaaagaacacaagatggagaagaccaagcaattcgaactgctggatattagctggcttatcgaaagcatgaaagttggtaaaccggtggacaccaaggggaaataccagttggcggaatcgggtgagatgagtgcgaacccagatccgacagagggtcgtgaaaacgagctgcctcctactatgaagaccgtttctccgtatgcgtgtcaacgccgcaccaccctgaacaaccataatcaacgttttacggacgcactggaaattcttcgtgaaaattacgagttcaaacgcaacgatgatactgcgctggaatttcgtcgtgctatctccgtgctgaaaagccttccgtttgaggtacgtagcctgaaagacacggaaggattgccctggatcggtgatgaagtcaaagggattatggaagaaatcatcgaggtcgggaattcgcgtgaagtgcaggccgtgctcaatgatgagtggtatcaaagcttccaccgctttaagagtgtctttggagtgggggtgaagacagcagacaagtggtaccgtatgggtctgcgcaccctcgaggatgttcgttccagcaagaccctgaagttgaccccgatgcagaaagcgggtctgctgtattatgaagatcttgctcgcggcgttacgcgtgccgaagctgacgcgatttctctgatggttcaggatgcagtcgcaactttcgacccggatgcgctggtggagattgtcggtggatttcgtcgtgggaaacctcagggtcacgacgttgatctgcttatcagttctccgggagctgagaaagagcaagaagaccagctcctgcagaaagtgacgaatctgtggaagaaacaagggttgttgctgtacggtcgtctggaatggacccagtgggaagatgggaaactcccgtccgggaaggctgacgtaggtgacgcgggtgcgaaatgctttctgatcctcaaactttatgatcataaagtggacaaaagcaaatgggaaatgccgacgggttcgaacatgggcgaggccaaaccgtggaaagcaattcgcgtagatctgctgcgttgcccctacggcggttttgcgtttgcaatgttgcagtggaccggaagccgcatgttccgtcgtgatctgcgttggtacgccgcggacgagaagaacatgatgctggacaatcatgcgctgtatgacctgaccaagaaaatctttctcaaagctaaatcggaagaggaaattttcgcacatctggggcttgaatacctggaaccgttcgaacgtaacgca

SEQ ID NO: 2904 - protein, 529 aa, synthetic construct
  REGION 1..529: note = Variant of terminal deoxynucleotidyltransferase
MHHHHHHGGSGSHGIRTIDSDFGKKQQKKMDNHDSSATYEIKFHEFVLFILEEKMGATRRTFLTDLARKKGFRVENELTDEVTHIVAENLSRSEVLAWLKEHKMEKTKQFELLDISWLIESMKVGKPVDTKGKYQLAESGEMSANPDPTEGRENELPPTMKTVSPYACQRRTTLNNHNQRFTDALEILRENYEFKRNDDTALEFRRAISVLKSLPFEVRSLKDTEGLPWIGDEVKGIMEEIIEVGNSREVQAVLNDEWYQSFHRFKSVFGVGVKTADKWYRMGLRTLEDVRSSKTLKLTPMQKAGLLYYEDLARGVTRAEADAISLMVQDAVATFDPDALVEIVGGFRRGKPQGHDVDLLISSPGAEKEQEDQLLQKVTNLWKKQGLLLYGRLEWTQWEDGKLPSGKADVGDAGAKCFLILKLYDHKVDKSKWEMPTGSNMGEAKPWKAIRVDLLRCPYGGFAFAMLQWTGSRMFRRDLRWYAADEKNMMLDNHALYDLTKKIFLKAKSEEEIFAHLGLEYLEPFERNA

SEQ ID NO: 2905 - DNA, 1587 bp, synthetic construct
  misc_feature 1..1587: note = Variant of terminal deoxynucleotidyltransferase
  source 1..1587: mol_type = other DNA
atgcaccatcatcatcatcatggcggtagcggcagccacggcattcgtaccatcgattcggacttcgggaagaaacagcagaaaaaaatggataaccacgatagttccgccacttatgaaatcaaatttcacgagtttgtgctgttcattctcgaagaaaaaatgggtgcgacgcgtcgtacttttctgacagatttagcccgcaagaaagggttccgcgtcgagaatgaactgaccgacgaagttacccacatcgtggcagaaaatctgtcacgctctgaagtattggcttggctgaaagaacacaagatggagaagaccaagcaattcgaactgctggatattagctggcttatcgaaagcatgaaagttggtaaaccggtggacaccaaggggaaataccagttggcggaatcgggtgagatgagtgcgaacccagatccgacagagggtcgtgaaaacgagctgcctcctactatgaagaccgtttctccgtatgcgtgtcaacgccgcaccaccctgaacaaccataatcaacgttttacggacgcactggaaattcttcgtgaaaattacgagttcaaacgcaacgatgatactgcgctggaatttcgtcgtgctatctccgtgctgaaaagccttccgtttgaggtacgtagcctgaaagacacggaaggattgccctggatcggtgatgaagtcaaagggattatggaagaaatcatcgaggtcgggaattcgcgtgaagtgcaggccgtgctcaatgatgagtggtatcaaagcttccaccgctttaagagtgtctttggagtgggggtgaagacagcagacaagtggtaccgtatgggtctgcgcaccctcgaggatgttcgtagcagcaagaccctgaagttgaccccgatgcagaaagcgggtctgctgtattatgaagatcttgctcgcggcgttacgcgtgccgaagctgacgcgatttctctgctggttcaggatgcagtcgcaactttcgacccggatgcgctggtggagattgtcggtggatttcgtcgtgggaaacctcagggtcacgacgttgatctgcttatcagttctccgggagctgagaaagagcaagaagaccagctcctgcagaaagtgatgaatctgtggaagaaacaagggttgttgctgtacggtcgtctggaatggacccagtgggaagatgggaaactcgattccgggaaggctgacgtaggtgacgcgggtgcgaaatgctttctgatcctcaaactttatgatcataaagtggacaaaagcaaatgggaaatgccgacgggttcgaacatgggcgaggccaaaccgtggaaagcaattcgcgtagatctgctgcgttgcccctacggcggttttgcgtttgcaatgttgcagtggaccggaagccgcatgttccgtcgtgatctgcgttggtacgccactgacgagaagaacatgatgctggacaatcatgcgctgtatgacctgaccaagaaaatctttctcaaagctaaatcggaagaggaaattttcgcacatctggggcttgaatacctggaaccgttcgaacgtaacgca

SEQ ID NO: 2906 - protein, 529 aa, synthetic construct
  REGION 1..529: note = Variant of terminal deoxynucleotidyltransferase
MHHHHHHGGSGSHGIRTIDSDFGKKQQKKMDNHDSSATYEIKFHEFVLFILEEKMGATRRTFLTDLARKKGFRVENELTDEVTHIVAENLSRSEVLAWLKEHKMEKTKQFELLDISWLIESMKVGKPVDTKGKYQLAESGEMSANPDPTEGRENELPPTMKTVSPYACQRRTTLNNHNQRFTDALEILRENYEFKRNDDTALEFRRAISVLKSLPFEVRSLKDTEGLPWIGDEVKGIMEEIIEVGNSREVQAVLNDEWYQSFHRFKSVFGVGVKTADKWYRMGLRTLEDVRSSKTLKLTPMQKAGLLYYEDLARGVTRAEADAISLLVQDAVATFDPDALVEIVGGFRRGKPQGHDVDLLISSPGAEKEQEDQLLQKVMNLWKKQGLLLYGRLEWTQWEDGKLDSGKADVGDAGAKCFLILKLYDHKVDKSKWEMPTGSNMGEAKPWKAIRVDLLRCPYGGFAFAMLQWTGSRMFRRDLRWYATDEKNMMLDNHALYDLTKKIFLKAKSEEEIFAHLGLEYLEPFERNA

SEQ ID NO: 2907 - DNA, 1587 bp, synthetic construct
  misc_feature 1..1587: note = Variant of terminal deoxynucleotidyltransferase
  source 1..1587: mol_type = other DNA
atgcaccatcatcatcatcatggcggtagcggcagccacggcattcgtaccatcgattcggacttcgggaagaaacagcagaaaaaaatggataaccacgatagttccgccacttatgaaatcaaatttcacgagtttgtgctgttcattctcgaagaaaaaatgggtgcgacgcgtcgtacttttctgacagatttagcccgcaagaaagggttccgcgtcgagaatgaactgaccgacgaagttacccacatcgtggcagaaaatctgtcacgctctgaagtattggcttggctgaaagaacacaagatggagaagaccaagcaattcgaactgctggatattagctggcttatcgaaagcatgaaagttggtaaaccggtggacaccaaggggaaataccagttggcggaatcgggtgagatgagtgcgaacccagatccgacagagggtcgtgaaaacgagctgcctcctactatgaagaccgtttctccgtatgcgtgtcaacgccgcaccaccctgaacaaccataatcaacgttttacggacgcactggaaattcttcgtgaaaattacgagttcaaacgcaacgatgatactgcgctggaatttcgtcgtgctatctccgtgctgaaaagccttccgtttgaggtacgtagcctgaaagacacggaaggattgccctggatcggtgatgaagtcaaagggattatggaagaaatcatcgaggtcgggaattcgcgtgaagtgcaggccgtgctcaatgatgagtggtatcaaagcttccaccgctttaagagtgtctttggagtgggggtgaagacagcagacaagtggtaccgtatgggtctgcgcaccctcgaggatgttcgttccagcaagaccctgaagttgaccccgatgcagaaagcgggtctgctgtattatgaagatcttgctcgcggcgttacgcgtgccgaagctgacgcgatttctctgatggttcgcgatgcagtcgcaactttcgacccggatgcgctggtggagattgtcggtggatttcgtcgtgggaaacctcagggtcacgacgttgatctgcttatcagttctccgggagctgagaaagagcaagaagaccagctcctgcagaaagtgatgaatctgtggaagaaacaagggttgttgctgtacggtcgtctggaatggacccagtgggaagatgggaaactcgattccacgaaggctgacgtaggtgacgcgggtgcgaaatgctttctgatcctcaaactttatgatcataaagtggacaaaagcaaatgggaaatgccgacgggttcgaacatgggcgaggccaaaccgtggaaagcaattcgcgtagatctgctgcgttgcccctacggcggttttgcgtttgcaatgttgcagtggaccggaagccgcatgttccgtcgtgatctgcgttggtacgccacggacgagaagaacatgatgctggacaatcatgcgctgtatgacctgaccaagaaaatctttctcaaagctaaatcggaagaggaaattttcgcacatctggggcttgaatacctggaaccgttcgaacgtaacgca

SEQ ID NO: 2908 - protein, 529 aa, synthetic construct
  REGION 1..529: note = Variant of terminal deoxynucleotidyltransferase
MHHHHHHGGSGSHGIRTIDSDFGKKQQKKMDNHDSSATYEIKFHEFVLFILEEKMGATRRTFLTDLARKKGFRVENELTDEVTHIVAENLSRSEVLAWLKEHKMEKTKQFELLDISWLIESMKVGKPVDTKGKYQLAESGEMSANPDPTEGRENELPPTMKTVSPYACQRRTTLNNHNQRFTDALEILRENYEFKRNDDTALEFRRAISVLKSLPFEVRSLKDTEGLPWIGDEVKGIMEEIIEVGNSREVQAVLNDEWYQSFHRFKSVFGVGVKTADKWYRMGLRTLEDVRSSKTLKLTPMQKAGLLYYEDLARGVTRAEADAISLMVRDAVATFDPDALVEIVGGFRRGKPQGHDVDLLISSPGAEKEQEDQLLQKVMNLWKKQGLLLYGRLEWTQWEDGKLDSTKADVGDAGAKCFLILKLYDHKVDKSKWEMPTGSNMGEAKPWKAIRVDLLRCPYGGFAFAMLQWTGSRMFRRDLRWYATDEKNMMLDNHALYDLTKKIFLKAKSEEEIFAHLGLEYLEPFERNA

SEQ ID NO: 2909 - DNA, 1587 bp, synthetic construct
  misc_feature 1..1587: note = Variant of terminal deoxynucleotidyltransferase
  source 1..1587: mol_type = other DNA
atgcaccatcatcatcatcatggcggtagcggcagccacggcattcgtaccatcgattcggacttcgggaagaaacagcagaaaaaaatggataaccacgatagttccgccacttatgaaatcaaatttcacgagtttgtgctgttcattctcgaagaaaaaatgggtgcgacgcgtcgtacttttctgacagatttagcccgcaagaaagggttccgcgtcgagaatgaactgaccgacgaagttacccacatcgtggcagaaaatctgtcacgctctgaagtattggcttggctgaaagaacacaagatggagaagaccaagcaattcgaactgctggatattagctggcttatcgaaagcatgaaagttggtaaaccggtggacaccaaggggaaataccagttggcggaatcgggtgagatgagtgcgaacccagatccgacagagggtcgtgaaaacgagctgcctcctactatgaagaccgtttctccgtatgcgtgtatgcgccgcaccaccctgaacaaccataatcaacgttttacggacgcactggaaattcttcgtgaaaattacgagttcaaacgcaacgatgatactgcgctggaatttcgtcgtgctatctccgtgctgaaaagccttccgtttgaggtacgtagcctgaaagacacggaaggattgccctggatcggtgatgaagtcaaagggattatggaagaaatcatcgaggtcgggaattcgcgtgaagtgcaggccgtgctcaatgatgagtggtatcaaagcttccaccgctttaagagtgtctttggagtgggggtgaagacagcagacaagtggtaccgtatgggtctgcgcaccctcgaggatgttcgttccagcaagaccctgaagttgaccccgatgcagaaagcaggtctgctgtattatgaagatcttgctcgcggcgttacgcgtgccgaagctgacgcgatttctctgctggttcaggatgcagtcgcaactttcgacccggatgcggtcgtggagattgtcggtggatttcgtcgtgggaaacctcagggtcacgacgttgatctgcttatcagttctccgggagctgagaaagagcaagaagaccagctcctgcagaaagtgaccaatctgtggaagaaacaagggttgttgctgtacggtcgtctggaatggacccagtgggaagatgggggtccgccatccggtaaggctgacgagggtgacgcgggtgcgaaatgctttctgatcctcaaactttatgatcatatggtggacaaaagcaaatgggaaatgccgacgggttcgaacatgggcgaggccaaaccgtggaaagcaattcgcgtagatctgctgcgttgcccctacggcggttttgcgtttgcgatgttgcagtggaccggaagccgcatgttccgtcgtgatctgcgttggtacgccactgacgagaagaacatgatgctggacaatcatgcgctgtatgacctgaccaagaaaatcaaactccctgctaaatcggaagaggaaattttcgcacatctggggcttgaatacctggaaccgttcgaacgtaacgca

SEQ ID NO: 2910 - protein, 529 aa, synthetic construct
  REGION 1..529: note = Variant of terminal deoxynucleotidyltransferase
MHHHHHHGGSGSHGIRTIDSDFGKKQQKKMDNHDSSATYEIKFHEFVLFILEEKMGATRRTFLTDLARKKGFRVENELTDEVTHIVAENLSRSEVLAWLKEHKMEKTKQFELLDISWLIESMKVGKPVDTKGKYQLAESGEMSANPDPTEGRENELPPTMKTVSPYACMRRTTLNNHNQRFTDALEILRENYEFKRNDDTALEFRRAISVLKSLPFEVRSLKDTEGLPWIGDEVKGIMEEIIEVGNSREVQAVLNDEWYQSFHRFKSVFGVGVKTADKWYRMGLRTLEDVRSSKTLKLTPMQKAGLLYYEDLARGVTRAEADAISLLVQDAVATFDPDAVVEIVGGFRRGKPQGHDVDLLISSPGAEKEQEDQLLQKVTNLWKKQGLLLYGRLEWTQWEDGGPPSGKADEGDAGAKCFLILKLYDHMVDKSKWEMPTGSNMGEAKPWKAIRVDLLRCPYGGFAFAMLQWTGSRMFRRDLRWYATDEKNMMLDNHALYDLTKKIKLPAKSEEEIFAHLGLEYLEPFERNA

SEQ ID NO: 2911 - DNA, 1587 bp, synthetic construct
  misc_feature 1..1587: note = Variant of terminal deoxynucleotidyltransferase
  source 1..1587: mol_type = other DNA
atgcaccatcatcatcatcatggcggtagcggcagccacggcattcgtaccatcgattcggacttcgggaagaaacagcagaaaaaaatggataaccacgatagttccgccacttatgaaatcaaatttcacgagtttgtgctgttcattctcgaagaaaaaatgggtgcgacgcgtcgtacttttctgacagatttagcccgcaagaaagggttccgcgtcgagaatgaactgaccgacgaagttacccacatcgtggcagaaaatctgtcacgctctgaagtattggcttggctgaaagaacacaagatggagaagaccaagcaattcgaactgctggatattagctggcttatcgaaagcatgaaagttggtaaaccggtggacaccaaggggaaataccagttggcggaatcgggtgagatgagtgcgaacccagatccgacagagggtcgtgaaaacgagctgcctcctactatgaagaccgtttctccgtatgcgtgtcaacgccgcaccaccctgaacaaccataatcaacgttttacggacgcactggaaattcttcgtgaaaattacgagttcaaacgcaacgatgatactgcgctggaatttcgtcgtgctatctccgtgctgaaaagccttccgtttgaggtacgtagcctgaaagacacggaaggattgccctggatcggtgatgaagtcaaagggattatggaagaaatcatcgaggtcgggaattcgcgtgaagtgcaggccgtgctcaatgatgagtggtatcaaagcttccaccgctttaagagtgtctttggagtgggggtgaagacagcagacaagtggtaccgtatgggtctgcgcaccctcgaggatgttcgttccagcaagaccctgaagttgaccccgatgcagaaagcaggtctgctgtattatgaagatcttgctcgcggcgttacgcgtgccgaagctgacgcgatttctctgctggttcaggatgcagtcgcaactttcgacccggatgcgctggtggagattgtcggtggatttcgtcgtgggaaacctcagggtcacgacgttgatctgcttatcagttctccgggagctgagaaagagcaagaagaccagctcctgcagaaagtgaccaatctgtggaagaaacaagggttgttgctgtacggtcgtctggaatggacccagtgggaagatgggaaactcccatccggtaaggctgacgagggtgacgcgggtgcgaaatgctttctgatcctcaaactttatgatcataaagtggacaaaagcaaatgggaaatgccgacgggttcgaacatgggcgaggccaaaccgtggaaagcaattcgcgtagatctgctgcgttgcccctacggcggttttgcgtttgcgatgttgcagtggaccggaagccgcatgttccgtcgtgatctgcgttggtacgccactgacgagaagaacatgatgctggacaatcatgcgctgtatgacctgaccaagaaaatcaaactccctgctaaatcggaagaggaaattttcgcacatctggggcttgaatacctggaaccgttcgaacgtaacgca

SEQ ID NO: 2912 - protein, 529 aa, synthetic construct
  REGION 1..529: note = Variant of terminal deoxynucleotidyltransferase
MHHHHHHGGSGSHGIRTIDSDFGKKQQKKMDNHDSSATYEIKFHEFVLFILEEKMGATRRTFLTDLARKKGFRVENELTDEVTHIVAENLSRSEVLAWLKEHKMEKTKQFELLDISWLIESMKVGKPVDTKGKYQLAESGEMSANPDPTEGRENELPPTMKTVSPYACQRRTTLNNHNQRFTDALEILRENYEFKRNDDTALEFRRAISVLKSLPFEVRSLKDTEGLPWIGDEVKGIMEEIIEVGNSREVQAVLNDEWYQSFHRFKSVFGVGVKTADKWYRMGLRTLEDVRSSKTLKLTPMQKAGLLYYEDLARGVTRAEADAISLLVQDAVATFDPDALVEIVGGFRRGKPQGHDVDLLISSPGAEKEQEDQLLQKVTNLWKKQGLLLYGRLEWTQWEDGKLPSGKADEGDAGAKCFLILKLYDHKVDKSKWEMPTGSNMGEAKPWKAIRVDLLRCPYGGFAFAMLQWTGSRMFRRDLRWYATDEKNMMLDNHALYDLTKKIKLPAKSEEEIFAHLGLEYLEPFERNA

SEQ ID NO: 2913 - DNA, 1587 bp, synthetic construct
  misc_feature 1..1587: note = Variant of terminal deoxynucleotidyltransferase
  source 1..1587: mol_type = other DNA
atgcaccatcatcatcatcatggcggtagcggcagccacggcattcgtaccatcgattcggacttcgggaagaaacagcagaaaaaaatggataaccacgatagttccgccacttatgaaatcaaatttcacgagtttgtgctgttcattctcgaagaaaaaatgggtgcgacgcgtcgtacttttctgacagatttagcccgcaagaaagggttccgcgtcgagaatgaactgaccgacgaagttacccacatcgtggcagaaaatctgtcacgctctgaagtattggcttggctgaaagaacacaagatggagaagaccaagcaattcgaactgctggatattagctggcttatcgaaagcatgaaagttggtaaaccggtggacaccaaggggaaataccagttggcggaatcgggtgagatgagtgcgaacccagatccgacagagggtcgtgaaaacgagctgcctcctactatgaagaccgtttctccgtatgcgtgtatgcgccgcaccaccctgaacaaccataatcaacgttttacggacgcactggaaattcttcgtgaaaattacgagttcaaacgcaacgatgatactgcgctggaatttcgtcgtgctatctccgtgctgaaaagccttccgtttgaggtacgtagcctgaaagacacggaaggattgccctggatcggtgatgaagtcaaagggattatggaagaaatcatcgaggtcgggaattcgcgtgaagtgcaggccgtgctcaatgatgagtggtatcaaagcttccaccgctttaagagtgtctttggagtgggggtgaagacagcagacaagtggtaccgtatgggtctgcgcaccctcgaggatgttcgttccagcaagaccctgaagttgaccccgatgcagaaagtaggtctgctgtattatgaagatcttgctcgcggcgttacgcgtgccgaagctgacgcgatttctctgctggttcaggatgcagtcgcaactttcgacccggatgcgctggtggagattgtcggtggatttcgtcgtgggaaacctcagggtcacgacgttgatctgcttatcagttctccgggagctgagaaagagcaagaagaccagctcctgcagaaagtgaccaatctgtggaagaaacaagggttgttgctgtacggtcgtctggaatggacccagtgggaagatgggaagtcgccatccggtaaggctgacgagggtgacgcgggtgcgaaatgctttctgatcctcaaactttatgatcatctggtggacaaaagcaaatgggaaatgccgacgggttcgaacatgggcgaggccaaaccgtggaaagcaattcgcgtagatctgctgcgttgcccctacggcggttttgcgtttgcgatgttgcagtggaccggaagccgcatgttccgtcgtgatctgcgttggtacgccactgacgagaagaacatgatgctggacaatcatgcgctgtatgacctgaccaagaaaatcaaactcaaagctaaatcggaagaggaaattttcgcacatctggggcttgaatacctggaaccgttcgaacgtaacgca

SEQ ID NO: 2914 - protein, 529 aa, synthetic construct
  REGION 1..529: note = Variant of terminal deoxynucleotidyltransferase
MHHHHHHGGSGSHGIRTIDSDFGKKQQKKMDNHDSSATYEIKFHEFVLFILEEKMGATRRTFLTDLARKKGFRVENELTDEVTHIVAENLSRSEVLAWLKEHKMEKTKQFELLDISWLIESMKVGKPVDTKGKYQLAESGEMSANPDPTEGRENELPPTMKTVSPYACMRRTTLNNHNQRFTDALEILRENYEFKRNDDTALEFRRAISVLKSLPFEVRSLKDTEGLPWIGDEVKGIMEEIIEVGNSREVQAVLNDEWYQSFHRFKSVFGVGVKTADKWYRMGLRTLEDVRSSKTLKLTPMQKVGLLYYEDLARGVTRAEADAISLLVQDAVATFDPDALVEIVGGFRRGKPQGHDVDLLISSPGAEKEQEDQLLQKVTNLWKKQGLLLYGRLEWTQWEDGKSPSGKADEGDAGAKCFLILKLYDHLVDKSKWEMPTGSNMGEAKPWKAIRVDLLRCPYGGFAFAMLQWTGSRMFRRDLRWYATDEKNMMLDNHALYDLTKKIKLKAKSEEEIFAHLGLEYLEPFERNA

SEQ ID NO: 2915 - DNA, 1587 bp, synthetic construct
  misc_feature 1..1587: note = Variant of terminal deoxynucleotidyltransferase
  source 1..1587: mol_type = other DNA
atgcaccatcatcatcatcatggcggtagcggcagccacggcattcgtaccatcgattcggacttcgggaagaaacagcagaaaaaaatggataaccacgatagttccgccacttatgaaatcaaatttcacgagtttgtgctgttcattctcgaagaaaaaatgggtgcgacgcgtcgtacttttctgacagatttagcccgcaagaaagggttccgcgtcgagaatgaactgaccgacgaagttacccacatcgtggcagaaaatctgtcacgctctgaagtattggcttggctgaaagaacacaagatggagaagaccaagcaattcgaactgctggatattagctggcttatcgaaagcatgaaagttggtaaaccggtggacaccaaggggaaataccagttggcggaatcgggtgagatgagtgcgaacccagatccgacagagggtcgtgaaaacgagctgcctcctactatgaagaccgtttctccgtatgcgtgtcaacgccgcaccaccctgaacaaccataatcaacgttttacggacgcactggaaattcttcgtgaaaattacgagttcaaacgcaacgatgatactgcgctggaatttcgtcgtgctatctccgtgctgaaaagccttccgtttgaggtacgtagcctgaaagacacggaaggattgccctggatcggtgatgaagtcaaagggattatggaagaaatcatcgaggtcgggaattcgcgtgaagtgcaggccgtgctcaatgatgagtggtatcaaagcttccaccgctttaagagtgtctttggagtgggggtgaagacagcagacaagtggtaccgtatgggtctgcgcaccctcgaggatgttcgttccagcaagaccctgaagttgaccccgatgcagaaagcgggtctgctgtattatgaagatcttgctcgcggcgttacgcgtgccgaagctgacgcgatttctctgctggttcaggatgcagtcgcaactttcgacccggatgcgctggtggagattgtcggtggatttcgtcgtgggaaacctcagggtcacgacgttgatctgcttatcagttctccgggagctgagaaagagcaagaagaccagctcctgcagaaagtgctgaatctgtggaagaaacaagggttgttgctgtacggtcgtctggaatggacccagtgggaagatgggaaactcccatccggtaaggctgacgagggtgacgcgggtgcgaaatgctttctgatcctcaaactttatgatcataaagtggacaaaagcaaatgggaaatgccgacgggttcgaacatgggcgaggccaaaccgtggaaagcaattcgcgtagatctgctgcgttgcccctacggcggttttgcgtttgcaatgttgagttggaccggaagccgcatgttccgtcgtgatctgcgttggtacgccactgacgagaagaacatgatgctggacaatcatgcgctgtatgacctgaccaagaaaatctttctcaaagctaaatcggaagaggaaattttcgcacatctggggcttgaatacctggaaccgttcgaacgtaacgca

SEQ ID NO: 2916 - protein, 529 aa, synthetic construct
  REGION 1..529: note = Variant of terminal deoxynucleotidyltransferase
MHHHHHHGGSGSHGIRTIDSDFGKKQQKKMDNHDSSATYEIKFHEFVLFILEEKMGATRRTFLTDLARKKGFRVENELTDEVTHIVAENLSRSEVLAWLKEHKMEKTKQFELLDISWLIESMKVGKPVDTKGKYQLAESGEMSANPDPTEGRENELPPTMKTVSPYACQRRTTLNNHNQRFTDALEILRENYEFKRNDDTALEFRRAISVLKSLPFEVRSLKDTEGLPWIGDEVKGIMEEIIEVGNSREVQAVLNDEWYQSFHRFKSVFGVGVKTADKWYRMGLRTLEDVRSSKTLKLTPMQKAGLLYYEDLARGVTRAEADAISLLVQDAVATFDPDALVEIVGGFRRGKPQGHDVDLLISSPGAEKEQEDQLLQKVLNLWKKQGLLLYGRLEWTQWEDGKLPSGKADEGDAGAKCFLILKLYDHKVDKSKWEMPTGSNMGEAKPWKAIRVDLLRCPYGGFAFAMLSWTGSRMFRRDLRWYATDEKNMMLDNHALYDLTKKIFLKAKSEEEIFAHLGLEYLEPFERNA

SEQ ID NO: 2917 - DNA, 1587 bp, synthetic construct
  misc_feature 1..1587: note = Variant of terminal deoxynucleotidyltransferase
  source 1..1587: mol_type = other DNA
atgcaccatcatcatcatcatggcggtagcggcagccacggcattcgtaccatcgattcggacttcgggaagaaacagcagaaaaaaatggataaccacgatagttccgccacttatgaaatcaaatttcacgagtttgtgctgttcattctcgaagaaaaaatgggtgcgacgcgtcgtacttttctgacagatttagcccgcaagaaagggttccgcgtcgagaatgaactgaccgacgaagttacccacatcgtggcagaaaatctgtcacgctctgaagtattggcttggctgaaagaacacaagatggagaagaccaagcaattcgaactgctggatattagctggcttatcgaaagcatgaaagttggtaaaccggtggacaccaaggggaaataccagttggcggaatcgggtgagatgagtgcgaacccagatccgacagagggtcgtgaaaacgagctgcctcctactatgaagaccgtttctccgtatgcgtgtcaacgccgcaccaccctgaacaaccataatcaacgttttacggacgcactggaaattcttcgtgaaaattacgagttcaaacgcaacgatgatactgcgctggaatttcgtcgtgctatctccgtgctgaaaagccttccgtttgaggtacgtagcctgaaagacacggaaggattgccctggatcggtgatgaagtcaaagggattatggaagaaatcatcgaggtcgggaattcgcgtgaagtgcaggccgtgctcaatgatgagtggtatcaaagcttccaccgctttaagagtgtctttggagtgggggtgaagacagcagacaagtggtaccgtatgggtctgcgcaccctcgaggatgttcgttccagcaagaccctgaagttgaccccgatgcagaaagcgggtctgctgtattatgaagatcttgctcgcggcgttacgcgtgccgaagctgacgcgatttctctgctggttcaggatgcagtcgcaactttcgacccggatgcgctggtggagattgtcggtggatttcgtcgtgggaaacctcagggtcacgacgttgatctgcttatcagttctccgggagctgagaaagagcaagaagaccagctcctgcagaaagtgaccaatctgtggaagaaacaagggttgttgctgtacggtcgtctggaatggacccagtgggaagatgggaaactcccatccggtaaggctgacgagggtgacgcgggtgcgaaatgctttctgatcctcaaactttatgatcataaagtggacaaaagcaaatgggaaatgccgacgggttcgaacatgggcgaggccaaaccgtggaaagcaattcgcgtagatctgctgcgttgcccctacggcggttttgcgtttgcgatgttgcagtggaccggaagccgcatgttccgtcgtgatctgcgttggtacgccactgacgagaagaacatgatgctggacaatcatgcgctgtatgacctgaccaagaaaatcttcctccctgctaaatcggaagaggaaattttcgcacatctggggcttgaatacctggaaccgttcgaacgtaacgca

SEQ ID NO: 2918 - protein, 529 aa, synthetic construct
  REGION 1..529: note = Variant of terminal deoxynucleotidyltransferase
MHHHHHHGGSGSHGIRTIDSDFGKKQQKKMDNHDSSATYEIKFHEFVLFILEEKMGATRRTFLTDLARKKGFRVENELTDEVTHIVAENLSRSEVLAWLKEHKMEKTKQFELLDISWLIESMKVGKPVDTKGKYQLAESGEMSANPDPTEGRENELPPTMKTVSPYACQRRTTLNNHNQRFTDALEILRENYEFKRNDDTALEFRRAISVLKSLPFEVRSLKDTEGLPWIGDEVKGIMEEIIEVGNSREVQAVLNDEWYQSFHRFKSVFGVGVKTADKWYRMGLRTLEDVRSSKTLKLTPMQKAGLLYYEDLARGVTRAEADAISLLVQDAVATFDPDALVEIVGGFRRGKPQGHDVDLLISSPGAEKEQEDQLLQKVTNLWKKQGLLLYGRLEWTQWEDGKLPSGKADEGDAGAKCFLILKLYDHKVDKSKWEMPTGSNMGEAKPWKAIRVDLLRCPYGGFAFAMLQWTGSRMFRRDLRWYATDEKNMMLDNHALYDLTKKIFLPAKSEEEIFAHLGLEYLEPFERNA

SEQ ID NO: 2919 - DNA, 1587 bp, synthetic construct
  misc_feature 1..1587: note = Variant of terminal deoxynucleotidyltransferase
  source 1..1587: mol_type = other DNA
atgcaccatcatcatcatcatggcggtagcggcagccacggcattcgtaccatcgattcggacttcgggaagaaacagcagaaaaaaatggataaccacgatagttccgccacttatgaaatcaaatttcacgagtttgtgctgttcattctcgaagaaaaaatgggtgcgacgcgtcgtacttttctgacagatttagcccgcaagaaagggttccgcgtcgagaatgaactgaccgacgaagttacccacatcgtggcagaaaatctgtcacgctctgaagtattggcttggctgaaagaacacaagatggagaagaccaagcaattcgaactgctggatattagctggcttatcgaaagcatgaaagttggtaaaccggtggacaccaaggggaaataccagttggcggaatcgggtgagatgagtgcgaacccagatccgacagagggtcgtgaaaacgagctgcctcctactatgaagaccgtttctccgtatgcgtgtatgcgccgcaccaccctgaacaaccataatcaacgttttacggacgcactggaaattcttcgtgaaaattacgagttcaaacgcaacgatgatactgcgctggaatttcgtcgtgctatctccgtgctgaaaagccttccgtttgaggtacgtagcctgaaagacacggaaggattgccctggatcggtgatgaagtcaaagggattatggaagaaatcatcgaggtcgggaattcgcgtgaagtgcaggccgtgctcaatgatgagtggtatcaaagcttccaccgctttaagagtgtctttggagtgggggtgaagacagcagacaagtggtaccgtatgggtctgcgcaccctcgaggatgttcgttccagcaagaccctgaagttgaccccgatgcagaaagcgggtctgctgtattatgaagatcttgctcgcggcgttacgcgtgccgaagctgacgcgatttctctgctggttcaggatgcagtcgcaactttcgacccggatgcgatcgtggagattgtcggtggatttcgtcgtgggaaacctcagggtcacgacgttgatctgcttatcagttctccgggagctgagaaagagcaagaagaccagctcctgcagaaagtgaccaatctgtggaagaaacaagggttgttgctgtacggtcgtctggaatggacccagtgggaagatgggggtgcgccatccggtaaggctgacgagggtgacgcgggtgcgaaatgctttctgatcctcaaactttatgatcatatggtgcgcaaaagcaaatgggaaatgccgacgggttcgaacatgggcgaggccaaaccgtggaaagcaattcgcgtagatctgctgcgttgcccctacggcggttttgcgtttgcgatgttgcagtggaccggaagccgcatgttccgtcgtgatctgcgttggtacgccactgacgagaagaacatgatgctggacaatcatgcgctgtatgacctgaccaagaaaatcaaactcaaagctaaatcggaagaggaaattttcgcacatctggggcttgaatacctggaaccgttcgaacgtaacgca

SEQ ID NO: 2920 - protein, 529 aa, synthetic construct
  REGION 1..529: note = Variant of terminal deoxynucleotidyltransferase
MHHHHHHGGSGSHGIRTIDSDFGKKQQKKMDNHDSSATYEIKFHEFVLFILEEKMGATRRTFLTDLARKKGFRVENELTDEVTHIVAENLSRSEVLAWLKEHKMEKTKQFELLDISWLIESMKVGKPVDTKGKYQLAESGEMSANPDPTEGRENELPPTMKTVSPYACMRRTTLNNHNQRFTDALEILRENYEFKRNDDTALEFRRAISVLKSLPFEVRSLKDTEGLPWIGDEVKGIMEEIIEVGNSREVQAVLNDEWYQSFHRFKSVFGVGVKTADKWYRMGLRTLEDVRSSKTLKLTPMQKAGLLYYEDLARGVTRAEADAISLLVQDAVATFDPDAIVEIVGGFRRGKPQGHDVDLLISSPGAEKEQEDQLLQKVTNLWKKQGLLLYGRLEWTQWEDGGAPSGKADEGDAGAKCFLILKLYDHMVRKSKWEMPTGSNMGEAKPWKAIRVDLLRCPYGGFAFAMLQWTGSRMFRRDLRWYATDEKNMMLDNHALYDLTKKIKLKAKSEEEIFAHLGLEYLEPFERNA

SEQ ID NO: 2921 - DNA, 1587 bp, synthetic construct
  misc_feature 1..1587: note = Variant of terminal deoxynucleotidyltransferase
  source 1..1587: mol_type = other DNA
atgcaccatcatcatcatcatggcggtagcggcagccacggcattcgtaccatcgattcggacttcgggaagaaacagcagaaaaaaatggataaccacgatagttccgccacttatgaaatcaaatttcacgagtttgtgctgttcattctcgaagaaaaaatgggtgcgacgcgtcgtacttttctgacagatttagcccgcaagaaagggttccgcgtcgagaatgaactgaccgacgaagttacccacatcgtggcagaaaatctgtcacgctctgaagtattggcttggctgaaagaacacaagatggagaagaccaagcaattcgaactgctggatattagctggcttatcgaaagcatgaaagttggtaaaccggtggacaccaaggggaaataccagttggcggaatcgggtgagatgagtgcgaacccagatccgacagagggtcgtgaaaacgagctgcctcctactatgaagaccgtttctccgtatgcgtgtatgcgccgcaccaccctgaacaaccataatcaacgttttacggacgcactggaaattcttcgtgaaaattacgagttcaaacgcaacgatgatactgcgctggaatttcgtcgtgctatctccgtgctgaaaagccttccgtttgaggtacgtagcctgaaagacacggaaggattgccctggatcggtgatgaagtcaaagggattatggaagaaatcatcgaggtcgggaattcgcgtgaagtgcaggccgtgctcaatgatgagtggtatcaaagcttccaccgctttaagagtgtctttggagtgggggtgaagacagcagacaagtggtaccgtatgggtctgcgcaccctcgaggatgttcgttccagcaagaccctgaagttgaccccgatgcagaaagcgggtctgctgtattatgaagatcttgctcgcggcgttacgcgtgccgaagctgacgcgatttctctgctggttcaggatgcagtcgcaactttcgacccggatgcgctggtggagattgtcggtggatttcgtcgtgggaaacctcagggtcacgacgttgatctgcttatcagttctccgggagctgagaaagagcaagaagaccagctcctgcagaaagtgaccaatctgtggaagaaacaagggttgttgctgtacggtcgtctggaatggacccagtgggaagatgggggtctgccatccggtaaggctgacgagggtgacgcgggtgcgaaatgctttctgatcctcaaactttatgatcataaagtggacaaaagcaaatgggaaatgccgacgggttcgaacatgggcgaggccaaaccgtggaaagcaattcgcgtagatctgctgcgttgcccctacggcggttttgcgtttgcgatgttgcagtggaccggaagccgcatgttccgtcgtgatctgcgttggtacgccactgacgagaagaacatgatgctggacaatcatgcgctgtatgacctgaccaagaaaatcaaactcaaagctaaatcggaagaggaaattttcgcacatctggggcttgaatacctggaaccgttcgaacgtaacgca

SEQ ID NO: 2922 - protein, 529 aa, synthetic construct
  REGION 1..529: note = Variant of terminal deoxynucleotidyltransferase
MHHHHHHGGSGSHGIRTIDSDFGKKQQKKMDNHDSSATYEIKFHEFVLFILEEKMGATRRTFLTDLARKKGFRVENELTDEVTHIVAENLSRSEVLAWLKEHKMEKTKQFELLDISWLIESMKVGKPVDTKGKYQLAESGEMSANPDPTEGRENELPPTMKTVSPYACMRRTTLNNHNQRFTDALEILRENYEFKRNDDTALEFRRAISVLKSLPFEVRSLKDTEGLPWIGDEVKGIMEEIIEVGNSREVQAVLNDEWYQSFHRFKSVFGVGVKTADKWYRMGLRTLEDVRSSKTLKLTPMQKAGLLYYEDLARGVTRAEADAISLLVQDAVATFDPDALVEIVGGFRRGKPQGHDVDLLISSPGAEKEQEDQLLQKVTNLWKKQGLLLYGRLEWTQWEDGGLPSGKADEGDAGAKCFLILKLYDHKVDKSKWEMPTGSNMGEAKPWKAIRVDLLRCPYGGFAFAMLQWTGSRMFRRDLRWYATDEKNMMLDNHALYDLTKKIKLKAKSEEEIFAHLGLEYLEPFERNA

SEQ ID NO: 2923 - DNA, 1587 bp, synthetic construct
  misc_feature 1..1587: note = Variant of terminal deoxynucleotidyltransferase
  source 1..1587: mol_type = other DNA
atgcaccatcatcatcatcatggcggtagcggcagccacggcattcgtaccatcgattcggacttcgggaagaaacagcagaaaaaaatggataaccacgatagttccgccacttatgaaatcaaatttcacgagtttgtgctgttcattctcgaagaaaaaatgggtgcgacgcgtcgtacttttctgacagatttagcccgcaagaaagggttccgcgtcgagaatgaactgaccgacgaagttacccacatcgtggcagaaaatctgtcacgctctgaagtattggcttggctgaaagaacacaagatggagaagaccaagcaattcgaactgctggatattagctggcttatcgaaagcatgaaagttggtaaaccggtggacaccaaggggaaataccagttggcggaatcgggtgagatgagtgcgaacccagatccgacagagggtcgtgaaaacgagctgcctcctactatgaagaccgtttctccgtatgcgtgtcaacgccgcaccaccctgaacaaccataatcaacgttttacggacgcactggaaattcttcgtgaaaattacgagttcaaacgcaacgatgatactgcgctggaatttcgtcgtgctatctccgtgctgaaaagccttccgtttgaggtacgtagcctgaaagacacggaaggattgccctggatcggtgatgaagtcaaagggattatggaagaaatcatcgaggtcgggaattcgcgtgaagtgcaggccgtgctcaatgatgagtggtatcaaagcttccaccgctttaagagtgtctttggagtgggggtgaagacagcagacaagtggtaccgtatgggtctgcgcaccctcgaggatgttcgttccagcaagaccctgaagttgaccccgatgcagaaagcgggtctgctgtattatgaagatcttgctcgcggcgttacgcgtgccgaagctgacgcgatttctctgctggttcaggatgcagtcgcaactttcgacccggatgcgctggtggagattgtcggtggatttcgtcgtgggaaacctcagggtcacgacgttgatctgcttatcagttctccgggagctgagaaagagcaagaagaccagctcctgcagaaagtgatgaatctgtggaagaaacaagggttgttgctgtacggtcgtctggaatggacccagtgggaagatgggaaactcccgtccgggaaggctgacgtaggtgacgcgggtgcgaaatgctttctgatcctcaaactttatgatcataaagtggacaaaagcaaatgggaaatgccgacgggttcgaacatgggcgaggccaaaccgtggaaagcaattcgcgtagatctgctgcgttgcccctacggcggttttgcgtttgcgatgttgcagtggaccggaagccgcatgttccgccgtgatctgcgttggtacgccacggacgagaagaacatgatgctggacaatcatgcgctgtatgacctgaccaagaaaatctttctcaaagctaaatcggaagaggaaattttcgcacatctggggcttgaatacctggaaccgttcgaacgtaacgca

SEQ ID NO: 2924 - protein, 529 aa, synthetic construct
  REGION 1..529: note = Variant of terminal deoxynucleotidyltransferase
MHHHHHHGGSGSHGIRTIDSDFGKKQQKKMDNHDSSATYEIKFHEFVLFILEEKMGATRRTFLTDLARKKGFRVENELTDEVTHIVAENLSRSEVLAWLKEHKMEKTKQFELLDISWLIESMKVGKPVDTKGKYQLAESGEMSANPDPTEGRENELPPTMKTVSPYACQRRTTLNNHNQRFTDALEILRENYEFKRNDDTALEFRRAISVLKSLPFEVRSLKDTEGLPWIGDEVKGIMEEIIEVGNSREVQAVLNDEWYQSFHRFKSVFGVGVKTADKWYRMGLRTLEDVRSSKTLKLTPMQKAGLLYYEDLARGVTRAEADAISLLVQDAVATFDPDALVEIVGGFRRGKPQGHDVDLLISSPGAEKEQEDQLLQKVMNLWKKQGLLLYGRLEWTQWEDGKLPSGKADVGDAGAKCFLILKLYDHKVDKSKWEMPTGSNMGEAKPWKAIRVDLLRCPYGGFAFAMLQWTGSRMFRRDLRWYATDEKNMMLDNHALYDLTKKIFLKAKSEEEIFAHLGLEYLEPFERNA

SEQ ID NO: 2925 - DNA, 1587 bp, synthetic construct
  misc_feature 1..1587: note = Variant of terminal deoxynucleotidyltransferase
  source 1..1587: mol_type = other DNA
atgcaccatcatcatcatcatggcggtagcggcagccacggcattcgtaccatcgattcggacttcgggaagaaacagcagaaaaaaatggataaccacgatagttccgccacttatgaaatcaaatttcacgagtttgtgctgttcattctcgaagaaaaaatgggtgcgacgcgtcgtacttttctgacagatttagcccgcaagaaagggttccgcgtcgagaatgaactgaccgacgaagttacccacatcgtggcagaaaatctgtcacgctctgaagtattggcttggctgaaagaacacaagatggagaagaccaagcaattcgaactgctggatattagctggcttatcgaaagcatgaaagttggtaaaccggtggacaccaaggggaaataccagttggcggaatcgggtgagatgagtgcgaacccagatccgacagagggtcgtgaaaacgagctgcctcctactatgaagaccgtttctccgtatgcgtgtcaacgccgcaccaccctgaacaaccataatcaacgttttacggacgcactggaaattcttcgtgaaaattacgagttcaaacgcaacgatgatactgcgctggaatttcgtcgtgctatctccgtgctgaaaagccttccgtttgaggtacgtagcctgaaagacacggaaggattgccctggatcggtgatgaagtcaaagggattatggaagaaatcatcgaggtcgggaattcgcgtgaagtgcaggccgtgctcaatgatgagtggtatcaaagcttccaccgctttaagagtgtctttggagtgggggtgaagacagcagacaagtggtaccgtatgggtctgcgcaccctcgaggatgttcgttccagcaagaccctgaagttgaccccgatgcagaaagcgggtctgctgtattatgaagatcttgctcgcggcgttacgcgtgccgaagctgacgcgatttctctgatggttcaggatgcagtcgcaactttcgacccggatgcgctggtggagattgtcggtggatttcgtcgtgggaaacctcagggtcacgacgttgatctgcttatcagttctccgggagctgagaaagagcaagaagaccagctcctgcagaaagtgacgaatctgtggaagaaacaagggttgttgctgtacggtcgtctggaatggacccagtgggaagatgggaaactcccatccggtaaggctgacgagggtgacgcgggtgcgaaatgctttctgatcctcaaactttatgatcataaagtggacaaaagcaaatgggaaatgccgacgggttcgaacatgggcgaggccaaaccgtggaaagcaattcgcgtagatctgctgcgttgcccctacggcggttttgcgtttgcgatgttgcagtggaccggaagccgcatgttccgtcgtgatctgcgttggtacgccactgacgagaagaacatgatgctggacaatcatgcgctgtatgacctgaccaagaaaatctttctcaaagctaaatcggaagaggaaattttcgcacatctggggcttgaatacctggaaccgttcgaacgtaacgca

SEQ ID NO: 2926 - protein, 529 aa, synthetic construct
  REGION 1..529: note = Variant of terminal deoxynucleotidyltransferase
MHHHHHHGGSGSHGIRTIDSDFGKKQQKKMDNHDSSATYEIKFHEFVLFILEEKMGATRRTFLTDLARKKGFRVENELTDEVTHIVAENLSRSEVLAWLKEHKMEKTKQFELLDISWLIESMKVGKPVDTKGKYQLAESGEMSANPDPTEGRENELPPTMKTVSPYACQRRTTLNNHNQRFTDALEILRENYEFKRNDDTALEFRRAISVLKSLPFEVRSLKDTEGLPWIGDEVKGIMEEIIEVGNSREVQAVLNDEWYQSFHRFKSVFGVGVKTADKWYRMGLRTLEDVRSSKTLKLTPMQKAGLLYYEDLARGVTRAEADAISLMVQDAVATFDPDALVEIVGGFRRGKPQGHDVDLLISSPGAEKEQEDQLLQKVTNLWKKQGLLLYGRLEWTQWEDGKLPSGKADEGDAGAKCFLILKLYDHKVDKSKWEMPTGSNMGEAKPWKAIRVDLLRCPYGGFAFAMLQWTGSRMFRRDLRWYATDEKNMMLDNHALYDLTKKIFLKAKSEEEIFAHLGLEYLEPFERNA

SEQ ID NO: 2927 - DNA, 1587 bp, synthetic construct
  misc_feature 1..1587: note = Variant of terminal deoxynucleotidyltransferase
  source 1..1587: mol_type = other DNA
atgcaccatcatcatcatcatggcggtagcggcagccacggcattcgtaccatcgattcggacttcgggaagaaacagcagaaaaaaatggataaccacgatagttccgccacttatgaaatcaaatttcacgagtttgtgctgttcattctcgaagaaaaaatgggtgcgacgcgtcgtacttttctgacagatttagcccgcaagaaagggttccgcgtcgagaatgaactgaccgacgaagttacccacatcgtggcagaaaatctgtcacgctctgaagtattggcttggctgaaagaacacaagatggagaagaccaagcaattcgaactgctggatattagctggcttatcgaaagcatgaaagttggtaaaccggtggacaccaaggggaaataccagttggcggaatcgggtgagatgagtgcgaacccagatccgacagagggtcgtgaaaacgagctgcctcctactatgaagaccgtttctccgtatgcgtgtcaacgccgcaccaccctgaacaaccataatcaacgttttacggacgcactggaaattcttcgtgaaaattacgagttcaaacgcaacgatgatactgcgctggaatttcgtcgtgctatctccgtgctgaaaagccttccgtttgaggtacgtagcctgaaagacacggaaggattgccctggatcggtgatgaagtcaaagggattatggaagaaatcatcgaggtcgggaattcgcgtgaagtgcaggccgtgctcaatgatgagtggtatcaaagcttccaccgctttaagagtgtctttggagtgggggtgaagacagcagacaagtggtaccgtatgggtctgcgcaccctcgaggatgttcgttccagcaagaccctgaagttgaccccgatgcagaaagcaggtctgctgtattatgaagatcttgctcgcggcgttacgcgtgccgaagctgacgcgatttctctgctggttcaggatgcagtcgcaactttcgacccggatgcgatcgtggagattgtcggtggatttcgtcgtgggaaacctcagggtcacgacgttgatctgcttatcagttctccgggagctgagaaagagcaagaagaccagctcctgcagaaagtgaccaatctgtggaagaaacaagggttgttgctgtacggtcgtctggaatggacccagtgggaagatgggaagtcgccatccggtaaggctgacgagggtgacgcgggtgcgaaatgctttctgatcctcaaactttatgatcataaagtggacaaaagcaaatgggaaatgccgacgggttcgaacatgggcgaggccaaaccgtggaaagcaattcgcgtagatctgctgcgttgcccctacggcggttttgcgtttgcgatgttgcagtggaccggaagccgcatgttccgtcgtgatctgcgttggtacgccactgacgagaagaacatgatgctggacaatcatgcgctgtatgacctgaccaagaaaatcaaactcaaagctaaatcggaagaggaaattttcgcacatctggggcttgaatacctggaaccgttcgaacgtaacgca

SEQ ID NO: 2928 - protein, 529 aa, synthetic construct
  REGION 1..529: note = Variant of terminal deoxynucleotidyltransferase
MHHHHHHGGSGSHGIRTIDSDFGKKQQKKMDNHDSSATYEIKFHEFVLFILEEKMGATRRTFLTDLARKKGFRVENELTDEVTHIVAENLSRSEVLAWLKEHKMEKTKQFELLDISWLIESMKVGKPVDTKGKYQLAESGEMSANPDPTEGRENELPPTMKTVSPYACQRRTTLNNHNQRFTDALEILRENYEFKRNDDTALEFRRAISVLKSLPFEVRSLKDTEGLPWIGDEVKGIMEEIIEVGNSREVQAVLNDEWYQSFHRFKSVFGVGVKTADKWYRMGLRTLEDVRSSKTLKLTPMQKAGLLYYEDLARGVTRAEADAISLLVQDAVATFDPDAIVEIVGGFRRGKPQGHDVDLLISSPGAEKEQEDQLLQKVTNLWKKQGLLLYGRLEWTQWEDGKSPSGKADEGDAGAKCFLILKLYDHKVDKSKWEMPTGSNMGEAKPWKAIRVDLLRCPYGGFAFAMLQWTGSRMFRRDLRWYATDEKNMMLDNHALYDLTKKIKLKAKSEEEIFAHLGLEYLEPFERNA

SEQ ID NO: 2929 - DNA, 1587 bp, synthetic construct
  misc_feature 1..1587: note = Variant of terminal deoxynucleotidyltransferase
  source 1..1587: mol_type = other DNA
atgcaccatcatcatcatcatggcggtagcggcagccacggcattcgtaccatcgattcggacttcgggaagaaacagcagaaaaaaatggataaccacgatagttccgccacttatgaaatcaaatttcacgagtttgtgctgttcattctcgaagaaaaaatgggtgcgacgcgtcgtacttttctgacagatttagcccgcaagaaagggttccgcgtcgagaatgaactgaccgacgaagttacccacatcgtggcagaaaatctgtcacgctctgaagtattggcttggctgaaagaacacaagatggagaagaccaagcaattcgaactgctggatattagctggcttatcgaaagcatgaaagttggtaaaccggtggacaccaaggggaaataccagttggcggaatcgggtgagatgagtgcgaacccagatccgacagagggtcgtgaaaacgagctgcctcctactatgaagaccgtttctccgtatgcgtgtcaacgccgcaccaccctgaacaaccataatcaacgttttacggacgcactggaaattcttcgtgaaaattacgagttcaaacgcaacgatgatactgcgctggaatttcgtcgtgctatctccgtgctgaaaagccttccgtttgaggtacgtagcctgaaagacacggaaggattgccctggatcggtgatgaagtcaaagggattatggaagaaatcatcgaggtcgggaattcgcgtgaagtgcaggccgtgctcaatgatgagtggtatcaaagcttccaccgctttaagagtgtctttggagtgggggtgaagacagcagacaagtggtaccgtatgggtctgcgcaccctcgaggatgttcgttccagcaagaccctgaagttgaccccgatgcagaaagcaggtctgctgtattatgaagatcttgctcgcggcgttacgcgtgccgaagctgacgcgatttctctgctggttcaggatgcagtcgcaactttcgacccggatgcggtcgtggagattgtcggtggatttcgtcgtgggaaacctcagggtcacgacgttgatctgcttatcagttctccgggagctgagaaagagcaagaagaccagctcctgcagaaagtgaccaatctgtggaagaaacaagggttgttgctgtacggtcgtctggaatggacccagtgggaagatgggaagctgccatccggtaaggctgacgagggtgacgcgggtgcgaaatgctttctgatcctcaaactttatgatcataaggtggacaaaagcaaatgggaaatgccgacgggttcgaacatgggcgaggccaaaccgtggaaagcaattcgcgtagatctgctgcgttgcccctacggcggttttgcgtttgcgatgttgcagtggaccggaagccgcatgttccgtcgtgatctgcgttggtacgccactgacgagaagaacatgatgctggacaatcatgcgctgtatgacctgaccaagaaaatctttctcaaagctaaatcggaagaggaaattttcgcacatctggggcttgaatacctggaaccgttcgaacgtaacgca

SEQ ID NO: 2930 - protein, 529 aa, synthetic construct
  REGION 1..529: note = Variant of terminal deoxynucleotidyltransferase
MHHHHHHGGSGSHGIRTIDSDFGKKQQKKMDNHDSSATYEIKFHEFVLFILEEKMGATRRTFLTDLARKKGFRVENELTDEVTHIVAENLSRSEVLAWLKEHKMEKTKQFELLDISWLIESMKVGKPVDTKGKYQLAESGEMSANPDPTEGRENELPPTMKTVSPYACQRRTTLNNHNQRFTDALEILRENYEFKRNDDTALEFRRAISVLKSLPFEVRSLKDTEGLPWIGDEVKGIMEEIIEVGNSREVQAVLNDEWYQSFHRFKSVFGVGVKTADKWYRMGLRTLEDVRSSKTLKLTPMQKAGLLYYEDLARGVTRAEADAISLLVQDAVATFDPDAVVEIVGGFRRGKPQGHDVDLLISSPGAEKEQEDQLLQKVTNLWKKQGLLLYGRLEWTQWEDGKLPSGKADEGDAGAKCFLILKLYDHKVDKSKWEMPTGSNMGEAKPWKAIRVDLLRCPYGGFAFAMLQWTGSRMFRRDLRWYATDEKNMMLDNHALYDLTKKIFLKAKSEEEIFAHLGLEYLEPFERNA

SEQ ID NO: 2931 - DNA, 1587 bp, synthetic construct
  misc_feature 1..1587: note = Variant of terminal deoxynucleotidyltransferase
  source 1..1587: mol_type = other DNA
atgcaccatcatcatcatcatggcggtagcggcagccacggcattcgtaccatcgattcggacttcgggaagaaacagcagaaaaaaatggataaccacgatagttccgccacttatgaaatcaaatttcacgagtttgtgctgttcattctcgaagaaaaaatgggtgcgacgcgtcgtacttttctgacagatttagcccgcaagaaagggttccgcgtcgagaatgaactgaccgacgaagttacccacatcgtggcagaaaatctgtcacgctctgaagtattggcttggctgaaagaacacaagatggagaagaccaagcaattcgaactgctggatattagctggcttatcgaaagcatgaaagttggtaaaccggtggacaccaaggggaaataccagttggcggaatcgggtgagatgagtgcgaacccagatccgacagagggtcgtgaaaacgagctgcctcctactatgaagaccgtttctccgtatgcgtgtcaacgccgcaccaccctgaacaaccataatcaacgttttacggacgcactggaaattcttcgtgaaaattacgagttcaaacgcaacgatgatactgcgctggaatttcgtcgtgctatctccgtgctgaaaagccttccgtttgaggtacgtagcctgaaagacacggaaggattgccctggatcggtgatgaagtcaaagggattatggaagaaatcatcgaggtcgggaattcgcgtgaagtgcaggccgtgctcaatgatgagtggtatcaaagcttccaccgctttaagagtgtctttggagtgggggtgaagacagcagacaagtggtaccgtatgggtctgcgcaccctcgaggatgttcgttccagcaagaccctgaagttgaccccgatgcagaaagcgggtctgctgtattatgaagatcttgctcgcggcgttacgcgtgccgaagctgacgcgatttctctgatggttcgcgatgcagtcgcaactttcgacccggatgcgctggtggagattgtcggtggatttcgtcgtgggaaacctcagggtcacgacgttgatctgcttatcagttctccgggagctgagaaagagcaagaagaccagctcctgcagaaagtgaccaatctgtggaagaaacaagggttgttgctgtacggtcgtctggaatggacccagtgggaagatgggaaactcccatccggtaaggctgacgagggtgacgcgggtgcgaaatgctttctgatcctcaaactttatgatcataaagtggacaaaagcaaatgggaaatgccgacgggttcgaacatgggcgaggccaaaccgtggaaagcaattcgcgtagatctgctgcgttgcccctacggcggttttgcgtttgaaatgttgcagtggaccggaagccgcatgttccgtcgtgatctgcgttggtacgccgcggacgagaagaacatgatgctggacaatcatgcgctgtatgacctgaccaagaaaatctttctcaaagctaaatcggaagaggaaattttcgcacatctggggcttgaatacctggaaccgttcgaacgtaacgca

SEQ ID NO: 2932 - protein, 529 aa, synthetic construct
  REGION 1..529: note = Variant of terminal deoxynucleotidyltransferase
MHHHHHHGGSGSHGIRTIDSDFGKKQQKKMDNHDSSATYEIKFHEFVLFILEEKMGATRRTFLTDLARKKGFRVENELTDEVTHIVAENLSRSEVLAWLKEHKMEKTKQFELLDISWLIESMKVGKPVDTKGKYQLAESGEMSANPDPTEGRENELPPTMKTVSPYACQRRTTLNNHNQRFTDALEILRENYEFKRNDDTALEFRRAISVLKSLPFEVRSLKDTEGLPWIGDEVKGIMEEIIEVGNSREVQAVLNDEWYQSFHRFKSVFGVGVKTADKWYRMGLRTLEDVRSSKTLKLTPMQKAGLLYYEDLARGVTRAEADAISLMVRDAVATFDPDALVEIVGGFRRGKPQGHDVDLLISSPGAEKEQEDQLLQKVTNLWKKQGLLLYGRLEWTQWEDGKLPSGKADEGDAGAKCFLILKLYDHKVDKSKWEMPTGSNMGEAKPWKAIRVDLLRCPYGGFAFEMLQWTGSRMFRRDLRWYAADEKNMMLDNHALYDLTKKIFLKAKSEEEIFAHLGLEYLEPFERNA

SEQ ID NO: 2933 - DNA, 1587 bp, synthetic construct
  misc_feature 1..1587: note = Variant of terminal deoxynucleotidyltransferase
  source 1..1587: mol_type = other DNA
atgcaccatcatcatcatcatggcggtagcggcagccacggcattcgtaccatcgattcggacttcgggaagaaacagcagaaaaaaatggataaccacgatagttccgccacttatgaaatcaaatttcacgagtttgtgctgttcattctcgaagaaaaaatgggtgcgacgcgtcgtacttttctgacagatttagcccgcaagaaagggttccgcgtcgagaatgaactgaccgacgaagttacccacatcgtggcagaaaatctgtcacgctctgaagtattggcttggctgaaagaacacaagatggagaagaccaagcaattcgaactgctggatattagctggcttatcgaaagcatgaaagttggtaaaccggtggacaccaaggggaaataccagttggcggaatcgggtgagatgagtgcgaacccagatccgacagagggtcgtgaaaacgagctgcctcctactatgaagaccgtttctccgtatgcgtgtcaacgccgcaccaccctgaacaaccataatcaacgttttacggacgcactggaaattcttcgtgaaaattacgagttcaaacgcaacgatgatactgcgctggaatttcgtcgtgctatctccgtgctgaaaagccttccgtttgaggtacgtagcctgaaagacacggaaggattgccctggatcggtgatgaagtcaaagggattatggaagaaatcatcgaggtcgggaattcgcgtgaagtgcaggccgtgctcaatgatgagtggtatcaaagcttccaccgctttaagagtgtctttggagtgggggtgaagacagcagacaagtggtaccgtatgggtctgcgcaccctcgaggatgttcgttccagcaagaccctgaagttgaccccgatgcagaaagcgggtctgctgtattatgaagatcttgctcgcggcgttacgcgtgccgaagctgacgcgatttctctgctggttcaggatgcagtcgcaactttcgacccggatgcgctggtggagattgtcggtggatttcgtcgtgggaaacctcagggtcacgacgttgatctgcttatcagttctccgggagctgagaaagagcaagaagaccagctcctgcagaaagtgaccaatctgtggaagaaacaagggttgttgctgtacggtcgtctggaatggacccagtgggaagatgggaaactcccatccggtaaggctgacgagggtgacgcgggtgcgaaatgctttctgatcctcaaactttatgatcataaagtggacaaaagcaaatgggaaatgccgacgggttcgaacatgggcgaggccaaaccgtggaaagcaattcgcgtagatctgctgcgttgcccctacggcggttttgcgtttgcgatgttgcagtggaccggaagccgcatgttccgccgtgatctgcgttggtacgccgcggacgagaagaacatgatgctggacaatcatgcgctgtatgacctgaccaagaaaatctttctcaaagctaaatcggaagaggaaattttcgcacatctggggcttgaatacctggaaccgttcgaacgtaacgca

SEQ ID NO: 2934 - protein, 529 aa, synthetic construct
  REGION 1..529: note = Variant of terminal deoxynucleotidyltransferase
MHHHHHHGGSGSHGIRTIDSDFGKKQQKKMDNHDSSATYEIKFHEFVLFILEEKMGATRRTFLTDLARKKGFRVENELTDEVTHIVAENLSRSEVLAWLKEHKMEKTKQFELLDISWLIESMKVGKPVDTKGKYQLAESGEMSANPDPTEGRENELPPTMKTVSPYACQRRTTLNNHNQRFTDALEILRENYEFKRNDDTALEFRRAISVLKSLPFEVRSLKDTEGLPWIGDEVKGIMEEIIEVGNSREVQAVLNDEWYQSFHRFKSVFGVGVKTADKWYRMGLRTLEDVRSSKTLKLTPMQKAGLLYYEDLARGVTRAEADAISLLVQDAVATFDPDALVEIVGGFRRGKPQGHDVDLLISSPGAEKEQEDQLLQKVTNLWKKQGLLLYGRLEWTQWEDGKLPSGKADEGDAGAKCFLILKLYDHKVDKSKWEMPTGSNMGEAKPWKAIRVDLLRCPYGGFAFAMLQWTGSRMFRRDLRWYAADEKNMMLDNHALYDLTKKIFLKAKSEEEIFAHLGLEYLEPFERNA

SEQ ID NO: 2935 - DNA, 1587 bp, synthetic construct
  misc_feature 1..1587: note = Variant of terminal deoxynucleotidyltransferase
  source 1..1587: mol_type = other DNA
atgcaccatcatcatcatcatggcggtagcggcagccacggcattcgtaccatcgattcggacttcgggaagaaacagcagaaaaaaatggataaccacgatagttccgccacttatgaaatcaaatttcacgagtttgtgctgttcattctcgaagaaaaaatgggtgcgacgcgtcgtacttttctgacagatttagcccgcaagaaagggttccgcgtcgagaatgaactgaccgacgaagttacccacatcgtggcagaaaatctgtcacgctctgaagtattggcttggctgaaagaacacaagatggagaagaccaagcaattcgaactgctggatattagctggcttatcgaaagcatgaaagttggtaaaccggtggacaccaaggggaaataccagttggcggaatcgggtgagatgagtgcgaacccagatccgacagagggtcgtgaaaacgagctgcctcctactatgaagaccgtttctccgtatgcgtgtatgcgccgcaccaccctgaacaaccataatcaacgttttacggacgcactggaaattcttcgtgaaaattacgagttcaaacgcaacgatgatactgcgctggaatttcgtcgtgctatctccgtgctgaaaagccttccgtttgaggtacgtagcctgaaagacacggaaggattgccctggatcggtgatgaagtcaaagggattatggaagaaatcatcgaggtcgggaattcgcgtgaagtgcaggccgtgctcaatgatgagtggtatcaaagcttccaccgctttaagagtgtctttggagtgggggtgaagacagcagacaagtggtaccgtatgggtctgcgcaccctcgaggatgttcgttccagcaagaccctgaagttgaccccgatgcagaaagtaggtctgctgtattatgaagatcttgctcgcggcgttacgcgtgccgaagctgacgcgatttctctgctggttcaggatgcagtcgcaactttcgacccggatgcggtcgtggagattgtcggtggatttcgtcgtgggaaacctcagggtcacgacgttgatctgcttatcagttctccgggagctgagaaagagcaagaagaccagctcctgcagaaagtgaccaatctgtggaagaaacaagggttgttgctgtacggtcgtctggaatggacccagtgggaagatgggaagctgccatccggtaaggctgacgagggtgacgcgggtgcgaaatgctttctgatcctcaaactttatgatcatctggtgcgcaaaagcaaatgggaaatgccgacgggttcgaacatgggcgaggccaaaccgtggaaagcaattcgcgtagatctgctgcgttgcccctacggcggttttgcgtttgcgatgttgcagtggaccggaagccgcatgttccgtcgtgatctgcgttggtacgccactgacgagaagaacatgatgctggacaatcatgcgctgtatgacctgaccaagaaaatcaaactcaaagctaaatcggaagaggaaattttcgcacatctggggcttgaatacctggaaccgttcgaacgtaacgca

SEQ ID NO: 2936 - protein, 529 aa, synthetic construct
  REGION 1..529: note = Variant of terminal deoxynucleotidyltransferase
MHHHHHHGGSGSHGIRTIDSDFGKKQQKKMDNHDSSATYEIKFHEFVLFILEEKMGATRRTFLTDLARKKGFRVENELTDEVTHIVAENLSRSEVLAWLKEHKMEKTKQFELLDISWLIESMKVGKPVDTKGKYQLAESGEMSANPDPTEGRENELPPTMKTVSPYACMRRTTLNNHNQRFTDALEILRENYEFKRNDDTALEFRRAISVLKSLPFEVRSLKDTEGLPWIGDEVKGIMEEIIEVGNSREVQAVLNDEWYQSFHRFKSVFGVGVKTADKWYRMGLRTLEDVRSSKTLKLTPMQKVGLLYYEDLARGVTRAEADAISLLVQDAVATFDPDAVVEIVGGFRRGKPQGHDVDLLISSPGAEKEQEDQLLQKVTNLWKKQGLLLYGRLEWTQWEDGKLPSGKADEGDAGAKCFLILKLYDHLVRKSKWEMPTGSNMGEAKPWKAIRVDLLRCPYGGFAFAMLQWTGSRMFRRDLRWYATDEKNMMLDNHALYDLTKKIKLKAKSEEEIFAHLGLEYLEPFERNA

SEQ ID NO: 2937 - DNA, 1587 bp, synthetic construct
  misc_feature 1..1587: note = Variant of terminal deoxynucleotidyltransferase
  source 1..1587: mol_type = other DNA
atgcaccatcatcatcatcatggcggtagcggcagccacggcattcgtaccatcgattcggacttcgggaagaaacagcagaaaaaaatggataaccacgatagttccgccacttatgaaatcaaatttcacgagtttgtgctgttcattctcgaagaaaaaatgggtgcgacgcgtcgtacttttctgacagatttagcccgcaagaaagggttccgcgtcgagaatgaactgaccgacgaagttacccacatcgtggcagaaaatctgtcacgctctgaagtattggcttggctgaaagaacacaagatggagaagaccaagcaattcgaactgctggatattagctggcttatcgaaagcatgaaagttggtaaaccggtggacaccaaggggaaataccagttggcggaatcgggtgagatgagtgcgaacccagatccgacagagggtcgtgaaaacgagctgcctcctactatgaagaccgtttctccgtatgcgtgtcaacgccgcaccaccctgaacaaccataatcaacgttttacggacgcactggaaattcttcgtgaaaattacgagttcaaacgcaacgatgatactgcgctggaatttcgtcgtgctatctccgtgctgaaaagccttccgtttgaggtacgtagcctgaaagacacggaaggattgccctggatcggtgatgaagtcaaagggattatggaagaaatcatcgaggtcgggaattcgcgtgaagtgcaggccgtgctcaatgatgagtggtatcaaagcttccaccgctttaagagtgtctttggagtgggggtgaagacagcagacaagtggtaccgtatgggtctgcgcaccctcgaggatgttcgttccagcaagaccctgaagttgaccccgatgcagaaagtaggtctgctgtattatgaagatcttgctcgcggcgttacgcgtgccgaagctgacgcgatttctctgctggttcaggatgcagtcgcaactttcgacccggatgcgctggtggagattgtcggtggatttcgtcgtgggaaacctcagggtcacgacgttgatctgcttatcagttctccgggagctgagaaagagcaagaagaccagctcctgcagaaagtgaccaatctgtggaagaaacaagggttgttgctgtacggtcgtctggaatggacccagtgggaagatgggaaactcccatccggtaaggctgacgagggtgacgcgggtgcgaaatgctttctgatcctcaaactttatgatcataaagtggacaaaagcaaatgggaaatgccgacgggttcgaacatgggcgaggccaaaccgtggaaagcaattcgcgtagatctgctgcgttgcccctacggcggttttgcgtttgcgatgttgcagtggaccggaagccgcatgttccgtcgtgatctgcgttggtacgccactgacgagaagaacatgatgctggacaatcatgcgctgtatgacctgaccaagaaaatcttcctcaaagctaaatcggaagaggaaattttcgcacatctggggcttgaatacctggaaccgttcgaacgtaacgca

SEQ ID NO: 2938 - protein, 529 aa, synthetic construct
  REGION 1..529: note = Variant of terminal deoxynucleotidyltransferase
MHHHHHHGGSGSHGIRTIDSDFGKKQQKKMDNHDSSATYEIKFHEFVLFILEEKMGATRRTFLTDLARKKGFRVENELTDEVTHIVAENLSRSEVLAWLKEHKMEKTKQFELLDISWLIESMKVGKPVDTKGKYQLAESGEMSANPDPTEGRENELPPTMKTVSPYACQRRTTLNNHNQRFTDALEILRENYEFKRNDDTALEFRRAISVLKSLPFEVRSLKDTEGLPWIGDEVKGIMEEIIEVGNSREVQAVLNDEWYQSFHRFKSVFGVGVKTADKWYRMGLRTLEDVRSSKTLKLTPMQKVGLLYYEDLARGVTRAEADAISLLVQDAVATFDPDALVEIVGGFRRGKPQGHDVDLLISSPGAEKEQEDQLLQKVTNLWKKQGLLLYGRLEWTQWEDGKLPSGKADEGDAGAKCFLILKLYDHKVDKSKWEMPTGSNMGEAKPWKAIRVDLLRCPYGGFAFAMLQWTGSRMFRRDLRWYATDEKNMMLDNHALYDLTKKIFLKAKSEEEIFAHLGLEYLEPFERNA

SEQ ID NO: 2939 - DNA, 1587 bp, synthetic construct
  misc_feature 1..1587: note = Variant of terminal deoxynucleotidyltransferase
  source 1..1587: mol_type = other DNA
atgcaccatcatcatcatcatggcggtagcggcagccacggcattcgtaccatcgattcggacttcgggaagaaacagcagaaaaaaatggataaccacgatagttccgccacttatgaaatcaaatttcacgagtttgtgctgttcattctcgaagaaaaaatgggtgcgacgcgtcgtacttttctgacagatttagcccgcaagaaagggttccgcgtcgagaatgaactgaccgacgaagttacccacatcgtggcagaaaatctgtcacgctctgaagtattggcttggctgaaagaacacaagatggagaagaccaagcaattcgaactgctggatattagctggcttatcgaaagcatgaaagttggtaaaccggtggacaccaaggggaaataccagttggcggaatcgggtgagatgagtgcgaacccagatccgacagagggtcgtgaaaacgagctgcctcctactatgaagaccgtttctccgtatgcgtgtcaacgccgcaccaccctgaacaaccataatcaacgttttacggacgcactggaaattcttcgtgaaaattacgagttcaaacgcaacgatgatactgcgctggaatttcgtcgtgctatctccgtgctgaaaagccttccgtttgaggtacgtagcctgaaagacacggaaggattgccctggatcggtgatgaagtcaaagggattatggaagaaatcatcgaggtcgggaattcgcgtgaagtgcaggccgtgctcaatgatgagtggtatcaaagcttccaccgctttaagagtgtctttggagtgggggtgaagacagcagacaagtggtaccgtatgggtctgcgcaccctcgaggatgttcgtaacagcaagaccctgaagttgaccccgatgcagaaagcgggtctgctgtattatgaagatcttgctcgcggcgttacgcgtgccgaagctgacgcgatttctctgatggttcgcgatgcagtcgcaactttcgacccggatgcgctggtggagattgtcggtggatttcgtcgtgggaaacctcagggtcacgacgttgatctgcttatcagttctccgggagctgagaaagagcaagaagaccagctcctgcagaaagtgacgaatctgtggaagaaacaagggttgttgctgtacggtcgtctggaatggacccagtgggaagatgggaaactcccatccggtaaggctgacgagggtgacgcgggtgcgaaatgctttctgatcctcaaactttatgatcataaagtggacaaaagcaaatgggaaatgccgacgggttcgaacatgggcgaggccaaaccgtggaaagcaattcgcgtagatctgctgcgttgcccctacggcggttttgcgtttgcaatgttgagttggaccggaagccgcatgttccgtcgtgatctgcgttggtacgccactgacgagaagaacatgatgctggacaatcatgcgctgtatgacctgaccaagaaaatctttctcaaagctaaatcggaagaggaaattttcgcacatctggggcttgaatacctggaaccgttcgaacgtaacgca

SEQ ID NO: 2940 - protein, 529 aa, synthetic construct
  REGION 1..529: note = Variant of terminal deoxynucleotidyltransferase
MHHHHHHGGSGSHGIRTIDSDFGKKQQKKMDNHDSSATYEIKFHEFVLFILEEKMGATRRTFLTDLARKKGFRVENELTDEVTHIVAENLSRSEVLAWLKEHKMEKTKQFELLDISWLIESMKVGKPVDTKGKYQLAESGEMSANPDPTEGRENELPPTMKTVSPYACQRRTTLNNHNQRFTDALEILRENYEFKRNDDTALEFRRAISVLKSLPFEVRSLKDTEGLPWIGDEVKGIMEEIIEVGNSREVQAVLNDEWYQSFHRFKSVFGVGVKTADKWYRMGLRTLEDVRNSKTLKLTPMQKAGLLYYEDLARGVTRAEADAISLMVRDAVATFDPDALVEIVGGFRRGKPQGHDVDLLISSPGAEKEQEDQLLQKVTNLWKKQGLLLYGRLEWTQWEDGKLPSGKADEGDAGAKCFLILKLYDHKVDKSKWEMPTGSNMGEAKPWKAIRVDLLRCPYGGFAFAMLSWTGSRMFRRDLRWYATDEKNMMLDNHALYDLTKKIFLKAKSEEEIFAHLGLEYLEPFERNA

SEQ ID NO: 2941 - DNA, 1587 bp, synthetic construct
  misc_feature 1..1587: note = Variant of terminal deoxynucleotidyltransferase
  source 1..1587: mol_type = other DNA
atgcaccatcatcatcatcatggcggtagcggcagccacggcattcgtaccatcgattcggacttcgggaagaaacagcagaaaaaaatggataaccacgatagttccgccacttatgaaatcaaatttcacgagtttgtgctgttcattctcgaagaaaaaatgggtgcgacgcgtcgtacttttctgacagatttagcccgcaagaaagggttccgcgtcgagaatgaactgaccgacgaagttacccacatcgtggcagaaaatctgtcacgctctgaagtattggcttggctgaaagaacacaagatggagaagaccaagcaattcgaactgctggatattagctggcttatcgaaagcatgaaagttggtaaaccggtggacaccaaggggaaataccagttggcggaatcgggtgagatgagtgcgaacccagatccgacagagggtcgtgaaaacgagctgcctcctactatgaagaccgtttctccgtatgcgtgtcaacgccgcaccaccctgaacaaccataatcaacgttttacggacgcactggaaattcttcgtgaaaattacgagttcaaacgcaacgatgatactgcgctggaatttcgtcgtgctatctccgtgctgaaaagccttccgtttgaggtacgtagcctgaaagacacggaaggattgccctggatcggtgatgaagtcaaagggattatggaagaaatcatcgaggtcgggaattcgcgtgaagtgcaggccgtgctcaatgatgagtggtatcaaagcttccaccgctttaagagtgtctttggagtgggggtgaagacagcagacaagtggtaccgtatgggtctgcgcaccctcgaggatgttcgttccagcaagaccctgaagttgaccccgatgcagaaagcgggtctgctgtattatgaagatcttgctcgcggcgttacgcgtgccgaagctgacgcgatttctctgctggttcaggatgcagtcgcaactttcgacccggatgcggtcgtggagattgtcggtggatttcgtcgtgggaaacctcagggtcacgacgttgatctgcttatcagttctccgggagctgagaaagagcaagaagaccagctcctgcagaaagtgaccaatctgtggaagaaacaagggttgttgctgtacggtcgtctggaatggacccagtgggaagatgggaaactcccatccggtaaggctgacgagggtgacgcgggtgcgaaatgctttctgatcctcaaactttatgatcataaagtggacaaaagcaaatgggaaatgccgacgggttcgaacatgggcgaggccaaaccgtggaaagcaattcgcgtagatctgctgcgttgcccctacggcggttttgcgtttgcgatgttgcagtggaccggaagccgcatgttccgtcgtgatctgcgttggtacgccactgacgagaagaacatgatgctggacaatcatgcgctgtatgacctgaccaagaaaatcaaactcaaagctaaatcggaagaggaaattttcgcacatctggggcttgaatacctggaaccgttcgaacgtaacgca

SEQ ID NO: 2942 - protein, 529 aa, synthetic construct
  REGION 1..529: note = Variant of terminal deoxynucleotidyltransferase
MHHHHHHGGSGSHGIRTIDSDFGKKQQKKMDNHDSSATYEIKFHEFVLFILEEKMGATRRTFLTDLARKKGFRVENELTDEVTHIVAENLSRSEVLAWLKEHKMEKTKQFELLDISWLIESMKVGKPVDTKGKYQLAESGEMSANPDPTEGRENELPPTMKTVSPYACQRRTTLNNHNQRFTDALEILRENYEFKRNDDTALEFRRAISVLKSLPFEVRSLKDTEGLPWIGDEVKGIMEEIIEVGNSREVQAVLNDEWYQSFHRFKSVFGVGVKTADKWYRMGLRTLEDVRSSKTLKLTPMQKAGLLYYEDLARGVTRAEADAISLLVQDAVATFDPDAVVEIVGGFRRGKPQGHDVDLLISSPGAEKEQEDQLLQKVTNLWKKQGLLLYGRLEWTQWEDGKLPSGKADEGDAGAKCFLILKLYDHKVDKSKWEMPTGSNMGEAKPWKAIRVDLLRCPYGGFAFAMLQWTGSRMFRRDLRWYATDEKNMMLDNHALYDLTKKIKLKAKSEEEIFAHLGLEYLEPFERNA

SEQ ID NO: 2943 - DNA, 1587 bp, synthetic construct
  misc_feature 1..1587: note = Variant of terminal deoxynucleotidyltransferase
  source 1..1587: mol_type = other DNA
atgcaccatcatcatcatcatggcggtagcggcagccacggcattcgtaccatcgattcggacttcgggaagaaacagcagaaaaaaatggataaccacgatagttccgccacttatgaaatcaaatttcacgagtttgtgctgttcattctcgaagaaaaaatgggtgcgacgcgtcgtacttttctgacagatttagcccgcaagaaagggttccgcgtcgagaatgaactgaccgacgaagttacccacatcgtggcagaaaatctgtcacgctctgaagtattggcttggctgaaagaacacaagatggagaagaccaagcaattcgaactgctggatattagctggcttatcgaaagcatgaaagttggtaaaccggtggacaccaaggggaaataccagttggcggaatcgggtgagatgagtgcgaacccagatccgacagagggtcgtgaaaacgagctgcctcctactatgaagaccgtttctccgtatgcgtgtcaacgccgcaccaccctgaacaaccataatcaacgttttacggacgcactggaaattcttcgtgaaaattacgagttcaaacgcaacgatgatactgcgctggaatttcgtcgtgctatctccgtgctgaaaagccttccgtttgaggtacgtagcctgaaagacacggaaggattgccctggatcggtgatgaagtcaaagggattatggaagaaatcatcgaggtcgggaattcgcgtgaagtgcaggccgtgctcaatgatgagtggtatcaaagcttccaccgctttaagagtgtctttggagtgggggtgaagacagcagacaagtggtaccgtatgggtctgcgcaccctcgaggatgttcgttccagcaagaccctgaagttgaccccgatgcagaaagcgggtctgctgtattatgaagatcttgctcgcggcgttacgcgtgccgaagctgacgcgatttctctgctggttcaggatgcagtcgcaactttcgacccggatgcgctggtggagattgtcggtggatttcgtcgtgggaaacctcagggtcacgacgttgatctgcttatcagttctccgggagctgagaaagagcaagaagaccagctcctgcagaaagtgaccaatctgtggaagaaacaagggttgttgctgtacggtcgtctggaatggacccagtgggaagatgggaaactcccatccggtaaggctgacgagggtgacgcgggtgcgaaatgctttctgatcctcaaactttatgatcataaagtggacaaaagcaaatgggaaatgccgacgggttcgaacatgggcgaggccaaaccgtggaaagcaattcgcgtagatctgctgcgttgcccctacggcggttttgcgtttgcgatgttgcagtggaccggaagccgcatgttccgtcgtgatctgcgttggtacgccactgacgagaagaacatgatgctggacaatcatgcgctgtatgacctgaccaagaaaatcaaactcaaagctaaatcggaagaggaaattttcgcacatctggggcttgaatacctggaaccgttcgaacgtaacgca

SEQ ID NO: 2944 - protein, 529 aa, synthetic construct
  REGION 1..529: note = Variant of terminal deoxynucleotidyltransferase
MHHHHHHGGSGSHGIRTIDSDFGKKQQKKMDNHDSSATYEIKFHEFVLFILEEKMGATRRTFLTDLARKKGFRVENELTDEVTHIVAENLSRSEVLAWLKEHKMEKTKQFELLDISWLIESMKVGKPVDTKGKYQLAESGEMSANPDPTEGRENELPPTMKTVSPYACQRRTTLNNHNQRFTDALEILRENYEFKRNDDTALEFRRAISVLKSLPFEVRSLKDTEGLPWIGDEVKGIMEEIIEVGNSREVQAVLNDEWYQSFHRFKSVFGVGVKTADKWYRMGLRTLEDVRSSKTLKLTPMQKAGLLYYEDLARGVTRAEADAISLLVQDAVATFDPDALVEIVGGFRRGKPQGHDVDLLISSPGAEKEQEDQLLQKVTNLWKKQGLLLYGRLEWTQWEDGKLPSGKADEGDAGAKCFLILKLYDHKVDKSKWEMPTGSNMGEAKPWKAIRVDLLRCPYGGFAFAMLQWTGSRMFRRDLRWYATDEKNMMLDNHALYDLTKKIKLKAKSEEEIFAHLGLEYLEPFERNA

SEQ ID NO: 2945 - DNA, 1587 bp, synthetic construct
  misc_feature 1..1587: note = Variant of terminal deoxynucleotidyltransferase
  source 1..1587: mol_type = other DNA
atgcaccatcatcatcatcatggcggtagcggcagccacggcattcgtaccatcgattcggacttcgggaagaaacagcagaaaaaaatggataaccacgatagttccgccacttatgaaatcaaatttcacgagtttgtgctgttcattctcgaagaaaaaatgggtgcgacgcgtcgtacttttctgacagatttagcccgcaagaaagggttccgcgtcgagaatgaactgaccgacgaagttacccacatcgtggcagaaaatctgtcacgctctgaagtattggcttggctgaaagaacacaagatggagaagaccaagcaattcgaactgctggatattagctggcttatcgaaagcatgaaagttggtaaaccggtggacaccaaggggaaataccagttggcggaatcgggtgagatgagtgcgaacccagatccgacagagggtcgtgaaaacgagctgcctcctactatgaagaccgtttctccgtatgcgtgtcaacgccgcaccaccctgaacaaccataatcaacgttttacggacgcactggaaattcttcgtgaaaattacgagttcaaacgcaacgatgatactgcgctggaatttcgtcgtgctatctccgtgctgaaaagccttccgtttgaggtacgtagcctgaaagacacggaaggattgccctggatcggtgatgaagtcaaagggattatggaagaaatcatcgaggtcgggaattcgcgtgaagtgcaggccgtgctcaatgatgagtggtatcaaagcttccaccgctttaagagtgtctttggagtgggggtgaagacagcagacaagtggtaccgtatgggtctgcgcaccctcgaggatgttcgttccagcaagaccctgaagttgaccccgatgcagaaagcgggtctgctgtattatgaagatcttgctcgcggcgttacgcgtgccgaagctgacgcgatttctctgatggttcaggatgcagtcgcaactttcgacccggatgcgctggtggagattgtcggtggatttcgtcgtgggaaacctcagggtcacgacgttgatctgcttatcagttctccgggagctgagaaagagcaagaagaccagctcctgcagaaagtgacgaatctgctgaagaaacaagggttgttgctgtacggtcgtctggaatggacccagtgggaagatgggaaactcccgtccacgaaggctgacgtaggtgacgcgggtgcgaaatgctttctgatcctcaaactttatgatcataaagtggacaaaagcaaatgggaaatgccgacgggttcgaacatgggcgaggccaaaccgtggaaagcaattcgcgtagatctgctgcgttgcccctacggcggttttgcgtttgcaatgttgcagtggaccggaagccgcatgttccgtcgtgatctgcgttggtacgccgcggacgagaagaacatgatgctggacaatcatgcgctgtatgacctgaccaagaaaatctttctcaaagctaaatcggaagaggaaattttcgcacatctggggcttgaatacctggaaccgttcgaacgtaacgca

SEQ ID NO: 2946 - protein, 529 aa, synthetic construct
  REGION 1..529: note = Variant of terminal deoxynucleotidyltransferase
MHHHHHHGGSGSHGIRTIDSDFGKKQQKKMDNHDSSATYEIKFHEFVLFILEEKMGATRRTFLTDLARKKGFRVENELTDEVTHIVAENLSRSEVLAWLKEHKMEKTKQFELLDISWLIESMKVGKPVDTKGKYQLAESGEMSANPDPTEGRENELPPTMKTVSPYACQRRTTLNNHNQRFTDALEILRENYEFKRNDDTALEFRRAISVLKSLPFEVRSLKDTEGLPWIGDEVKGIMEEIIEVGNSREVQAVLNDEWYQSFHRFKSVFGVGVKTADKWYRMGLRTLEDVRSSKTLKLTPMQKAGLLYYEDLARGVTRAEADAISLMVQDAVATFDPDALVEIVGGFRRGKPQGHDVDLLISSPGAEKEQEDQLLQKVTNLLKKQGLLLYGRLEWTQWEDGKLPSTKADVGDAGAKCFLILKLYDHKVDKSKWEMPTGSNMGEAKPWKAIRVDLLRCPYGGFAFAMLQWTGSRMFRRDLRWYAADEKNMMLDNHALYDLTKKIFLKAKSEEEIFAHLGLEYLEPFERNA

SEQ ID NO: 2947 - DNA, 1587 bp, synthetic construct
  misc_feature 1..1587: note = Variant of terminal deoxynucleotidyltransferase
  source 1..1587: mol_type = other DNA
atgcaccatcatcatcatcatggcggtagcggcagccacggcattcgtaccatcgattcggacttcgggaagaaacagcagaaaaaaatggataaccacgatagttccgccacttatgaaatcaaatttcacgagtttgtgctgttcattctcgaagaaaaaatgggtgcgacgcgtcgtacttttctgacagatttagcccgcaagaaagggttccgcgtcgagaatgaactgaccgacgaagttacccacatcgtggcagaaaatctgtcacgctctgaagtattggcttggctgaaagaacacaagatggagaagaccaagcaattcgaactgctggatattagctggcttatcgaaagcatgaaagttggtaaaccggtggacaccaaggggaaataccagttggcggaatcgggtgagatgagtgcgaacccagatccgacagagggtcgtgaaaacgagctgcctcctactatgaagaccgtttctccgtatgcgtgtcaacgccgcaccaccctgaacaaccataatcaacgttttacggacgcactggaaattcttcgtgaaaattacgagttcaaacgcaacgatgatactgcgctggaatttcgtcgtgctatctccgtgctgaaaagccttccgtttgaggtacgtagcctgaaagacacggaaggattgccctggatcggtgatgaagtcaaagggattatggaagaaatcatcgaggtcgggaattcgcgtgaagtgcaggccgtgctcaatgatgagtggtatcaaagcttccaccgctttaagagtgtctttggagtgggggtgaagacagcagacaagtggtaccgtatgggtctgcgcaccctcgaggatgttcgttccagcaagaccctgaagttgaccccgatgcagaaagcgggtctgctgtattatgaagatcttgctcgcggcgttacgcgtgccgaagctgacgcgatttctctgctggttcaggatgcagtcgcaactttcgacccggatgcgctggtggagattgtcggtggatttcgtcgtgggaaacctcagggtcacgacgttgatctgcttatcagttctccgggagctgagaaagagcaagaagaccagctcctgcagaaagtgatgaatctgctgaagaaacaagggttgttgctgtacggtcgtctggaatggacccagtgggaagatgggaaactcccatccggtaaggctgacgagggtgacgcgggtgcgaaatgctttctgatcctcaaactttatgatcataaagtggacaaaagcaaatgggaaatgccgacgggttcgaacatgggcgaggccaaaccgtggaaagcaattcgcgtagatctgctgcgttgcccctacggcggttttgcgtttgcaatgttgagttggaccggaagccgcatgttccgtcgtgatctgcgttggtacgccacggacgagaagaacatgatgctggacaatcatgcgctgtatgacctgaccaagaaaatctttctcaaagctaaatcggaagaggaaattttcgcacatctggggcttgaatacctggaaccgttcgaacgtaacgca

SEQ ID NO: 2948 - protein, 529 aa, synthetic construct
  REGION 1..529: note = Variant of terminal deoxynucleotidyltransferase
MHHHHHHGGSGSHGIRTIDSDFGKKQQKKMDNHDSSATYEIKFHEFVLFILEEKMGATRRTFLTDLARKKGFRVENELTDEVTHIVAENLSRSEVLAWLKEHKMEKTKQFELLDISWLIESMKVGKPVDTKGKYQLAESGEMSANPDPTEGRENELPPTMKTVSPYACQRRTTLNNHNQRFTDALEILRENYEFKRNDDTALEFRRAISVLKSLPFEVRSLKDTEGLPWIGDEVKGIMEEIIEVGNSREVQAVLNDEWYQSFHRFKSVFGVGVKTADKWYRMGLRTLEDVRSSKTLKLTPMQKAGLLYYEDLARGVTRAEADAISLLVQDAVATFDPDALVEIVGGFRRGKPQGHDVDLLISSPGAEKEQEDQLLQKVMNLLKKQGLLLYGRLEWTQWEDGKLPSGKADEGDAGAKCFLILKLYDHKVDKSKWEMPTGSNMGEAKPWKAIRVDLLRCPYGGFAFAMLSWTGSRMFRRDLRWYATDEKNMMLDNHALYDLTKKIFLKAKSEEEIFAHLGLEYLEPFERNA

SEQ ID NO: 2949 - DNA, 1587 bp, synthetic construct
  misc_feature 1..1587: note = Variant of terminal deoxynucleotidyltransferase
  source 1..1587: mol_type = other DNA
atgcaccatcatcatcatcatggcggtagcggcagccacggcattcgtaccatcgattcggacttcgggaagaaacagcagaaaaaaatggataaccacgatagttccgccacttatgaaatcaaatttcacgagtttgtgctgttcattctcgaagaaaaaatgggtgcgacgcgtcgtacttttctgacagatttagcccgcaagaaagggttccgcgtcgagaatgaactgaccgacgaagttacccacatcgtggcagaaaatctgtcacgctctgaagtattggcttggctgaaagaacacaagatggagaagaccaagcaattcgaactgctggatattagctggcttatcgaaagcatgaaagttggtaaaccggtggacaccaaggggaaataccagttggcggaatcgggtgagatgagtgcgaacccagatccgacagagggtcgtgaaaacgagctgcctcctactatgaagaccgtttctccgtatgcgtgtcaacgccgcaccaccctgaacaaccataatcaacgttttacggacgcactggaaattcttcgtgaaaattacgagttcaaacgcaacgatgatactgcgctggaatttcgtcgtgctatctccgtgctgaaaagccttccgtttgaggtacgtagcctgaaagacacggaaggattgccctggatcggtgatgaagtcaaagggattatggaagaaatcatcgaggtcgggaattcgcgtgaagtgcaggccgtgctcaatgatgagtggtatcaaagcttccaccgctttaagagtgtctttggagtgggggtgaagacagcagacaagtggtaccgtatgggtctgcgcaccctcgaggatgttcgttccagcaagaccctgaagttgaccccgatgcagaaagcgggtctgctgtattatgaagatcttgctcgcggcgttacgcgtgccgaagctgacgcgatttctctgctggttcaggatgcagtcgcaactttcgacccggatgcgctggtggagattgtcggtggatttcgtcgtgggaaacctcagggtcacgacgttgatctgcttatcagttctccgggagctgagaaagagcaagaagaccagctcctgcagaaagtgctgaatctgtggaagaaacaagggttgttgctgtacggtcgtctggaatggacccagtgggaagatgggaaactcccatccggtaaggctgacgagggtgacgcgggtgcgaaatgctttctgatcctcaaactttatgatcataaagtggacaaaagcaaatgggaaatgccgacgggttcgaacatgggcgaggccaaaccgtggaaagcaattcgcgtagatctgctgcgttgcccctacggcggttttgcgtttgaaatgttgagttggaccggaagccgcatgttccgccgtgatctgcgttggtacgccgcggacgagaagaacatgatgctggacaatcatgcgctgtatgacctgaccaagaaaatctttctcaaagctaaatcggaagaggaaattttcgcacatctggggcttgaatacctggaaccgttcgaacgtaacgca

SEQ ID NO: 2950 - protein, 529 aa, synthetic construct
  REGION 1..529: note = Variant of terminal deoxynucleotidyltransferase
MHHHHHHGGSGSHGIRTIDSDFGKKQQKKMDNHDSSATYEIKFHEFVLFILEEKMGATRRTFLTDLARKKGFRVENELTDEVTHIVAENLSRSEVLAWLKEHKMEKTKQFELLDISWLIESMKVGKPVDTKGKYQLAESGEMSANPDPTEGRENELPPTMKTVSPYACQRRTTLNNHNQRFTDALEILRENYEFKRNDDTALEFRRAISVLKSLPFEVRSLKDTEGLPWIGDEVKGIMEEIIEVGNSREVQAVLNDEWYQSFHRFKSVFGVGVKTADKWYRMGLRTLEDVRSSKTLKLTPMQKAGLLYYEDLARGVTRAEADAISLLVQDAVATFDPDALVEIVGGFRRGKPQGHDVDLLISSPGAEKEQEDQLLQKVLNLWKKQGLLLYGRLEWTQWEDGKLPSGKADEGDAGAKCFLILKLYDHKVDKSKWEMPTGSNMGEAKPWKAIRVDLLRCPYGGFAFEMLSWTGSRMFRRDLRWYAADEKNMMLDNHALYDLTKKIFLKAKSEEEIFAHLGLEYLEPFERNA

SEQ ID NO: 2951 - DNA, 1587 bp, synthetic construct
  misc_feature 1..1587: note = Variant of terminal deoxynucleotidyltransferase
  source 1..1587: mol_type = other DNA
atgcaccatcatcatcatcatggcggtagcggcagccacggcattcgtaccatcgattcggacttcgggaagaaacagcagaaaaaaggcgataaccacgatagttccgccacttatgaaatcaaatttcacgagtttgtgctgttcattctcgaagaaaaaatgggtgcgacgcgtcgtacttttctgacagatttagcccgcaagaaagggttccgcgtcgagaatgaactgaccgacgaagttacccacatcgtggcagaaaatctgtcacgctctgaagtattggcttggctgaaagaacacaagatggagaagaccaagcaattcgaactgctggatattagctggcttatcgaaagcatgaaagttggtaaaccggtggacaccaaggggaaataccagttggcggaatcgggtgagatgagtgcgaacccagatccgacagagggtcgtgaaaacgagctgcctcctactatgaagaccgtttctccgtatgcgtgtcaacgccgcaccaccctgaacaaccataatgctcgttttacggacgcactggaaattcttcgtgaaaattacgagttcaaacgcaacgatgatactgcgctggaatttcgtcgtgctatctccgtgctgaaaagccttccgtttgaggtacgtagcctgaaagacacggaaggattgccctggatcggtgatgaagtcaaagggattatggaagaaatcatcgaggtcgggaattcgcgtgaagtgcaggccgtgctcaatgatgagtggtatcaaagcttccaccgctttaagagtgtctttggagtgggggtgaagacagcagacaagtggtaccgtatgggtctgcgcaccctcgaggatgttcgttccagcaagaccctgaagttgaccccgatgcagaaagtaggtctgctgtattatgaagatcttgctcgcggcgttacgcgtgccgaagctgacgcgatttctctgctggttcaggatgcagtcgcaactttcgacccggatgcgatcgtggagattgtcggtggatttcgtcgtgggaaacctcagggtcacgacgttgatctgcttatcagttctccgggagctgagaaagagcaagaagacgggctcctgcagaaagtgatgaatctgtggaagaaacaagggttgttgctgtacggtcgtctggaatggacccagtgggaagatgggggttcgccatccggtaaggctgacgagggtgacgcgggtgcgaaatgctttctgatcctcaaactttatgatcataaagtggacaaaagcaaatgggaaatgccgacgggttcgaacatgggcgaggccaaaccgtggaaagcaattcgcgtagatctgctgcgttgcccctacggcggttttgcgtttgcgatgttgcagtggaccggaagccgcatgttccgtcgtgatctgcgttggtacgccactgacgagaagaacatgatgctggacaatcatgcgctgtatgacctgaccaagaaaatcttcctccctgctaaatcggaagaggaaattttcgcacatctggggcttgaatacctggaaccgttcgaacgtaacgca

SEQ ID NO: 2952 - protein, 529 aa, synthetic construct
  REGION 1..529: note = Variant of terminal deoxynucleotidyltransferase
MHHHHHHGGSGSHGIRTIDSDFGKKQQKKGDNHDSSATYEIKFHEFVLFILEEKMGATRRTFLTDLARKKGFRVENELTDEVTHIVAENLSRSEVLAWLKEHKMEKTKQFELLDISWLIESMKVGKPVDTKGKYQLAESGEMSANPDPTEGRENELPPTMKTVSPYACQRRTTLNNHNARFTDALEILRENYEFKRNDDTALEFRRAISVLKSLPFEVRSLKDTEGLPWIGDEVKGIMEEIIEVGNSREVQAVLNDEWYQSFHRFKSVFGVGVKTADKWYRMGLRTLEDVRSSKTLKLTPMQKVGLLYYEDLARGVTRAEADAISLLVQDAVATFDPDAIVEIVGGFRRGKPQGHDVDLLISSPGAEKEQEDGLLQKVMNLWKKQGLLLYGRLEWTQWEDGGSPSGKADEGDAGAKCFLILKLYDHKVDKSKWEMPTGSNMGEAKPWKAIRVDLLRCPYGGFAFAMLQWTGSRMFRRDLRWYATDEKNMMLDNHALYDLTKKIFLPAKSEEEIFAHLGLEYLEPFERNA

SEQ ID NO: 2953 - DNA, 1587 bp, synthetic construct
  misc_feature 1..1587: note = Variant of terminal deoxynucleotidyltransferase
  source 1..1587: mol_type = other DNA
atgcaccatcatcatcatcatggcggtagcggcagccacggcattcgtaccatcgattcggacttcgggaagaaacagcagaaaaaaatggataaccacgatagttccgccacttatgaaatcaaatttcacgagtttgtgctgttcattctcgaagaaaaaatgggtgcgacgcgtcgtacttttctgacagatttagcccgcaagaaagggttccgcgtcgagaatgaactgaccgacgaagttacccacatcgtggcagaaaatctgtcacgctctgaagtattggcttggctgaaagaacacaagatggagaagaccaagcaattcgaactgctggatattagctggcttatcgaaagcatgaaagttggtaaaccggtggacaccaaggggaaataccagttggcggaatcgggtgagatgagtgcgaacccagatccgacagagggtcgtgaaaacgagctgcctcctactatgaagaccgtttctccgtatgcgtgtcaacgccgcaccaccctgaacaaccataatcaacgttttacggacgcgctggaaattcttcgtgaaaattacgagttcaaacgcaacgatgatactgcgctggaatttcgtcgtgctatctccgtgctgaaaagccttccgtttgaggtacgtagcctgaaagacacggaaggattgccctggatcggtgatgaagtcaaagggattatggaagaaatcatcgaggtcggggagtcgcgtgaagtgcaggccgtgctcaatgatgagtggtatcaaagcttccaccgctttaagagtgtctttggagtgggggtgaagacagcagacaagtggtaccgtatgggtctgcgcaccctcgaggatgttcgttccagcaagaccctgaagttgaccccgatgcagaaagtaggtctgctgtattatgaagatcttgctcgcggcgttacgcgtgccgaagctgacgcgatttggctgctggttcgcgatgcagtcgcaactttcgacccggatgcgatcgtggagattgtcggtggatttcgtcgtgggaaacctcagggtcacgacgttgatctgcttatcagttctccgggagctgagaaagagcaagaagaccagctcctgcagaaagtgatgaatctgtggaagaaacaagggttgttgctgtacggtcgtctggaatggacccagtgggaagatgggggttcgccatccggtaaggctgacgagggtgacgcgggtgcgaaatgctttctgatcctcaaactttatgatcataaagtggacaaaagcaaatgggaaatgccgacgggttcgaacatgggcgaggccaaaccgtggaaagcaattcgcgtagatctgctgcgttgcccctatggcagttttgcgtttgcgatgttgcagtggaccggaagccgcatgttccgtcgtgatctgcgttggtacgccactgacgagaagaacatgatgctggacaatcatgcgctgtatgacctgaccaagaaaatcttcctccctgctaaatcggaagaggaaattttcgcacatctggggcttgaatacctggaaccgttcgaacgtaacgca

SEQ ID NO: 2954 - protein, 529 aa, synthetic construct
  REGION 1..529: note = Variant of terminal deoxynucleotidyltransferase
MHHHHHHGGSGSHGIRTIDSDFGKKQQKKMDNHDSSATYEIKFHEFVLFILEEKMGATRRTFLTDLARKKGFRVENELTDEVTHIVAENLSRSEVLAWLKEHKMEKTKQFELLDISWLIESMKVGKPVDTKGKYQLAESGEMSANPDPTEGRENELPPTMKTVSPYACQRRTTLNNHNQRFTDALEILRENYEFKRNDDTALEFRRAISVLKSLPFEVRSLKDTEGLPWIGDEVKGIMEEIIEVGESREVQAVLNDEWYQSFHRFKSVFGVGVKTADKWYRMGLRTLEDVRSSKTLKLTPMQKVGLLYYEDLARGVTRAEADAIWLLVRDAVATFDPDAIVEIVGGFRRGKPQGHDVDLLISSPGAEKEQEDQLLQKVMNLWKKQGLLLYGRLEWTQWEDGGSPSGKADEGDAGAKCFLILKLYDHKVDKSKWEMPTGSNMGEAKPWKAIRVDLLRCPYGSFAFAMLQWTGSRMFRRDLRWYATDEKNMMLDNHALYDLTKKIFLPAKSEEEIFAHLGLEYLEPFERNA

SEQ ID NO: 2955 - DNA, 1587 bp, synthetic construct
  misc_feature 1..1587: note = Variant of terminal deoxynucleotidyltransferase
  source 1..1587: mol_type = other DNA
atgcaccatcatcatcatcatggcggtagcggcagccacggcattcgtaccatcgattcggacttcgggaagaaacagcagaaaaaaggcgataaccacgatagttccgccacttatgaaatcaaatttcacgagtttgtgctgttcattctcgaagaaaaaatgggtgcgacgcgtcgtacttttctgacagatttagcccgcaagaaagggttccgcgtcgagaatgaactgaccgacgaagttacccacatcgtggcagaaaatctgtcacgctctgaagtattggcttggctgaaagaacacaagatggagaagaccaagcaattcgaactgctggatattagctggcttatcgaaagcatgaaagttggtaaaccggtggacaccaaggggaaataccagttggcggaatcgggtgagatgagtgcgaacccagatccgacagagggtcgtgaaaacgagctgcctcctactatgaagaccgtttctccgtatgcgtgtcaacgccgcaccaccctgaacaaccataatcaacgttttacggactcgctggaaattcttcgtgaaaattacgagttcaaacgcaacgatgatactgcgctggaatttcgtcgtgctatctccgtgctgaaaagccttccgtttgaggtacgtagcctgaaagacacggaaggattgccctggatcggtgatgaagtcaaagggattatggaagaaatcatcgaggtcggggagtcgcgtgaagtgcaggccgtgctcaatgatgagtggtatcaaagcttccaccgctttaagagtgtctttggagtgggggtgaagacagcagacaagtggtaccgtatgggtctgcgcaccctcgaggatgttcgttccagcaagaccctgaagttgaccccgatgcagaaagtaggtctgctgtattatgaagatcttgctcgcggcgttacgcgtgccgaagctgacgcgatttggctgctggttcaggatgcagtcgcaactttcgacccggatgcgatcgtggagattgtcggtggatttcgtcgtgggaaacctcagggtcacgacgttgatctgcttatcagttctccgggagctgagaaagagcaagaagaccagctcctgcagaaagtgatgaatctgtggaagaaacaagggttgttgctgtacggtcgtctggaatggacccagtgggaagatgggggttcgccttccggtaaggctgacgagggtgacgcgggtgcgaaatgctttctgatcctcaaactttatgatcataaagtgcgtaaaagcaaatgggaaatgccgacgggttcgaacatgggcgaggccaaaccgtggaaagcaattcgcgtagatctgctgcgttgcccctatggcggttttgcgtttgcgatgttgcagtggaccggaagccgcatgttccgtcgtgatctgcgttggtacgccactgacgagaagaacatgatgctggacaatcattcgctgtatgacctgaccaagaaaatcttcctccctgctaaatcggaagaggaaattttcgcacatctggggcttgaatacctggaaccgttcgaacgtaacgca

SEQ ID NO: 2956 - protein, 529 aa, synthetic construct
  REGION 1..529: note = Variant of terminal deoxynucleotidyltransferase
MHHHHHHGGSGSHGIRTIDSDFGKKQQKKGDNHDSSATYEIKFHEFVLFILEEKMGATRRTFLTDLARKKGFRVENELTDEVTHIVAENLSRSEVLAWLKEHKMEKTKQFELLDISWLIESMKVGKPVDTKGKYQLAESGEMSANPDPTEGRENELPPTMKTVSPYACQRRTTLNNHNQRFTDSLEILRENYEFKRNDDTALEFRRAISVLKSLPFEVRSLKDTEGLPWIGDEVKGIMEEIIEVGESREVQAVLNDEWYQSFHRFKSVFGVGVKTADKWYRMGLRTLEDVRSSKTLKLTPMQKVGLLYYEDLARGVTRAEADAIWLLVQDAVATFDPDAIVEIVGGFRRGKPQGHDVDLLISSPGAEKEQEDQLLQKVMNLWKKQGLLLYGRLEWTQWEDGGSPSGKADEGDAGAKCFLILKLYDHKVRKSKWEMPTGSNMGEAKPWKAIRVDLLRCPYGGFAFAMLQWTGSRMFRRDLRWYATDEKNMMLDNHSLYDLTKKIFLPAKSEEEIFAHLGLEYLEPFERNA

SEQ ID NO: 2957 - DNA, 1587 bp, synthetic construct
  misc_feature 1..1587: note = Variant of terminal deoxynucleotidyltransferase
  source 1..1587: mol_type = other DNA
atgcaccatcatcatcatcatggcggtagcggcagccacggcattcgtaccatcgattcggacttcgggaagaaacagcagaaaaaaggcgataaccacgatagttccgccacttatgaaatcaaatttcacgagtttgtgctgttcattctcgaagaaaaaatgggtgcgacgcgtcgtacttttctgacagatttagcccgcaagaaagggttccgcgtcgagaatgaactgaccgacgaagttacccacatcgtggcagaaaatctgtcacgctctgaagtattggcttggctgaaagaacacaagatggagaagaccaagcaattcgaactgctggatattagctggcttatcgaaagcatgaaagttggtaaaccggtggacaccaaggggaaataccagttggcggaatcgggtgagatgagtgcgaacccagatccgacagagggtcgtgaaaacgagctgcctcctactatgaagaccgtttctccgtatgcgtgtcaacgccgcaccaccctgaacaaccataatcaacgttttacggacgcgctggaaattcttcgtgaaaattacgagttcaaacgcaacgatgatactgcgctggaatttcgtcgtgctatctccgtgctgaaaagccttccgtttgaggtacgtagcctgaaagacacggaaggattgccctggatcggtgatgaagtcaaagggattatggaagaaatcatcgaggtcggggagtcgcgtgaagtgcaggccgtgctcaatgatgagtggtatcaaagcttccaccgctttaagagtgtctttggagtgggggtgaagacagcagacaagtggtaccgtatgggtctgcgcaccctcgaggatgttcgttccagcaagaccctgaagttgaccccgatgcagaaagtaggtctgctgtattatgaagatcttgctcgcggcgttacgcgtgccgaagctgacgcgatttggctgatggttcgcgatgcagtcgcaactttcgacccggatgcgatcgtggagattgtcggtggatttcgtcgtgggaaacctcagggtcacgacgttgatctgcttatcagttctccgggagctgagaaagagcaagaagaccagctcctgcagaaagtgaccaatctgtggaagaaacaagggttgttgctgtacggtcgtctggaatggacccagtgggaagatgggggttcggactccggtaaggctgacgagggtgacgcgggtgcgaaatgctttctgatcctcaaactttatgatcataaagtggataaaagcaaatgggaaatgccgacgggttcgaacatgggcgaggccaaaccgtggaaagcaattcgcgtagatctgctgcgttgcccctatggcagttttgcgtttgcgatgttgcagtggaccggaagccgcatgttccgtcgtgatctgcgttggtacgccactgacgagaagaacatgatgctggacaatcatgcgctgtatgacctgaccaagaaaatcttcctccctgctaaatcggaagaggaaattttcgcacatctggggcttgaatacctggaaccgttcgaacgtaacgca

SEQ ID NO: 2958 - protein, 529 aa, synthetic construct
  REGION 1..529: note = Variant of terminal deoxynucleotidyltransferase
MHHHHHHGGSGSHGIRTIDSDFGKKQQKKGDNHDSSATYEIKFHEFVLFILEEKMGATRRTFLTDLARKKGFRVENELTDEVTHIVAENLSRSEVLAWLKEHKMEKTKQFELLDISWLIESMKVGKPVDTKGKYQLAESGEMSANPDPTEGRENELPPTMKTVSPYACQRRTTLNNHNQRFTDALEILRENYEFKRNDDTALEFRRAISVLKSLPFEVRSLKDTEGLPWIGDEVKGIMEEIIEVGESREVQAVLNDEWYQSFHRFKSVFGVGVKTADKWYRMGLRTLEDVRSSKTLKLTPMQKVGLLYYEDLARGVTRAEADAIWLMVRDAVATFDPDAIVEIVGGFRRGKPQGHDVDLLISSPGAEKEQEDQLLQKVTNLWKKQGLLLYGRLEWTQWEDGGSDSGKADEGDAGAKCFLILKLYDHKVDKSKWEMPTGSNMGEAKPWKAIRVDLLRCPYGSFAFAMLQWTGSRMFRRDLRWYATDEKNMMLDNHALYDLTKKIFLPAKSEEEIFAHLGLEYLEPFERNA

SEQ ID NO: 2959 - DNA, 1587 bp, synthetic construct
  misc_feature 1..1587: note = Variant of terminal deoxynucleotidyltransferase
  source 1..1587: mol_type = other DNA
atgcaccatcatcatcatcatggcggtagcggcagccacggcattcgtaccatcgattcggacttcgggaagaaacagcagaaaaaaggcgataaccacgatagttccgccacttatgaaatcaaatttcacgagtttgtgctgttcattctcgaagaaaaaatgggtgcgacgcgtcgtacttttctgacagatttagcccgcaagaaagggttccgcgtcgagaatgaactgaccgacgaagttacccacatcgtggcagaaaatctgtcacgctctgaagtattggcttggctgaaagaacacaagatggagaagaccaagcaattcgaactgctggatattagctggcttatcgaaagcatgaaagttggtaaaccggtggacaccaaggggaaataccagttggcggaatcgggtgagatgagtgcgaacccagatccgacagagggtcgtgaaaacgagctgcctcctactatgaagaccgtttctccgtatgcgtgtcaacgccgcaccaccctgaacaaccataatcaacgttttacggacgcgctggaaattcttcgtgaaaattacgagttcaaacgcaacgatgatactgcgctggaatttcgtcgtgctatctccgtgctgaaaagccttccgtttgaggtacgtagcctgaaagacacggaaggattgccctggatcggtgatgaagtcaaagggattatggaagaaatcatcgaggtcgggaattcgcgtgaagtgcaggccgtgctcaatgatgagtggtatcaaagcttccaccgctttaagagtgtctttggagtgggggtgaagacagcagacaagtggtaccgtatgggtctgcgcaccctcgaggatgttcgttccagcaagaccctgaagttgaccccgatgcagaaagtaggtctgctgtattatgaagatcttgctcgcggcgttacgcgtgccgaagctgacgcgatttcgctgctggttcgcgatgcagtcgcaactttcgacccggatgcgatcgtggagattgtcggtggatttcgtcgtgggaaacctcagggtcacgacgttgatctgcttatcagttctccgggagctgagaaagagcaagaagaccagctcctgcagaaagtgatgaatctgtggaagaaacaagggttgttgctgtacggtcgtctggaatggacccagtgggaagatgggggttcgccttccggtaaggctgacgagggtgacgcgggtgcgaaatgctttctgatcctcaaactttatgatcataaagtggataaaagcaaatgggaaatgccgacgggttcgaacatgggcgaggccaaaccgtggaaagcaattcgcgtagatctgctgcgttgcccctacggcggttttgcgtttgcgatgttgcagtggaccggaagccgcatgttccgtcgtgatctgcgttggtacgccactgacgagaagaacatgatgctggacaatcatgcgctgtatgacctgaccaagaaaatctttctccctgctaaatcggaagaggaaattttcgcacatctggggcttgaatacctggaaccgttcgaacgtaacgca

SEQ ID NO: 2960 - protein, 529 aa, synthetic construct
  REGION 1..529: note = Variant of terminal deoxynucleotidyltransferase
MHHHHHHGGSGSHGIRTIDSDFGKKQQKKGDNHDSSATYEIKFHEFVLFILEEKMGATRRTFLTDLARKKGFRVENELTDEVTHIVAENLSRSEVLAWLKEHKMEKTKQFELLDISWLIESMKVGKPVDTKGKYQLAESGEMSANPDPTEGRENELPPTMKTVSPYACQRRTTLNNHNQRFTDALEILRENYEFKRNDDTALEFRRAISVLKSLPFEVRSLKDTEGLPWIGDEVKGIMEEIIEVGNSREVQAVLNDEWYQSFHRFKSVFGVGVKTADKWYRMGLRTLEDVRSSKTLKLTPMQKVGLLYYEDLARGVTRAEADAISLLVRDAVATFDPDAIVEIVGGFRRGKPQGHDVDLLISSPGAEKEQEDQLLQKVMNLWKKQGLLLYGRLEWTQWEDGGSPSGKADEGDAGAKCFLILKLYDHKVDKSKWEMPTGSNMGEAKPWKAIRVDLLRCPYGGFAFAMLQWTGSRMFRRDLRWYATDEKNMMLDNHALYDLTKKIFLPAKSEEEIFAHLGLEYLEPFERNA

SEQ ID NO: 2961 - DNA, 1587 bp, synthetic construct
  misc_feature 1..1587: note = Variant of terminal deoxynucleotidyltransferase
  source 1..1587: mol_type = other DNA
atgcaccatcatcatcatcatggcggtagcggcagccacggcattcgtaccatcgattcggacttcgggaagaaacagcagaaaaaaggcgataaccacgatagttccgccacttatgaaatcaaatttcacgagtttgtgctgttcattctcgaagaaaaaatgggtgcgacgcgtcgtacttttctgacagatttagcccgcaagaaagggttccgcgtcgagaatgaactgaccgacgaagttacccacatcgtggcagaaaatctgtcacgctctgaagtattggcttggctgaaagaacacaagatggagaagaccaagcaattcgaactgctggatattagctggcttatcgaaagcatgaaagttggtaaaccggtggacaccaaggggaaataccagttggcggaatcgggtgagatgagtgcgaacccagatccgacagagggtcgtgaaaacgagctgcctcctactatgaagaccgtttctccgtatgcgtgtcaacgccgcaccaccctgaacaaccataatcaacgttttacggacgcgctggaaattcttcgtgaaaattacgagttcaaacgcaacgatgatactgcgctggaatttcgtcgtgctatctccgtgctgaaaagccttccgtttgaggtacgtagcctgaaagacacggaaggattgccctggatcggtgatgaagtcaaagggattatggaagaaatcatcgaggtcggggagtcgcgtgaagtgcaggccgtgctcaatgatgagtggtatcaaagcttccaccgctttaagagtgtctttggagtgggggtgaagacagcagacaagtggtaccgtatgggtctgcgcaccctcgaggatgttcgttccagcaagaccctgaagttgaccccgatgcagaaagtaggtctgctgtattatgaagatcttgctcgcggcgttacgcgtgccgaagctgacgcgatttggctgctggttcaggatgcagtcgcaactttcgacccggatgcgatcgtggagattgtcggtggatttcgtcgtgggaaacctcagggtcacgacgttgatctgcttatcagttctccgggagctgagaaagagcaagaagaccagctcctgcagaaagtgatgaatctgtggaagaaacaagggttgttgctgtacggtcgtctggaatggacccagtgggaagatgggggttcggactccggtaaggctgacgagggtgacgcgggtgcgaaatgctttctgatcctcaaactttatgatcatctggtgcgtaaaagcaaatgggaaatgccgacgggttcgaacatgggcgaggccaaaccgtggaaagcaattcgcgtagatctgctgcgttgcccctatggcagttttgcgtttgcgatgttgcagtggaccggaagccgcatgttccgtcgtgatctgcgttggtacgccactgacgagaagaacatgatgctggacaatcatgcgctgtatgacctgaccaagaaaatcttcctccctgctaaatcggaagaggaaattttcgcacatctggggcttgaatacctggaaccgttcgaacgtaacgca

SEQ ID NO: 2962 - protein, 529 aa, synthetic construct
  REGION 1..529: note = Variant of terminal deoxynucleotidyltransferase
MHHHHHHGGSGSHGIRTIDSDFGKKQQKKGDNHDSSATYEIKFHEFVLFILEEKMGATRRTFLTDLARKKGFRVENELTDEVTHIVAENLSRSEVLAWLKEHKMEKTKQFELLDISWLIESMKVGKPVDTKGKYQLAESGEMSANPDPTEGRENELPPTMKTVSPYACQRRTTLNNHNQRFTDALEILRENYEFKRNDDTALEFRRAISVLKSLPFEVRSLKDTEGLPWIGDEVKGIMEEIIEVGESREVQAVLNDEWYQSFHRFKSVFGVGVKTADKWYRMGLRTLEDVRSSKTLKLTPMQKVGLLYYEDLARGVTRAEADAIWLLVQDAVATFDPDAIVEIVGGFRRGKPQGHDVDLLISSPGAEKEQEDQLLQKVMNLWKKQGLLLYGRLEWTQWEDGGSDSGKADEGDAGAKCFLILKLYDHLVRKSKWEMPTGSNMGEAKPWKAIRVDLLRCPYGSFAFAMLQWTGSRMFRRDLRWYATDEKNMMLDNHALYDLTKKIFLPAKSEEEIFAHLGLEYLEPFERNA

SEQ ID NO: 2963 - DNA, 1587 bp, synthetic construct
  misc_feature 1..1587: note = Variant of terminal deoxynucleotidyltransferase
  source 1..1587: mol_type = other DNA
atgcaccatcatcatcatcatggcggtagcggcagccacggcattcgtaccatcgattcggacttcgggaagaaacagcagaaaaaaggcgataaccacgatagttccgccacttatgaaatcaaatttcacgagtttgtgctgttcattctcgaagaaaaaatgggtgcgacgcgtcgtacttttctgacagatttagcccgcaagaaagggttccgcgtcgagaatgaactgaccgacgaagttacccacatcgtggcagaaaatctgtcacgctctgaagtattggcttggctgaaagaacacaagatggagaagaccaagcaattcgaactgctggatattagctggcttatcgaaagcatgaaagttggtaaaccggtggacaccaaggggaaataccagttggcggaatcgggtgagatgagtgcgaacccagatccgacagagggtcgtgaaaacgagctgcctcctactatgaagaccgtttctccgtatgcgtgtcaacgccgcaccaccctgaacaaccataatcaacgttttacggactcgctggaaattcttcgtgaaaattacgagttcaaacgcaacgatgatactgcgctggaatttcgtcgtgctatctccgtgctgaaaagccttccgtttgaggtacgtagcctgaaagacacggaaggattgccctggatcggtgatgaagtcaaagggattatggaagaaatcatcgaggtcggggagtcgcgtgaagtgcaggccgtgctcaatgatgagtggtatcaaagcttccaccgctttaagagtgtctttggagtgggggtgaagacagcagacaagtggtaccgtatgggtctgcgcaccctcgaggatgttcgttccagcaagaccctgaagttgaccccgatgcagaaagtaggtctgctgtattatgaagatcttgctcgcggcgttacgcgtgccgaagctgacgcgatttcgctgctggttcaggatgcagtcgcaactttcgacccggatgcgatcgtggagattgtcggtggatttcgtcgtgggaaacctcagggtcacgacgttgatctgcttatcagttctccgggagctgagaaagagcaagaagaccagctcctgcagaaagtgatgaatctgtggaagaaacaagggttgttgctgtacggtcgtctggaatggacccagtgggaagatgggggttcggactccggtaaggctgacgagggtgacgcgggtgcgaaatgctttctgatcctcaaactttatgatcataaagtggacaaaagcaaatgggaaatgccgacgggttcgaacatgggcgaggccaaaccgtggaaagcaattcgcgtagatctgctgcgttgcccctacggcggttttgcgtttgcgatgttgcagtggaccggaagccgcatgttccgtcgtgatctgcgttggtacgccactgacgagaagaacatgatgctggacaatcatgcgctgtatgacctgaccaagaaaatcttcctccctgctaaatcggaagaggaaattttcgcacatctggggcttgaatacctggaaccgttcgaacgtaacgca

SEQ ID NO: 2964 - protein, 529 aa, synthetic construct
  REGION 1..529: note = Variant of terminal deoxynucleotidyltransferase
MHHHHHHGGSGSHGIRTIDSDFGKKQQKKGDNHDSSATYEIKFHEFVLFILEEKMGATRRTFLTDLARKKGFRVENELTDEVTHIVAENLSRSEVLAWLKEHKMEKTKQFELLDISWLIESMKVGKPVDTKGKYQLAESGEMSANPDPTEGRENELPPTMKTVSPYACQRRTTLNNHNQRFTDSLEILRENYEFKRNDDTALEFRRAISVLKSLPFEVRSLKDTEGLPWIGDEVKGIMEEIIEVGESREVQAVLNDEWYQSFHRFKSVFGVGVKTADKWYRMGLRTLEDVRSSKTLKLTPMQKVGLLYYEDLARGVTRAEADAISLLVQDAVATFDPDAIVEIVGGFRRGKPQGHDVDLLISSPGAEKEQEDQLLQKVMNLWKKQGLLLYGRLEWTQWEDGGSDSGKADEGDAGAKCFLILKLYDHKVDKSKWEMPTGSNMGEAKPWKAIRVDLLRCPYGGFAFAMLQWTGSRMFRRDLRWYATDEKNMMLDNHALYDLTKKIFLPAKSEEEIFAHLGLEYLEPFERNA

SEQ ID NO: 2965 - DNA, 1587 bp, synthetic construct
  misc_feature 1..1587: note = Variant of terminal deoxynucleotidyltransferase
  source 1..1587: mol_type = other DNA
atgcaccatcatcatcatcatggcggtagcggcagccacggcattcgtaccatcgattcggacttcgggaagaaacagcagaaaaaaatggataaccacgatagttccgccacttatgaaatcaaatttcacgagtttgtgctgttcattctcgaagaaaaaatgggtgcgacgcgtcgtacttttctgacagatttagcccgcaagaaagggttccgcgtcgagaatgaactgaccgacgaagttacccacatcgtggcagaaaatctgtcacgctctgaagtattggcttggctgaaagaacacaagatggagaagaccaagcaattcgaactgctggatattagctggcttatcgaaagcatgaaagttggtaaaccggtggacaccaaggggaaataccagttggcggaatcgggtgagatgagtgcgaacccagatccgacagagggtcgtgaaaacgagctgcctcctactatgaagaccgtttctccgtatgcgtgtcaacgccgcaccaccctgaacaaccataatcaacgttttacggacgcactggaaattcttcgtgaaaattacgagttcaaacgcaacgatgatactgcgctggaatttcgtcgtgctatctccgtgctgaaaagccttccgtttgaggtacgtagcctgaaagacacggaaggattgccctggatcggtgatgaagtcaaagggattatggaagaaatcatcgaggtcgggaattcgcgtgaagtgcaggccgtgctcaatgatgagtggtatcaaagcttccaccgctttaagagtgtctttggagtgggggtgaagacagcagacaagtggtaccgtatgggtctgcgcaccctcgaggatgttcgttccagcaagaccctgaagttgaccccgatgcagaaagtaggtctgctgtattatgaagatcttgctcgcggcgttacgcgtgccgaagctgacgcgatttctctgctggttcaggatgcagtcgcaactttcgacccggatgcgatcgtggagattgtcggtggatttcgtcgtgggaaacctcagggtcacgacgttgatctgcttatcagttctccgggagctgagaaagagcaagaagacgggctcctgcagaaagtgatgaatctgtggaagaaacaagggttgttgctgtacggtcgtctggaatggacccagtgggaagatgggggttcgccatccggtaaggctgacgagggtgacgcgggtgcgaaatgctttctgatcctcaaactttatgatcataaagtggacaaaagcaaatgggaaatgccgacgggttcgaacatgggcgaggccaaaccgtggaaagcaattcgcgtagatctgctgcgttgcccctacggcggttttgcgtttgcgatgttgcagtggaccggaagccgcatgttccgtcgtgatctgcgttggtacgccactgacgagaagaacatgatgctggacaatcatgcgctgtatgacctgaccaagaaaatcttcctccctgctaaatcggaagaggaaattttcgcacatctggggcttgaatacctggaaccgttcgaacgtaacgca

SEQ ID NO: 2966 - protein, 529 aa, synthetic construct
  REGION 1..529: note = Variant of terminal deoxynucleotidyltransferase
MHHHHHHGGSGSHGIRTIDSDFGKKQQKKMDNHDSSATYEIKFHEFVLFILEEKMGATRRTFLTDLARKKGFRVENELTDEVTHIVAENLSRSEVLAWLKEHKMEKTKQFELLDISWLIESMKVGKPVDTKGKYQLAESGEMSANPDPTEGRENELPPTMKTVSPYACQRRTTLNNHNQRFTDALEILRENYEFKRNDDTALEFRRAISVLKSLPFEVRSLKDTEGLPWIGDEVKGIMEEIIEVGNSREVQAVLNDEWYQSFHRFKSVFGVGVKTADKWYRMGLRTLEDVRSSKTLKLTPMQKVGLLYYEDLARGVTRAEADAISLLVQDAVATFDPDAIVEIVGGFRRGKPQGHDVDLLISSPGAEKEQEDGLLQKVMNLWKKQGLLLYGRLEWTQWEDGGSPSGKADEGDAGAKCFLILKLYDHKVDKSKWEMPTGSNMGEAKPWKAIRVDLLRCPYGGFAFAMLQWTGSRMFRRDLRWYATDEKNMMLDNHALYDLTKKIFLPAKSEEEIFAHLGLEYLEPFERNA

SEQ ID NO: 2967 - DNA, 1587 bp, synthetic construct
  misc_feature 1..1587: note = Variant of terminal deoxynucleotidyltransferase
  source 1..1587: mol_type = other DNA
atgcaccatcatcatcatcatggcggtagcggcagccacggcattcgtaccatcgattcggacttcgggaagaaacagcagaaaaaaggcgataaccacgatagttccgccacttatgaaatcaaatttcacgagtttgtgctgttcattctcgaagaaaaaatgggtgcgacgcgtcgtacttttctgacagatttagcccgcaagaaagggttccgcgtcgagaatgaactgaccgacgaagttacccacatcgtggcagaaaatctgtcacgctctgaagtattggcttggctgaaagaacacaagatggagaagaccaagcaattcgaactgctggatattagctggcttatcgaaagcatgaaagttggtaaaccggtggacaccaaggggaaataccagttggcggaatcgggtgagatgagtgcgaacccagatccgacagagggtcgtgaaaacgagctgcctcctactatgaagaccgtttctccgtatgcgtgtcaacgccgcaccaccctgaacaaccataatcaacgttttacggacgcactggaaattcttcgtgaaaattacgagttcaaacgcaacgatgatactgcgctggaatttcgtcgtgctatctccgtgctgaaaagccttccgtttgaggtacgtagcctgaaagacacggaaggattgccctggatcggtgatgaagtcaaagggattatggaagaaatcatcgaggtcgggaattcgcgtgaagtgcaggccgtgctcaatgatgagtggtatcaaagcttccaccgctttaagagtgtctttggagtgggggtgaagacagcagacaagtggtaccgtatgggtctgcgcaccctcgaggatgttcgttccagcaagaccctgaagttgaccccgatgcagaaagtaggtctgctgtattatgaagatcttgctcgcggcgttacgcgtgccgaagctgacgcgatttctctgctggttcaggatgcagtcgcaactttcgacccggatgcgatcgtggagattgtcggtggatttcgtcgtgggaaacctcagggtcacgacgttgatctgcttatcagttctccgggagctgagaaagagcaagaagacgggctcctgcagaaagtgaccaatctgtggaagaaacaagggttgttgctgtacggtcgtctggaatggacccagtgggaagatgggggttcgccatccggtaaggctgacgagggtgacgcgggtgcgaaatgctttctgatcctcaaactttatgatcataaagtggacaaaagcaaatgggaaatgccgacgggttcgaacatgggcgaggccaaaccgtggaaagcaattcgcgtagatctgctgcgttgcccctacggcggttttgcgtttgcgatgttgcagtggaccggaagccgcatgttccgtcgtgatctgcgttggtacgccactgacgagaagaacatgatgctggacaatcatgcgctgtatgacctgaccaagaaaatcttcctccctgctaaatcggaagaggaaattttcgcacatctggggcttgaatacctggaaccgttcgaacgtaacgca

SEQ ID NO: 2968 - protein, 529 aa, synthetic construct
  REGION 1..529: note = Variant of terminal deoxynucleotidyltransferase
MHHHHHHGGSGSHGIRTIDSDFGKKQQKKGDNHDSSATYEIKFHEFVLFILEEKMGATRRTFLTDLARKKGFRVENELTDEVTHIVAENLSRSEVLAWLKEHKMEKTKQFELLDISWLIESMKVGKPVDTKGKYQLAESGEMSANPDPTEGRENELPPTMKTVSPYACQRRTTLNNHNQRFTDALEILRENYEFKRNDDTALEFRRAISVLKSLPFEVRSLKDTEGLPWIGDEVKGIMEEIIEVGNSREVQAVLNDEWYQSFHRFKSVFGVGVKTADKWYRMGLRTLEDVRSSKTLKLTPMQKVGLLYYEDLARGVTRAEADAISLLVQDAVATFDPDAIVEIVGGFRRGKPQGHDVDLLISSPGAEKEQEDGLLQKVTNLWKKQGLLLYGRLEWTQWEDGGSPSGKADEGDAGAKCFLILKLYDHKVDKSKWEMPTGSNMGEAKPWKAIRVDLLRCPYGGFAFAMLQWTGSRMFRRDLRWYATDEKNMMLDNHALYDLTKKIFLPAKSEEEIFAHLGLEYLEPFERNA

SEQ ID NO: 2969 - DNA, 1587 bp, synthetic construct
  misc_feature 1..1587: note = Variant of terminal deoxynucleotidyltransferase
  source 1..1587: mol_type = other DNA
atgcaccatcatcatcatcatggcggtagcggcagccacggcattcgtaccatcgattcggacttcgggaagaaacagcagaaaaaaatggataaccacgatagttccgccacttatgaaatcaaatttcacgagtttgtgctgttcattctcgaagaaaaaatgggtgcgacgcgtcgtacttttctgacagatttagcccgcaagaaagggttccgcgtcgagaatgaactgaccgacgaagttacccacatcgtggcagaaaatctgtcacgctctgaagtattggcttggctgaaagaacacaagatggagaagaccaagcaattcgaactgctggatattagctggcttatcgaaagcatgaaagttggtaaaccggtggacaccaaggggaaataccagttggcggaatcgggtgagatgagtgcgaacccagatccgacagagggtcgtgaaaacgagctgcctcctactatgaagaccgtttctccgtatgcgtgtcaacgccgcaccaccctgaacaaccataatcaacgttttacggacgcactggaaattcttcgtgaaaattacgagttcaaacgcaacgatgatactgcgctggaatttcgtcgtgctatctccgtgctgaaaagccttccgtttgaggtacgtagcctgaaagacacggaaggattgccctggatcggtgatgaagtcaaagggattatggaagaaatcatcgaggtcggggagtcgcgtgaagtgcaggccgtgctcaatgatgagtggtatcaaagcttccaccgctttaagagtgtctttggagtgggggtgaagacagcagacaagtggtaccgtatgggtctgcgcaccctcgaggatgttcgttccagcaagaccctgaagttgaccccgatgcagaaagtaggtctgctgtattatgaagatcttgctcgcggcgttacgcgtgccgaagctgacgcgatttcgctgatggttcaggatgcagtcgcaactttcgacccggatgcgatcgtggagattgtcggtggatttcgtcgtgggaaacctcagggtcacgacgttgatctgcttatcagttctccgggagctgagaaagagcaagaagaccagctcctgcagaaagtgaccaatctgtggaagaaacaagggttgttgctgtacggtcgtctggaatggacccagtgggaagatgggggttcggactccggtaaggctgacgagggtgacgcgggtgcgaaatgctttctgatcctcaaactttatgatcataaagtggacaaaagcaaatgggaaatgccgacgggttcgaacatgggcgaggccaaaccgtggaaagcaattcgcgtagatctgctgcgttgcccctatggcagttttgcgtttgcgatgttgcagtggaccggaagccgcatgttccgtcgtgatctgcgttggtacgccactgacgagaagaacatgatgctggacaatcattcgctgtatgacctgaccaagaaaatcttcctccctgctaaatcggaagaggaaattttcgcacatctggggcttgaatacctggaaccgttcgaacgtaacgca

SEQ ID NO: 2970 - protein, 529 aa, synthetic construct
  REGION 1..529: note = Variant of terminal deoxynucleotidyltransferase
MHHHHHHGGSGSHGIRTIDSDFGKKQQKKMDNHDSSATYEIKFHEFVLFILEEKMGATRRTFLTDLARKKGFRVENELTDEVTHIVAENLSRSEVLAWLKEHKMEKTKQFELLDISWLIESMKVGKPVDTKGKYQLAESGEMSANPDPTEGRENELPPTMKTVSPYACQRRTTLNNHNQRFTDALEILRENYEFKRNDDTALEFRRAISVLKSLPFEVRSLKDTEGLPWIGDEVKGIMEEIIEVGESREVQAVLNDEWYQSFHRFKSVFGVGVKTADKWYRMGLRTLEDVRSSKTLKLTPMQKVGLLYYEDLARGVTRAEADAISLMVQDAVATFDPDAIVEIVGGFRRGKPQGHDVDLLISSPGAEKEQEDQLLQKVTNLWKKQGLLLYGRLEWTQWEDGGSDSGKADEGDAGAKCFLILKLYDHKVDKSKWEMPTGSNMGEAKPWKAIRVDLLRCPYGSFAFAMLQWTGSRMFRRDLRWYATDEKNMMLDNHSLYDLTKKIFLPAKSEEEIFAHLGLEYLEPFERNA

SEQ ID NO: 2971 - DNA, 1587 bp, synthetic construct
  misc_feature 1..1587: note = Variant of terminal deoxynucleotidyltransferase
  source 1..1587: mol_type = other DNA
atgcaccatcatcatcatcatggcggtagcggcagccacggcattcgtaccatcgattcggacttcgggaagaaacagcagaaaaaaggcgataaccacgatagttccgccacttatgaaatcaaatttcacgagtttgtgctgttcattctcgaagaaaaaatgggtgcgacgcgtcgtacttttctgacagatttagcccgcaagaaagggttccgcgtcgagaatgaactgaccgacgaagttacccacatcgtggcagaaaatctgtcacgctctgaagtattggcttggctgaaagaacacaagatggagaagaccaagcaattcgaactgctggatattagctggcttatcgaaagcatgaaagttggtaaaccggtggacaccaaggggaaataccagttggcggaatcgggtgagatgagtgcgaacccagatccgacagagggtcgtgaaaacgagctgcctcctactatgaagaccgtttctccgtatgcgtgtcaacgccgcaccaccctgaacaaccataatcaacgttttacggacgcgctggaaattcttcgtgaaaattacgagttcaaacgcaacgatgatactgcgctggaatttcgtcgtgctatctccgtgctgaaaagccttccgtttgaggtacgtagcctgaaagacacggaaggattgccctggatcggtgatgaagtcaaagggattatggaagaaatcatcgaggtcgggaattcgcgtgaagtgcaggccgtgctcaatgatgagtggtatcaaagcttccaccgctttaagagtgtctttggagtgggggtgaagacagcagacaagtggtaccgtatgggtctgcgcaccctcgaggatgttcgttccagcaagaccctgaagttgaccccgatgcagaaagtaggtctgctgtattatgaagatcttgctcgcggcgttacgcgtgccgaagctgacgcgatttcgctgctggttcaggatgcagtcgcaactttcgacccggatgcgatcgtggagattgtcggtggatttcgtcgtgggaaacctcagggtcacgacgttgatctgcttatcagttctccgggagctgagaaagagcaagaagaccagctcctgcagaaagtgatgaatctgtggaagaaacaagggttgttgctgtacggtcgtctggaatggacccagtgggaagatgggggttcgccttccggtaaggctgacgagggtgacgcgggtgcgaaatgctttctgatcctcaaactttatgatcataaagtgcgtaaaagcaaatgggaaatgccgacgggttcgaacatgggcgaggccaaaccgtggaaagcaattcgcgtagatctgctgcgttgccccatcggcagttttgcgtttgcgatgttgcagtggaccggaagccgcatgttccgtcgtgatctgcgttggtacgccactgacgagaagaacatgatgctggacaatcatgcgctgtatgacctgaccaagaaaatcttcctccctgctaaatcggaagaggaaattttcgcacatctggggcttgaatacctggaaccgttcgaacgtaacgca

SEQ ID NO: 2972 - protein, 529 aa, synthetic construct
  REGION 1..529: note = Variant of terminal deoxynucleotidyltransferase
MHHHHHHGGSGSHGIRTIDSDFGKKQQKKGDNHDSSATYEIKFHEFVLFILEEKMGATRRTFLTDLARKKGFRVENELTDEVTHIVAENLSRSEVLAWLKEHKMEKTKQFELLDISWLIESMKVGKPVDTKGKYQLAESGEMSANPDPTEGRENELPPTMKTVSPYACQRRTTLNNHNQRFTDALEILRENYEFKRNDDTALEFRRAISVLKSLPFEVRSLKDTEGLPWIGDEVKGIMEEIIEVGNSREVQAVLNDEWYQSFHRFKSVFGVGVKTADKWYRMGLRTLEDVRSSKTLKLTPMQKVGLLYYEDLARGVTRAEADAISLLVQDAVATFDPDAIVEIVGGFRRGKPQGHDVDLLISSPGAEKEQEDQLLQKVMNLWKKQGLLLYGRLEWTQWEDGGSPSGKADEGDAGAKCFLILKLYDHKVRKSKWEMPTGSNMGEAKPWKAIRVDLLRCPIGSFAFAMLQWTGSRMFRRDLRWYATDEKNMMLDNHALYDLTKKIFLPAKSEEEIFAHLGLEYLEPFERNA

SEQ ID NO: 2973 - DNA, 1587 bp, synthetic construct
  misc_feature 1..1587: note = Variant of terminal deoxynucleotidyltransferase
  source 1..1587: mol_type = other DNA
atgcaccatcatcatcatcatggcggtagcggcagccacggcattcgtaccatcgattcggacttcgggaagaaacagcagaaaaaaggcgataaccacgatagttccgccacttatgaaatcaaatttcacgagtttgtgctgttcattctcgaagaaaaaatgggtgcgacgcgtcgtacttttctgacagatttagcccgcaagaaagggttccgcgtcgagaatgaactgaccgacgaagttacccacatcgtggcagaaaatctgtcacgctctgaagtattggcttggctgaaagaacacaagatggagaagaccaagcaattcgaactgctggatattagctggcttatcgaaagcatgaaagttggtaaaccggtggacaccaaggggaaataccagttggcggaatcgggtgagatgagtgcgaacccagatccgacagagggtcgtgaaaacgagctgcctcctactatgaagaccgtttctccgtatgcgtgtcaacgccgcaccaccctgaacaaccataatcaacgttttacggacgcactggaaattcttcgtgaaaattacgagttcaaacgcaacgatgatactgcgctggaatttcgtcgtgctatctccgtgctgaaaagccttccgtttgaggtacgtagcctgaaagacacggaaggattgccctggatcggtgatgaagtcaaagggattatggaagaaatcatcgaggtcggggagtcgcgtgaagtgcaggccgtgctcaatgatgagtggtatcaaagcttccaccgctttaagagtgtctttggagtgggggtgaagacagcagacaagtggtaccgtatgggtctgcgcaccctcgaggatgttcgttccagcaagaccctgaagttgaccccgatgcagaaagtaggtctgctgtattatgaagatcttgctcgcggcgttacgcgtgccgaagctgacgcgatttctctgctggttcaggatgcagtcgcaactttcgacccggatgcgatcgtggagattgtcggtggatttcgtcgtgggaaacctcagggtcacgacgttgatctgcttatcagttctccgggagctgagaaagagcaagaagaccagctcctgcagaaagtgaccaatctgtggaagaaacaagggttgttgctgtacggtcgtctggaatggacccagtgggaagatgggggttcgccatccggtaaggctgacgagggtgacgcgggtgcgaaatgctttctgatcctcaaactttatgatcatctggtggataaaagcaaatgggaaatgccgacgggttcgaacatgggcgaggccaaaccgtggaaagcaattcgcgtagatctgctgcgttgccccatcggcagttttgcgtttgcgatgttgcagtggaccggaagccgcatgttccgtcgtgatctgcgttggtacgccactgacgagaagaacatgatgctggacaatcatgcgctgtatgacctgaccaagaaaatcttcctccctgctaaatcggaagaggaaattttcgcacatctggggcttgaatacctggaaccgttcgaacgtaacgca

SEQ ID NO: 2974 - protein, 529 aa, synthetic construct
  REGION 1..529: note = Variant of terminal deoxynucleotidyltransferase
MHHHHHHGGSGSHGIRTIDSDFGKKQQKKGDNHDSSATYEIKFHEFVLFILEEKMGATRRTFLTDLARKKGFRVENELTDEVTHIVAENLSRSEVLAWLKEHKMEKTKQFELLDISWLIESMKVGKPVDTKGKYQLAESGEMSANPDPTEGRENELPPTMKTVSPYACQRRTTLNNHNQRFTDALEILRENYEFKRNDDTALEFRRAISVLKSLPFEVRSLKDTEGLPWIGDEVKGIMEEIIEVGESREVQAVLNDEWYQSFHRFKSVFGVGVKTADKWYRMGLRTLEDVRSSKTLKLTPMQKVGLLYYEDLARGVTRAEADAISLLVQDAVATFDPDAIVEIVGGFRRGKPQGHDVDLLISSPGAEKEQEDQLLQKVTNLWKKQGLLLYGRLEWTQWEDGGSPSGKADEGDAGAKCFLILKLYDHLVDKSKWEMPTGSNMGEAKPWKAIRVDLLRCPIGSFAFAMLQWTGSRMFRRDLRWYATDEKNMMLDNHALYDLTKKIFLPAKSEEEIFAHLGLEYLEPFERNA

SEQ ID NO: 2975 - DNA, 1587 bp, synthetic construct
  misc_feature 1..1587: note = Variant of terminal deoxynucleotidyltransferase
  source 1..1587: mol_type = other DNA
atgcaccatcatcatcatcatggcggtagcggcagccacggcattcgtaccatcgattcggacttcgggaagaaacagcagaaaaaaggcgataaccacgatagttccgccacttatgaaatcaaatttcacgagtttgtgctgttcattctcgaagaaaaaatgggtgcgacgcgtcgtacttttctgacagatttagcccgcaagaaagggttccgcgtcgagaatgaactgaccgacgaagttacccacatcgtggcagaaaatctgtcacgctctgaagtattggcttggctgaaagaacacaagatggagaagaccaagcaattcgaactgctggatattagctggcttatcgaaagcatgaaagttggtaaaccggtggacaccaaggggaaataccagttggcggaatcgggtgagatgagtgcgaacccagatccgacagagggtcgtgaaaacgagctgcctcctactatgaagaccgtttctccgtatgcgtgtcaacgccgcaccaccctgaacaaccataatcaacgttttacggacgcactggaaattcttcgtgaaaattacgagttcaaacgcaacgatgatactgcgctggaatttcgtcgtgctatctccgtgctgaaaagccttccgtttgaggtacgtagcctgaaagacacggaaggattgccctggatcggtgatgaagtcaaagggattatggaagaaatcatcgaggtcgggaattcgcgtgaagtgcaggccgtgctcaatgatgagtggtatcaaagcttccaccgctttaagagtgtctttggagtgggggtgaagacagcagacaagtggtaccgtatgggtctgcgcaccctcgaggatgttcgttccagcaagaccctgaagttgaccccgatgcagaaagtaggtctgctgtattatgaagatcttgctcgcggcgttacgcgtgccgaagctgacgcgatttctctgctggttcaggatgcagtcgcaactttcgacccggatgcgatcgtggagattgtcggtggatttcgtcgtgggaaacctcagggtcacgacgttgatctgcttatcagttctccgggagctgagaaagagcaagaagaccagctcctgcagaaagtgatgaatctgtggaagaaacaagggttgttgctgtacggtcgtctggaatggacccagtgggaagatgggggttcgccttccggtaaggctgacgagggtgacgcgggtgcgaaatgctttctgatcctcaaactttatgatcataaagtggataaaagcaaatgggaaatgccgacgggttcgaacatgggcgaggccaaaccgtggaaagcaattcgcgtagatctgctgcgttgccccatcggcagttttgcgtttgcgatgttgcagtggaccggaagccgcatgttccgtcgtgatctgcgttggtacgccactgacgagaagaacatgatgctggacaatcatgcgctgtatgacctgactaagaaaatccagctccctgctaaatcggaagaggaaattttcgcacatctggggcttgaatacctggaaccgttcgaacgtaacgca

SEQ ID NO: 2976 - protein, 529 aa, synthetic construct
  REGION 1..529: note = Variant of terminal deoxynucleotidyltransferase
MHHHHHHGGSGSHGIRTIDSDFGKKQQKKGDNHDSSATYEIKFHEFVLFILEEKMGATRRTFLTDLARKKGFRVENELTDEVTHIVAENLSRSEVLAWLKEHKMEKTKQFELLDISWLIESMKVGKPVDTKGKYQLAESGEMSANPDPTEGRENELPPTMKTVSPYACQRRTTLNNHNQRFTDALEILRENYEFKRNDDTALEFRRAISVLKSLPFEVRSLKDTEGLPWIGDEVKGIMEEIIEVGNSREVQAVLNDEWYQSFHRFKSVFGVGVKTADKWYRMGLRTLEDVRSSKTLKLTPMQKVGLLYYEDLARGVTRAEADAISLLVQDAVATFDPDAIVEIVGGFRRGKPQGHDVDLLISSPGAEKEQEDQLLQKVMNLWKKQGLLLYGRLEWTQWEDGGSPSGKADEGDAGAKCFLILKLYDHKVDKSKWEMPTGSNMGEAKPWKAIRVDLLRCPIGSFAFAMLQWTGSRMFRRDLRWYATDEKNMMLDNHALYDLTKKIQLPAKSEEEIFAHLGLEYLEPFERNA

SEQ ID NO: 2977 - DNA, 1587 bp, synthetic construct
  misc_feature 1..1587: note = Variant of terminal deoxynucleotidyltransferase
  source 1..1587: mol_type = other DNA
atgcaccatcatcatcatcatggcggtagcggcagccacggcattcgtaccatcgattcggacttcgggaagaaacagcagaaaaaaggcgataaccacgatagttccgccacttatgaaatcaaatttcacgagtttgtgctgttcattctcgaagaaaaaatgggtgcgacgcgtcgtacttttctgacagatttagcccgcaagaaagggttccgcgtcgagaatgaactgaccgacgaagttacccacatcgtggcagaaaatctgtcacgctctgaagtattggcttggctgaaagaacacaagatggagaagaccaagcaattcgaactgctggatattagctggcttatcgaaagcatgaaagttggtaaaccggtggacaccaaggggaaataccagttggcggaatcgggtgagatgagtgcgaacccagatccgacagagggtcgtgaaaacgagctgcctcctactatgaagaccgtttctccgtatgcgtgtcaacgccgcaccaccctgaacaaccataatcaacgttttacggacgcactggaaattcttcgtgaaaattacgagttcaaacgcaacgatgataatgcgctggaatttcgtcgtgctatctccgtgctgaaaagccttccgtttgaggtacgtagcctgaaagacacggaaggattgccctggatcggtgatgaagtcaaagggattatggaagaaatcatcgaggtcgggaattcgcgtgaagtgcaggccgtgctcaatgatgagtggtatcaaagcttccaccgctttaagagtgtctttggagtgggggtgaagacagcagacaagtggtaccgtatgggtctgcgcaccctcgaggatgttcgttccagcaagaccctgaagttgaccccgatgcagaaagtaggtctgctgtattatgaagatcttgctcgcggcgttacgcgtgccgaagctgacgcgatttctctgctggttcaggatgcagtcgcaactttcgacccggatgcgatcgtggagattgtcggtggatttcgtcgtgggaaacctcagggtcacgacgttgatctgcttatcagttctccgggagctgagaaagagcaagaagacgggctcctgcagaaagtgatgaatctgtggaagaaacaagggttgttgctgtacggtcgtctggaatggacccagtgggaagatgggggttcgccatccggtaaggctgacgagggtgacgcgggtgcgaaatgctttctgatcctcaaactttatgatcataaagtggacaaaagcaaatgggaaatgccgacgggttcgaacatgggcgaggccaaaccgtggaaagcaattcgcgtagatctgctgcgttgcccctacggcggttttgcgtttgcgatgttgcagtggaccggaagccgcatgttccgtcgtgatctgcgttggtacgccactgacgagaagaacatgatgctggacaatcatgcgctgtatgacctgaccaagaaaatcttcctccctgctaaatcggaagaggaaattttcgcacatctggggcttgaatacctggaaccgttcgaacgtaacgca

SEQ ID NO: 2978 - protein, 529 aa, synthetic construct
  REGION 1..529: note = Variant of terminal deoxynucleotidyltransferase
MHHHHHHGGSGSHGIRTIDSDFGKKQQKKGDNHDSSATYEIKFHEFVLFILEEKMGATRRTFLTDLARKKGFRVENELTDEVTHIVAENLSRSEVLAWLKEHKMEKTKQFELLDISWLIESMKVGKPVDTKGKYQLAESGEMSANPDPTEGRENELPPTMKTVSPYACQRRTTLNNHNQRFTDALEILRENYEFKRNDDNALEFRRAISVLKSLPFEVRSLKDTEGLPWIGDEVKGIMEEIIEVGNSREVQAVLNDEWYQSFHRFKSVFGVGVKTADKWYRMGLRTLEDVRSSKTLKLTPMQKVGLLYYEDLARGVTRAEADAISLLVQDAVATFDPDAIVEIVGGFRRGKPQGHDVDLLISSPGAEKEQEDGLLQKVMNLWKKQGLLLYGRLEWTQWEDGGSPSGKADEGDAGAKCFLILKLYDHKVDKSKWEMPTGSNMGEAKPWKAIRVDLLRCPYGGFAFAMLQWTGSRMFRRDLRWYATDEKNMMLDNHALYDLTKKIFLPAKSEEEIFAHLGLEYLEPFERNA

SEQ ID NO: 2979 - DNA, 1587 bp, synthetic construct
  misc_feature 1..1587: note = Variant of terminal deoxynucleotidyltransferase
  source 1..1587: mol_type = other DNA
atgcaccatcatcatcatcatggcggtagcggcagccacggcattcgtaccatcgattcggacttcgggaagaaacagcagaaaaaaatggataaccacgatagttccgccacttatgaaatcaaatttcacgagtttgtgctgttcattctcgaagaaaaaatgggtgcgacgcgtcgtacttttctgacagatttagcccgcaagaaagggttccgcgtcgagaatgaactgaccgacgaagttacccacatcgtggcagaaaatctgtcacgctctgaagtattggcttggctgaaagaacacaagatggagaagaccaagcaattcgaactgctggatattagctggcttatcgaaagcatgaaagttggtaaaccggtggacaccaaggggaaataccagttggcggaatcgggtgagatgagtgcgaacccagatccgacagagggtcgtgaaaacgagctgcctcctactatgaagaccgtttctccgtatgcgtgtcaacgccgcaccaccctgaacaaccataatcagcgttttacggacgcactggaaattcttcgtgaaaattacgagttcaaacgcaacgatgatactgcgctggaatttcgtcgtgctatctccgtgctgaaaagccttccgtttgaggtacgtagcctgaaagacacggaaggattgccctggatcggtgatgaagtcaaagggattatggaagaaatcatcgaggtcgggaattcgcgtgaagtgcaggccgtgctcaatgatgagtggtatcaaagcttccaccgctttaagagtgtctttggagtgggggtgaagacagcagacaagtggtaccgtatgggtctgcgcaccctcgaggatgttcgttccagcaagaccctgaagttgaccccgatgcagaaagtaggtctgctgtattatgaagatcttgctcgcggcgttacgcgtgccgaagctgacgcgatttctctgctggttcaggatgcagtcgcaactttcgacccggatgcgatcgtggagattgtcggtggatttcgtcgtgggaaacctcagggtcacgacgttgatctgcttatcagttctccgggagctgagaaagagcaagaagaccaactcctgcagaaagtgatgaatctgtggaagaaacaagggttgttgctgtacggtcgtctggaatggacccagtgggaagatgggggcctgccatccaacaaggctgacgagggtgacgcgggtgcgaaatgctttctgatcctcaaactttatgatcataaagtggacaaaagcaaatgggaaatgccgacgggttcgaacatgggcgaggccaaaccgtggaaagcaattcgcgtagatctgctgcgttgcccctacggcggttttgcgtttgcgatgttgtcgtggaccggaagccgcatgttccgtcgtgatctgcgttggtacgccactgacgagaagaacatgatgctggacaatcatgcgctgtatgacctgaccaagaaaatcttcctccctgctaaatcggaagaggaaattttcgcacatctggggcttgaatacctggaaccgttcgaacgtaacgca

SEQ ID NO: 2980 - protein, 529 aa, synthetic construct
  REGION 1..529: note = Variant of terminal deoxynucleotidyltransferase
MHHHHHHGGSGSHGIRTIDSDFGKKQQKKMDNHDSSATYEIKFHEFVLFILEEKMGATRRTFLTDLARKKGFRVENELTDEVTHIVAENLSRSEVLAWLKEHKMEKTKQFELLDISWLIESMKVGKPVDTKGKYQLAESGEMSANPDPTEGRENELPPTMKTVSPYACQRRTTLNNHNQRFTDALEILRENYEFKRNDDTALEFRRAISVLKSLPFEVRSLKDTEGLPWIGDEVKGIMEEIIEVGNSREVQAVLNDEWYQSFHRFKSVFGVGVKTADKWYRMGLRTLEDVRSSKTLKLTPMQKVGLLYYEDLARGVTRAEADAISLLVQDAVATFDPDAIVEIVGGFRRGKPQGHDVDLLISSPGAEKEQEDQLLQKVMNLWKKQGLLLYGRLEWTQWEDGGLPSNKADEGDAGAKCFLILKLYDHKVDKSKWEMPTGSNMGEAKPWKAIRVDLLRCPYGGFAFAMLSWTGSRMFRRDLRWYATDEKNMMLDNHALYDLTKKIFLPAKSEEEIFAHLGLEYLEPFERNA

SEQ ID NO: 2981 - DNA, 1587 bp, synthetic construct
  misc_feature 1..1587: note = Variant of terminal deoxynucleotidyltransferase
  source 1..1587: mol_type = other DNA
atgcaccatcatcatcatcatggcggtagcggcagccacggcattcgtaccatcgattcggacttcgggaagaaacagcagaaaaaaatggataaccacgatagttccgccacttatgaaatcaaatttcacgagtttgtgctgttcattctcgaagaaaaaatgggtgcgacgcgtcgtacttttctgacagatttagcccgcaagaaagggttccgcgtcgagaatgaactgaccgacgaagttacccacatcgtggcagaaaatctgtcacgctctgaagtattggcttggctgaaagaacacaagatggagaagaccaagcaattcgaactgctggatattagctggcttatcgaaagcatgaaagttggtaaaccggtggacaccaaggggaaataccagttggcggaatcgggtgagatgagtgcgaacccagatccgacagagggtcgtgaaaacgagctgcctcctactatgaagaccgtttctccgtatgcgtgtcaacgccgcaccaccctgaacaaccataatcaacgttttacggacgcactggaaattcttcgtgaaaattacgagttcaaacgcaacgatgatactgcgctggaatttcgtcgtgctatctccgtgctgaaaagccttccgtttgaggtacgtagcctgaaagacacggaaggattgccctggatcggtgatgaagtcaaagggattatggaagaaatcatcgaggtcgggaattcgcgtgaagtgcaggccgtgctcaatgatgagtggtatcaaagcttccaccgctttaagagtgtctttggagtgggggtgaagacagcagacaagtggtaccgtatgggtctgcgcaccctcgaggatgttcgttccagcaagaccctgaagttgaccccgatgcagaaagtaggtctgctgtattatgaagatcttgctcgcggcgttacgcgtgccgaagctgacgcgatttctctgctggttcaggatgcagtcgcaactttcgacccggatgcgatcgtggagattgtcggtggatttcgtcgtgggaaacctcagggtcacgacgttgatctgcttatcagttctccgggagctgagaaagagcaagaagaccaactcctgcagaaagtgaccaatctgtggaagaaacaagggttgttgctgtacggtcgtctggaatggacccagtgggaagatgggggcctgccatccggcaaggctgacgagggtgacgcgggtgcgaaatgctttctgatcctcaaactttatgatcataaagtggacaaaagcaaatgggaaatgccgacgggttcgaacaagggcgaggccaaaccgtggaaagcaattcgcgtagatctgctgcgttgcccctacggcggttttgcgtttgcgatgttgcaatggaccggaagccgcatgttccgtcgtgatctgcgttggtacgccactgacgagaagaacatgatgctggacaatcatgcgctgtatgacctgaccaagaaaatcttcctccctgctaaatcggaagaggaaattttcgcacatctggggcttgaatacctggaaccgttcgaacgtaacgca

SEQ ID NO: 2982 - protein, 529 aa, synthetic construct
  REGION 1..529: note = Variant of terminal deoxynucleotidyltransferase
MHHHHHHGGSGSHGIRTIDSDFGKKQQKKMDNHDSSATYEIKFHEFVLFILEEKMGATRRTFLTDLARKKGFRVENELTDEVTHIVAENLSRSEVLAWLKEHKMEKTKQFELLDISWLIESMKVGKPVDTKGKYQLAESGEMSANPDPTEGRENELPPTMKTVSPYACQRRTTLNNHNQRFTDALEILRENYEFKRNDDTALEFRRAISVLKSLPFEVRSLKDTEGLPWIGDEVKGIMEEIIEVGNSREVQAVLNDEWYQSFHRFKSVFGVGVKTADKWYRMGLRTLEDVRSSKTLKLTPMQKVGLLYYEDLARGVTRAEADAISLLVQDAVATFDPDAIVEIVGGFRRGKPQGHDVDLLISSPGAEKEQEDQLLQKVTNLWKKQGLLLYGRLEWTQWEDGGLPSGKADEGDAGAKCFLILKLYDHKVDKSKWEMPTGSNKGEAKPWKAIRVDLLRCPYGGFAFAMLQWTGSRMFRRDLRWYATDEKNMMLDNHALYDLTKKIFLPAKSEEEIFAHLGLEYLEPFERNA

SEQ ID NO: 2983 - DNA, 1587 bp, synthetic construct
  misc_feature 1..1587: note = Variant of terminal deoxynucleotidyltransferase
  source 1..1587: mol_type = other DNA
atgcaccatcatcatcatcatggcggtagcggcagccacggcattcgtaccatcgattcggacttcgggaagaaacagcagaaaaaaggcgataaccacgatagttccgccacttatgaaatcaaatttcacgagtttgtgctgttcattctcgaagaaaaaatgggtgcgacgcgtcgtacttttctgacagatttagcccgcaagaaagggttccgcgtcgagaatgaactgaccgacgaagttacccacatcgtggcagaaaatctgtcacgctctgaagtattggcttggctgaaagaacacaagatggagaagaccaagcaattcgaactgctggatattagctggcttatcgaaagcatgaaagttggtaaaccggtggacaccaaggggaaataccagttggcggaatcgggtgagatgagtgcgaacccagatccgacagagggtcgtgaaaacgagctgcctcctactatgaagaccgtttctccgtatgcgtgtcaacgccgcaccaccctgaacaaccataatgctcgttttacggacgcactggaaattcttcgtgaaaattacgagttcaaacgcaacgatgataatgcgctggaatttcgtcgtgctatctccgtgctgaaaagccttccgtttgaggtacgtagcctgaaagacacggaaggattgccctggatcggtgatgaagtcaaagggattatggaagaaatcatcgaggtcgggaattcgcgtgaagtgcaggccgtgctcaatgatgagtggtatcaaagcttccaccgctttaagagtgtctttggagtgggggtgaagacagcagacaagtggtaccgtatgggtctgcgcaccctcgaggatgttcgttccagcaagaccctgaagttgaccccgatgcagaaagtaggtctgctgtattatgaagatcttgctcgcggcgttacgcgtgccgaagctgacgcgatttctctgctggttcaggatgcagtcgcaactttcgacccggatgcgatcgtggagattgtcggtggatttcgtcgtgggaaacctcagggtcacgacgttgatctgcttatcagttctccgggagctgagaaagagcaagaagacgggctcctgcagaaagtgaccaatctgtggaagaaacaagggttgttgctgtacggtcgtctggaatggacccagtgggaagatgggggcgaaccatccggcaaggctgacgagggtgacgcgggtgcgaaatgctttctgatcctcaaactttatgatcataaagtggacaaaagcaaatgggaaatgccgacgggttcgaacatgggcgaggccaaaccgtggaaagcaattcgcgtagatctgctgcgttgcccctacggcggttttgcgtttgcgatgttgcaatggaccggaagccgcatgttccgtcgtgatctgcgttggtacgccactgacgagaagaacatgatgctggacaatcatgcgctgtatgacctgaccaagaaaatcttcctccctgctaaatcggaagaggaaattttcgcacatctggggcttgaatacctggaaccgttcgaacgtaacgca

SEQ ID NO: 2984 - protein, 529 aa, synthetic construct
  REGION 1..529: note = Variant of terminal deoxynucleotidyltransferase
MHHHHHHGGSGSHGIRTIDSDFGKKQQKKGDNHDSSATYEIKFHEFVLFILEEKMGATRRTFLTDLARKKGFRVENELTDEVTHIVAENLSRSEVLAWLKEHKMEKTKQFELLDISWLIESMKVGKPVDTKGKYQLAESGEMSANPDPTEGRENELPPTMKTVSPYACQRRTTLNNHNARFTDALEILRENYEFKRNDDNALEFRRAISVLKSLPFEVRSLKDTEGLPWIGDEVKGIMEEIIEVGNSREVQAVLNDEWYQSFHRFKSVFGVGVKTADKWYRMGLRTLEDVRSSKTLKLTPMQKVGLLYYEDLARGVTRAEADAISLLVQDAVATFDPDAIVEIVGGFRRGKPQGHDVDLLISSPGAEKEQEDGLLQKVTNLWKKQGLLLYGRLEWTQWEDGGEPSGKADEGDAGAKCFLILKLYDHKVDKSKWEMPTGSNMGEAKPWKAIRVDLLRCPYGGFAFAMLQWTGSRMFRRDLRWYATDEKNMMLDNHALYDLTKKIFLPAKSEEEIFAHLGLEYLEPFERNA

SEQ ID NO: 2985 - DNA, 1587 bp, synthetic construct
  misc_feature 1..1587: note = Variant of terminal deoxynucleotidyltransferase
  source 1..1587: mol_type = other DNA
atgcaccatcatcatcatcatggcggtagcggcagccacggcattcgtaccatcgattcggacttcgggaagaaacagcagaaaaaaggcgataaccacgatagttccgccacttatgaaatcaaatttcacgagtttgtgctgttcattctcgaagaaaaaatgggtgcgacgcgtcgtacttttctgacagatttagcccgcaagaaagggttccgcgtcgagaatgaactgaccgacgaagttacccacatcgtggcagaaaatctgtcacgctctgaagtattggcttggctgaaagaacacaagatggagaagaccaagcaattcgaactgctggatattagctggcttatcgaaagcatgaaagttggtaaaccggtggacaccaaggggaaataccagttggcggaatcgggtgagatgagtgcgaacccagatccgacagagggtcgtgaaaacgagctgcctcctactatgaagaccgtttctccgtatgcgtgtcaacgccgcaccaccctgaacaaccataatcaacgttttacggactcgctggaaattcttcgtgaaaattacgagttcaaacgcaacgatgatactgcgctggaatttcgtcgtgctatctccgtgctgaaaagccttccgtttgaggtacgtagcctgaaagacacggaaggattgccctggatcggtgatgaagtcaaagggattatggaagaaatcatcgaggtcggggagtcgcgtgaagtgcaggccgtgctcaatgatgagtggtatcaaagcttccaccgctttaagagtgtctttggagtgggggtgaagacagcagacaagtggtaccgtatgggtctgcgcaccctcgaggatgttcgttccagcaagaccctgaagttgaccccgatgcagaaagtaggtctgctgtattatgaagatcttgctcgcggcgttacgcgtgccgaagctgacgcgatttcgctgatggttcgcgatgcagtcgcaactttcgacccggatgcgatcgtggagattgtcggtggatttcgtcgtgggaaacctcagggtcacgacgttgatctgcttatcagttctccgggagctgagaaagagcaagaagaccagctcctgcagaaagtgaccaatctgtggaagaaacaagggttgttgctgtacggtcgtctggaatggacccagtgggaagatgggggttcgccttccggtaaggctgacgagggtgacgcgggtgcgaaatgctttctgatcctcaaactttatgatcataaagtggacaaaagcaaatgggaaatgccgacgggttcgaacatgggcgaggccaaaccgtggaaagcaattcgcgtagatctgctgcgttgccccatcggcggttttgcgtttgcgatgttgcagtggaccggaagccgcatgttccgtcgtgatctgcgttggtacgccactgacgagaagaacatgatgctggacaatcatgcgctgtatgacctgaccaagaaaatcttcctccctgctaaatcggaagaggaaattttcgcacatctggggcttgaatacctggaaccgttcgaacgtaacgca

SEQ ID NO: 2986 - protein, 529 aa, synthetic construct
  REGION 1..529: note = Variant of terminal deoxynucleotidyltransferase
MHHHHHHGGSGSHGIRTIDSDFGKKQQKKGDNHDSSATYEIKFHEFVLFILEEKMGATRRTFLTDLARKKGFRVENELTDEVTHIVAENLSRSEVLAWLKEHKMEKTKQFELLDISWLIESMKVGKPVDTKGKYQLAESGEMSANPDPTEGRENELPPTMKTVSPYACQRRTTLNNHNQRFTDSLEILRENYEFKRNDDTALEFRRAISVLKSLPFEVRSLKDTEGLPWIGDEVKGIMEEIIEVGESREVQAVLNDEWYQSFHRFKSVFGVGVKTADKWYRMGLRTLEDVRSSKTLKLTPMQKVGLLYYEDLARGVTRAEADAISLMVRDAVATFDPDAIVEIVGGFRRGKPQGHDVDLLISSPGAEKEQEDQLLQKVTNLWKKQGLLLYGRLEWTQWEDGGSPSGKADEGDAGAKCFLILKLYDHKVDKSKWEMPTGSNMGEAKPWKAIRVDLLRCPIGGFAFAMLQWTGSRMFRRDLRWYATDEKNMMLDNHALYDLTKKIFLPAKSEEEIFAHLGLEYLEPFERNA

SEQ ID NO: 2987 - DNA, 1587 bp, synthetic construct
  misc_feature 1..1587: note = Variant of terminal deoxynucleotidyltransferase
  source 1..1587: mol_type = other DNA
atgcaccatcatcatcatcatggcggtagcggcagccacggcattcgtaccatcgattcggacttcgggaagaaacagcagaaaaaaggcgataaccacgatagttccgccacttatgaaatcaaatttcacgagtttgtgctgttcattctcgaagaaaaaatgggtgcgacgcgtcgtacttttctgacagatttagcccgcaagaaagggttccgcgtcgagaatgaactgaccgacgaagttacccacatcgtggcagaaaatctgtcacgctctgaagtattggcttggctgaaagaacacaagatggagaagaccaagcaattcgaactgctggatattagctggcttatcgaaagcatgaaagttggtaaaccggtggacaccaaggggaaataccagttggcggaatcgggtgagatgagtgcgaacccagatccgacagagggtcgtgaaaacgagctgcctcctactatgaagaccgtttctccgtatgcgtgtcaacgccgcaccaccctgaacaaccataatcaacgttttacggactcgctggaaattcttcgtgaaaattacgagttcaaacgcaacgatgatactgcgctggaatttcgtcgtgctatctccgtgctgaaaagccttccgtttgaggtacgtagcctgaaagacacggaaggattgccctggatcggtgatgaagtcaaagggattatggaagaaatcatcgaggtcggggagtcgcgtgaagtgcaggccgtgctcaatgatgagtggtatcaaagcttccaccgctttaagagtgtctttggagtgggggtgaagacagcagacaagtggtaccgtatgggtctgcgcaccctcgaggatgttcgttccagcaagaccctgaagttgaccccgatgcagaaagtaggtctgctgtattatgaagatcttgctcgcggcgttacgcgtgccgaagctgacgcgatttctctgctggttcaggatgcagtcgcaactttcgacccggatgcgatcgtggagattgtcggtggatttcgtcgtgggaaacctcagggtcacgacgttgatctgcttatcagttctccgggagctgagaaagagcaagaagaccagctcctgcagaaagtgaccaatctgtggaagaaacaagggttgttgctgtacggtcgtctggaatggacccagtgggaagatgggggttcgccatccggtaaggctgacgagggtgacgcgggtgcgaaatgctttctgatcctcaaactttatgatcataaagtggacaaaagcaaatgggaaatgccgacgggttcgaacatgggcgaggccaaaccgtggaaagcaattcgcgtagatctgctgcgttgccccatcggcagttttgcgtttgcgatgttgcagtggaccggaagccgcatgttccgtcgtgatctgcgttggtacgccactgacgagaagaacatgatgctggacaatcattcgctgtatgacctgaataagaaaatccagctccctgctaaatcggaagaggaaattttcgcacatctggggcttgaatacctggaaccgttcgaacgtaacgca

SEQ ID NO: 2988 - protein, 529 aa, synthetic construct
  REGION 1..529: note = Variant of terminal deoxynucleotidyltransferase
MHHHHHHGGSGSHGIRTIDSDFGKKQQKKGDNHDSSATYEIKFHEFVLFILEEKMGATRRTFLTDLARKKGFRVENELTDEVTHIVAENLSRSEVLAWLKEHKMEKTKQFELLDISWLIESMKVGKPVDTKGKYQLAESGEMSANPDPTEGRENELPPTMKTVSPYACQRRTTLNNHNQRFTDSLEILRENYEFKRNDDTALEFRRAISVLKSLPFEVRSLKDTEGLPWIGDEVKGIMEEIIEVGESREVQAVLNDEWYQSFHRFKSVFGVGVKTADKWYRMGLRTLEDVRSSKTLKLTPMQKVGLLYYEDLARGVTRAEADAISLLVQDAVATFDPDAIVEIVGGFRRGKPQGHDVDLLISSPGAEKEQEDQLLQKVTNLWKKQGLLLYGRLEWTQWEDGGSPSGKADEGDAGAKCFLILKLYDHKVDKSKWEMPTGSNMGEAKPWKAIRVDLLRCPIGSFAFAMLQWTGSRMFRRDLRWYATDEKNMMLDNHSLYDLNKKIQLPAKSEEEIFAHLGLEYLEPFERNA

SEQ ID NO: 2989 - DNA, 1587 bp, synthetic construct
  misc_feature 1..1587: note = Variant of terminal deoxynucleotidyltransferase
  source 1..1587: mol_type = other DNA
atgcaccatcatcatcatcatggcggtagcggcagccacggcattcgtaccatcgattcggacttcgggaagaaacagcagaaaaaaggcgataaccacgatagttccgccacttatgaaatcaaatttcacgagtttgtgctgttcattctcgaagaaaaaatgggtgcgacgcgtcgtacttttctgacagatttagcccgcaagaaagggttccgcgtcgagaatgaactgaccgacgaagttacccacatcgtggcagaaaatctgtcacgctctgaagtattggcttggctgaaagaacacaagatggagaagaccaagcaattcgaactgctggatattagctggcttatcgaaagcatgaaagttggtaaaccggtggacaccaaggggaaataccagttggcggaatcgggtgagatgagtgcgaacccagatccgacagagggtcgtgaaaacgagctgcctcctactatgaagaccgtttctccgtatgcgtgtcaacgccgcaccaccctgaacaaccataatcagcgttttacggacgcactggaaattcttcgtgaaaattacgagttcaaacgcaacgatgataatgcgctggaatttcgtcgtgctatctccgtgctgaaaagccttccgtttgaggtacgtagcctgaaagacacggaaggattgccctggatcggtgatgaagtcaaagggattatggaagaaatcatcgaggtcgggaattcgcgtgaagtgcaggccgtgctcaatgatgagtggtatcaaagcttccaccgctttaagagtgtctttggagtgggggtgaagacagcagacaagtggtaccgtatgggtctgcgcaccctcgaggatgttcgttccagcaagaccctgaagttgaccccgatgcagaaagtaggtctgctgtattatgaagatcttgctcgcggcgttacgcgtgccgaagctgacgcgatttctctgctggttcaggatgcagtcgcaactttcgacccggatgcgatcgtggagattgtcggtggatttcgtcgtgggaaacctcagggtcacgacgttgatctgcttatcagttctccgggagctgagaaagagcaagaagacgggctcctgcagaaagtgaccaatctgtggaagaaacaagggttgttgctgtacggtcgtctggaatggacccagtgggaagatgggggttcgccatccggtaaggctgacgagggtgacgcgggtgcgaaatgctttctgatcctcaaactttatgatcataaagtggacaaaagcaaatgggaaatgccgacgggttcgaacatgggcgaggccaaaccgtggaaagcaattcgcgtagatctgctgcgttgcccctacggcggttttgcgtttgcgatgttgcaatggaccggaagccgcatgttccgtcgtgatctgcgttggtacgccactgacgagaagaacatgatgctggacaatcatgcgctgtatgacctgaccaagaaaatcttcctccctgctaaatcggaagaggaaattttcgcacatctggggcttgaatacctggaaccgttcgaacgtaacgca

SEQ ID NO: 2990 - protein, 529 aa, synthetic construct
  REGION 1..529: note = Variant of terminal deoxynucleotidyltransferase
MHHHHHHGGSGSHGIRTIDSDFGKKQQKKGDNHDSSATYEIKFHEFVLFILEEKMGATRRTFLTDLARKKGFRVENELTDEVTHIVAENLSRSEVLAWLKEHKMEKTKQFELLDISWLIESMKVGKPVDTKGKYQLAESGEMSANPDPTEGRENELPPTMKTVSPYACQRRTTLNNHNQRFTDALEILRENYEFKRNDDNALEFRRAISVLKSLPFEVRSLKDTEGLPWIGDEVKGIMEEIIEVGNSREVQAVLNDEWYQSFHRFKSVFGVGVKTADKWYRMGLRTLEDVRSSKTLKLTPMQKVGLLYYEDLARGVTRAEADAISLLVQDAVATFDPDAIVEIVGGFRRGKPQGHDVDLLISSPGAEKEQEDGLLQKVTNLWKKQGLLLYGRLEWTQWEDGGSPSGKADEGDAGAKCFLILKLYDHKVDKSKWEMPTGSNMGEAKPWKAIRVDLLRCPYGGFAFAMLQWTGSRMFRRDLRWYATDEKNMMLDNHALYDLTKKIFLPAKSEEEIFAHLGLEYLEPFERNA

SEQ ID NO: 2991 - DNA, 1587 bp, synthetic construct
  misc_feature 1..1587: note = Variant of terminal deoxynucleotidyltransferase
  source 1..1587: mol_type = other DNA
atgcaccatcatcatcatcatggcggtagcggcagccacggcattcgtaccatcgattcggacttcgggaagaaacagcagaaaaaaggcgataaccacgatagttccgccacttatgaaatcaaatttcacgagtttgtgctgttcattctcgaagaaaaaatgggtgcgacgcgtcgtacttttctgacagatttagcccgcaagaaagggttccgcgtcgagaatgaactgaccgacgaagttacccacatcgtggcagaaaatctgtcacgctctgaagtattggcttggctgaaagaacacaagatggagaagaccaagcaattcgaactgctggatattagctggcttatcgaaagcatgaaagttggtaaaccggtggacaccaaggggaaataccagttggcggaatcgggtgagatgagtgcgaacccagatccgacagagggtcgtgaaaacgagctgcctcctactatgaagaccgtttctccgtatgcgtgtcaacgccgcaccaccctgaacaaccataatcaacgttttacggacgcactggaaattcttcgtgaaaattacgagttcaaacgcaacgatgatactgcgctggaatttcgtcgtgctatctccgtgctgaaaagccttccgtttgaggtacgtagcctgaaagacacggaaggattgccctggatcggtgatgaagtcaaagggattatggaagaaatcatcgaggtcgggaattcgcgtgaagtgcaggccgtgctcaatgatgagtggtatcaaagcttccaccgctttaagagtgtctttggagtgggggtgaagacagcagacaagtggtaccgtatgggtctgcgcaccctcgaggatgttcgttccagcaagaccctgaagttgaccccgatgcagaaagtaggtctgctgtattatgaagatcttgctcgcggcgttacgcgtgccgaagctgacgcgatttcgctgatggttcaggatgcagtcgcaactttcgacccggatgcgatcgtggagattgtcggtggatttcgtcgtgggaaacctcagggtcacgacgttgatctgcttatcagttctccgggagctgagaaagagcaagaagaccagctcctgcagaaagtgaccaatctgtggaagaaacaagggttgttgctgtacggtcgtctggaatggacccagtgggaagatgggggttcggactccggtaaggctgacgagggtgacgcgggtgcgaaatgctttctgatcctcaaactttatgatcataaagtggacaaaagcaaatgggaaatgccgacgggttcgaacatgggcgaggccaaaccgtggaaagcaattcgcgtagatctgctgcgttgcccctacggcggttttgcgtttgcgatgttgcagtggaccggaagccgcatgttccgtcgtgatctgcgttggtacgccactgacgagaagaacatgatgctggacaatcatgcgctgtatgacctgactaagaaaatcagtctccctgctaaatcggaagaggaaattttcgcacatctggggcttgaatacctggaaccgttcgaacgtaacgca

SEQ ID NO: 2992 - protein, 529 aa, synthetic construct
  REGION 1..529: note = Variant of terminal deoxynucleotidyltransferase
MHHHHHHGGSGSHGIRTIDSDFGKKQQKKGDNHDSSATYEIKFHEFVLFILEEKMGATRRTFLTDLARKKGFRVENELTDEVTHIVAENLSRSEVLAWLKEHKMEKTKQFELLDISWLIESMKVGKPVDTKGKYQLAESGEMSANPDPTEGRENELPPTMKTVSPYACQRRTTLNNHNQRFTDALEILRENYEFKRNDDTALEFRRAISVLKSLPFEVRSLKDTEGLPWIGDEVKGIMEEIIEVGNSREVQAVLNDEWYQSFHRFKSVFGVGVKTADKWYRMGLRTLEDVRSSKTLKLTPMQKVGLLYYEDLARGVTRAEADAISLMVQDAVATFDPDAIVEIVGGFRRGKPQGHDVDLLISSPGAEKEQEDQLLQKVTNLWKKQGLLLYGRLEWTQWEDGGSDSGKADEGDAGAKCFLILKLYDHKVDKSKWEMPTGSNMGEAKPWKAIRVDLLRCPYGGFAFAMLQWTGSRMFRRDLRWYATDEKNMMLDNHALYDLTKKISLPAKSEEEIFAHLGLEYLEPFERNA

SEQ ID NO: 2993 - DNA, 1587 bp, synthetic construct
  misc_feature 1..1587: note = Variant of terminal deoxynucleotidyltransferase
  source 1..1587: mol_type = other DNA
atgcaccatcatcatcatcatggcggtagcggcagccacggcattcgtaccatcgattcggacttcgggaagaaacagcagaaaaaaatggataaccacgatagttccgccacttatgaaatcaaatttcacgagtttgtgctgttcattctcgaagaaaaaatgggtgcgacgcgtcgtacttttctgacagatttagcccgcaagaaagggttccgcgtcgagaatgaactgaccgacgaagttacccacatcgtggcagaaaatctgtcacgctctgaagtattggcttggctgaaagaacacaagatggagaagaccaagcaattcgaactgctggatattagctggcttatcgaaagcatgaaagttggtaaaccggtggacaccaaggggaaataccagttggcggaatcgggtgagatgagtgcgaacccagatccgacagagggtcgtgaaaacgagctgcctcctactatgaagaccgtttctccgtatgcgtgtcaacgccgcaccaccctgaacaaccataatcagcgttttacggacgcactggaaattcttcgtgaaaattacgagttcaaacgcaacgatgatactgcgctggaatttcgtcgtgctatctccgtgctgaaaagccttccgtttgaggtacgtagcctgaaagacacggaaggattgccctggatcggtgatgaagtcaaagggattatggaagaaatcatcgaggtcgggaattcgcgtgaagtgcaggccgtgctcaatgatgagtggtatcaaagcttccaccgctttaagagtgtctttggagtgggggtgaagacagcagacaagtggtaccgtatgggtctgcgcaccctcgaggatgttcgttccagcaagaccctgaagttgaccccgatgcagaaagtaggtctgctgtattatgaagatcttgctcgcggcgttacgcgtgccgaagctgacgcgatttctctgctggttcaggatgcagtcgcaactttcgacccggatgcgatcgtggagattgtcggtggatttcgtcgtgggaaacctcgcggtcacgacgttgatctgcttatcagttctccgggagctgagaaagagcaagaagaccagctcctgcagaaagtgaccaatctgtggaagaaacaagggttgttgctgtacggtcgtctggaatggacccagtgggaagatgggggcgaaccatccggcaaggctgacgagggtgacgcgggtgcgaaatgctttctgatcctcaaactttatgatcataaagtggacaaaagcaaatgggaaatgccgacgggttcgaacatgggcgaggccaaaccgtggaaagcaattcgcgtagatctgctgcgttgcccctacggcggttttgcgtttgcgatgttgcagtggaccggaagccgcatgttccgtcgtgatctgcgttggtacgccactgacgagaagaacatgatgctggacaatcatgcgctgtatgacctgaccaagaaaatctttctccctgctaaatcggaagaggaaattttcgcacatctggggcttgaatacctggaaccgttcgaacgtaacgca

SEQ ID NO: 2994 - protein, 529 aa, synthetic construct
  REGION 1..529: note = Variant of terminal deoxynucleotidyltransferase
MHHHHHHGGSGSHGIRTIDSDFGKKQQKKMDNHDSSATYEIKFHEFVLFILEEKMGATRRTFLTDLARKKGFRVENELTDEVTHIVAENLSRSEVLAWLKEHKMEKTKQFELLDISWLIESMKVGKPVDTKGKYQLAESGEMSANPDPTEGRENELPPTMKTVSPYACQRRTTLNNHNQRFTDALEILRENYEFKRNDDTALEFRRAISVLKSLPFEVRSLKDTEGLPWIGDEVKGIMEEIIEVGNSREVQAVLNDEWYQSFHRFKSVFGVGVKTADKWYRMGLRTLEDVRSSKTLKLTPMQKVGLLYYEDLARGVTRAEADAISLLVQDAVATFDPDAIVEIVGGFRRGKPRGHDVDLLISSPGAEKEQEDQLLQKVTNLWKKQGLLLYGRLEWTQWEDGGEPSGKADEGDAGAKCFLILKLYDHKVDKSKWEMPTGSNMGEAKPWKAIRVDLLRCPYGGFAFAMLQWTGSRMFRRDLRWYATDEKNMMLDNHALYDLTKKIFLPAKSEEEIFAHLGLEYLEPFERNA

SEQ ID NO: 2995 - DNA, 1587 bp, synthetic construct
  misc_feature 1..1587: note = Variant of terminal deoxynucleotidyltransferase
  source 1..1587: mol_type = other DNA
atgcaccatcatcatcatcatggcggtagcggcagccacggcattcgtaccatcgattcggacttcgggaagaaacagcagaaaaaaatggataaccacgatagttccgccacttatgaaatcaaatttcacgagtttgtgctgttcattctcgaagaaaaaatgggtgcgacgcgtcgtacttttctgacagatttagcccgcaagaaagggttccgcgtcgagaatgaactgaccgacgaagttacccacatcgtggcagaaaatctgtcacgctctgaagtattggcttggctgaaagaacacaagatggagaagaccaagcaattcgaactgctggatattagctggcttatcgaaagcatgaaagttggtaaaccggtggacaccaaggggaaataccagttggcggaatcgggtgagatgagtgcgaacccagatccgacagagggtcgtgaaaacgagctgcctcctactatgaagaccgtttctccgtatgcgtgtcaacgccgcaccaccctgaacaaccataatcaacgttttacggacgcactggaaattcttcgtgaaaattacgagttcaaacgcaacgatgatactgcgctggaatttcgtcgtgctatctccgtgctgaaaagccttccgtttgaggtacgtagcctgaaagacacggaaggattgccctggatcggtgatgaagtcaaagggattatggaagaaatcatcgaggtcgggaattcgcgtgaagtgcaggccgtgctcaatgatgagtggtatcaaagcttccaccgctttaagagtgtctttggagtgggggtgaagacagcagacaagtggtaccgtatgggtctgcgcaccctcgaggatgttcgttccagcaagaccctgaagttgaccccgatgcagaaagtaggtctgctgtattatgaagatcttgctcgcggcgttacgcgtgccgaagctgacgcgatttcgctgatggttcgcgatgcagtcgcaactttcgacccggatgcgatcgtggagattgtcggtggatttcgtcgtgggaaacctcagggtcacgacgttgatctgcttatcagttctccgggagctgagaaagagcaagaagaccagctcctgcagaaagtgatgaatctgtggaagaaacaagggttgttgctgtacggtcgtctggaatggacccagtgggaagatgggggttcgccttccggtaaggctgacgagggtgacgcgggtgcgaaatgctttctgatcctcaaactttatgatcataaagtggataaaagcaaatgggaaatgccgacgggttcgaacatgggcgaggccaaaccgtggaaagcaattcgcgtagatctgctgcgttgcccctacggcggttttgcgtttgcgatgttgcagtggaccggaagccgcatgttccgtcgtgatctgcgttggtacgccactgacgagaagaacatgatgctggacaatcatgcgctgtatgacctgactaagaaaatcagtctccctgctaaatcggaagaggaaattttcgcacatctggggcttgaatacctggaaccgttcgaacgtaacgca

SEQ ID NO: 2996 - protein, 529 aa, synthetic construct
  REGION 1..529: note = Variant of terminal deoxynucleotidyltransferase
MHHHHHHGGSGSHGIRTIDSDFGKKQQKKMDNHDSSATYEIKFHEFVLFILEEKMGATRRTFLTDLARKKGFRVENELTDEVTHIVAENLSRSEVLAWLKEHKMEKTKQFELLDISWLIESMKVGKPVDTKGKYQLAESGEMSANPDPTEGRENELPPTMKTVSPYACQRRTTLNNHNQRFTDALEILRENYEFKRNDDTALEFRRAISVLKSLPFEVRSLKDTEGLPWIGDEVKGIMEEIIEVGNSREVQAVLNDEWYQSFHRFKSVFGVGVKTADKWYRMGLRTLEDVRSSKTLKLTPMQKVGLLYYEDLARGVTRAEADAISLMVRDAVATFDPDAIVEIVGGFRRGKPQGHDVDLLISSPGAEKEQEDQLLQKVMNLWKKQGLLLYGRLEWTQWEDGGSPSGKADEGDAGAKCFLILKLYDHKVDKSKWEMPTGSNMGEAKPWKAIRVDLLRCPYGGFAFAMLQWTGSRMFRRDLRWYATDEKNMMLDNHALYDLTKKISLPAKSEEEIFAHLGLEYLEPFERNA

SEQ ID NO: 2997 - DNA, 1587 bp, synthetic construct
  misc_feature 1..1587: note = Variant of terminal deoxynucleotidyltransferase
  source 1..1587: mol_type = other DNA
atgcaccatcatcatcatcatggcggtagcggcagccacggcattcgtaccatcgattcggacttcgggaagaaacagcagaaaaaaggcgataaccacgatagttccgccacttatgaaatcaaatttcacgagtttgtgctgttcattctcgaagaaaaaatgggtgcgacgcgtcgtacttttctgacagatttagcccgcaagaaagggttccgcgtcgagaatgaactgaccgacgaagttacccacatcgtggcagaaaatctgtcacgctctgaagtattggcttggctgaaagaacacaagatggagaagaccaagcaattcgaactgctggatattagctggcttatcgaaagcatgaaagttggtaaaccggtggacaccaaggggaaataccagttggcggaatcgggtgagatgagtgcgaacccagatccgacagagggtcgtgaaaacgagctgcctcctactatgaagaccgtttctccgtatgcgtgtcaacgccgcaccaccctgaacaaccataatcagcgttttacggacgcactggaaattcttcgtgaaaattacgagttcaaacgcaacgatgatactgcgctggaatttcgtcgtgctatctccgtgctgaaaagccttccgtttgaggtacgtagcctgaaagacacggaaggattgccctggatcggtgatgaagtcaaagggattatggaagaaatcatcgaggtcgggaattcgcgtgaagtgcaggccgtgctcaatgatgagtggtatcaaagcttccaccgctttaagagtgtctttggagtgggggtgaagacagcagacaagtggtaccgtatgggtctgcgcaccctcgaggatgttcgttccagcaagaccctgaagttgaccccgatgcagaaagtaggtctgctgtattatgaagatcttgctcgcggcgttacgcgtgccgaagctgacgcgatttctctgctggttcaggatgcagtcgcaactttcgacccggatgcgatcgtggagattgtcggtggatttcgtcgtgggaaacctcagggtcacgacgttgatctgcttatcagttctccgggagctgagaaagagcaagaagacgggctcctgcagaaagtgaccaatctgtggaagaaacaagggttgttgctgtacggtcgtctggaatggacccagtgggaagatgggggcctgccatccggcaaggctgacgagggtgacgcgggtgcgaaatgctttctgatcctcaaactttatgatcataaagtggacaaaagcaaatgggaaatgccgacgggttcgaacatgggcgaggccaaaccgtggaaagcaattcgcgtagatctgctgcgttgcccctacggcggttttgcgtttgcgatgttgcagtggaccggaagccgcatgttccgtcgtgatctgcgttggtacgccactgacgagaagaacatgatgctggacaatcatgcgctgtatgacctgaccaagaaaatcttcctccctgctaaatcggaagaggaaattttcgcacatctggggcttgaatacctggaaccgttcgaacgtaacgca

SEQ ID NO: 2998 - protein, 529 aa, synthetic construct
  REGION 1..529: note = Variant of terminal deoxynucleotidyltransferase
MHHHHHHGGSGSHGIRTIDSDFGKKQQKKGDNHDSSATYEIKFHEFVLFILEEKMGATRRTFLTDLARKKGFRVENELTDEVTHIVAENLSRSEVLAWLKEHKMEKTKQFELLDISWLIESMKVGKPVDTKGKYQLAESGEMSANPDPTEGRENELPPTMKTVSPYACQRRTTLNNHNQRFTDALEILRENYEFKRNDDTALEFRRAISVLKSLPFEVRSLKDTEGLPWIGDEVKGIMEEIIEVGNSREVQAVLNDEWYQSFHRFKSVFGVGVKTADKWYRMGLRTLEDVRSSKTLKLTPMQKVGLLYYEDLARGVTRAEADAISLLVQDAVATFDPDAIVEIVGGFRRGKPQGHDVDLLISSPGAEKEQEDGLLQKVTNLWKKQGLLLYGRLEWTQWEDGGLPSGKADEGDAGAKCFLILKLYDHKVDKSKWEMPTGSNMGEAKPWKAIRVDLLRCPYGGFAFAMLQWTGSRMFRRDLRWYATDEKNMMLDNHALYDLTKKIFLPAKSEEEIFAHLGLEYLEPFERNA

SEQ ID NO: 2999 - DNA, 1587 bp, synthetic construct
  misc_feature 1..1587: note = Variant of terminal deoxynucleotidyltransferase
  source 1..1587: mol_type = other DNA
atgcaccatcatcatcatcatggcggtagcggcagccacggcattcgtaccatcgattcggacttcgggaagaaacagcagaaaaaaggcgataaccacgatagttccgccacttatgaaatcaaatttcacgagtttgtgctgttcattctcgaagaaaaaatgggtgcgacgcgtcgtacttttctgacagatttagcccgcaagaaagggttccgcgtcgagaatgaactgaccgacgaagttacccacatcgtggcagaaaatctgtcacgctctgaagtattggcttggctgaaagaacacaagatggagaagaccaagcaattcgaactgctggatattagctggcttatcgaaagcatgaaagttggtaaaccggtggacaccaaggggaaataccagttggcggaatcgggtgagatgagtgcgaacccagatccgacagagggtcgtgaaaacgagctgcctcctactatgaagaccgtttctccgtatgcgtgtcaacgccgcaccaccctgaacaaccataatcaacgttttacggacgcactggaaattcttcgtgaaaattacgagttcaaacgcaacgatgatactgcgctggaatttcgtcgtgctatctccgtgctgaaaagccttccgtttgaggtacgtagcctgaaagacacggaaggattgccctggatcggtgatgaagtcaaagggattatggaagaaatcatcgaggtcgggaattcgcgtgaagtgcaggccgtgctcaatgatgagtggtatcaaagcttccaccgctttaagagtgtctttggagtgggggtgaagacagcagacaagtggtaccgtatgggtctgcgcaccctcgaggatgttcgttccagcaagaccctgaagttgaccccgatgcagaaagtaggtctgctgtattatgaagatcttgctcgcggcgttacgcgtgccgaagctgacgcgatttctctgctggttcaggatgcagtcgcaactttcgacccggatgcgatcgtggagattgtcggtggatttcgtcgtgggaaacctcagggtcacgacgttgatctgcttatcagttctccgggagctgagaaagagcaagaagaccagctcctgcagaaagtgaccaatctgtggaagaaacaagggttgttgctgtacggtcgtctggaatggacccagtgggaagatgggggttcgccatccggtaaggctgacgagggtgacgcgggtgcgaaatgctttctgatcctcaaactttatgatcataaagtggacaaaagcaaatgggaaatgccgacgggttcgaacatgggcgaggccaaaccgtggaaagcaattcgcgtagatctgctgcgttgcccctacggcggttttgcgtttgcgatgttgcagtggaccggaagccgcatgttccgtcgtgatctgcgttggtacgccactgacgagaagaacatgatgctggacaatcatgcgctgtatgacctgaccaagaaaatcttcctccctgctaaatcggaagaggaaattttcgcacatctggggcttgaatacctggaaccgttcgaacgtaacgca

SEQ ID NO: 3000 - protein, 529 aa, synthetic construct
  REGION 1..529: note = Variant of terminal deoxynucleotidyltransferase
MHHHHHHGGSGSHGIRTIDSDFGKKQQKKGDNHDSSATYEIKFHEFVLFILEEKMGATRRTFLTDLARKKGFRVENELTDEVTHIVAENLSRSEVLAWLKEHKMEKTKQFELLDISWLIESMKVGKPVDTKGKYQLAESGEMSANPDPTEGRENELPPTMKTVSPYACQRRTTLNNHNQRFTDALEILRENYEFKRNDDTALEFRRAISVLKSLPFEVRSLKDTEGLPWIGDEVKGIMEEIIEVGNSREVQAVLNDEWYQSFHRFKSVFGVGVKTADKWYRMGLRTLEDVRSSKTLKLTPMQKVGLLYYEDLARGVTRAEADAISLLVQDAVATFDPDAIVEIVGGFRRGKPQGHDVDLLISSPGAEKEQEDQLLQKVTNLWKKQGLLLYGRLEWTQWEDGGSPSGKADEGDAGAKCFLILKLYDHKVDKSKWEMPTGSNMGEAKPWKAIRVDLLRCPYGGFAFAMLQWTGSRMFRRDLRWYATDEKNMMLDNHALYDLTKKIFLPAKSEEEIFAHLGLEYLEPFERNA

SEQ ID NO: 3001 - DNA, 1587 bp, synthetic construct
  misc_feature 1..1587: note = Variant of terminal deoxynucleotidyltransferase
  source 1..1587: mol_type = other DNA
atgcaccatcatcatcatcatggcggtagcggcagccacggcattcgtaccatcgattcggacttcgggaagaaacagcagaaaaaaggcgataaccacgatagttccgccacttatgaaatcaaatttcacgagtttgtgctgttcattctcgaagaaaaaatgggtgcgacgcgtcgtacttttctgacagatttagcccgcaagaaagggttccgcgtcgagaatgaactgaccgacgaagttacccacatcgtggcagaaaatctgtcacgctctgaagtattggcttggctgaaagaacacaagatggagaagaccaagcaattcgaactgctggatattagctggcttatcgaaagcatgaaagttggtaaaccggtggacaccaaggggaaataccagttggcggaatcgggtgagatgagtgcgaacccagatccgacagagggtcgtgaaaacgagctgcctcctactatgaagaccgtttctccgtatgcgtgtcaacgccgcaccaccctgaacaaccataatcaacgttttacggacgcactggaaattcttcgtgaaaattacgagttcaaacgcaacgatgatactgcgctggaatttcgtcgtgctatctccgtgctgaaaagccttccgtttgaggtacgtagcctgaaagacacggaaggattgccctggatcggtgatgaagtcaaagggattatggaagaaatcatcgaggtcgggaattcgcgtgaagtgcaggccgtgctcaatgatgagtggtatcaaagcttccaccgctttaagagtgtctttggagtgggggtgaagacagcagacaagtggtaccgtatgggtctgcgcaccctcgaggatgttcgttccagcaagaccctgaagttgaccccgatgcagaaagtaggtctgctgtattatgaagatcttgctcgcggcgttacgcgtgccgaagctgacgcgatttggctgatggttcaggatgcagtcgcaactttcgacccggatgcgatcgtggagattgtcggtggatttcgtcgtgggaaacctcagggtcacgacgttgatctgcttatcagttctccgggagctgagaaagagcaagaagaccagctcctgcagaaagtgaccaatctgtggaagaaacaagggttgttgctgtacggtcgtctggaatggacccagtgggaagatgggggttcgccatccggtaaggctgacgagggtgacgcgggtgcgaaatgctttctgatcctcaaactttatgatcataaagtggacaaaagcaaatgggaaatgccgacgggttcgaacatgggcgaggccaaaccgtggaaagcaattcgcgtagatctgctgcgttgcccctacggcggttttgcgtttgcgatgttgcagtggaccggaagccgcatgttccgtcgtgatctgcgttggtacgccactgacgagaagaacatgatgctggacaatcatgcgctgtatgacctgactaagaaaatctttctccctgctaaatcggaagaggaaattttcgcacatctggggcttgaatacctggaaccgttcgaacgtaacgca

SEQ ID NO: 3002 - protein, 529 aa, synthetic construct
  REGION 1..529: note = Variant of terminal deoxynucleotidyltransferase
MHHHHHHGGSGSHGIRTIDSDFGKKQQKKGDNHDSSATYEIKFHEFVLFILEEKMGATRRTFLTDLARKKGFRVENELTDEVTHIVAENLSRSEVLAWLKEHKMEKTKQFELLDISWLIESMKVGKPVDTKGKYQLAESGEMSANPDPTEGRENELPPTMKTVSPYACQRRTTLNNHNQRFTDALEILRENYEFKRNDDTALEFRRAISVLKSLPFEVRSLKDTEGLPWIGDEVKGIMEEIIEVGNSREVQAVLNDEWYQSFHRFKSVFGVGVKTADKWYRMGLRTLEDVRSSKTLKLTPMQKVGLLYYEDLARGVTRAEADAIWLMVQDAVATFDPDAIVEIVGGFRRGKPQGHDVDLLISSPGAEKEQEDQLLQKVTNLWKKQGLLLYGRLEWTQWEDGGSPSGKADEGDAGAKCFLILKLYDHKVDKSKWEMPTGSNMGEAKPWKAIRVDLLRCPYGGFAFAMLQWTGSRMFRRDLRWYATDEKNMMLDNHALYDLTKKIFLPAKSEEEIFAHLGLEYLEPFERNA

SEQ ID NO: 3003 - DNA, 1587 bp, synthetic construct
  misc_feature 1..1587: note = Variant of terminal deoxynucleotidyltransferase
  source 1..1587: mol_type = other DNA
atgcaccatcatcatcatcatggcggtagcggcagccacggcattcgtaccatcgattcggacttcgggaagaaacagcagaaaaaaatggataaccacgatagttccgccacttatgaaatcaaatttcacgagtttgtgctgttcattctcgaagaaaaaatgggtgcgacgcgtcgtacttttctgacagatttagcccgcaagaaagggttccgcgtcgagaatgaactgaccgacgaagttacccacatcgtggcagaaaatctgtcacgctctgaagtattggcttggctgaaagaacacaagatggagaagaccaagcaattcgaactgctggatattagctggcttatcgaaagcatgaaagttggtaaaccggtggacaccaaggggaaataccagttggcggaatcgggtgagatgagtgcgaacccagatccgacagagggtcgtgaaaacgagctgcctcctactatgaagaccgtttctccgtatgcgtgtcaacgccgcaccaccctgaacaaccataatcaacgttttacggacgcactggaaattcttcgtgaaaattacgagttcaaacgcaacgatgatactgcgctggaatttcgtcgtgctatctccgtgctgaaaagccttccgtttgaggtacgtagcctgaaagacacggaaggattgccctggatcggtgatgaagtcaaagggattatggaagaaatcatcgaggtcgggaattcgcgtgaagtgcaggccgtgctcaatgatgagtggtatcaaagcttccaccgctttaagagtgtctttggagtgggggtgaagacagcagacaagtggtaccgtatgggtctgcgcaccctcgaggatgttcgttccagcaagaccctgaagttgaccccgatgcagaaagtaggtctgctgtattatgaagatcttgctcgcggcgttacgcgtgccgaagctgacgcgatttcgctgatggttcaggatgcagtcgcaactttcgacccggatgcgatcgtggagattgtcggtggatttcgtcgtgggaaacctcagggtcacgacgttgatctgcttatcagttctccgggagctgagaaagagcaagaagaccagctcctgcagaaagtgaccaatctgtggaagaaacaagggttgttgctgtacggtcgtctggaatggacccagtgggaagatgggggttcgccatccggtaaggctgacgagggtgacgcgggtgcgaaatgctttctgatcctcaaactttatgatcataaagtggacaaaagcaaatgggaaatgccgacgggttcgaacatgggcgaggccaaaccgtggaaagcaattcgcgtagatctgctgcgttgccccatcggcagttttgcgtttgcgatgttgcagtggaccggaagccgcatgttccgtcgtgatctgcgttggtacgccactgacgagaagaacatgatgctggacaatcattcgctgtatgacctgaccaagaaaatcttcctccctgctaaatcggaagaggaaattttcgcacatctggggcttgaatacctggaaccgttcgaacgtaacgca

SEQ ID NO: 3004 - protein, 529 aa, synthetic construct
  REGION 1..529: note = Variant of terminal deoxynucleotidyltransferase
MHHHHHHGGSGSHGIRTIDSDFGKKQQKKMDNHDSSATYEIKFHEFVLFILEEKMGATRRTFLTDLARKKGFRVENELTDEVTHIVAENLSRSEVLAWLKEHKMEKTKQFELLDISWLIESMKVGKPVDTKGKYQLAESGEMSANPDPTEGRENELPPTMKTVSPYACQRRTTLNNHNQRFTDALEILRENYEFKRNDDTALEFRRAISVLKSLPFEVRSLKDTEGLPWIGDEVKGIMEEIIEVGNSREVQAVLNDEWYQSFHRFKSVFGVGVKTADKWYRMGLRTLEDVRSSKTLKLTPMQKVGLLYYEDLARGVTRAEADAISLMVQDAVATFDPDAIVEIVGGFRRGKPQGHDVDLLISSPGAEKEQEDQLLQKVTNLWKKQGLLLYGRLEWTQWEDGGSPSGKADEGDAGAKCFLILKLYDHKVDKSKWEMPTGSNMGEAKPWKAIRVDLLRCPIGSFAFAMLQWTGSRMFRRDLRWYATDEKNMMLDNHSLYDLTKKIFLPAKSEEEIFAHLGLEYLEPFERNA

SEQ ID NO: 3005 - DNA, 1587 bp, synthetic construct
  misc_feature 1..1587: note = Variant of terminal deoxynucleotidyltransferase
  source 1..1587: mol_type = other DNA
atgcaccatcatcatcatcatggcggtagcggcagccacggcattcgtaccatcgattcggacttcgggaagaaacagcagaaaaaaatggataaccacgatagttccgccacttatgaaatcaaatttcacgagtttgtgctgttcattctcgaagaaaaaatgggtgcgacgcgtcgtacttttctgacagatttagcccgcaagaaagggttccgcgtcgagaatgaactgaccgacgaagttacccacatcgtggcagaaaatctgtcacgctctgaagtattggcttggctgaaagaacacaagatggagaagaccaagcaattcgaactgctggatattagctggcttatcgaaagcatgaaagttggtaaaccggtggacaccaaggggaaataccagttggcggaatcgggtgagatgagtgcgaacccagatccgacagagggtcgtgaaaacgagctgcctcctactatgaagaccgtttctccgtatgcgtgtcaacgccgcaccaccctgaacaaccataatcaacgttttacggacgcactggaaattcttcgtgaaaattacgagttcaaacgcaacgatgatactgcgctggaatttcgtcgtgctatctccgtgctgaaaagccttccgtttgaggtacgtagcctgaaagacacggaaggattgccctggatcggtgatgaagtcaaagggattatggaagaaatcatcgaggtcgggaattcgcgtgaagtgcaggccgtgctcaatgatgagtggtatcaaagcttccaccgctttaagagtgtctttggagtgggggtgaagacagcagacaagtggtaccgtatgggtctgcgcaccctcgaggatgttcgttccagcaagaccctgaagttgaccccgatgcagaaagtaggtctgctgtattatgaagatcttgctcgcggcgttacgcgtgccgaagctgacgcgatttctctgctggttcaggatgcagtcgcaactttcgacccggatgcgatcgtggagattgtcggtggatttcgtcgtgggaaacctcagggtcacgacgttgatctgcttatcagttctccgggagctgagaaagagcaagaagacgggctcctgcagaaagtgatgaatctgtggaagaaacaagggttgttgctgtacggtcgtctggaatggacccagtgggaagatgggggcctgccatccggcaaggctgacgagggtgacgcgggtgcgaaatgctttctgatcctcaaactttatgatcataaagtggacaaaagcaaatgggaaatgccgacgggttcgaacatgggcgaggccaaaccgtggaaagcaattcgcgtagatctgctgcgttgcccctacggcggttttgcgtttgcgatgttgcaatggaccggaagccgcatgttccgtcgtgatctgcgttggtacgccactgacgagaagaacatgatgctggacaatcatgcgctgtatgacctgaccaagaaaatcttcctccctgctaaatcggaagaggaaattttcgcacatctggggcttgaatacctggaaccgttcgaacgtaacgca

SEQ ID NO: 3006 - protein, 529 aa, synthetic construct
  REGION 1..529: note = Variant of terminal deoxynucleotidyltransferase
MHHHHHHGGSGSHGIRTIDSDFGKKQQKKMDNHDSSATYEIKFHEFVLFILEEKMGATRRTFLTDLARKKGFRVENELTDEVTHIVAENLSRSEVLAWLKEHKMEKTKQFELLDISWLIESMKVGKPVDTKGKYQLAESGEMSANPDPTEGRENELPPTMKTVSPYACQRRTTLNNHNQRFTDALEILRENYEFKRNDDTALEFRRAISVLKSLPFEVRSLKDTEGLPWIGDEVKGIMEEIIEVGNSREVQAVLNDEWYQSFHRFKSVFGVGVKTADKWYRMGLRTLEDVRSSKTLKLTPMQKVGLLYYEDLARGVTRAEADAISLLVQDAVATFDPDAIVEIVGGFRRGKPQGHDVDLLISSPGAEKEQEDGLLQKVMNLWKKQGLLLYGRLEWTQWEDGGLPSGKADEGDAGAKCFLILKLYDHKVDKSKWEMPTGSNMGEAKPWKAIRVDLLRCPYGGFAFAMLQWTGSRMFRRDLRWYATDEKNMMLDNHALYDLTKKIFLPAKSEEEIFAHLGLEYLEPFERNA

SEQ ID NO: 3007 - DNA, 1587 bp, synthetic construct
  misc_feature 1..1587: note = Variant of terminal deoxynucleotidyltransferase
  source 1..1587: mol_type = other DNA
atgcaccatcatcatcatcatggcggtagcggcagccacggcattcgtaccatcgattcggacttcgggaagaaacagcagaaaaaaggcgataaccacgatagttccgccacttatgaaatcaaatttcacgagtttgtgctgttcattctcgaagaaaaaatgggtgcgacgcgtcgtacttttctgacagatttagcccgcaagaaagggttccgcgtcgagaatgaactgaccgacgaagttacccacatcgtggcagaaaatctgtcacgctctgaagtattggcttggctgaaagaacacaagatggagaagaccaagcaattcgaactgctggatattagctggcttatcgaaagcatgaaagttggtaaaccggtggacaccaaggggaaataccagttggcggaatcgggtgagatgagtgcgaacccagatccgacagagggtcgtgaaaacgagctgcctcctactatgaagaccgtttctccgtatgcgtgtcaacgccgcaccaccctgaacaaccataatcaacgttttacggacgcactggaaattcttcgtgaaaattacgagttcaaacgcaacgatgatactgcgctggaatttcgtcgtgctatctccgtgctgaaaagccttccgtttgaggtacgtagcctgaaagacacggaaggattgccctggatcggtgatgaagtcaaagggattatggaagaaatcatcgaggtcgggaattcgcgtgaagtgcaggccgtgctcaatgatgagtggtatcaaagcttccaccgctttaagagtgtctttggagtgggggtgaagacagcagacaagtggtaccgtatgggtctgcgcaccctcgaggatgttcgttccagcaagaccctgaagttgaccccgatgcagaaagtaggtctgctgtattatgaagatcttgctcgcggcgttacgcgtgccgaagctgacgcgatttggctgatggttcaggatgcagtcgcaactttcgacccggatgcgatcgtggagattgtcggtggatttcgtcgtgggaaacctcagggtcacgacgttgatctgcttatcagttctccgggagctgagaaagagcaagaagaccagctcctgcagaaagtgatgaatctgtggaagaaacaagggttgttgctgtacggtcgtctggaatggacccagtgggaagatgggggttcggactccggtaaggctgacgagggtgacgcgggtgcgaaatgctttctgatcctcaaactttatgatcataaagtgcgtaaaagcaaatgggaaatgccgacgggttcgaacatgggcgaggccaaaccgtggaaagcaattcgcgtagatctgctgcgttgcccctacggcggttttgcgtttgcgatgttgcagtggaccggaagccgcatgttccgtcgtgatctgcgttggtacgccactgacgagaagaacatgatgctggacaatcattcgctgtatgacctgaccaagaaaatcttcctccctgctaaatcggaagaggaaattttcgcacatctggggcttgaatacctggaaccgttcgaacgtaacgca

SEQ ID NO: 3008 - protein, 529 aa, synthetic construct
  REGION 1..529: note = Variant of terminal deoxynucleotidyltransferase
MHHHHHHGGSGSHGIRTIDSDFGKKQQKKGDNHDSSATYEIKFHEFVLFILEEKMGATRRTFLTDLARKKGFRVENELTDEVTHIVAENLSRSEVLAWLKEHKMEKTKQFELLDISWLIESMKVGKPVDTKGKYQLAESGEMSANPDPTEGRENELPPTMKTVSPYACQRRTTLNNHNQRFTDALEILRENYEFKRNDDTALEFRRAISVLKSLPFEVRSLKDTEGLPWIGDEVKGIMEEIIEVGNSREVQAVLNDEWYQSFHRFKSVFGVGVKTADKWYRMGLRTLEDVRSSKTLKLTPMQKVGLLYYEDLARGVTRAEADAIWLMVQDAVATFDPDAIVEIVGGFRRGKPQGHDVDLLISSPGAEKEQEDQLLQKVMNLWKKQGLLLYGRLEWTQWEDGGSDSGKADEGDAGAKCFLILKLYDHKVRKSKWEMPTGSNMGEAKPWKAIRVDLLRCPYGGFAFAMLQWTGSRMFRRDLRWYATDEKNMMLDNHSLYDLTKKIFLPAKSEEEIFAHLGLEYLEPFERNA

SEQ ID NO: 3009 - DNA, 1587 bp, synthetic construct
  misc_feature 1..1587: note = Variant of terminal deoxynucleotidyltransferase
  source 1..1587: mol_type = other DNA
atgcaccatcatcatcatcatggcggtagcggcagccacggcattcgtaccatcgattcggacttcgggaagaaacagcagaaaaaaggcgataaccacgatagttccgccacttatgaaatcaaatttcacgagtttgtgctgttcattctcgaagaaaaaatgggtgcgacgcgtcgtacttttctgacagatttagcccgcaagaaagggttccgcgtcgagaatgaactgaccgacgaagttacccacatcgtggcagaaaatctgtcacgctctgaagtattggcttggctgaaagaacacaagatggagaagaccaagcaattcgaactgctggatattagctggcttatcgaaagcatgaaagttggtaaaccggtggacaccaaggggaaataccagttggcggaatcgggtgagatgagtgcgaacccagatccgacagagggtcgtgaaaacgagctgcctcctactatgaagaccgtttctccgtatgcgtgtcaacgccgcaccaccctgaacaaccataatcaacgttttacggacgcactggaaattcttcgtgaaaattacgagttcaaacgcaacgatgatactgcgctggaatttcgtcgtgctatctccgtgctgaaaagccttccgtttgaggtacgtagcctgaaagacacggaaggattgccctggatcggtgatgaagtcaaagggattatggaagaaatcatcgaggtcgggaattcgcgtgaagtgcaggccgtgctcaatgatgagtggtatcaaagcttccaccgctttaagagtgtctttggagtgggggtgaagacagcagacaagtggtaccgtatgggtctgcgcaccctcgaggatgttcgttccagcaagaccctgaagttgaccccgatgcagaaagtaggtctgctgtattatgaagatcttgctcgcggcgttacgcgtgccgaagctgacgcgatttctctgctggttcaggatgcagtcgcaactttcgacccggatgcgatcgtggagattgtcggtggatttcgtcgtgggaaacctcaaggtcacgacgttgatctgcttatcagttctccgggagctgagaaagagcaagaagaccaactcctgcagaaagtgaccaatctgtggaagaaacaagggttgttgctgtacggtcgtctggaatggacccagtgggaagatgggggcgaaccatccggcaaggctgacgagggtgacgcgggtgcgaaatgctttctgatcctcaaactttatgatcataaagtggacaaaagcaaatgggaaatgccgacgggttcgaacaagggcgaggccaaaccgtggaaagcaattcgcgtagatctgctgcgttgcccctacccgggttttgcgtttgcgatgttgcaatggaccggaagccgcatgttccgtcgtgatctgcgttggtacgccactgacgagaagaacatgatgctggacaatcatgcgctgtatgacctgaccaagaaaatcttcctccctgctaaatcggaagaggaaattttcgcacatctggggcttgaatacctggaaccgttcgaacgtaacgca

SEQ ID NO: 3010 - protein, 529 aa, synthetic construct
  REGION 1..529: note = Variant of terminal deoxynucleotidyltransferase
MHHHHHHGGSGSHGIRTIDSDFGKKQQKKGDNHDSSATYEIKFHEFVLFILEEKMGATRRTFLTDLARKKGFRVENELTDEVTHIVAENLSRSEVLAWLKEHKMEKTKQFELLDISWLIESMKVGKPVDTKGKYQLAESGEMSANPDPTEGRENELPPTMKTVSPYACQRRTTLNNHNQRFTDALEILRENYEFKRNDDTALEFRRAISVLKSLPFEVRSLKDTEGLPWIGDEVKGIMEEIIEVGNSREVQAVLNDEWYQSFHRFKSVFGVGVKTADKWYRMGLRTLEDVRSSKTLKLTPMQKVGLLYYEDLARGVTRAEADAISLLVQDAVATFDPDAIVEIVGGFRRGKPQGHDVDLLISSPGAEKEQEDQLLQKVTNLWKKQGLLLYGRLEWTQWEDGGEPSGKADEGDAGAKCFLILKLYDHKVDKSKWEMPTGSNKGEAKPWKAIRVDLLRCPYPGFAFAMLQWTGSRMFRRDLRWYATDEKNMMLDNHALYDLTKKIFLPAKSEEEIFAHLGLEYLEPFERNA

SEQ ID NO: 3011 - DNA, 1587 bp, synthetic construct
  misc_feature 1..1587: note = Variant of terminal deoxynucleotidyltransferase
  source 1..1587: mol_type = other DNA
atgcaccatcatcatcatcatggcggtagcggcagccacggcattcgtaccatcgattcggacttcgggaagaaacagcagaaaaaaatggataaccacgatagttccgccacttatgaaatcaaatttcacgagtttgtgctgttcattctcgaagaaaaaatgggtgcgacgcgtcgtacttttctgacagatttagcccgcaagaaagggttccgcgtcgagaatgaactgaccgacgaagttacccacatcgtggcagaaaatctgtcacgctctgaagtattggcttggctgaaagaacacaagatggagaagaccaagcaattcgaactgctggatattagctggcttatcgaaagcatgaaagttggtaaaccggtggacaccaaggggaaataccagttggcggaatcgggtgagatgagtgcgaacccagatccgacagagggtcgtgaaaacgagctgcctcctactatgaagaccgtttctccgtatgcgtgtcaacgccgcaccaccctgaacaaccataatcaacgttttacggacgcactggaaattcttcgtgaaaattacgagttcaaacgcaacgatgataatgcgctggaatttcgtcgtgctatctccgtgctgaaaagccttccgtttgaggtacgtagcctgaaagacacggaaggattgccctggatcggtgatgaagtcaaagggattatggaagaaatcatcgaggtcgggaattcgcgtgaagtgcaggccgtgctcaatgatgagtggtatcaaagcttccaccgctttaagagtgtctttggagtgggggtgaagacagcagacaagtggtaccgtatgggtctgcgcaccctcgaggatgttcgttccagcaagaccctgaagttgaccccgatgcagaaagtaggtctgctgtattatgaagatcttgctcgcggcgttacgcgtgccgaagctgacgcgatttctctgctggttcaggatgcagtcgcaactttcgacccggatgcgatcgtggagattgtcggtggatttcgtcgtgggaaacctcagggtcacgacgttgatctgcttatcagttctccgggagctgagaaagagcaagaagacgggctcctgcagaaagtgatgaatctgtggaagaaacaagggttgttgctgtacggtcgtctggaatggacccagtgggaagatgggggttcgccatccggtaaggctgacgagggtgacgcgggtgcgaaatgctttctgatcctcaaactttatgatcataaagtggacaaaagcaaatgggaaatgccgacgggttcgaacatgggcgaggccaaaccgtggaaagcaattcgcgtagatctgctgcgttgcccctacggcggttttgcgtttgcgatgttgcagtggaccggaagccgcatgttccgtcgtgatctgcgttggtacgccactgacgagaagaacatgatgctggacaatcatgcgctgtatgacctgaccaagaaaatcttcctccctgctaaatcggaagaggaaattttcgcacatctggggcttgaatacctggaaccgttcgaacgtaacgca

SEQ ID NO: 3012 - protein, 529 aa, synthetic construct
  REGION 1..529: note = Variant of terminal deoxynucleotidyltransferase
MHHHHHHGGSGSHGIRTIDSDFGKKQQKKMDNHDSSATYEIKFHEFVLFILEEKMGATRRTFLTDLARKKGFRVENELTDEVTHIVAENLSRSEVLAWLKEHKMEKTKQFELLDISWLIESMKVGKPVDTKGKYQLAESGEMSANPDPTEGRENELPPTMKTVSPYACQRRTTLNNHNQRFTDALEILRENYEFKRNDDNALEFRRAISVLKSLPFEVRSLKDTEGLPWIGDEVKGIMEEIIEVGNSREVQAVLNDEWYQSFHRFKSVFGVGVKTADKWYRMGLRTLEDVRSSKTLKLTPMQKVGLLYYEDLARGVTRAEADAISLLVQDAVATFDPDAIVEIVGGFRRGKPQGHDVDLLISSPGAEKEQEDGLLQKVMNLWKKQGLLLYGRLEWTQWEDGGSPSGKADEGDAGAKCFLILKLYDHKVDKSKWEMPTGSNMGEAKPWKAIRVDLLRCPYGGFAFAMLQWTGSRMFRRDLRWYATDEKNMMLDNHALYDLTKKIFLPAKSEEEIFAHLGLEYLEPFERNA

SEQ ID NO: 3013 - DNA, 1587 bp, synthetic construct
  misc_feature 1..1587: note = Variant of terminal deoxynucleotidyltransferase
  source 1..1587: mol_type = other DNA
atgcaccatcatcatcatcatggcggtagcggcagccacggcattcgtaccatcgattcggacttcgggaagaaacagcagaaaaaaatggataaccacgatagttccgccacttatgaaatcaaatttcacgagtttgtgctgttcattctcgaagaaaaaatgggtgcgacgcgtcgtacttttctgacagatttagcccgcaagaaagggttccgcgtcgagaatgaactgaccgacgaagttacccacatcgtggcagaaaatctgtcacgctctgaagtattggcttggctgaaagaacacaagatggagaagaccaagcaattcgaactgctggatattagctggcttatcgaaagcatgaaagttggtaaaccggtggacaccaaggggaaataccagttggcggaatcgggtgagatgagtgcgaacccagatccgacagagggtcgtgaaaacgagctgcctcctactatgaagaccgtttctccgtatgcgtgtcaacgccgcaccaccctgaacaaccataatcaacgttttacggacgcactggaaattcttcgtgaaaattacgagttcaaacgcaacgatgatactgcgctggaatttcgtcgtgctatctccgtgctgaaaagccttccgtttgaggtacgtagcctgaaagacacggaaggattgccctggatcggtgatgaagtcaaagggattatggaagaaatcatcgaggtcgggaattcgcgtgaagtgcaggccgtgctcaatgatgagtggtatcaaagcttccaccgctttaagagtgtctttggagtgggggtgaagacagcagacaagtggtaccgtatgggtctgcgcaccctcgaggatgttcgttccagcaagaccctgaagttgaccccgatgcagaaagtaggtctgctgtattatgaagatcttgctcgcggcgttacgcgtgccgaagctgacgcgatttctctgctggttcaggatgcagtcgcaactttcgacccggatgcgatcgtggagattgtcggtggatttcgtcgtgggaaacctcagggtcacgacgttgatctgcttatcagttctccgggagctgagaaagaggatgaagaccagctcctgcagaaagtgaccaatctgtggaagaaacaagggttgttgctgtacggtcgtctggaatggacccagtgggaagatgggggttcgccatccggtaaggctgacgagggtgacgcgggtgcgaaatgctttctgatcctcaaactttatgatcataaagtggacaaaagcaaatgggaaatgccgacgggttcgaacatgggcgaggccaaaccgtggaaagcaattcgcgtagatctgctgcgttgcccctacggcggttttgcgtttgcgatgttgcagtggaccggaagccgcatgttccgtcgtgatctgcgttggtacgccactgacgagaagaacatgatgctggacaatcatgcgctgtatgacctgaccaagaaaatcttcctccctgctaaatcggaagaggaaattttcgcacatctggggcttgaatacctggaaccgttcgaacgtaacgca

SEQ ID NO: 3014 - protein, 529 aa, synthetic construct
  REGION 1..529: note = Variant of terminal deoxynucleotidyltransferase
MHHHHHHGGSGSHGIRTIDSDFGKKQQKKMDNHDSSATYEIKFHEFVLFILEEKMGATRRTFLTDLARKKGFRVENELTDEVTHIVAENLSRSEVLAWLKEHKMEKTKQFELLDISWLIESMKVGKPVDTKGKYQLAESGEMSANPDPTEGRENELPPTMKTVSPYACQRRTTLNNHNQRFTDALEILRENYEFKRNDDTALEFRRAISVLKSLPFEVRSLKDTEGLPWIGDEVKGIMEEIIEVGNSREVQAVLNDEWYQSFHRFKSVFGVGVKTADKWYRMGLRTLEDVRSSKTLKLTPMQKVGLLYYEDLARGVTRAEADAISLLVQDAVATFDPDAIVEIVGGFRRGKPQGHDVDLLISSPGAEKEDEDQLLQKVTNLWKKQGLLLYGRLEWTQWEDGGSPSGKADEGDAGAKCFLILKLYDHKVDKSKWEMPTGSNMGEAKPWKAIRVDLLRCPYGGFAFAMLQWTGSRMFRRDLRWYATDEKNMMLDNHALYDLTKKIFLPAKSEEEIFAHLGLEYLEPFERNA

SEQ ID NO: 3015 - DNA, 1587 bp, synthetic construct
  misc_feature 1..1587: note = Variant of terminal deoxynucleotidyltransferase
  source 1..1587: mol_type = other DNA
atgcaccatcatcatcatcatggcggtagcggcagccacggcattcgtaccatcgattcggacttcgggaagaaacagcagaaaaaaatggataaccacgatagttccgccacttatgaaatcaaatttcacgagtttgtgctgttcattctcgaagaaaaaatgggtgcgacgcgtcgtacttttctgacagatttagcccgcaagaaagggttccgcgtcgagaatgaactgaccgacgaagttacccacatcgtggcagaaaatctgtcacgctctgaagtattggcttggctgaaagaacacaagatggagaagaccaagcaattcgaactgctggatattagctggcttatcgaaagcatgaaagttggtaaaccggtggacaccaaggggaaataccagttggcggaatcgggtgagatgagtgcgaacccagatccgacagagggtcgtgaaaacgagctgcctcctactatgaagaccgtttctccgtatgcgtgtcaacgccgcaccaccctgaacaaccataatcaacgttttacggacgcactggaaattcttcgtgaaaattacgagttcaaacgcaacgatgatactgcgctggaatttcgtcgtgctatctccgtgctgaaaagccttccgtttgaggtacgtagcctgaaagacacggaaggattgccctggatcggtgatgaagtcaaagggattatggaagaaatcatcgaggtcgggaattcgcgtgaagtgcaggccgtgctcaatgatgagtggtatcaaagcttccaccgctttaagagtgtctttggagtgggggtgaagacagcagacaagtggtaccgtatgggtctgcgcaccctcgaggatgttcgttccagcaagaccctgaagttgaccccgatgcagaaagtaggtctgctgtattatgaagatcttgctcgcggcgttacgcgtgccgaagctgacgcgatttctctgctggttcaggatgcagtcgcaactttcgacccggatgcgatcgtggagattgtcggtggatttcgtcgtgggaaacctcagggtcacgacgttgatctgcttatcagttctccgggagctgataaagagcaagaagaccagctcctgcagaaagtgaccaatctgtggaagaaacaagggttgttgctgtacggtcgtctggaatggacccagtgggaagatgggggttcgccatccggtaaggctgacgagggtgacgcgggtgcgaaatgctttctgatcctcaaactttatgatcataaagtggacaaaagcaaatgggaaatgccgacgggttcgaacatgggcgaggccaaaccgtggaaagcaattcgcgtagatctgctgcgttgcccctacggcggttttgcgtttgcgatgttgcagtggaccggaagccgcatgttccgtcgtgatctgcgttggtacgccactgacgagaagaacatgatgctggacaatcatgcgctgtatgacctgaccaagaaaatcttcctccctgctaaatcggaagaggaaattttcgcacatctggggcttgaatacctggaaccgttcgaacgtaacgca

SEQ ID NO: 3016 - protein, 529 aa, synthetic construct
  REGION 1..529: note = Variant of terminal deoxynucleotidyltransferase
MHHHHHHGGSGSHGIRTIDSDFGKKQQKKMDNHDSSATYEIKFHEFVLFILEEKMGATRRTFLTDLARKKGFRVENELTDEVTHIVAENLSRSEVLAWLKEHKMEKTKQFELLDISWLIESMKVGKPVDTKGKYQLAESGEMSANPDPTEGRENELPPTMKTVSPYACQRRTTLNNHNQRFTDALEILRENYEFKRNDDTALEFRRAISVLKSLPFEVRSLKDTEGLPWIGDEVKGIMEEIIEVGNSREVQAVLNDEWYQSFHRFKSVFGVGVKTADKWYRMGLRTLEDVRSSKTLKLTPMQKVGLLYYEDLARGVTRAEADAISLLVQDAVATFDPDAIVEIVGGFRRGKPQGHDVDLLISSPGADKEQEDQLLQKVTNLWKKQGLLLYGRLEWTQWEDGGSPSGKADEGDAGAKCFLILKLYDHKVDKSKWEMPTGSNMGEAKPWKAIRVDLLRCPYGGFAFAMLQWTGSRMFRRDLRWYATDEKNMMLDNHALYDLTKKIFLPAKSEEEIFAHLGLEYLEPFERNA

SEQ ID NO: 3017 - DNA, 1587 bp, synthetic construct
  misc_feature 1..1587: note = Variant of terminal deoxynucleotidyltransferase
  source 1..1587: mol_type = other DNA
atgcaccatcatcatcatcatggcggtagcggcagccacggcattcgtaccatcgattcggacttcgggaagaaacagcagaaaaaaatggataaccacgatagttccgccacttatgaaatcaaatttcacgagtttgtgctgttcattctcgaagaaaaaatgggtgcgacgcgtcgtacttttctgacagatttagcccgcaagaaagggttccgcgtcgagaatgaactgaccgacgaagttacccacatcgtggcagaaaatctgtcacgctctgaagtattggcttggctgaaagaacacaagatggagaagaccaagcaattcgaactgctggatattagctggcttatcgaaagcatgaaagttggtaaaccggtggacaccaaggggaaataccagttggcggaatcgggtgagatgagtgcgaacccagatccgacagagggtcgtgaaaacgagctgcctcctactatgaagaccgtttctccgtatgcgtgtcaacgccgcaccaccctgaacaaccataatcaacgttttacggacgcactggaaattcttcgtgaaaattacgagttcaaacgcaacgatgatactgcgctggaatttcgtcgtgctatctccgtgctgaaaagccttccgtttgaggtacgtagcctgaaagacacggaaggattgccctggatcggtgatgaagtcaaagggattatggaagaaatcatcgaggtcgggaattcgcgtgaagtgcaggccgtgctcaatgatgagtggtatcaaagcttccaccgctttaagagtgtctttggagtgggggtgaagacagcagacaagtggtaccgtatgggtctgcgcaccctcgaggatgttcgttccagcaagaccctgaagttgaccccgatgcagaaagtaggtctgctgtattatgaagatcttgctcgcggcgttacgcgtgccgaagctgacgcgatttctctgctggttcaggatgcagtcgcaactttcgacccggatgcgatcgtggagattgtcggtggatttcgtcgtgggaaacctcagggtcacgacgttgatctgcttatcagttctccgggagctgagaaagagcaagaagaccagctcctgcagaaagtgaccaatctgtggaagaaacaagggttgttgctgtacggtcgtctggaatggacccagtgggaagatgggggttcgccatccggtaaggctgacgagggtgacgcgggtgcgaaatgctttctgatcctcaaactttatgatcataaagtggacaaaagcaaaggggaaatgccgacgggttcgaacatgggcgaggccaaaccgtggaaagcaattcgcgtagatctgctgcgttgcccctacggcggttttgcgtttgcgatgttgcagtggaccggaagccgcatgttccgtcgtgatctgcgttggtacgccactgacgagaagaacatgatgctggacaatcatgcgctgtatgacctgaccaagaaaatcttcctccctgctaaatcggaagaggaaattttcgcacatctggggcttgaatacctggaaccgttcgaacgtaacgca

SEQ ID NO: 3018 - protein, 529 aa, synthetic construct
  REGION 1..529: note = Variant of terminal deoxynucleotidyltransferase
MHHHHHHGGSGSHGIRTIDSDFGKKQQKKMDNHDSSATYEIKFHEFVLFILEEKMGATRRTFLTDLARKKGFRVENELTDEVTHIVAENLSRSEVLAWLKEHKMEKTKQFELLDISWLIESMKVGKPVDTKGKYQLAESGEMSANPDPTEGRENELPPTMKTVSPYACQRRTTLNNHNQRFTDALEILRENYEFKRNDDTALEFRRAISVLKSLPFEVRSLKDTEGLPWIGDEVKGIMEEIIEVGNSREVQAVLNDEWYQSFHRFKSVFGVGVKTADKWYRMGLRTLEDVRSSKTLKLTPMQKVGLLYYEDLARGVTRAEADAISLLVQDAVATFDPDAIVEIVGGFRRGKPQGHDVDLLISSPGAEKEQEDQLLQKVTNLWKKQGLLLYGRLEWTQWEDGGSPSGKADEGDAGAKCFLILKLYDHKVDKSKGEMPTGSNMGEAKPWKAIRVDLLRCPYGGFAFAMLQWTGSRMFRRDLRWYATDEKNMMLDNHALYDLTKKIFLPAKSEEEIFAHLGLEYLEPFERNA

SEQ ID NO: 3019 - DNA, 1587 bp, synthetic construct
  misc_feature 1..1587: note = Variant of terminal deoxynucleotidyltransferase
  source 1..1587: mol_type = other DNA
atgcaccatcatcatcatcatggcggtagcggcagccacggcattcgtaccatcgattcggacttcgggaagaaacagcagaaaaaaatggataaccacgatagttccgccacttatgaaatcaaatttcacgagtttgtgctgttcattctcgaagaaaaaatgggtgcgacgcgtcgtacttttctgacagatttagcccgcaagaaagggttccgcgtcgagaatgaactgaccgacgaagttacccacatcgtggcagaaaatctgtcacgctctgaagtattggcttggctgaaagaacacaagatggagaagaccaagcaattcgaactgctggatattagctggcttatcgaaagcatgaaagttggtaaaccggtggacaccaaggggaaataccagttggcggaatcgggtgagatgagtgcgaacccagatccgacagagggtcgtgaaaacgagctgcctcctactatgaagaccgtttctccgtatgcgtgtcaacgccgcaccaccctgaacaaccataatcaacgttttacggacgcactggaaattcttcgtgaaaattacgagttcaaacgcaacgatgatactgcgctggaatttcgtcgtgctatctccgtgctgaaaagccttccgtttgaggtacgtagcctgaaagacacggaaggattgccctggatcggtgatgaagtcaaagggattatggaagaaatcatcgaggtcgggaattcgcgtgaagtgcaggccgtgctcaatgatgagtggtatcaaagcttccaccgctttaagagtgtctttggagtgggggtgaagacagcagacaagtggtaccgtatgggtctgcgcaccctcgaggatgttcgttccagcaagaccctgaagttgaccccgatgcagaaagtaggtctgctgtattatgaagatcttgctcgcggcgttacgcgtgccgaagctgacgcgatttctctgctggttcaggatgcagtcgcaactttcgacccggatgcgatcgtggagattgtcggtggatttcgtcgtgggaaacctcagggtcacgacgttgatctgcttatcagttctccgggagctgagaaagagcaagaagaccagctcctgcagaaagtgaccaatctgtggaagaaacaagggttgttgctgtacggtcgtctggaatggacccagtgggaagatgggggttcgccatccggtaaggctgacgagggtgacgcgggtgcgaaatgctttctgatcctcaaactttatgatcataaagtggacaaaagcaaatgggaaatgccgacgggttcgaacatgggcgaggccaaaccgtggaaagcaattcgcgtagatctgctgcgttgcccctacggcggttttgcgtttgcgatgttgcagtggaccggaagccgcatgttccgtcgtgatctgcgttggtacgccactgacgagaagaacatgatgctggacaatcatgcgctgtatgacctgaccaagaaaacgttcctccctgctaaatcggaagaggaaattttcgcacatctggggcttgaatacctggaaccgttcgaacgtaacgca

SEQ ID NO: 3020 - protein, 529 aa, synthetic construct
  REGION 1..529: note = Variant of terminal deoxynucleotidyltransferase
MHHHHHHGGSGSHGIRTIDSDFGKKQQKKMDNHDSSATYEIKFHEFVLFILEEKMGATRRTFLTDLARKKGFRVENELTDEVTHIVAENLSRSEVLAWLKEHKMEKTKQFELLDISWLIESMKVGKPVDTKGKYQLAESGEMSANPDPTEGRENELPPTMKTVSPYACQRRTTLNNHNQRFTDALEILRENYEFKRNDDTALEFRRAISVLKSLPFEVRSLKDTEGLPWIGDEVKGIMEEIIEVGNSREVQAVLNDEWYQSFHRFKSVFGVGVKTADKWYRMGLRTLEDVRSSKTLKLTPMQKVGLLYYEDLARGVTRAEADAISLLVQDAVATFDPDAIVEIVGGFRRGKPQGHDVDLLISSPGAEKEQEDQLLQKVTNLWKKQGLLLYGRLEWTQWEDGGSPSGKADEGDAGAKCFLILKLYDHKVDKSKWEMPTGSNMGEAKPWKAIRVDLLRCPYGGFAFAMLQWTGSRMFRRDLRWYATDEKNMMLDNHALYDLTKKTFLPAKSEEEIFAHLGLEYLEPFERNA

SEQ ID NO: 3021 - DNA, 1587 bp, synthetic construct
  misc_feature 1..1587: note = Variant of terminal deoxynucleotidyltransferase
  source 1..1587: mol_type = other DNA
atgcaccatcatcatcatcatggcggtagcggcagccacggcattcgtaccatcgattcggacttcgggaagaaacagcagaaaaaaatggataaccacgatagttccgccacttatgaaatcaaatttcacgagtttgtgctgttcattctcgaagaaaaaatgggtgcgacgcgtcgtacttttctgacagatttagcccgcaagaaagggttccgcgtcgagaatgaactgaccgacgaagttacccacatcgtggcagaaaatctgtcacgctctgaagtattggcttggctgaaagaacacaagatggagaagaccaagcaattcgaactgctggatattagctggcttatcgaaagcatgaaagttggtaaaccggtggacaccaaggggaaataccagttggcggaatcgggtgagatgagtgcgaacccagatccgacagagggtcgtgaaaacgagctgcctcctactatgaagaccgtttctccgtatgcgtgtcaacgccgcaccaccctgaacaaccataatcaacgttttacggacgcactggaaattcttcgtgaaaattacgagttcaaacgcaacgatgatactgcgctggaatttcgtcgtgctatctccgtgctgaaaagccttccgtttgaggtacgtagcctgaaagacacggaaggattgccctggatcggtgatgaagtcaaagggattatggaagaaatcatcgaggtcgggaattcgcgtgaagtgcaggccgtgctcaatgatgagtggtatcaaagcttccaccgctttaagagtgtctttggagtgggggtgaagacagcagacaagtggtaccgtatgggtctgcgcaccctcgaggatgttcgttccagcaagaccctgaagttgaccccgatgcagaaagtaggtctgctgtattatgaagatcttgctcgcggcgttacgcgtgccgaagctgacgcgatttctctgctggttcaggatgcagtcgcaactttcgacccggatgcgatcgtggagattgtcggtggatttcgtcgtgggaaacctcagggtcacgacgttgatctgcttatcagttctccgggagctgagaaagagcaagaagaccagctcctgcagaaagtgaccaatctgtggaagaaacaagggttgttgctgtacggtcgtctggaatggacccagtgggaagatgggggttcgccatccggtaaggctgacgagggtgacgcgggtgcgaaatgctttctgatcctcaaactttatgatcataaagtggacaaaagcaaagaggaaatgccgacgggttcgaacatgggcgaggccaaaccgtggaaagcaattcgcgtagatctgctgcgttgcccctacggcggttttgcgtttgcgatgttgcagtggaccggaagccgcatgttccgtcgtgatctgcgttggtacgccactgacgagaagaacatgatgctggacaatcatgcgctgtatgacctgaccaagaaaatcttcctccctgctaaatcggaagaggaaattttcgcacatctggggcttgaatacctggaaccgttcgaacgtaacgca

SEQ ID NO: 3022 - protein, 529 aa, synthetic construct
  REGION 1..529: note = Variant of terminal deoxynucleotidyltransferase
MHHHHHHGGSGSHGIRTIDSDFGKKQQKKMDNHDSSATYEIKFHEFVLFILEEKMGATRRTFLTDLARKKGFRVENELTDEVTHIVAENLSRSEVLAWLKEHKMEKTKQFELLDISWLIESMKVGKPVDTKGKYQLAESGEMSANPDPTEGRENELPPTMKTVSPYACQRRTTLNNHNQRFTDALEILRENYEFKRNDDTALEFRRAISVLKSLPFEVRSLKDTEGLPWIGDEVKGIMEEIIEVGNSREVQAVLNDEWYQSFHRFKSVFGVGVKTADKWYRMGLRTLEDVRSSKTLKLTPMQKVGLLYYEDLARGVTRAEADAISLLVQDAVATFDPDAIVEIVGGFRRGKPQGHDVDLLISSPGAEKEQEDQLLQKVTNLWKKQGLLLYGRLEWTQWEDGGSPSGKADEGDAGAKCFLILKLYDHKVDKSKEEMPTGSNMGEAKPWKAIRVDLLRCPYGGFAFAMLQWTGSRMFRRDLRWYATDEKNMMLDNHALYDLTKKIFLPAKSEEEIFAHLGLEYLEPFERNA

SEQ ID NO: 3023 - DNA, 1587 bp, synthetic construct
  misc_feature 1..1587: note = Variant of terminal deoxynucleotidyltransferase
  source 1..1587: mol_type = other DNA
atgcaccatcatcatcatcatggcggtagcggcagccacggcattcgtaccatcgattcggacttcgggaagaaacagcagaaaaaaatggataaccacgatagttccgccacttatgaaatcaaatttcacgagtttgtgctgttcattctcgaagaaaaaatgggtgcgacgcgtcgtacttttctgacagatttagcccgcaagaaagggttccgcgtcgagaatgaactgaccgacgaagttacccacatcgtggcagaaaatctgtcacgctctgaagtattggcttggctgaaagaacacaagatggagaagaccaagcaattcgaactgctggatattagctggcttatcgaaagcatgaaagttggtaaaccggtggacaccaaggggaaataccagttggcggaatcgggtgagatgagtgcgaacccagatccgacagagggtcgtgaaaacgagctgcctcctactatgaagaccgtttctccgtatgcgtgtcaacgccgcaccaccctgaacaaccataatcaacgttttacggacgcactggaaattcttcgtgaaaattacgagttcaaacgcaacgatgatactgcgctggaatttcgtcgtgctatctccgtgctgaaaagccttccgtttgaggtacgtagcctgaaagacacggaaggattgccctggatcggtgatgaagtcaaagggattatggaagaaatcatcgaggtcgggaattcgcgtgaagtgcaggccgtgctcaatgatgagtggtatcaaagcttccaccgctttaagagtgtctttggagtgggggtgaagacagcagacaagtggtaccgtatgggtctgcgcaccctcgaggatgttcgttccagcaagaccctgaagttgaccccgatgcagaaagtaggtctgctgtattatgaagatcttgctcgcggcgttacgcgtgccgaagctgacgcgatttctctgctggttcaggatgcagtcgcaactttcgacccggatgcgatcgtggagattgtcggtggatttcgtcgtgggaaacctcagggtcacgacgttgatctgcttatcagttctccgggagctgagaaagagcaagaagaccagctcctgcagaaagtgaccaatctgtggaagaaacaagggttgttgctgtacggtcgtctggaatggacccagtgggaagatgggggttcgccatccggtaaggctgacgagggtgacgcgggtgcgaaatgctttctgatcctcaaactttatgatcataaagtggacaaaagcaaaagtgaaatgccgacgggttcgaacatgggcgaggccaaaccgtggaaagcaattcgcgtagatctgctgcgttgcccctacggcggttttgcgtttgcgatgttgcagtggaccggaagccgcatgttccgtcgtgatctgcgttggtacgccactgacgagaagaacatgatgctggacaatcatgcgctgtatgacctgaccaagaaaatcttcctccctgctaaatcggaagaggaaattttcgcacatctggggcttgaatacctggaaccgttcgaacgtaacgca

SEQ ID NO: 3024 - protein, 529 aa, synthetic construct
  REGION 1..529: note = Variant of terminal deoxynucleotidyltransferase
MHHHHHHGGSGSHGIRTIDSDFGKKQQKKMDNHDSSATYEIKFHEFVLFILEEKMGATRRTFLTDLARKKGFRVENELTDEVTHIVAENLSRSEVLAWLKEHKMEKTKQFELLDISWLIESMKVGKPVDTKGKYQLAESGEMSANPDPTEGRENELPPTMKTVSPYACQRRTTLNNHNQRFTDALEILRENYEFKRNDDTALEFRRAISVLKSLPFEVRSLKDTEGLPWIGDEVKGIMEEIIEVGNSREVQAVLNDEWYQSFHRFKSVFGVGVKTADKWYRMGLRTLEDVRSSKTLKLTPMQKVGLLYYEDLARGVTRAEADAISLLVQDAVATFDPDAIVEIVGGFRRGKPQGHDVDLLISSPGAEKEQEDQLLQKVTNLWKKQGLLLYGRLEWTQWEDGGSPSGKADEGDAGAKCFLILKLYDHKVDKSKSEMPTGSNMGEAKPWKAIRVDLLRCPYGGFAFAMLQWTGSRMFRRDLRWYATDEKNMMLDNHALYDLTKKIFLPAKSEEEIFAHLGLEYLEPFERNA

SEQ ID NO: 3025 - DNA, 1587 bp, synthetic construct
  misc_feature 1..1587: note = Variant of terminal deoxynucleotidyltransferase
  source 1..1587: mol_type = other DNA
atgcaccatcatcatcatcatggcggtagcggcagccacggcattcgtaccatcgattcggacttcgggaagaaacagcagaaaaaaatggataaccacgatagttccgccacttatgaaatcaaatttcacgagtttgtgctgttcattctcgaagaaaaaatgggtgcgacgcgtcgtacttttctgacagatttagcccgcaagaaagggttccgcgtcgagaatgaactgaccgacgaagttacccacatcgtggcagaaaatctgtcacgctctgaagtattggcttggctgaaagaacacaagatggagaagaccaagcaattcgaactgctggatattagctggcttatcgaaagcatgaaagttggtaaaccggtggacaccaaggggaaataccagttggcggaatcgggtgagatgagtgcgaacccagatccgacagagggtcgtgaaaacgagctgcctcctactatgaagaccgtttctccgtatgcgtgtcaacgccgcaccaccctgaacaaccataatcaacgttttacggacgcactggaaattcttcgtgaaaattacgagttcaaacgcaacgatgatactgcgctggaatttcgtcgtgctatctccgtgctgaaaagccttccgtttgaggtacgtagcctgaaagacacggaaggattgccctggatcggtgatgaagtcaaagggattatggaagaaatcatcgaggtcgggaattcgcgtgaagtgcaggccgtgctcaatgatgagtggtatcaaagcttccaccgctttaagagtgtctttggagtgggggtgaagacagcagacaagtggtaccgtatgggtctgcgcaccctcgaggatgttcgttccagcaagaccctgaagttgaccccgatgcagaaagtaggtctgctgtattatgaagatcttgctcgcggcgttacgcgtgccgaagctgacgcgatttctctgctggttcaggatgcagtcgcaactttcgacccggatgcgatcgtggagattgtcggtggatttcgtcgtgggaaacctcagggtcacgacgttgatctgcttatcagttctccgggagctgagaaagagtctgaagaccagctcctgcagaaagtgaccaatctgtggaagaaacaagggttgttgctgtacggtcgtctggaatggacccagtgggaagatgggggttcgccatccggtaaggctgacgagggtgacgcgggtgcgaaatgctttctgatcctcaaactttatgatcataaagtggacaaaagcaaatgggaaatgccgacgggttcgaacatgggcgaggccaaaccgtggaaagcaattcgcgtagatctgctgcgttgcccctacggcggttttgcgtttgcgatgttgcagtggaccggaagccgcatgttccgtcgtgatctgcgttggtacgccactgacgagaagaacatgatgctggacaatcatgcgctgtatgacctgaccaagaaaatcttcctccctgctaaatcggaagaggaaattttcgcacatctggggcttgaatacctggaaccgttcgaacgtaacgca

SEQ ID NO: 3026 - protein, 529 aa, synthetic construct
  REGION 1..529: note = Variant of terminal deoxynucleotidyltransferase
MHHHHHHGGSGSHGIRTIDSDFGKKQQKKMDNHDSSATYEIKFHEFVLFILEEKMGATRRTFLTDLARKKGFRVENELTDEVTHIVAENLSRSEVLAWLKEHKMEKTKQFELLDISWLIESMKVGKPVDTKGKYQLAESGEMSANPDPTEGRENELPPTMKTVSPYACQRRTTLNNHNQRFTDALEILRENYEFKRNDDTALEFRRAISVLKSLPFEVRSLKDTEGLPWIGDEVKGIMEEIIEVGNSREVQAVLNDEWYQSFHRFKSVFGVGVKTADKWYRMGLRTLEDVRSSKTLKLTPMQKVGLLYYEDLARGVTRAEADAISLLVQDAVATFDPDAIVEIVGGFRRGKPQGHDVDLLISSPGAEKESEDQLLQKVTNLWKKQGLLLYGRLEWTQWEDGGSPSGKADEGDAGAKCFLILKLYDHKVDKSKWEMPTGSNMGEAKPWKAIRVDLLRCPYGGFAFAMLQWTGSRMFRRDLRWYATDEKNMMLDNHALYDLTKKIFLPAKSEEEIFAHLGLEYLEPFERNA

SEQ ID NO: 3027 - DNA, 1587 bp, synthetic construct
  misc_feature 1..1587: note = Variant of terminal deoxynucleotidyltransferase
  source 1..1587: mol_type = other DNA
atgcaccatcatcatcatcatggcggtagcggcagccacggcattcgtaccatcgattcggacttcgggaagaaacagcagaaaaaaatggataaccacgatagttccgccacttatgaaatcaaatttcacgagtttgtgctgttcattctcgaagaaaaaatgggtgcgacgcgtcgtacttttctgacagatttagcccgcaagaaagggttccgcgtcgagaatgaactgaccgacgaagttacccacatcgtggcagaaaatctgtcacgctctgaagtattggcttggctgaaagaacacaagatggagaagaccaagcaattcgaactgctggatattagctggcttatcgaaagcatgaaagttggtaaaccggtggacaccaaggggaaataccagttggcggaatcgggtgagatgagtgcgaacccagatccgacagagggtcgtgaaaacgagctgcctcctactatgaagaccgtttctccgtatgcgtgtcaacgccgcaccaccctgaacaaccataatcaacgttttacggacgcactggaaattcttcgtgaaaattacgagttcaaacgcaacgatgatactgcgctggaatttcgtcgtgctatctccgtgctgaaaagccttccgtttgaggtacgtagcctgaaagacacggaaggattgccctggatcggtgatgaagtcaaagggattatggaagaaatcatcgaggtcgggaattcgcgtgaagtgcaggccgtgctcaatgatgagtggtatcaaagcttccacctttttaagagtgtctttggagtgggggtgaagacagcagacaagtggtaccgtatgggtctgcgcaccctcgaggatgttcgttccagcaagaccctgaagttgaccccgatgcagaaagtaggtctgctgtattatgaagatcttgctcgcggcgttacgcgtgccgaagctgacgcgatttctctgctggttcaggatgcagtcgcaactttcgacccggatgcgatcgtggagattgtcggtggatttcgtcgtgggaaacctcagggtcacgacgttgatctgcttatcagttctccgggagctgagaaagagcaagaagaccagctcctgcagaaagtgaccaatctgtggaagaaacaagggttgttgctgtacggtcgtctggaatggacccagtgggaagatgggggttcgccatccggtaaggctgacgagggtgacgcgggtgcgaaatgctttctgatcctcaaactttatgatcataaagtggacaaaagcaaatgggaaatgccgacgggttcgaacatgggcgaggccaaaccgtggaaagcaattcgcgtagatctgctgcgttgcccctacggcggttttgcgtttgcgatgttgcagtggaccggaagccgcatgttccgtcgtgatctgcgttggtacgccactgacgagaagaacatgatgctggacaatcatgcgctgtatgacctgaccaagaaaatcttcctccctgctaaatcggaagaggaaattttcgcacatctggggcttgaatacctggaaccgttcgaacgtaacgca

SEQ ID NO: 3028 - protein, 529 aa, synthetic construct
  REGION 1..529: note = Variant of terminal deoxynucleotidyltransferase
MHHHHHHGGSGSHGIRTIDSDFGKKQQKKMDNHDSSATYEIKFHEFVLFILEEKMGATRRTFLTDLARKKGFRVENELTDEVTHIVAENLSRSEVLAWLKEHKMEKTKQFELLDISWLIESMKVGKPVDTKGKYQLAESGEMSANPDPTEGRENELPPTMKTVSPYACQRRTTLNNHNQRFTDALEILRENYEFKRNDDTALEFRRAISVLKSLPFEVRSLKDTEGLPWIGDEVKGIMEEIIEVGNSREVQAVLNDEWYQSFHLFKSVFGVGVKTADKWYRMGLRTLEDVRSSKTLKLTPMQKVGLLYYEDLARGVTRAEADAISLLVQDAVATFDPDAIVEIVGGFRRGKPQGHDVDLLISSPGAEKEQEDQLLQKVTNLWKKQGLLLYGRLEWTQWEDGGSPSGKADEGDAGAKCFLILKLYDHKVDKSKWEMPTGSNMGEAKPWKAIRVDLLRCPYGGFAFAMLQWTGSRMFRRDLRWYATDEKNMMLDNHALYDLTKKIFLPAKSEEEIFAHLGLEYLEPFERNA

SEQ ID NO: 3029 - DNA, 1587 bp, synthetic construct
  misc_feature 1..1587: note = Variant of terminal deoxynucleotidyltransferase
  source 1..1587: mol_type = other DNA
atgcaccatcatcatcatcatggcggtagcggcagccacggcattcgtaccatcgattcggacttcgggaagaaacagcagaaaaaaatggataaccacgatagttccgccacttatgaaatcaaatttcacgagtttgtgctgttcattctcgaagaaaaaatgggtgcgacgcgtcgtacttttctgacagatttagcccgcaagaaagggttccgcgtcgagaatgaactgaccgacgaagttacccacatcgtggcagaaaatctgtcacgctctgaagtattggcttggctgaaagaacacaagatggagaagaccaagcaattcgaactgctggatattagctggcttatcgaaagcatgaaagttggtaaaccggtggacaccaaggggaaataccagttggcggaatcgggtgagatgagtgcgaacccagatccgacagagggtcgtgaaaacgagctgcctcctactatgaagaccgtttctccgtatgcgtgtcaacgccgcaccaccctgaacaaccataatcaacgttttacggacgcactggaaattcttcgtgaaaattacgagttcaaacgcaacgatgatactgcgctggaatttcgtcgtgctatctccgtgctgaaaagccttccgtttgaggtacgtagcctgaaagacacggaaggattgccctggatcggtgatgaagtcaaagggattatggaagaaatcatcgaggtcgggaattcgcgtgaagtgcaggccgtgctcaatgatgagtggtatcaaagcttccaccgctttaagagtgtctttggagtgggggtgaagacagcagacaagtggtaccgtatgggtctgcgcaccctcgaggatgttcgttccagcaagaccctgaagttgaccccgatgcagaaagtaggtctgctgtattatgaagatcttgctcgcggcgttacgcgtgccgaagctgacgcgatttctctgctggttcaggatgcagtcgcaactttcgacccggatgcgatcgtggagattgtcggtggatttcgtcgtgggaaacctcagggtcacgacgttgatctgcttatcagttctccgggagctgagaaagagcaagaagaccagctcctgcagaaagtgaccaatctgtggaagaaacaagggttgttgctgtacggtcgtctggaatggacccagtgggaagatgggggttcgccatccggtaaggctgacgagggtgacgcgggtgcgaaatgctttctgatcctcaaactttatgatcataaagtggacaaaagcaaagctgaaatgccgacgggttcgaacatgggcgaggccaaaccgtggaaagcaattcgcgtagatctgctgcgttgcccctacggcggttttgcgtttgcgatgttgcagtggaccggaagccgcatgttccgtcgtgatctgcgttggtacgccactgacgagaagaacatgatgctggacaatcatgcgctgtatgacctgaccaagaaaatcttcctccctgctaaatcggaagaggaaattttcgcacatctggggcttgaatacctggaaccgttcgaacgtaacgca

SEQ ID NO: 3030 - protein, 529 aa, synthetic construct
  REGION 1..529: note = Variant of terminal deoxynucleotidyltransferase
MHHHHHHGGSGSHGIRTIDSDFGKKQQKKMDNHDSSATYEIKFHEFVLFILEEKMGATRRTFLTDLARKKGFRVENELTDEVTHIVAENLSRSEVLAWLKEHKMEKTKQFELLDISWLIESMKVGKPVDTKGKYQLAESGEMSANPDPTEGRENELPPTMKTVSPYACQRRTTLNNHNQRFTDALEILRENYEFKRNDDTALEFRRAISVLKSLPFEVRSLKDTEGLPWIGDEVKGIMEEIIEVGNSREVQAVLNDEWYQSFHRFKSVFGVGVKTADKWYRMGLRTLEDVRSSKTLKLTPMQKVGLLYYEDLARGVTRAEADAISLLVQDAVATFDPDAIVEIVGGFRRGKPQGHDVDLLISSPGAEKEQEDQLLQKVTNLWKKQGLLLYGRLEWTQWEDGGSPSGKADEGDAGAKCFLILKLYDHKVDKSKAEMPTGSNMGEAKPWKAIRVDLLRCPYGGFAFAMLQWTGSRMFRRDLRWYATDEKNMMLDNHALYDLTKKIFLPAKSEEEIFAHLGLEYLEPFERNA

SEQ ID NO: 3031 - DNA, 1587 bp, synthetic construct
  misc_feature 1..1587: note = Variant of terminal deoxynucleotidyltransferase
  source 1..1587: mol_type = other DNA
atgcaccatcatcatcatcatggcggtagcggcagccacggcattcgtaccatcgattcggacttcgggaagaaacagcagaaaaaaatggataaccacgatagttccgccacttatgaaatcaaatttcacgagtttgtgctgttcattctcgaagaaaaaatgggtgcgacgcgtcgtacttttctgacagatttagcccgcaagaaagggttccgcgtcgagaatgaactgaccgacgaagttacccacatcgtggcagaaaatctgtcacgctctgaagtattggcttggctgaaagaacacaagatggagaagaccaagcaattcgaactgctggatattagctggcttatcgaaagcatgaaagttggtaaaccggtggacaccaaggggaaataccagttggcggaatcgggtgagatgagtgcgaacccagatccgacagagggtcgtgaaaacgagctgcctcctactatgaagaccgtttctccgtatgcgtgtcaacgccgcaccaccctgaacaaccataatcaacgttttacggacgcactggaaattcttcgtgaaaattacgagttcaaacgcaacgatgatactgcgctggaatttcgtcgtgctatctccgtgctgaaaagccttccgtttgaggtacgtagcctgaaagacacggaaggattgccctggatcggtgatgaagtcaaagggattatggaagaaatcatcgaggtcgggaattcgcgtgaagtgcaggccgtgctcaatgatgagtggtatcaaagcttccaccgctttaagagtgtctttggagtgggggtgaagacagcagacatgtggtaccgtatgggtctgcgcaccctcgaggatgttcgttccagcaagaccctgaagttgaccccgatgcagaaagtaggtctgctgtattatgaagatcttgctcgcggcgttacgcgtgccgaagctgacgcgatttctctgctggttcaggatgcagtcgcaactttcgacccggatgcgatcgtggagattgtcggtggatttcgtcgtgggaaacctcagggtcacgacgttgatctgcttatcagttctccgggagctgagaaagagcaagaagaccagctcctgcagaaagtgaccaatctgtggaagaaacaagggttgttgctgtacggtcgtctggaatggacccagtgggaagatgggggttcgccatccggtaaggctgacgagggtgacgcgggtgcgaaatgctttctgatcctcaaactttatgatcataaagtggacaaaagcaaatgggaaatgccgacgggttcgaacatgggcgaggccaaaccgtggaaagcaattcgcgtagatctgctgcgttgcccctacggcggttttgcgtttgcgatgttgcagtggaccggaagccgcatgttccgtcgtgatctgcgttggtacgccactgacgagaagaacatgatgctggacaatcatgcgctgtatgacctgaccaagaaaatcttcctccctgctaaatcggaagaggaaattttcgcacatctggggcttgaatacctggaaccgttcgaacgtaacgca

SEQ ID NO: 3032 - protein, 529 aa, synthetic construct
  REGION 1..529: note = Variant of terminal deoxynucleotidyltransferase
MHHHHHHGGSGSHGIRTIDSDFGKKQQKKMDNHDSSATYEIKFHEFVLFILEEKMGATRRTFLTDLARKKGFRVENELTDEVTHIVAENLSRSEVLAWLKEHKMEKTKQFELLDISWLIESMKVGKPVDTKGKYQLAESGEMSANPDPTEGRENELPPTMKTVSPYACQRRTTLNNHNQRFTDALEILRENYEFKRNDDTALEFRRAISVLKSLPFEVRSLKDTEGLPWIGDEVKGIMEEIIEVGNSREVQAVLNDEWYQSFHRFKSVFGVGVKTADMWYRMGLRTLEDVRSSKTLKLTPMQKVGLLYYEDLARGVTRAEADAISLLVQDAVATFDPDAIVEIVGGFRRGKPQGHDVDLLISSPGAEKEQEDQLLQKVTNLWKKQGLLLYGRLEWTQWEDGGSPSGKADEGDAGAKCFLILKLYDHKVDKSKWEMPTGSNMGEAKPWKAIRVDLLRCPYGGFAFAMLQWTGSRMFRRDLRWYATDEKNMMLDNHALYDLTKKIFLPAKSEEEIFAHLGLEYLEPFERNA

SEQ ID NO: 3033 - DNA, 1587 bp, synthetic construct
  misc_feature 1..1587: note = Variant of terminal deoxynucleotidyltransferase
  source 1..1587: mol_type = other DNA
atgcaccatcatcatcatcatggcggtagcggcagccacggcattcgtaccatcgattcggacttcgggaagaaacagcagaaaaaaatggataaccacgatagttccgccacttatgaaatcaaatttcacgagtttgtgctgttcattctcgaagaaaaaatgggtgcgacgcgtcgtacttttctgacagatttagcccgcaagaaagggttccgcgtcgagaatgaactgaccgacgaagttacccacatcgtggcagaaaatctgtcacgctctgaagtattggcttggctgaaagaacacaagatggagaagaccaagcaattcgaactgctggatattagctggcttatcgaaagcatgaaagttggtaaaccggtggacaccaaggggaaataccagttggcggaatcgggtgagatgagtgcgaacccagatccgacagagggtcgtgaaaacgagctgcctcctactatgaagaccgtttctccgtatgcgtgtcaacgccgcaccaccctgaacaaccataatcaacgttttacggacgcactggaaattcttcgtgaaaattacgagttcaaacgcaacgatgatactgcgctggaatttcgtcgtgctatctccgtgctgaaaagccttccgtttgaggtacgtagcctgaaagacacggaaggattgccctggatcggtgatgaagtcaaagggattatggaagaaatcatcgaggtcgggaattcgcgtgaagtgcaggccgtgctcaatgatgagtggtatcaaagcttccaccgctttcggagtgtctttggagtgggggtgaagacagcagacaagtggtaccgtatgggtctgcgcaccctcgaggatgttcgttccagcaagaccctgaagttgaccccgatgcagaaagtaggtctgctgtattatgaagatcttgctcgcggcgttacgcgtgccgaagctgacgcgatttctctgctggttcaggatgcagtcgcaactttcgacccggatgcgatcgtggagattgtcggtggatttcgtcgtgggaaacctcagggtcacgacgttgatctgcttatcagttctccgggagctgagaaagagcaagaagaccagctcctgcagaaagtgaccaatctgtggaagaaacaagggttgttgctgtacggtcgtctggaatggacccagtgggaagatgggggttcgccatccggtaaggctgacgagggtgacgcgggtgcgaaatgctttctgatcctcaaactttatgatcataaagtggacaaaagcaaatgggaaatgccgacgggttcgaacatgggcgaggccaaaccgtggaaagcaattcgcgtagatctgctgcgttgcccctacggcggttttgcgtttgcgatgttgcagtggaccggaagccgcatgttccgtcgtgatctgcgttggtacgccactgacgagaagaacatgatgctggacaatcatgcgctgtatgacctgaccaagaaaatcttcctccctgctaaatcggaagaggaaattttcgcacatctggggcttgaatacctggaaccgttcgaacgtaacgca

SEQ ID NO: 3034 - protein, 529 aa, synthetic construct
  REGION 1..529: note = Variant of terminal deoxynucleotidyltransferase
MHHHHHHGGSGSHGIRTIDSDFGKKQQKKMDNHDSSATYEIKFHEFVLFILEEKMGATRRTFLTDLARKKGFRVENELTDEVTHIVAENLSRSEVLAWLKEHKMEKTKQFELLDISWLIESMKVGKPVDTKGKYQLAESGEMSANPDPTEGRENELPPTMKTVSPYACQRRTTLNNHNQRFTDALEILRENYEFKRNDDTALEFRRAISVLKSLPFEVRSLKDTEGLPWIGDEVKGIMEEIIEVGNSREVQAVLNDEWYQSFHRFRSVFGVGVKTADKWYRMGLRTLEDVRSSKTLKLTPMQKVGLLYYEDLARGVTRAEADAISLLVQDAVATFDPDAIVEIVGGFRRGKPQGHDVDLLISSPGAEKEQEDQLLQKVTNLWKKQGLLLYGRLEWTQWEDGGSPSGKADEGDAGAKCFLILKLYDHKVDKSKWEMPTGSNMGEAKPWKAIRVDLLRCPYGGFAFAMLQWTGSRMFRRDLRWYATDEKNMMLDNHALYDLTKKIFLPAKSEEEIFAHLGLEYLEPFERNA

SEQ ID NO: 3035 - DNA, 1587 bp, synthetic construct
  misc_feature 1..1587: note = Variant of terminal deoxynucleotidyltransferase
  source 1..1587: mol_type = other DNA
atgcaccatcatcatcatcatggcggtagcggcagccacggcattcgtaccatcgattcggacttcgggaagaaacagcagaaaaaaatggataaccacgatagttccgccacttatgaaatcaaatttcacgagtttgtgctgttcattctcgaagaaaaaatgggtgcgacgcgtcgtacttttctgacagatttagcccgcaagaaagggttccgcgtcgagaatgaactgaccgacgaagttacccacatcgtggcagaaaatctgtcacgctctgaagtattggcttggctgaaagaacacaagatggagaagaccaagcaattcgaactgctggatattagctggcttatcgaaagcatgaaagttggtaaaccggtggacaccaaggggaaataccagttggcggaatcgggtgagatgagtgcgaacccagatccgacagagggtcgtgaaaacgagctgcctcctactatgaagaccgtttctccgtatgcgtgtcaacgccgcaccaccctgaacaaccataatcaacgttttacggacgcactggaaattcttcgtgaaaattacgagttcaaacgcaacgatgatactgcgctggaatttcgtcgtgctatctccgtgctgaaaagccttccgtttgaggtacgtagcctgaaagacacggaaggattgccctggatcggtgatgaagtcaaagggattatggaagaaatcatcgaggtcgggaattcgcgtgaagtgcaggccgtgctcaatgatgagtggtatcaaagcttccaccgctttaagagtgtctttggagtgggggtgaagacagcagacaagtggtaccgtatgggtctgcgcaccctcgaggatgttcgttccagcaagaccctgaagttgaccccgatgcagaaagtaggtctgctgtattatgaagatcttgctcgcggcgttacgcgtgccgaagctgacgcgatttctctgctggttcaggatgcagtcgcaactttcgacccggatgcgatcgtggagattgtcggtggatttcgtcgtgggaaacctcagggtcacgacgttgatctgcttatcagttctccgggagctgagaaagagcaagaagaccagctcctgcagaaagtgaccaatctgtggaagaaacaagggttgttgctgtacggtcgtctggaatggacccagtgggaagatgggggttcgccatccggtaaggctgacgagggtgacgcgggtgcgaaatgctttctgatcctcaaactttatgatcataaagtggacaaaagcaaatgggaaatgccgacgggttcgaacatgggcgaggccaaaccgtggaaagcaattcgcgtagatctgctgcgttgcccctacggcggttttgcgtttgcgatgttgcagtggaccggaagccgcatgttccgtcgtgatctgcgttggtacgccactgacgagaagaacatgatgctggacaatcatgcgctgtatgacctgaccaagaaaatcttcctccctgctaaatcggaagaggaaattttcgcacatctggggcttccgtacctggaaccgttcgaacgtaacgca

SEQ ID NO: 3036 - protein, 529 aa, synthetic construct
  REGION 1..529: note = Variant of terminal deoxynucleotidyltransferase
MHHHHHHGGSGSHGIRTIDSDFGKKQQKKMDNHDSSATYEIKFHEFVLFILEEKMGATRRTFLTDLARKKGFRVENELTDEVTHIVAENLSRSEVLAWLKEHKMEKTKQFELLDISWLIESMKVGKPVDTKGKYQLAESGEMSANPDPTEGRENELPPTMKTVSPYACQRRTTLNNHNQRFTDALEILRENYEFKRNDDTALEFRRAISVLKSLPFEVRSLKDTEGLPWIGDEVKGIMEEIIEVGNSREVQAVLNDEWYQSFHRFKSVFGVGVKTADKWYRMGLRTLEDVRSSKTLKLTPMQKVGLLYYEDLARGVTRAEADAISLLVQDAVATFDPDAIVEIVGGFRRGKPQGHDVDLLISSPGAEKEQEDQLLQKVTNLWKKQGLLLYGRLEWTQWEDGGSPSGKADEGDAGAKCFLILKLYDHKVDKSKWEMPTGSNMGEAKPWKAIRVDLLRCPYGGFAFAMLQWTGSRMFRRDLRWYATDEKNMMLDNHALYDLTKKIFLPAKSEEEIFAHLGLPYLEPFERNA

SEQ ID NO: 3037 - DNA, 1587 bp, synthetic construct
  misc_feature 1..1587: note = Variant of terminal deoxynucleotidyltransferase
  source 1..1587: mol_type = other DNA
atgcaccatcatcatcatcatggcggtagcggcagccacggcattcgtaccatcgattcggacttcgggaagaaacagcagaaaaaaatggataaccacgatagttccgccacttatgaaatcaaatttcacgagtttgtgctgttcattctcgaagaaaaaatgggtgcgacgcgtcgtacttttctgacagatttagcccgcaagaaagggttccgcgtcgagaatgaactgaccgacgaagttacccacatcgtggcagaaaatctgtcacgctctgaagtattggcttggctgaaagaacacaagatggagaagaccaagcaattcgaactgctggatattagctggcttatcgaaagcatgaaagttggtaaaccggtggacaccaaggggaaataccagttggcggaatcgggtgagatgagtgcgaacccagatccgacagagggtcgtgaaaacgagctgcctcctactatgaagaccgtttctccgtatgcgtgtcaacgccgcaccaccctgaacaaccataatcaacgttttacggacgcactggaaattcttcgtgaaaattacgagttcaaacgcaacgatgatactgcgctggaatttcgtcgtgctatctccgtgctgaaaagccttccgtttgaggtacgtagcctgaaagacacggaaggattgccctggatcggtgatgaagtcaaagggattatggaagaaatcatcgaggtcgggaattcgcgtgaagtgcaggccgtgctcaatgatgagtggtatcaaagcttccacgtgtttaagagtgtctttggagtgggggtgaagacagcagacaagtggtaccgtatgggtctgcgcaccctcgaggatgttcgttccagcaagaccctgaagttgaccccgatgcagaaagtaggtctgctgtattatgaagatcttgctcgcggcgttacgcgtgccgaagctgacgcgatttctctgctggttcaggatgcagtcgcaactttcgacccggatgcgatcgtggagattgtcggtggatttcgtcgtgggaaacctcagggtcacgacgttgatctgcttatcagttctccgggagctgagaaagagcaagaagaccagctcctgcagaaagtgaccaatctgtggaagaaacaagggttgttgctgtacggtcgtctggaatggacccagtgggaagatgggggttcgccatccggtaaggctgacgagggtgacgcgggtgcgaaatgctttctgatcctcaaactttatgatcataaagtggacaaaagcaaatgggaaatgccgacgggttcgaacatgggcgaggccaaaccgtggaaagcaattcgcgtagatctgctgcgttgcccctacggcggttttgcgtttgcgatgttgcagtggaccggaagccgcatgttccgtcgtgatctgcgttggtacgccactgacgagaagaacatgatgctggacaatcatgcgctgtatgacctgaccaagaaaatcttcctccctgctaaatcggaagaggaaattttcgcacatctggggcttgaatacctggaaccgttcgaacgtaacgca

SEQ ID NO: 3038 - protein, 529 aa, synthetic construct
  REGION 1..529: note = Variant of terminal deoxynucleotidyltransferase
MHHHHHHGGSGSHGIRTIDSDFGKKQQKKMDNHDSSATYEIKFHEFVLFILEEKMGATRRTFLTDLARKKGFRVENELTDEVTHIVAENLSRSEVLAWLKEHKMEKTKQFELLDISWLIESMKVGKPVDTKGKYQLAESGEMSANPDPTEGRENELPPTMKTVSPYACQRRTTLNNHNQRFTDALEILRENYEFKRNDDTALEFRRAISVLKSLPFEVRSLKDTEGLPWIGDEVKGIMEEIIEVGNSREVQAVLNDEWYQSFHVFKSVFGVGVKTADKWYRMGLRTLEDVRSSKTLKLTPMQKVGLLYYEDLARGVTRAEADAISLLVQDAVATFDPDAIVEIVGGFRRGKPQGHDVDLLISSPGAEKEQEDQLLQKVTNLWKKQGLLLYGRLEWTQWEDGGSPSGKADEGDAGAKCFLILKLYDHKVDKSKWEMPTGSNMGEAKPWKAIRVDLLRCPYGGFAFAMLQWTGSRMFRRDLRWYATDEKNMMLDNHALYDLTKKIFLPAKSEEEIFAHLGLEYLEPFERNA

SEQ ID NO: 3039 - DNA, 1587 bp, synthetic construct
  misc_feature 1..1587: note = Variant of terminal deoxynucleotidyltransferase
  source 1..1587: mol_type = other DNA
atgcaccatcatcatcatcatggcggtagcggcagccacggcattcgtaccatcgattcggacttcgggaagaaacagcagaaaaaaatggataaccacgatagttccgccacttatgaaatcaaatttcacgagtttgtgctgttcattctcgaagaaaaaatgggtgcgacgcgtcgtacttttctgacagatttagcccgcaagaaagggttccgcgtcgagaatgaactgaccgacgaagttacccacatcgtggcagaaaatctgtcacgctctgaagtattggcttggctgaaagaacacaagatggagaagaccaagcaattcgaactgctggatattagctggcttatcgaaagcatgaaagttggtaaaccggtggacaccaaggggaaataccagttggcggaatcgggtgagatgagtgcgaacccagatccgacagagggtcgtgaaaacgagctgcctcctactatgaagaccgtttctccgtatgcgtgtcaacgccgcaccaccctgaacaaccataatcaacgttttacggacgcactggaaattcttcgtgaaaattacgagttcaaacgcaacgatgatactgcgctggaatttcgtcgtgctatctccgtgctgaaaagccttccgtttgaggtacgtagcctgaaagacacggaaggattgccctggatcggtgatgaagtcaaagggattatggaagaaatcatcgaggtcgggaattcgcgtgaagtgcaggccgtgctcaatgatgagtggtatcaaagcttccaccgctttaagagtgtctttggagtgggggtgaagacagcagacaagtggtaccgtatgggtctgcgcaccctcgaggatgttcgttccagcaagaccctgaagttgaccccgatgcagaaagtaggtctgctgtattatgaagatcttgctcgcggcgttacgcgtgccgaagctgacgcgatttctaggctggttcaggatgcagtcgcaactttcgacccggatgcgatcgtggagattgtcggtggatttcgtcgtgggaaacctcagggtcacgacgttgatctgcttatcagttctccgggagctgagaaagagcaagaagaccagctcctgcagaaagtgaccaatctgtggaagaaacaagggttgttgctgtacggtcgtctggaatggacccagtgggaagatgggggttcgccatccggtaaggctgacgagggtgacgcgggtgcgaaatgctttctgatcctcaaactttatgatcataaagtggacaaaagcaaatgggaaatgccgacgggttcgaacatgggcgaggccaaaccgtggaaagcaattcgcgtagatctgctgcgttgcccctacggcggttttgcgtttgcgatgttgcagtggaccggaagccgcatgttccgtcgtgatctgcgttggtacgccactgacgagaagaacatgatgctggacaatcatgcgctgtatgacctgaccaagaaaatcttcctccctgctaaatcggaagaggaaattttcgcacatctggggcttgaatacctggaaccgttcgaacgtaacgca

SEQ ID NO: 3040 - protein, 529 aa, synthetic construct
  REGION 1..529: note = Variant of terminal deoxynucleotidyltransferase
MHHHHHHGGSGSHGIRTIDSDFGKKQQKKMDNHDSSATYEIKFHEFVLFILEEKMGATRRTFLTDLARKKGFRVENELTDEVTHIVAENLSRSEVLAWLKEHKMEKTKQFELLDISWLIESMKVGKPVDTKGKYQLAESGEMSANPDPTEGRENELPPTMKTVSPYACQRRTTLNNHNQRFTDALEILRENYEFKRNDDTALEFRRAISVLKSLPFEVRSLKDTEGLPWIGDEVKGIMEEIIEVGNSREVQAVLNDEWYQSFHRFKSVFGVGVKTADKWYRMGLRTLEDVRSSKTLKLTPMQKVGLLYYEDLARGVTRAEADAISRLVQDAVATFDPDAIVEIVGGFRRGKPQGHDVDLLISSPGAEKEQEDQLLQKVTNLWKKQGLLLYGRLEWTQWEDGGSPSGKADEGDAGAKCFLILKLYDHKVDKSKWEMPTGSNMGEAKPWKAIRVDLLRCPYGGFAFAMLQWTGSRMFRRDLRWYATDEKNMMLDNHALYDLTKKIFLPAKSEEEIFAHLGLEYLEPFERNA

SEQ ID NO: 3041 - DNA, 1587 bp, synthetic construct
  misc_feature 1..1587: note = Variant of terminal deoxynucleotidyltransferase
  source 1..1587: mol_type = other DNA
atgcaccatcatcatcatcatggcggtagcggcagccacggcattcgtaccatcgattcggacttcgggaagaaacagcagaaaaaaatggataaccacgatagttccgccacttatgaaatcaaatttcacgagtttgtgctgttcattctcgaagaaaaaatgggtgcgacgcgtcgtacttttctgacagatttagcccgcaagaaagggttccgcgtcgagaatgaactgaccgacgaagttacccacatcgtggcagaaaatctgtcacgctctgaagtattggcttggctgaaagaacacaagatggagaagaccaagcaattcgaactgctggatattagctggcttatcgaaagcatgaaagttggtaaaccggtggacaccaaggggaaataccagttggcggaatcgggtgagatgagtgcgaacccagatccgacagagggtcgtgaaaacgagctgcctcctactatgaagaccgtttctccgtatgcgtgtcaacgccgcaccaccctgaacaaccataatcaacgttttacggacgcactggaaattcttcgtgaaaattacgagttcaaacgcaacgatgatactgcgctggaatttcgtcgtgctatctccgtgctgaaaagccttccgtttgaggtacgtagcctgaaagacacggaaggattgccctggatcggtgatgaagtcaaagggattatggaagaaatcatcgaggtcgggaattcgcgtgaagtgcaggccgtgctcaatgatgagtggtatcaaagcttccaccgctttaagagtgtctttggagtgggggtgaagacagcagacaagtggtaccgtatgggtctgcgcaccctcgaggatgttcgttccagcaagaccctgaagttgaccccgatgcagaaagtaggtctgctgtattatgaagatcttgctcgcggcgttacgcgtgccgaagctgacgcgatttctctgctggttcaggatgcagtcgcaactttcgacccggatgcgatcgtggagattgtcggtggatttcgtcgtgggaaacctcagggtcacgacgttgatctgcttatcagttctccgggagctgagaaagagcaagaagaccagctcctgcagaaagtgaccaatctgtggaagaaacaagggttgttgctgtacggtcgtctggaatggacccagtgggaagatgggggttcgccatccggtaaggctgacgagggtgacgcgggtgcgaaatgctttctgatcctcaaactttatgatcataaagtggacaaaagcaaatgggaagggccgacgggttcgaacatgggcgaggccaaaccgtggaaagcaattcgcgtagatctgctgcgttgcccctacggcggttttgcgtttgcgatgttgcagtggaccggaagccgcatgttccgtcgtgatctgcgttggtacgccactgacgagaagaacatgatgctggacaatcatgcgctgtatgacctgaccaagaaaatcttcctccctgctaaatcggaagaggaaattttcgcacatctggggcttgaatacctggaaccgttcgaacgtaacgca

SEQ ID NO: 3042 - protein, 529 aa, synthetic construct
  REGION 1..529: note = Variant of terminal deoxynucleotidyltransferase
MHHHHHHGGSGSHGIRTIDSDFGKKQQKKMDNHDSSATYEIKFHEFVLFILEEKMGATRRTFLTDLARKKGFRVENELTDEVTHIVAENLSRSEVLAWLKEHKMEKTKQFELLDISWLIESMKVGKPVDTKGKYQLAESGEMSANPDPTEGRENELPPTMKTVSPYACQRRTTLNNHNQRFTDALEILRENYEFKRNDDTALEFRRAISVLKSLPFEVRSLKDTEGLPWIGDEVKGIMEEIIEVGNSREVQAVLNDEWYQSFHRFKSVFGVGVKTADKWYRMGLRTLEDVRSSKTLKLTPMQKVGLLYYEDLARGVTRAEADAISLLVQDAVATFDPDAIVEIVGGFRRGKPQGHDVDLLISSPGAEKEQEDQLLQKVTNLWKKQGLLLYGRLEWTQWEDGGSPSGKADEGDAGAKCFLILKLYDHKVDKSKWEGPTGSNMGEAKPWKAIRVDLLRCPYGGFAFAMLQWTGSRMFRRDLRWYATDEKNMMLDNHALYDLTKKIFLPAKSEEEIFAHLGLEYLEPFERNA

SEQ ID NO: 3043 - DNA, 1587 bp, synthetic construct
  misc_feature 1..1587: note = Variant of terminal deoxynucleotidyltransferase
  source 1..1587: mol_type = other DNA
atgcaccatcatcatcatcatggcggtagcggcagccacggcattcgtaccatcgattcggacttcgggaagaaacagcagaaaaaaatggataaccacgatagttccgccacttatgaaatcaaatttcacgagtttgtgctgttcattctcgaagaaaaaatgggtgcgacgcgtcgtacttttctgacagatttagcccgcaagaaagggttccgcgtcgagaatgaactgaccgacgaagttacccacatcgtggcagaaaatctgtcacgctctgaagtattggcttggctgaaagaacacaagatggagaagaccaagcaattcgaactgctggatattagctggcttatcgaaagcatgaaagttggtaaaccggtggacaccaaggggaaataccagttggcggaatcgggtgagatgagtgcgaacccagatccgacagagggtcgtgaaaacgagctgcctcctactatgaagaccgtttctccgtatgcgtgtcaacgccgcaccaccctgaacaaccataatcaacgttttacggacgcactggaaattcttcgtgaaaattacgagttcaaacgcaacgatgatactgcgctggaatttcgtcgtgctatctccgtgctgaaaagccttccgtttgaggtacgtagcctgaaagacacggaaggattgccctggatcggtgatgaagtcaaagggattatggaagaaatcatcgaggtcgggaattcgcgtgaagtgcaggccgtgctcaatgatgagtggtatcaaagcttccaccgctttaagagtgtctttggagtgggggtgaagacagcagacaagtggtaccgtatgggtctgcgcaccctcgaggatgttcgttccagcaagaccctgaagttgaccccgatgcagaaagtaggtctgctgtattatgaagatcttgctcgcggcgttacgcgtgccgaagctgacgcgatttctctgctggttcaggatgcagtcgcaactttcgacccggatgcgatcgtggagattgtcggtggatttcgtcgtgggaaacctcagggtcacgacgttgatctgcttatcagttctccgggagctgagaaagagcaagaagaccagctcctgcagaaagtgaccaatctgtggaagaaacaagggttgttgctgtacggtcgtctggaatggacccagtgggaagatgggggttcgccatccggtaaggctgacgagggtgacgcgggtgcgaaatgctttctgatcctcaaactttatgatcataaagtggacaaaagcaaatgggaaatgccgacgggttcgaacatgggcgaggccaaaccgtggaaagcaattcgcgtagatctgctgcgttgcccctacggcggttttgcgtttgcgatgttgcagtggaccggaagccgcatgttccgtcgtgatctgcgttggtacgccactgacgagaagaacatgatgctggacaatcatgcgctgtatgacctgaccaagaaagagttcctccctgctaaatcggaagaggaaattttcgcacatctggggcttgaatacctggaaccgttcgaacgtaacgca

SEQ ID NO: 3044 - protein, 529 aa, synthetic construct
  REGION 1..529: note = Variant of terminal deoxynucleotidyltransferase
MHHHHHHGGSGSHGIRTIDSDFGKKQQKKMDNHDSSATYEIKFHEFVLFILEEKMGATRRTFLTDLARKKGFRVENELTDEVTHIVAENLSRSEVLAWLKEHKMEKTKQFELLDISWLIESMKVGKPVDTKGKYQLAESGEMSANPDPTEGRENELPPTMKTVSPYACQRRTTLNNHNQRFTDALEILRENYEFKRNDDTALEFRRAISVLKSLPFEVRSLKDTEGLPWIGDEVKGIMEEIIEVGNSREVQAVLNDEWYQSFHRFKSVFGVGVKTADKWYRMGLRTLEDVRSSKTLKLTPMQKVGLLYYEDLARGVTRAEADAISLLVQDAVATFDPDAIVEIVGGFRRGKPQGHDVDLLISSPGAEKEQEDQLLQKVTNLWKKQGLLLYGRLEWTQWEDGGSPSGKADEGDAGAKCFLILKLYDHKVDKSKWEMPTGSNMGEAKPWKAIRVDLLRCPYGGFAFAMLQWTGSRMFRRDLRWYATDEKNMMLDNHALYDLTKKEFLPAKSEEEIFAHLGLEYLEPFERNA

SEQ ID NO: 3045 - DNA, 1587 bp, synthetic construct
  misc_feature 1..1587: note = Variant of terminal deoxynucleotidyltransferase
  source 1..1587: mol_type = other DNA
atgcaccatcatcatcatcatggcggtagcggcagccacggcattcgtaccatcgattcggacttcgggaagaaacagcagaaaaaaatggataaccacgatagttccgccacttatgaaatcaaatttcacgagtttgtgctgttcattctcgaagaaaaaatgggtgcgacgcgtcgtacttttctgacagatttagcccgcaagaaagggttccgcgtcgagaatgaactgaccgacgaagttacccacatcgtggcagaaaatctgtcacgctctgaagtattggcttggctgaaagaacacaagatggagaagaccaagcaattcgaactgctggatattagctggcttatcgaaagcatgaaagttggtaaaccggtggacaccaaggggaaataccagttggcggaatcgggtgagatgagtgcgaacccagatccgacagagggtcgtgaaaacgagctgcctcctactatgaagaccgtttctccgtatgcgtgtcaacgccgcaccaccctgaacaaccataatcaacgttttacggacgcactggaaattcttcgtgaaaattacgagttcaaacgcaacgatgatactgcgctggaatttcgtcgtgctatctccgtgctgaaaagccttccgtttgaggtacgtagcctgaaagacacggaaggattgccctggatcggtgatgaagtcaaagggattatggaagaaatcatcgaggtcgggaattcgcgtgaagtgcaggccgtgctcaatgatgagtggtatcaaagcttccaccgctttaagagtgtctttggagtgggggtgaagacagcagacaagtggtaccgtatgggtctgcgcaccctcgaggatgttcgttccagcaagaccctgaagttgaccccgatgcagaaagtaggtctgctgtattatgaagatcttgctcgcggcgttacgcgtgccgaagctgacgcgatttctctgctggttcaggatgcagtcgcaactttcgacccggatgcgatcgtggagattgtcggtggatttcgtcgtgggaaacctcagggtcacgacgttgatctgcttatcagttctccgggagctgagaaagagcaagaagaccagctcctgcagaaagtgaccaatctgtggaagaaacaagggttgttgctgtacggtcgtctggaatggacccagtgggaagatgggggttcgccatccggtaaggctgacgagggtgacgcgggtgcgaaatgctttctgatcctcaaactttatgatcataaagtggacaaaagcaaatgggaaatgccgacgggttcgaacatgggcgaggccaaaccgtggaaagcaattcgcgtagatctgctgcgttgcccctacggcggttttgcgtttgcgatgttgcagtggaccggaagccgcatgttccgtcgtgatctgcgttggtacgccactgacgagaagaacatgatgctggacaatcatgcgctgtatgacatgaccaagaaaatcttcctccctgctaaatcggaagaggaaattttcgcacatctggggcttgaatacctggaaccgttcgaacgtaacgca

SEQ ID NO: 3046 - protein, 529 aa, synthetic construct
  REGION 1..529: note = Variant of terminal deoxynucleotidyltransferase
MHHHHHHGGSGSHGIRTIDSDFGKKQQKKMDNHDSSATYEIKFHEFVLFILEEKMGATRRTFLTDLARKKGFRVENELTDEVTHIVAENLSRSEVLAWLKEHKMEKTKQFELLDISWLIESMKVGKPVDTKGKYQLAESGEMSANPDPTEGRENELPPTMKTVSPYACQRRTTLNNHNQRFTDALEILRENYEFKRNDDTALEFRRAISVLKSLPFEVRSLKDTEGLPWIGDEVKGIMEEIIEVGNSREVQAVLNDEWYQSFHRFKSVFGVGVKTADKWYRMGLRTLEDVRSSKTLKLTPMQKVGLLYYEDLARGVTRAEADAISLLVQDAVATFDPDAIVEIVGGFRRGKPQGHDVDLLISSPGAEKEQEDQLLQKVTNLWKKQGLLLYGRLEWTQWEDGGSPSGKADEGDAGAKCFLILKLYDHKVDKSKWEMPTGSNMGEAKPWKAIRVDLLRCPYGGFAFAMLQWTGSRMFRRDLRWYATDEKNMMLDNHALYDMTKKIFLPAKSEEEIFAHLGLEYLEPFERNA

SEQ ID NO: 3047 - DNA, 1587 bp, synthetic construct
  misc_feature 1..1587: note = Variant of terminal deoxynucleotidyltransferase
  source 1..1587: mol_type = other DNA
atgcaccatcatcatcatcatggcggtagcggcagccacggcattcgtaccatcgattcggacttcgggaagaaacagcagaaaaaaatggataaccacgatagttccgccacttatgaaatcaaatttcacgagtttgtgctgttcattctcgaagaaaaaatgggtgcgacgcgtcgtacttttctgacagatttagcccgcaagaaagggttccgcgtcgagaatgaactgaccgacgaagttacccacatcgtggcagaaaatctgtcacgctctgaagtattggcttggctgaaagaacacaagatggagaagaccaagcaattcgaactgctggatattagctggcttatcgaaagcatgaaagttggtaaaccggtggacaccaaggggaaataccagttggcggaatcgggtgagatgagtgcgaacccagatccgacagagggtcgtgaaaacgagctgcctcctactatgaagaccgtttctccgtatgcgtgtcaacgccgcaccaccctgaacaaccataatcaacgttttacggacgcactggaaattcttcgtgaaaattacgagttcaaacgcaacgatgatactgcgctggaatttcgtcgtgctatctccgtgctgaaaagccttccgtttgaggtacgtagcctgaaagacacggaaggattgccctggatcggtgatgaagtcaaagggattatggaagaaatcatcgaggtcgggaattcgcgtgaagtgcaggccgtgctcaatgatgagtggtatcaaagcttccaccgctttaagagtgtctttggagtgggggtgaagacagcagacaagtggtaccgtatgggtctgcgcaccctcgaggatgttcgttccagcaagaccctgaagttgaccccgatgcagaaagtaggtctgctgtattatgaagatcttgctcgcggcgttacgcgtgccgaagctgacgcgatttctctgctggttcaggatgcagtcgcaactttcgacccggatgcgatcgtggagattgtcggtggatttcgtcgtgggaaacctcagggtcacgacgttgatctgcttatcagttctccgggagctgagaaagagcaagaagaccagctcctgcagaaagtgaccaatctgtggaagaaacaagggttgttgctgtacggtcgtctggaatggacccagtgggaagatgggggttcgccatccggtaaggctgacgagggtgacgcgggtgcgaaatgctttctgatcctcaaactttatgatcataaagtggacaaaagcaaatgggaaatgccgacgggttcgaacatgggcgaggccaaaccgtggaaagcaattcgcgtagatctgctgcgttgcccctacggcggttttgcgtttgcgatgttgcagtggaccggaagccgcatgttccgtcgtgatctgcgttggtacgccactgacgagaagaacatgatgctggacaatcatgcgctgtatgacctgaccaagaaaatcttcctccctgctaaatcggaagaggaaattttcgcacatctggggcttgaatacctggaaccgtctgaacgtaacgca

SEQ ID NO: 3048 - protein, 529 aa, synthetic construct
  REGION 1..529: note = Variant of terminal deoxynucleotidyltransferase
MHHHHHHGGSGSHGIRTIDSDFGKKQQKKMDNHDSSATYEIKFHEFVLFILEEKMGATRRTFLTDLARKKGFRVENELTDEVTHIVAENLSRSEVLAWLKEHKMEKTKQFELLDISWLIESMKVGKPVDTKGKYQLAESGEMSANPDPTEGRENELPPTMKTVSPYACQRRTTLNNHNQRFTDALEILRENYEFKRNDDTALEFRRAISVLKSLPFEVRSLKDTEGLPWIGDEVKGIMEEIIEVGNSREVQAVLNDEWYQSFHRFKSVFGVGVKTADKWYRMGLRTLEDVRSSKTLKLTPMQKVGLLYYEDLARGVTRAEADAISLLVQDAVATFDPDAIVEIVGGFRRGKPQGHDVDLLISSPGAEKEQEDQLLQKVTNLWKKQGLLLYGRLEWTQWEDGGSPSGKADEGDAGAKCFLILKLYDHKVDKSKWEMPTGSNMGEAKPWKAIRVDLLRCPYGGFAFAMLQWTGSRMFRRDLRWYATDEKNMMLDNHALYDLTKKIFLPAKSEEEIFAHLGLEYLEPSERNA

SEQ ID NO: 3049 - DNA, 1587 bp, synthetic construct
  misc_feature 1..1587: note = Variant of terminal deoxynucleotidyltransferase
  source 1..1587: mol_type = other DNA
atgcaccatcatcatcatcatggcggtagcggcagccacggcattcgtaccatcgattcggacttcgggaagaaacagcagaaaaaaatggataaccacgatagttccgccacttatgaaatcaaatttcacgagtttgtgctgttcattctcgaagaaaaaatgggtgcgacgcgtcgtacttttctgacagatttagcccgcaagaaagggttccgcgtcgagaatgaactgaccgacgaagttacccacatcgtggcagaaaatctgtcacgctctgaagtattggcttggctgaaagaacacaagatggagaagaccaagcaattcgaactgctggatattagctggcttatcgaaagcatgaaagttggtaaaccggtggacaccaaggggaaataccagttggcggaatcgggtgagatgagtgcgaacccagatccgacagagggtcgtgaaaacgagctgcctcctactatgaagaccgtttctccgtatgcgtgtcaacgccgcaccaccctgaacaaccataatcaacgttttacggacgcactggaaattcttcgtgaaaattacgagttcaaacgcaacgatgatactgcgctggaatttcgtcgtgctatctccgtgctgaaaagccttccgtttgaggtacgtagcctgaaagacacggaaggattgccctggatcggtgatgaagtcaaagggattatggaagaaatcatcgaggtcgggaattcgcgtgaagtgcaggccgtgctcaatgatgagtggtatcaaagcttccaccgctttaagagtgtctttggagtgggggtgaagacagcagacaagtggtaccgtatgggtctgcgcaccctcgaggatgttcgttccagcaagaccctgaagttgaccccgatgcagaaagtaggtctgctgtattatgaagatcttgctcgcggcgttacgcgtgccgaagctgacgcgatttctctgctggttcaggatgcagtcgcaactttcgacccggatgcgatcgtggagattgtcggtggatttcgtcgtgggaaacctcagggtcacgacgttgatctgcttatcagttctccgggagctgagaaagagcaagaagaccagctcctgcagaaagtgaccaatctgtggaagaaacaagggttgttgctgtacggtcgtctggaatggacccagtgggaagatgggggttcgccatccggtaaggctgacgagggtgacgcgggtgcgaaatgctttctgatcctcaaactttatgatcataaagtggacaaaagcaaatgggaaatgccgacgggttcgaacatgggcgaggccaaaccgtggaaagcaattcgcgtagatctgctgcgttgcccctacggcggttttgcgtttgcgatgttgcagtggaccggaagccgcatgttccgtcgtgatctgcgttggtacgccactgacgagaagaacatgatgctggacaatcatgcgctgtatgacctgaccaagaaagtgttcctccctgctaaatcggaagaggaaattttcgcacatctggggcttgaatacctggaaccgttcgaacgtaacgca

SEQ ID NO: 3050 - protein, 529 aa, synthetic construct
  REGION 1..529: note = Variant of terminal deoxynucleotidyltransferase
MHHHHHHGGSGSHGIRTIDSDFGKKQQKKMDNHDSSATYEIKFHEFVLFILEEKMGATRRTFLTDLARKKGFRVENELTDEVTHIVAENLSRSEVLAWLKEHKMEKTKQFELLDISWLIESMKVGKPVDTKGKYQLAESGEMSANPDPTEGRENELPPTMKTVSPYACQRRTTLNNHNQRFTDALEILRENYEFKRNDDTALEFRRAISVLKSLPFEVRSLKDTEGLPWIGDEVKGIMEEIIEVGNSREVQAVLNDEWYQSFHRFKSVFGVGVKTADKWYRMGLRTLEDVRSSKTLKLTPMQKVGLLYYEDLARGVTRAEADAISLLVQDAVATFDPDAIVEIVGGFRRGKPQGHDVDLLISSPGAEKEQEDQLLQKVTNLWKKQGLLLYGRLEWTQWEDGGSPSGKADEGDAGAKCFLILKLYDHKVDKSKWEMPTGSNMGEAKPWKAIRVDLLRCPYGGFAFAMLQWTGSRMFRRDLRWYATDEKNMMLDNHALYDLTKKVFLPAKSEEEIFAHLGLEYLEPFERNA

SEQ ID NO: 3051 - DNA, 1587 bp, synthetic construct
  misc_feature 1..1587: note = Variant of terminal deoxynucleotidyltransferase
  source 1..1587: mol_type = other DNA
atgcaccatcatcatcatcatggcggtagcggcagccacggcattcgtaccatcgattcggacttcgggaagaaacagcagaaaaaaatggataaccacgatagttccgccacttatgaaatcaaatttcacgagtttgtgctgttcattctcgaagaaaaaatgggtgcgacgcgtcgtacttttctgacagatttagcccgcaagaaagggttccgcgtcgagaatgaactgaccgacgaagttacccacatcgtggcagaaaatctgtcacgctctgaagtattggcttggctgaaagaacacaagatggagaagaccaagcaattcgaactgctggatattagctggcttatcgaaagcatgaaagttggtaaaccggtggacaccaaggggaaataccagttggcggaatcgggtgagatgagtgcgaacccagatccgacagagggtcgtgaaaacgagctgcctcctactatgaagaccgtttctccgtatgcgtgtcaacgccgcaccaccctgaacaaccataatcaacgttttacggacgcactggaaattcttcgtgaaaattacgagttcaaacgcaacgatgatactgcgctggaatttcgtcgtgctatctccgtgctgaaaagccttccgtttgaggtacgtagcctgaaagacacggaaggattgccctggatcggtgatgaagtcaaagggattatggaagaaatcatcgaggtcgggaattcgcgtgaagtgcaggccgtgctcaatgatgagtggtatcaaagcttccaccgctttaagagtgtctttggagtgggggtgaagacagcagacaagtggtaccgtatgggtctgcgcaccctcgaggatgttcgttccagcaagaccctgaagttgaccccgatgcagaaagtaggtctgctgtattatgaagatcttgctcgcggcgttacgcgtgccgaagctgacgcgatttctctgctggttcaggatgcagtcgcaactttcgacccggatgcgatcgtggagattgtcggtggatttcgtcgtgggaaacctcagggtcacgacgttgatctgcttatcagttctccgggagctgagaaagagcaagaagaccagctcctgcagaaagtgaccaatctgtggaagaaacaagggttgttgctgtacggtcgtctggaatggacccagtgggaagatgggggttcgccatccggtaaggctgacgagggtgacgcggaggcgaaatgctttctgatcctcaaactttatgatcataaagtggacaaaagcaaatgggaaatgccgacgggttcgaacatgggcgaggccaaaccgtggaaagcaattcgcgtagatctgctgcgttgcccctacggcggttttgcgtttgcgatgttgcagtggaccggaagccgcatgttccgtcgtgatctgcgttggtacgccactgacgagaagaacatgatgctggacaatcatgcgctgtatgacctgaccaagaaaatcttcctccctgctaaatcggaagaggaaattttcgcacatctggggcttgaatacctggaaccgttcgaacgtaacgca

SEQ ID NO: 3052 - protein, 529 aa, synthetic construct
  REGION 1..529: note = Variant of terminal deoxynucleotidyltransferase
MHHHHHHGGSGSHGIRTIDSDFGKKQQKKMDNHDSSATYEIKFHEFVLFILEEKMGATRRTFLTDLARKKGFRVENELTDEVTHIVAENLSRSEVLAWLKEHKMEKTKQFELLDISWLIESMKVGKPVDTKGKYQLAESGEMSANPDPTEGRENELPPTMKTVSPYACQRRTTLNNHNQRFTDALEILRENYEFKRNDDTALEFRRAISVLKSLPFEVRSLKDTEGLPWIGDEVKGIMEEIIEVGNSREVQAVLNDEWYQSFHRFKSVFGVGVKTADKWYRMGLRTLEDVRSSKTLKLTPMQKVGLLYYEDLARGVTRAEADAISLLVQDAVATFDPDAIVEIVGGFRRGKPQGHDVDLLISSPGAEKEQEDQLLQKVTNLWKKQGLLLYGRLEWTQWEDGGSPSGKADEGDAEAKCFLILKLYDHKVDKSKWEMPTGSNMGEAKPWKAIRVDLLRCPYGGFAFAMLQWTGSRMFRRDLRWYATDEKNMMLDNHALYDLTKKIFLPAKSEEEIFAHLGLEYLEPFERNA

SEQ ID NO: 3053 - DNA, 1587 bp, synthetic construct
  misc_feature 1..1587: note = Variant of terminal deoxynucleotidyltransferase
  source 1..1587: mol_type = other DNA
atgcaccatcatcatcatcatggcggtagcggcagccacggcattcgtaccatcgattcggacttcgggaagaaacagcagaaaaaaatggataaccacgatagttccgccacttatgaaatcaaatttcacgagtttgtgctgttcattctcgaagaaaaaatgggtgcgacgcgtcgtacttttctgacagatttagcccgcaagaaagggttccgcgtcgagaatgaactgaccgacgaagttacccacatcgtggcagaaaatctgtcacgctctgaagtattggcttggctgaaagaacacaagatggagaagaccaagcaattcgaactgctggatattagctggcttatcgaaagcatgaaagttggtaaaccggtggacaccaaggggaaataccagttggcggaatcgggtgagatgagtgcgaacccagatccgacagagggtcgtgaaaacgagctgcctcctactatgaagaccgtttctccgtatgcgtgtcaacgccgcaccaccctgaacaaccataatcaacgttttacggacgcactggaaattcttcgtgaaaattacgagttcaaacgcaacgatgatactgcgctggaatttcgtcgtgctatctccgtgctgaaaagccttccgtttgaggtacgtagcctgaaagacacggaaggattgccctggatcggtgatgaagtcaaagggattatggaagaaatcatcgaggtcgggaattcgcgtgaagtgcaggccgtgctcaatgatgagtggtatcaaagcttccacgagtttaagagtgtctttggagtgggggtgaagacagcagacaagtggtaccgtatgggtctgcgcaccctcgaggatgttcgttccagcaagaccctgaagttgaccccgatgcagaaagtaggtctgctgtattatgaagatcttgctcgcggcgttacgcgtgccgaagctgacgcgatttctctgctggttcaggatgcagtcgcaactttcgacccggatgcgatcgtggagattgtcggtggatttcgtcgtgggaaacctcagggtcacgacgttgatctgcttatcagttctccgggagctgagaaagagcaagaagaccagctcctgcagaaagtgaccaatctgtggaagaaacaagggttgttgctgtacggtcgtctggaatggacccagtgggaagatgggggttcgccatccggtaaggctgacgagggtgacgcgggtgcgaaatgctttctgatcctcaaactttatgatcataaagtggacaaaagcaaatgggaaatgccgacgggttcgaacatgggcgaggccaaaccgtggaaagcaattcgcgtagatctgctgcgttgcccctacggcggttttgcgtttgcgatgttgcagtggaccggaagccgcatgttccgtcgtgatctgcgttggtacgccactgacgagaagaacatgatgctggacaatcatgcgctgtatgacctgaccaagaaaatcttcctccctgctaaatcggaagaggaaattttcgcacatctggggcttgaatacctggaaccgttcgaacgtaacgca

SEQ ID NO: 3054 - protein, 529 aa, synthetic construct
  REGION 1..529: note = Variant of terminal deoxynucleotidyltransferase
MHHHHHHGGSGSHGIRTIDSDFGKKQQKKMDNHDSSATYEIKFHEFVLFILEEKMGATRRTFLTDLARKKGFRVENELTDEVTHIVAENLSRSEVLAWLKEHKMEKTKQFELLDISWLIESMKVGKPVDTKGKYQLAESGEMSANPDPTEGRENELPPTMKTVSPYACQRRTTLNNHNQRFTDALEILRENYEFKRNDDTALEFRRAISVLKSLPFEVRSLKDTEGLPWIGDEVKGIMEEIIEVGNSREVQAVLNDEWYQSFHEFKSVFGVGVKTADKWYRMGLRTLEDVRSSKTLKLTPMQKVGLLYYEDLARGVTRAEADAISLLVQDAVATFDPDAIVEIVGGFRRGKPQGHDVDLLISSPGAEKEQEDQLLQKVTNLWKKQGLLLYGRLEWTQWEDGGSPSGKADEGDAGAKCFLILKLYDHKVDKSKWEMPTGSNMGEAKPWKAIRVDLLRCPYGGFAFAMLQWTGSRMFRRDLRWYATDEKNMMLDNHALYDLTKKIFLPAKSEEEIFAHLGLEYLEPFERNA

SEQ ID NO: 3055 - DNA, 1587 bp, synthetic construct
  misc_feature 1..1587: note = Variant of terminal deoxynucleotidyltransferase
  source 1..1587: mol_type = other DNA
atgcaccatcatcatcatcatggcggtagcggcagccacggcattcgtaccatcgattcggacttcgggaagaaacagcagaaaaaaatggataaccacgatagttccgccacttatgaaatcaaatttcacgagtttgtgctgttcattctcgaagaaaaaatgggtgcgacgcgtcgtacttttctgacagatttagcccgcaagaaagggttccgcgtcgagaatgaactgaccgacgaagttacccacatcgtggcagaaaatctgtcacgctctgaagtattggcttggctgaaagaacacaagatggagaagaccaagcaattcgaactgctggatattagctggcttatcgaaagcatgaaagttggtaaaccggtggacaccaaggggaaataccagttggcggaatcgggtgagatgagtgcgaacccagatccgacagagggtcgtgaaaacgagctgcctcctactatgaagaccgtttctccgtatgcgtgtcaacgccgcaccaccctgaacaaccataatcaacgttttacggacgcactggaaattcttcgtgaaaattacgagttcaaacgcaacgatgatactgcgctggaatttcgtcgtgctatctccgtgctgaaaagccttccgtttgaggtacgtagcctgaaagacacggaaggattgccctggatcggtgatgaagtcaaagggattatggaagaaatcatcgaggtcgggaattcgcgtgaagtgcaggccgtgctcaatgatgagtggtatcaaagcttccaccgctttaagagtgtctttggagtgggggtgaagacagcagacaagtggtaccgtatgggtctgcgcaccctcgaggatgttcgttccagcaagaccctgaagttgaccccgatgcagaaagtaggtctgctgtattatgaagatcttgctcgcggcgttacgcgtgccgaagctgacgcgatttctctgctggttcaggatgcagtcgcaactttcgacccggatgcgatcgtggagattgtcggtggatttcgtcgtgggaaacctcagggtcacgacgttgatctgcttatcagttctccgggagctgagaaagagcaagaagaccagctcctgcagaaagtgaccaatctgtggaagaaacaagggttgttgctgtacggtcgtctggaatggacccagtgggaagatgggggttcgccatccggtaaggctgacgagggtgacgcgggtgcgaaatgctttctgatcctcaaactttatgatcataaagtggacaaaagcaaatgggaagctccgacgggttcgaacatgggcgaggccaaaccgtggaaagcaattcgcgtagatctgctgcgttgcccctacggcggttttgcgtttgcgatgttgcagtggaccggaagccgcatgttccgtcgtgatctgcgttggtacgccactgacgagaagaacatgatgctggacaatcatgcgctgtatgacctgaccaagaaaatcttcctccctgctaaatcggaagaggaaattttcgcacatctggggcttgaatacctggaaccgttcgaacgtaacgca

SEQ ID NO: 3056 - protein, 529 aa, synthetic construct
  REGION 1..529: note = Variant of terminal deoxynucleotidyltransferase
MHHHHHHGGSGSHGIRTIDSDFGKKQQKKMDNHDSSATYEIKFHEFVLFILEEKMGATRRTFLTDLARKKGFRVENELTDEVTHIVAENLSRSEVLAWLKEHKMEKTKQFELLDISWLIESMKVGKPVDTKGKYQLAESGEMSANPDPTEGRENELPPTMKTVSPYACQRRTTLNNHNQRFTDALEILRENYEFKRNDDTALEFRRAISVLKSLPFEVRSLKDTEGLPWIGDEVKGIMEEIIEVGNSREVQAVLNDEWYQSFHRFKSVFGVGVKTADKWYRMGLRTLEDVRSSKTLKLTPMQKVGLLYYEDLARGVTRAEADAISLLVQDAVATFDPDAIVEIVGGFRRGKPQGHDVDLLISSPGAEKEQEDQLLQKVTNLWKKQGLLLYGRLEWTQWEDGGSPSGKADEGDAGAKCFLILKLYDHKVDKSKWEAPTGSNMGEAKPWKAIRVDLLRCPYGGFAFAMLQWTGSRMFRRDLRWYATDEKNMMLDNHALYDLTKKIFLPAKSEEEIFAHLGLEYLEPFERNA

SEQ ID NO: 3057 - DNA, 1587 bp, synthetic construct
  misc_feature 1..1587: note = Variant of terminal deoxynucleotidyltransferase
  source 1..1587: mol_type = other DNA
atgcaccatcatcatcatcatggcggtagcggcagccacggcattcgtaccatcgattcggacttcgggaagaaacagcagaaaaaaatggataaccacgatagttccgccacttatgaaatcaaatttcacgagtttgtgctgttcattctcgaagaaaaaatgggtgcgacgcgtcgtacttttctgacagatttagcccgcaagaaagggttccgcgtcgagaatgaactgaccgacgaagttacccacatcgtggcagaaaatctgtcacgctctgaagtattggcttggctgaaagaacacaagatggagaagaccaagcaattcgaactgctggatattagctggcttatcgaaagcatgaaagttggtaaaccggtggacaccaaggggaaataccagttggcggaatcgggtgagatgagtgcgaacccagatccgacagagggtcgtgaaaacgagctgcctcctactatgaagaccgtttctccgtatgcgtgtcaacgccgcaccaccctgaacaaccataatcaacgttttacggacgcactggaaattcttcgtgaaaattacgagttcaaacgcaacgatgatactgcgctggaatttcgtcgtgctatctccgtgctgaaaagccttccgtttgaggtacgtagcctgaaagacacggaaggattgccctggatcggtgatgaagtcaaagggattatggaagaaatcatcgaggtcgggaattcgcgtgaagtgcaggccgtgctcaatgatgagtggtatcaaagcttccaccgctttaagagtgtctttggagtgggggtgaagacagcagacaagtggtaccgtatgggtctgcgcaccctcgaggatgttcgttccagcaagaccctgaagttgaccccgatgcagaaagtaggtctgctgtattatgaagatcttgctcgcggcgttacgcgtgccgaagctgacgcgatttctctgctggttcaggatgcagtcgcaactttcgacccggatgcgatcgtggagattgtcggtggatttcgtcgtgggaaacctcagggtcacgacgttgatctgcttatcagttctccgggagctgagaaagagggtgaagaccagctcctgcagaaagtgaccaatctgtggaagaaacaagggttgttgctgtacggtcgtctggaatggacccagtgggaagatgggggttcgccatccggtaaggctgacgagggtgacgcgggtgcgaaatgctttctgatcctcaaactttatgatcataaagtggacaaaagcaaatgggaaatgccgacgggttcgaacatgggcgaggccaaaccgtggaaagcaattcgcgtagatctgctgcgttgcccctacggcggttttgcgtttgcgatgttgcagtggaccggaagccgcatgttccgtcgtgatctgcgttggtacgccactgacgagaagaacatgatgctggacaatcatgcgctgtatgacctgaccaagaaaatcttcctccctgctaaatcggaagaggaaattttcgcacatctggggcttgaatacctggaaccgttcgaacgtaacgca

SEQ ID NO: 3058 - protein, 529 aa, synthetic construct
  REGION 1..529: note = Variant of terminal deoxynucleotidyltransferase
MHHHHHHGGSGSHGIRTIDSDFGKKQQKKMDNHDSSATYEIKFHEFVLFILEEKMGATRRTFLTDLARKKGFRVENELTDEVTHIVAENLSRSEVLAWLKEHKMEKTKQFELLDISWLIESMKVGKPVDTKGKYQLAESGEMSANPDPTEGRENELPPTMKTVSPYACQRRTTLNNHNQRFTDALEILRENYEFKRNDDTALEFRRAISVLKSLPFEVRSLKDTEGLPWIGDEVKGIMEEIIEVGNSREVQAVLNDEWYQSFHRFKSVFGVGVKTADKWYRMGLRTLEDVRSSKTLKLTPMQKVGLLYYEDLARGVTRAEADAISLLVQDAVATFDPDAIVEIVGGFRRGKPQGHDVDLLISSPGAEKEGEDQLLQKVTNLWKKQGLLLYGRLEWTQWEDGGSPSGKADEGDAGAKCFLILKLYDHKVDKSKWEMPTGSNMGEAKPWKAIRVDLLRCPYGGFAFAMLQWTGSRMFRRDLRWYATDEKNMMLDNHALYDLTKKIFLPAKSEEEIFAHLGLEYLEPFERNA

SEQ ID NO: 3059 - DNA, 1587 bp, synthetic construct
  misc_feature 1..1587: note = Variant of terminal deoxynucleotidyltransferase
  source 1..1587: mol_type = other DNA
atgcaccatcatcatcatcatggcggtagcggcagccacggcattcgtaccatcgattcggacttcgggaagaaacagcagaaaaaaatggataaccacgatagttccgccacttatgaaatcaaatttcacgagtttgtgctgttcattctcgaagaaaaaatgggtgcgacgcgtcgtacttttctgacagatttagcccgcaagaaagggttccgcgtcgagaatgaactgaccgacgaagttacccacatcgtggcagaaaatctgtcacgctctgaagtattggcttggctgaaagaacacaagatggagaagaccaagcaattcgaactgctggatattagctggcttatcgaaagcatgaaagttggtaaaccggtggacaccaaggggaaataccagttggcggaatcgggtgagatgagtgcgaacccagatccgacagagggtcgtgaaaacgagctgcctcctactatgaagaccgtttctccgtatgcgtgtcaacgccgcaccaccctgaacaaccataatcaacgttttacggacgcactggaaattcttcgtgaaaattacgagttcaaacgcaacgatgatactgcgctggaatttcgtcgtgctatctccgtgctgaaaagccttccgtttgaggtacgtagcctgaaagacacggaaggattgccctggatcggtgatgaagtcaaagggattatggaagaaatcatcgaggtcgggaattcgcgtgaagtgcaggccgtgctcaatgatgagtggtatcaaagcttccaccgctttaagagtgtctttggagtgggggtgaagacagcagacaagtggtaccgtatgggtctgcgcaccctcgaggatgttcgttccagcaagaccctgaagttgaccccgatgcagaaagtaggtctgctgtattatgaagatcttgctcgcggcgttacgcgtgccgaagctgacgcgatttctctgctggttcaggatgcagtcgcaactttcgacccggatgcgatcgtggagattgtcggtggatttcgtcgtgggaaacctcagggtcacgacgttgatctgcttatcagttctccgggagctgagaaagagcaagaagaccagctcctgcagaaagtgaccaatctgtggaagaaacaagggttgttgctgtacggtcgtctggaatggacccagtgggaagatgggggttcgccatccggtaaggctgacgagggtgacgcgggtgcgaaatgctttctgatcctcaaactttatgatcataaagtggacaaaagcaaatgggaaatgccgaggggttcgaacatgggcgaggccaaaccgtggaaagcaattcgcgtagatctgctgcgttgcccctacggcggttttgcgtttgcgatgttgcagtggaccggaagccgcatgttccgtcgtgatctgcgttggtacgccactgacgagaagaacatgatgctggacaatcatgcgctgtatgacctgaccaagaaaatcttcctccctgctaaatcggaagaggaaattttcgcacatctggggcttgaatacctggaaccgttcgaacgtaacgca

SEQ ID NO: 3060 - protein, 529 aa, synthetic construct
  REGION 1..529: note = Variant of terminal deoxynucleotidyltransferase
MHHHHHHGGSGSHGIRTIDSDFGKKQQKKMDNHDSSATYEIKFHEFVLFILEEKMGATRRTFLTDLARKKGFRVENELTDEVTHIVAENLSRSEVLAWLKEHKMEKTKQFELLDISWLIESMKVGKPVDTKGKYQLAESGEMSANPDPTEGRENELPPTMKTVSPYACQRRTTLNNHNQRFTDALEILRENYEFKRNDDTALEFRRAISVLKSLPFEVRSLKDTEGLPWIGDEVKGIMEEIIEVGNSREVQAVLNDEWYQSFHRFKSVFGVGVKTADKWYRMGLRTLEDVRSSKTLKLTPMQKVGLLYYEDLARGVTRAEADAISLLVQDAVATFDPDAIVEIVGGFRRGKPQGHDVDLLISSPGAEKEQEDQLLQKVTNLWKKQGLLLYGRLEWTQWEDGGSPSGKADEGDAGAKCFLILKLYDHKVDKSKWEMPRGSNMGEAKPWKAIRVDLLRCPYGGFAFAMLQWTGSRMFRRDLRWYATDEKNMMLDNHALYDLTKKIFLPAKSEEEIFAHLGLEYLEPFERNA

SEQ ID NO: 3061 - DNA, 1587 bp, synthetic construct
  misc_feature 1..1587: note = Variant of terminal deoxynucleotidyltransferase
  source 1..1587: mol_type = other DNA
atgcaccatcatcatcatcatggcggtagcggcagccacggcattcgtaccatcgattcggacttcgggaagaaacagcagaaaaaaatggataaccacgatagttccgccacttatgaaatcaaatttcacgagtttgtgctgttcattctcgaagaaaaaatgggtgcgacgcgtcgtacttttctgacagatttagcccgcaagaaagggttccgcgtcgagaatgaactgaccgacgaagttacccacatcgtggcagaaaatctgtcacgctctgaagtattggcttggctgaaagaacacaagatggagaagaccaagcaattcgaactgctggatattagctggcttatcgaaagcatgaaagttggtaaaccggtggacaccaaggggaaataccagttggcggaatcgggtgagatgagtgcgaacccagatccgacagagggtcgtgaaaacgagctgcctcctactatgaagaccgtttctccgtatgcgtgtcaacgccgcaccaccctgaacaaccataatcaacgttttacggacgcactggaaattcttcgtgaaaattacgagttcaaacgcaacgatgatactgcgctggaatttcgtcgtgctatctccgtgctgaaaagccttccgtttgaggtacgtagcctgaaagacacggaaggattgccctggatcggtgatgaagtcaaagggattatggaagaaatcatcgaggtcgggaattcgcgtgaagtgcaggccgtgctcaatgatgagtggtatcaaagcttccaccgctttaagagtgtctttggagtgggggtgaagacagcagacaagtggtaccgtatgggtctgcgcaccctcgaggatgttcgttccagcaagaccctgaagttgaccccgatgcagaaagtaggtctgctgtattatgaagatcttgctcgcggcgttacgcgtgccgaagctgacgcgatttctctgctggttcaggatgcagtcgcaactttcgacccggatgcgatcgtggagattgtcggtggatttcgtcgtgggaaacctcagggtcacgacgttgatctgcttatcagttctccgggagctgagaaagagcaagaagaccagctcctgcagaaagtgaccaatctgtggaagaaacaagggttgttgctgtacggtcgtctggaatggacccagtgggaagatgggggttcgccatccggtaaggctgacgagggtgacgcgggtgcgaaatgctttctgatcctcaaactttatgatcataaagtggacaaaagcaaatgggaaatgccgacgggttcgaacatgggcgaggccaaaccgtggaaagcaattcgcgtagatctgctgcgttgcccctacggcggttttgcgtttgcgatgttgcagtggaccggaagccgcatgttccgtcgtgatctgcgttggtacgccactgacgagaagaacatgatgctggacaatcatgcgctgtatgacctgaccaagaaagcgttcctccctgctaaatcggaagaggaaattttcgcacatctggggcttgaatacctggaaccgttcgaacgtaacgca

SEQ ID NO: 3062 - protein, 529 aa, synthetic construct
  REGION 1..529: note = Variant of terminal deoxynucleotidyltransferase
MHHHHHHGGSGSHGIRTIDSDFGKKQQKKMDNHDSSATYEIKFHEFVLFILEEKMGATRRTFLTDLARKKGFRVENELTDEVTHIVAENLSRSEVLAWLKEHKMEKTKQFELLDISWLIESMKVGKPVDTKGKYQLAESGEMSANPDPTEGRENELPPTMKTVSPYACQRRTTLNNHNQRFTDALEILRENYEFKRNDDTALEFRRAISVLKSLPFEVRSLKDTEGLPWIGDEVKGIMEEIIEVGNSREVQAVLNDEWYQSFHRFKSVFGVGVKTADKWYRMGLRTLEDVRSSKTLKLTPMQKVGLLYYEDLARGVTRAEADAISLLVQDAVATFDPDAIVEIVGGFRRGKPQGHDVDLLISSPGAEKEQEDQLLQKVTNLWKKQGLLLYGRLEWTQWEDGGSPSGKADEGDAGAKCFLILKLYDHKVDKSKWEMPTGSNMGEAKPWKAIRVDLLRCPYGGFAFAMLQWTGSRMFRRDLRWYATDEKNMMLDNHALYDLTKKAFLPAKSEEEIFAHLGLEYLEPFERNA

SEQ ID NO: 3063 - DNA, 1587 bp, synthetic construct
  misc_feature 1..1587: note = Variant of terminal deoxynucleotidyltransferase
  source 1..1587: mol_type = other DNA
atgcaccatcatcatcatcatggcggtagcggcagccacggcattcgtaccatcgattcggacttcgggaagaaacagcagaaaaaaatggataaccacgatagttccgccacttatgaaatcaaatttcacgagtttgtgctgttcattctcgaagaaaaaatgggtgcgacgcgtcgtacttttctgacagatttagcccgcaagaaagggttccgcgtcgagaatgaactgaccgacgaagttacccacatcgtggcagaaaatctgtcacgctctgaagtattggcttggctgaaagaacacaagatggagaagaccaagcaattcgaactgctggatattagctggcttatcgaaagcatgaaagttggtaaaccggtggacaccaaggggaaataccagttggcggaatcgggtgagatgagtgcgaacccagatccgacagagggtcgtgaaaacgagctgcctcctactatgaagaccgtttctccgtatgcgtgtcaacgccgcaccaccctgaacaaccataatcaacgttttacggacgcactggaaattcttcgtgaaaattacgagttcaaacgcaacgatgatactgcgctggaatttcgtcgtgctatctccgtgctgaaaagccttccgtttgaggtacgtagcctgaaagacacggaaggattgccctggatcggtgatgaagtcaaagggattatggaagaaatcatcgaggtcgggaattcgcgtgaagtgcaggccgtgctcaatgatgagtggtatcaaagcttccaccgctttaagagtgtctttggagtgggggtgaagacagcagacaagtggtaccgtatgggtctgcgcaccctcgaggatgttcgttccagcaagaccctgaagttgaccccgatgcagaaagtaggtctgctgtattatgaagatcttgctcgcggcgttacgcgtgccgaagctgacgcgatttctctgctggttcaggatgcagtcgcaactttcgacccggatgcgatcgtggagattgtcggtggatttcgtcgtgggaaacctcagggtcacgacgttgatctgcttatcagttctccgggagctgagaaagagcaagaagaccagctcctgcagaaagtgaccaatctgtggaagaaacaagggttgttgctgtacggtcgtctggaatggcgtcagtgggaagatgggggttcgccatccggtaaggctgacgagggtgacgcgggtgcgaaatgctttctgatcctcaaactttatgatcataaagtggacaaaagcaaatgggaaatgccgacgggttcgaacatgggcgaggccaaaccgtggaaagcaattcgcgtagatctgctgcgttgcccctacggcggttttgcgtttgcgatgttgcagtggaccggaagccgcatgttccgtcgtgatctgcgttggtacgccactgacgagaagaacatgatgctggacaatcatgcgctgtatgacctgaccaagaaaatcttcctccctgctaaatcggaagaggaaattttcgcacatctggggcttgaatacctggaaccgttcgaacgtaacgca

SEQ ID NO: 3064 - protein, 529 aa, synthetic construct
  REGION 1..529: note = Variant of terminal deoxynucleotidyltransferase
MHHHHHHGGSGSHGIRTIDSDFGKKQQKKMDNHDSSATYEIKFHEFVLFILEEKMGATRRTFLTDLARKKGFRVENELTDEVTHIVAENLSRSEVLAWLKEHKMEKTKQFELLDISWLIESMKVGKPVDTKGKYQLAESGEMSANPDPTEGRENELPPTMKTVSPYACQRRTTLNNHNQRFTDALEILRENYEFKRNDDTALEFRRAISVLKSLPFEVRSLKDTEGLPWIGDEVKGIMEEIIEVGNSREVQAVLNDEWYQSFHRFKSVFGVGVKTADKWYRMGLRTLEDVRSSKTLKLTPMQKVGLLYYEDLARGVTRAEADAISLLVQDAVATFDPDAIVEIVGGFRRGKPQGHDVDLLISSPGAEKEQEDQLLQKVTNLWKKQGLLLYGRLEWRQWEDGGSPSGKADEGDAGAKCFLILKLYDHKVDKSKWEMPTGSNMGEAKPWKAIRVDLLRCPYGGFAFAMLQWTGSRMFRRDLRWYATDEKNMMLDNHALYDLTKKIFLPAKSEEEIFAHLGLEYLEPFERNA

SEQ ID NO: 3065 - DNA, 1587 bp, synthetic construct
  misc_feature 1..1587: note = Variant of terminal deoxynucleotidyltransferase
  source 1..1587: mol_type = other DNA
atgcaccatcatcatcatcatggcggtagcggcagccacggcattcgtaccatcgattcggacttcgggaagaaacagcagaaaaaaatggataaccacgatagttccgccacttatgaaatcaaatttcacgagtttgtgctgttcattctcgaagaaaaaatgggtgcgacgcgtcgtacttttctgacagatttagcccgcaagaaagggttccgcgtcgagaatgaactgaccgacgaagttacccacatcgtggcagaaaatctgtcacgctctgaagtattggcttggctgaaagaacacaagatggagaagaccaagcaattcgaactgctggatattagctggcttatcgaaagcatgaaagttggtaaaccggtggacaccaaggggaaataccagttggcggaatcgggtgagatgagtgcgaacccagatccgacagagggtcgtgaaaacgagctgcctcctactatgaagaccgtttctccgtatgcgtgtcaacgccgcaccaccctgaacaaccataatcaacgttttacggacgcactggaaattcttcgtgaaaattacgagttcaaacgcaacgatgatactgcgctggaatttcgtcgtgctatctccgtgctgaaaagccttccgtttgaggtacgtagcctgaaagacacggaaggattgccctggatcggtgatgaagtcaaagggattatggaagaaatcatcgaggtcgggaattcgcgtgaagtgcaggccgtgctcaatgatgagtggtatcaaagcttccaccgctttaagagtgtctttggagtgggggtgaagacagcagacaagtggtaccgtatgggtctgcgcaccctcgaggatgttcgttccagcaagaccctgaagttgaccccgatgcagaaagtaggtctgctgtattatgaagatcttgctcgcggcgttacgcgtgccgaagctgacgcgatttctctgctggttcaggatgcagtcgcaactttcgacccggatgcgatcgtggagattgtcggtggatttcgtcgtgggaaacctcagggtcacgacgttgatctgcttatcagttctccgggagctgagaaagagcaagaagaccagctcctgcagaaagtgaccaatctgtggaagaaacaagggttgttgctgtacggtcgtctggaatggacccagtgggaagatgggggttcgccatccggtaaggctgacgagggtgacgcgggtgcgaaatgctttctgatcctcaaactttatgatcataaagtggacaaaagcaaaagggaaatgccgacgggttcgaacatgggcgaggccaaaccgtggaaagcaattcgcgtagatctgctgcgttgcccctacggcggttttgcgtttgcgatgttgcagtggaccggaagccgcatgttccgtcgtgatctgcgttggtacgccactgacgagaagaacatgatgctggacaatcatgcgctgtatgacctgaccaagaaaatcttcctccctgctaaatcggaagaggaaattttcgcacatctggggcttgaatacctggaaccgttcgaacgtaacgca

SEQ ID NO: 3066 - protein, 529 aa, synthetic construct
  REGION 1..529: note = Variant of terminal deoxynucleotidyltransferase
MHHHHHHGGSGSHGIRTIDSDFGKKQQKKMDNHDSSATYEIKFHEFVLFILEEKMGATRRTFLTDLARKKGFRVENELTDEVTHIVAENLSRSEVLAWLKEHKMEKTKQFELLDISWLIESMKVGKPVDTKGKYQLAESGEMSANPDPTEGRENELPPTMKTVSPYACQRRTTLNNHNQRFTDALEILRENYEFKRNDDTALEFRRAISVLKSLPFEVRSLKDTEGLPWIGDEVKGIMEEIIEVGNSREVQAVLNDEWYQSFHRFKSVFGVGVKTADKWYRMGLRTLEDVRSSKTLKLTPMQKVGLLYYEDLARGVTRAEADAISLLVQDAVATFDPDAIVEIVGGFRRGKPQGHDVDLLISSPGAEKEQEDQLLQKVTNLWKKQGLLLYGRLEWTQWEDGGSPSGKADEGDAGAKCFLILKLYDHKVDKSKREMPTGSNMGEAKPWKAIRVDLLRCPYGGFAFAMLQWTGSRMFRRDLRWYATDEKNMMLDNHALYDLTKKIFLPAKSEEEIFAHLGLEYLEPFERNA

SEQ ID NO: 3067 - DNA, 1587 bp, synthetic construct
  misc_feature 1..1587: note = Variant of terminal deoxynucleotidyltransferase
  source 1..1587: mol_type = other DNA
atgcaccatcatcatcatcatggcggtagcggcagccacggcattcgtaccatcgattcggacttcgggaagaaacagcagaaaaaaatggataaccacgatagttccgccacttatgaaatcaaatttcacgagtttgtgctgttcattctcgaagaaaaaatgggtgcgacgcgtcgtacttttctgacagatttagcccgcaagaaagggttccgcgtcgagaatgaactgaccgacgaagttacccacatcgtggcagaaaatctgtcacgctctgaagtattggcttggctgaaagaacacaagatggagaagaccaagcaattcgaactgctggatattagctggcttatcgaaagcatgaaagttggtaaaccggtggacaccaaggggaaataccagttggcggaatcgggtgagatgagtgcgaacccagatccgacagagggtcgtgaaaacgagctgcctcctactatgaagaccgtttctccgtatgcgtgtcaacgccgcaccaccctgaacaaccataatcaacgttttacggacgcactggaaattcttcgtgaaaattacgagttcaaacgcaacgatgatactgcgctggaatttcgtcgtgctatctccgtgctgaaaagccttccgtttgaggtacgtagcctgaaagacacggaaggattgccctggatcggtgatgaagtcaaagggattatggaagaaatcatcgaggtcgggaattcgaaggaagtgcaggccgtgctcaatgatgagtggtatcaaagcttccaccgctttaagagtgtctttggagtgggggtgaagacagcagacaagtggtaccgtatgggtctgcgcaccctcgaggatgttcgttccagcaagaccctgaagttgaccccgatgcagaaagtaggtctgctgtattatgaagatcttgctcgcggcgttacgcgtgccgaagctgacgcgatttctctgctggttcaggatgcagtcgcaactttcgacccggatgcgatcgtggagattgtcggtggatttcgtcgtgggaaacctcagggtcacgacgttgatctgcttatcagttctccgggagctgagaaagagcaagaagaccagctcctgcagaaagtgaccaatctgtggaagaaacaagggttgttgctgtacggtcgtctggaatggacccagtgggaagatgggggttcgccatccggtaaggctgacgagggtgacgcgggtgcgaaatgctttctgatcctcaaactttatgatcataaagtggacaaaagcaaatgggaaatgccgacgggttcgaacatgggcgaggccaaaccgtggaaagcaattcgcgtagatctgctgcgttgcccctacggcggttttgcgtttgcgatgttgcagtggaccggaagccgcatgttccgtcgtgatctgcgttggtacgccactgacgagaagaacatgatgctggacaatcatgcgctgtatgacctgaccaagaaaatcttcctccctgctaaatcggaagaggaaattttcgcacatctggggcttgaatacctggaaccgttcgaacgtaacgca

SEQ ID NO: 3068 - protein, 529 aa, synthetic construct
  REGION 1..529: note = Variant of terminal deoxynucleotidyltransferase
MHHHHHHGGSGSHGIRTIDSDFGKKQQKKMDNHDSSATYEIKFHEFVLFILEEKMGATRRTFLTDLARKKGFRVENELTDEVTHIVAENLSRSEVLAWLKEHKMEKTKQFELLDISWLIESMKVGKPVDTKGKYQLAESGEMSANPDPTEGRENELPPTMKTVSPYACQRRTTLNNHNQRFTDALEILRENYEFKRNDDTALEFRRAISVLKSLPFEVRSLKDTEGLPWIGDEVKGIMEEIIEVGNSKEVQAVLNDEWYQSFHRFKSVFGVGVKTADKWYRMGLRTLEDVRSSKTLKLTPMQKVGLLYYEDLARGVTRAEADAISLLVQDAVATFDPDAIVEIVGGFRRGKPQGHDVDLLISSPGAEKEQEDQLLQKVTNLWKKQGLLLYGRLEWTQWEDGGSPSGKADEGDAGAKCFLILKLYDHKVDKSKWEMPTGSNMGEAKPWKAIRVDLLRCPYGGFAFAMLQWTGSRMFRRDLRWYATDEKNMMLDNHALYDLTKKIFLPAKSEEEIFAHLGLEYLEPFERNA

SEQ ID NO: 3069 - DNA, 1587 bp, synthetic construct
  misc_feature 1..1587: note = Variant of terminal deoxynucleotidyltransferase
  source 1..1587: mol_type = other DNA
atgcaccatcatcatcatcatggcggtagcggcagccacggcattcgtaccatcgattcggacttcgggaagaaacagcagaaaaaaatggataaccacgatagttccgccacttatgaaatcaaatttcacgagtttgtgctgttcattctcgaagaaaaaatgggtgcgacgcgtcgtacttttctgacagatttagcccgcaagaaagggttccgcgtcgagaatgaactgaccgacgaagttacccacatcgtggcagaaaatctgtcacgctctgaagtattggcttggctgaaagaacacaagatggagaagaccaagcaattcgaactgctggatattagctggcttatcgaaagcatgaaagttggtaaaccggtggacaccaaggggaaataccagttggcggaatcgggtgagatgagtgcgaacccagatccgacagagggtcgtgaaaacgagctgcctcctactatgaagaccgtttctccgtatgcgtgtcaacgccgcaccaccctgaacaaccataatcaacgttttacggacgcactggaaattcttcgtgaaaattacgagttcaaacgcaacgatgatactgcgctggaatttcgtcgtgctatctccgtgctgaaaagccttccgtttgaggtacgtagcctgaaagacacggaaggattgccctggatcggtgatgaagtcaaagggattatggaagaaatcatcgaggtcgggaattcgcgtgaagtgcaggccgtgctcaatgatgagtggtatcaaagcttccacacttttaagagtgtctttggagtgggggtgaagacagcagacaagtggtaccgtatgggtctgcgcaccctcgaggatgttcgttccagcaagaccctgaagttgaccccgatgcagaaagtaggtctgctgtattatgaagatcttgctcgcggcgttacgcgtgccgaagctgacgcgatttctctgctggttcaggatgcagtcgcaactttcgacccggatgcgatcgtggagattgtcggtggatttcgtcgtgggaaacctcagggtcacgacgttgatctgcttatcagttctccgggagctgagaaagagcaagaagaccagctcctgcagaaagtgaccaatctgtggaagaaacaagggttgttgctgtacggtcgtctggaatggacccagtgggaagatgggggttcgccatccggtaaggctgacgagggtgacgcgggtgcgaaatgctttctgatcctcaaactttatgatcataaagtggacaaaagcaaatgggaaatgccgacgggttcgaacatgggcgaggccaaaccgtggaaagcaattcgcgtagatctgctgcgttgcccctacggcggttttgcgtttgcgatgttgcagtggaccggaagccgcatgttccgtcgtgatctgcgttggtacgccactgacgagaagaacatgatgctggacaatcatgcgctgtatgacctgaccaagaaaatcttcctccctgctaaatcggaagaggaaattttcgcacatctggggcttgaatacctggaaccgttcgaacgtaacgca

SEQ ID NO: 3070 - protein, 529 aa, synthetic construct
  REGION 1..529: note = Variant of terminal deoxynucleotidyltransferase
MHHHHHHGGSGSHGIRTIDSDFGKKQQKKMDNHDSSATYEIKFHEFVLFILEEKMGATRRTFLTDLARKKGFRVENELTDEVTHIVAENLSRSEVLAWLKEHKMEKTKQFELLDISWLIESMKVGKPVDTKGKYQLAESGEMSANPDPTEGRENELPPTMKTVSPYACQRRTTLNNHNQRFTDALEILRENYEFKRNDDTALEFRRAISVLKSLPFEVRSLKDTEGLPWIGDEVKGIMEEIIEVGNSREVQAVLNDEWYQSFHTFKSVFGVGVKTADKWYRMGLRTLEDVRSSKTLKLTPMQKVGLLYYEDLARGVTRAEADAISLLVQDAVATFDPDAIVEIVGGFRRGKPQGHDVDLLISSPGAEKEQEDQLLQKVTNLWKKQGLLLYGRLEWTQWEDGGSPSGKADEGDAGAKCFLILKLYDHKVDKSKWEMPTGSNMGEAKPWKAIRVDLLRCPYGGFAFAMLQWTGSRMFRRDLRWYATDEKNMMLDNHALYDLTKKIFLPAKSEEEIFAHLGLEYLEPFERNA

SEQ ID NO: 3071 - DNA, 1587 bp, synthetic construct
  misc_feature 1..1587: note = Variant of terminal deoxynucleotidyltransferase
  source 1..1587: mol_type = other DNA
atgcaccatcatcatcatcatggcggtagcggcagccacggcattcgtaccatcgattcggacttcgggaagaaacagcagaaaaaaatggataaccacgatagttccgccacttatgaaatcaaatttcacgagtttgtgctgttcattctcgaagaaaaaatgggtgcgacgcgtcgtacttttctgacagatttagcccgcaagaaagggttccgcgtcgagaatgaactgaccgacgaagttacccacatcgtggcagaaaatctgtcacgctctgaagtattggcttggctgaaagaacacaagatggagaagaccaagcaattcgaactgctggatattagctggcttatcgaaagcatgaaagttggtaaaccggtggacaccaaggggaaataccagttggcggaatcgggtgagatgagtgcgaacccagatccgacagagggtcgtgaaaacgagctgcctcctactatgaagaccgtttctccgtatgcgtgtcaacgccgcaccaccctgaacaaccataatcaacgttttacggacgcactggaaattcttcgtgaaaattacgagttcaaacgcaacgatgatactgcgctggaatttcgtcgtgctatctccgtgctgaaaagccttccgtttgaggtacgtagcctgaaagacacggaaggattgccctggatcggtgatgaagtcaaagggattatggaagaaatcatcgaggtcgggaattcgcgtgaagtgcaggccgtgctcaatgatgagtggtatcaaagcttccaccgctttaagagtgtctttggagtgggggtgaagacagcagacaagtggtaccgtatgggtctgcgcaccctcgaggatgttcgttccagcaagaccctgaagttgaccccgatgcagaaagtaggtctgctgtattatgaagatcttgctcgcggcgttacgcgtgccgaagctgacgcgatttctctgctggttcaggatgcagtcgcaactttcgacccggatgcgatcgtggagattgtcggtggatttcgtcgtgggaaacctcagggtcacgacgttgatctgcttatcagttctccgggagctgagaaagagcaagaagaccagctcctgcagaaagtgaccaatctgtggaagaaacaagggttgttgctgtacggtcgtctggaatggacccagtgggaagatgggggttcgccatccggtaaggctgacgagggtgacgcgggtgcgaaatgctttctgatcctcaaactttatgatcataaagtggacaaaagcaaatgggaagagccgacgggttcgaacatgggcgaggccaaaccgtggaaagcaattcgcgtagatctgctgcgttgcccctacggcggttttgcgtttgcgatgttgcagtggaccggaagccgcatgttccgtcgtgatctgcgttggtacgccactgacgagaagaacatgatgctggacaatcatgcgctgtatgacctgaccaagaaaatcttcctccctgctaaatcggaagaggaaattttcgcacatctggggcttgaatacctggaaccgttcgaacgtaacgca

SEQ ID NO: 3072 - protein, 529 aa, synthetic construct
  REGION 1..529: note = Variant of terminal deoxynucleotidyltransferase
MHHHHHHGGSGSHGIRTIDSDFGKKQQKKMDNHDSSATYEIKFHEFVLFILEEKMGATRRTFLTDLARKKGFRVENELTDEVTHIVAENLSRSEVLAWLKEHKMEKTKQFELLDISWLIESMKVGKPVDTKGKYQLAESGEMSANPDPTEGRENELPPTMKTVSPYACQRRTTLNNHNQRFTDALEILRENYEFKRNDDTALEFRRAISVLKSLPFEVRSLKDTEGLPWIGDEVKGIMEEIIEVGNSREVQAVLNDEWYQSFHRFKSVFGVGVKTADKWYRMGLRTLEDVRSSKTLKLTPMQKVGLLYYEDLARGVTRAEADAISLLVQDAVATFDPDAIVEIVGGFRRGKPQGHDVDLLISSPGAEKEQEDQLLQKVTNLWKKQGLLLYGRLEWTQWEDGGSPSGKADEGDAGAKCFLILKLYDHKVDKSKWEEPTGSNMGEAKPWKAIRVDLLRCPYGGFAFAMLQWTGSRMFRRDLRWYATDEKNMMLDNHALYDLTKKIFLPAKSEEEIFAHLGLEYLEPFERNA

SEQ ID NO: 3073 - DNA, 1587 bp, synthetic construct
  misc_feature 1..1587: note = Variant of terminal deoxynucleotidyltransferase
  source 1..1587: mol_type = other DNA
atgcaccatcatcatcatcatggcggtagcggcagccacggcattcgtaccatcgattcggacttcgggaagaaacagcagaaaaaaatggataaccacgatagttccgccacttatgaaatcaaatttcacgagtttgtgctgttcattctcgaagaaaaaatgggtgcgacgcgtcgtacttttctgacagatttagcccgcaagaaagggttccgcgtcgagaatgaactgaccgacgaagttacccacatcgtggcagaaaatctgtcacgctctgaagtattggcttggctgaaagaacacaagatggagaagaccaagcaattcgaactgctggatattagctggcttatcgaaagcatgaaagttggtaaaccggtggacaccaaggggaaataccagttggcggaatcgggtgagatgagtgcgaacccagatccgacagagggtcgtgaaaacgagctgcctcctactatgaagaccgtttctccgtatgcgtgtcaacgccgcaccaccctgaacaaccataatcaacgttttacggacgcactggaaattcttcgtgaaaattacgagttcaaacgcaacgatgatactgcgctggaatttcgtcgtgctatctccgtgctgaaaagccttccgtttgaggtacgtagcctgaaagacacggaaggattgccctggatcggtgatgaagtcaaagggattatggaagaaatcatcgaggtcgggaattcgcgtgaagtgcaggccgtgctcaatgatgagtggtatcaaagcttccaccgctttaagagtgtctttggagtgggggtgaagacagcagacaagtggtaccgtatgggtctgcgcaccctcgaggatgttcgttccagcaagaccctgaagttgaccccgatgcagaaagtaggtctgctgtattatgaagatcttgctcgcggcgttacgcgtgccgaagctgacgcgatttctctgctggttcaggatgcagtcgcaactttcgacccggatgcgatcgtggagattgtcggtggatttcgtcgtgggaaacctcagggtcacgacgttgatctgcttatcagttctccgggagctgagaaagagcaagaagaccagctcctgcagaaagtgaccaatctgtggaagaaacaagggttgttgctgtacggtcgtctggaatggacccagtgggaagatgggggttcgccatccggtaaggctgacgagggtgacgcgggtgcgaaatgctttctgatcctcaaactttatgatcataaagtggacaaaagcaaatgggaatctccgacgggttcgaacatgggcgaggccaaaccgtggaaagcaattcgcgtagatctgctgcgttgcccctacggcggttttgcgtttgcgatgttgcagtggaccggaagccgcatgttccgtcgtgatctgcgttggtacgccactgacgagaagaacatgatgctggacaatcatgcgctgtatgacctgaccaagaaaatcttcctccctgctaaatcggaagaggaaattttcgcacatctggggcttgaatacctggaaccgttcgaacgtaacgca

SEQ ID NO: 3074 - protein, 529 aa, synthetic construct
  REGION 1..529: note = Variant of terminal deoxynucleotidyltransferase
MHHHHHHGGSGSHGIRTIDSDFGKKQQKKMDNHDSSATYEIKFHEFVLFILEEKMGATRRTFLTDLARKKGFRVENELTDEVTHIVAENLSRSEVLAWLKEHKMEKTKQFELLDISWLIESMKVGKPVDTKGKYQLAESGEMSANPDPTEGRENELPPTMKTVSPYACQRRTTLNNHNQRFTDALEILRENYEFKRNDDTALEFRRAISVLKSLPFEVRSLKDTEGLPWIGDEVKGIMEEIIEVGNSREVQAVLNDEWYQSFHRFKSVFGVGVKTADKWYRMGLRTLEDVRSSKTLKLTPMQKVGLLYYEDLARGVTRAEADAISLLVQDAVATFDPDAIVEIVGGFRRGKPQGHDVDLLISSPGAEKEQEDQLLQKVTNLWKKQGLLLYGRLEWTQWEDGGSPSGKADEGDAGAKCFLILKLYDHKVDKSKWESPTGSNMGEAKPWKAIRVDLLRCPYGGFAFAMLQWTGSRMFRRDLRWYATDEKNMMLDNHALYDLTKKIFLPAKSEEEIFAHLGLEYLEPFERNA

SEQ ID NO: 3075 - DNA, 1587 bp, synthetic construct
  misc_feature 1..1587: note = Variant of terminal deoxynucleotidyltransferase
  source 1..1587: mol_type = other DNA
atgcaccatcatcatcatcatggcggtagcggcagccacggcattcgtaccatcgattcggacttcgggaagaaacagcagaaaaaaatggataaccacgatagttccgccacttatgaaatcaaatttcacgagtttgtgctgttcattctcgaagaaaaaatgggtgcgacgcgtcgtacttttctgacagatttagcccgcaagaaagggttccgcgtcgagaatgaactgaccgacgaagttacccacatcgtggcagaaaatctgtcacgctctgaagtattggcttggctgaaagaacacaagatggagaagaccaagcaattcgaactgctggatattagctggcttatcgaaagcatgaaagttggtaaaccggtggacaccaaggggaaataccagttggcggaatcgggtgagatgagtgcgaacccagatccgacagagggtcgtgaaaacgagctgcctcctactatgaagaccgtttctccgtatgcgtgtcaacgccgcaccaccctgaacaaccataatcaacgttttacggacgcactggaaattcttcgtgaaaattacgagttcaaacgcaacgatgatactgcgctggaatttcgtcgtgctatctccgtgctgaaaagccttccgtttgaggtacgtagcctgaaagacacggaaggattgccctggatcggtgatgaagtcaaagggattatggaagaaatcatcgaggtcgggaattcgcgtgaagtgcaggccgtgctcaatgatgagtggtatcaaagcttccaccgctttaagagtgtctttggagtgggggtgaagacagcagacaagtggtaccgtatgggtctgcgcaccctcgaggatgttcgttccagcaagaccctgaagttgaccccgatgcagaaagtaggtctgctgtattatgaagatcttgctcgcggcgttacgcgtgccgaagctgacgcgatttctctgctggttcaggatgcagtcgcaactttcgacccggatgcgatcgtggagattgtcggtggatttcgtcgtgggaaacctcagggtcacgacgttgatctgcttatcagttctccgggagctgagaaagagcaagaagaccagctcctgcagaaagtgaccaatctgtggaagaaacaagggttgttgctgtacggtcgtctggaatggacccagtgggaagatgggggttcgccatccggtaaggctgacgagggtgacgcgggtgcgaaatgctttctgatcctcaaactttatgatcataaagtggacaaaagcaaaatggaaatgccgacgggttcgaacatgggcgaggccaaaccgtggaaagcaattcgcgtagatctgctgcgttgcccctacggcggttttgcgtttgcgatgttgcagtggaccggaagccgcatgttccgtcgtgatctgcgttggtacgccactgacgagaagaacatgatgctggacaatcatgcgctgtatgacctgaccaagaaaatcttcctccctgctaaatcggaagaggaaattttcgcacatctggggcttgaatacctggaaccgttcgaacgtaacgca

SEQ ID NO: 3076 - protein, 529 aa, synthetic construct
  REGION 1..529: note = Variant of terminal deoxynucleotidyltransferase
MHHHHHHGGSGSHGIRTIDSDFGKKQQKKMDNHDSSATYEIKFHEFVLFILEEKMGATRRTFLTDLARKKGFRVENELTDEVTHIVAENLSRSEVLAWLKEHKMEKTKQFELLDISWLIESMKVGKPVDTKGKYQLAESGEMSANPDPTEGRENELPPTMKTVSPYACQRRTTLNNHNQRFTDALEILRENYEFKRNDDTALEFRRAISVLKSLPFEVRSLKDTEGLPWIGDEVKGIMEEIIEVGNSREVQAVLNDEWYQSFHRFKSVFGVGVKTADKWYRMGLRTLEDVRSSKTLKLTPMQKVGLLYYEDLARGVTRAEADAISLLVQDAVATFDPDAIVEIVGGFRRGKPQGHDVDLLISSPGAEKEQEDQLLQKVTNLWKKQGLLLYGRLEWTQWEDGGSPSGKADEGDAGAKCFLILKLYDHKVDKSKMEMPTGSNMGEAKPWKAIRVDLLRCPYGGFAFAMLQWTGSRMFRRDLRWYATDEKNMMLDNHALYDLTKKIFLPAKSEEEIFAHLGLEYLEPFERNA

SEQ ID NO: 3077 - DNA, 1587 bp, synthetic construct
  misc_feature 1..1587: note = Variant of terminal deoxynucleotidyltransferase
  source 1..1587: mol_type = other DNA
atgcaccatcatcatcatcatggcggtagcggcagccacggcattcgtaccatcgattcggacttcgggaagaaacagcagaaaaaaatggataaccacgatagttccgccacttatgaaatcaaatttcacgagtttgtgctgttcattctcgaagaaaaaatgggtgcgacgcgtcgtacttttctgacagatttagcccgcaagaaagggttccgcgtcgagaatgaactgaccgacgaagttacccacatcgtggcagaaaatctgtcacgctctgaagtattggcttggctgaaagaacacaagatggagaagaccaagcaattcgaactgctggatattagctggcttatcgaaagcatgaaagttggtaaaccggtggacaccaaggggaaataccagttggcggaatcgggtgagatgagtgcgaacccagatccgacagagggtcgtgaaaacgagctgcctcctactatgaagaccgtttctccgtatgcgtgtcaacgccgcaccaccctgaacaaccataatcaacgttttacggacgcactggaaattcttcgtgaaaattacgagttcaaacgcaacgatgatactgcgctggaatttcgtcgtgctatctccgtgctgaaaagccttccgtttgaggtacgtagcctgaaagacacggaaggattgccctggatcggtgatgaagtcaaagggattatggaagaaatcatcgaggtcgggaattcgcgtgaagtgcaggccgtgctcaatgatgagtggtatcaaagcttccaccgctttaagagtgtctttggagtgggggtgaagacagcagacaagtggtaccgtatgggtctgcgcaccctcgaggatgttcgttccagcaagaccctgaagttgaccccgatgcagaaagtaggtctgctgtattatgaagatcttgctcgcggcgttacgcgtgccgaagctgacgcgatttctctgctggttcaggatgcagtcgcaactttcgacccggatgcgatcgtggagattgtcggtggatttcgtcgtgggaaacctcagggtcacgacgttgatctgcttatcagttctccgggagctgagaaagagcaagaagaccagctcctgcagaaagtgaccaatctgtggaagaaacaagggttgttgctgtacggtcgtctggaatggacccagtgggaagatgggggttcgccatccggtaaggctgacgagggtgacgcgggtgcgaaatgctttctgatcctcaaactttatgatcataaagtggacaaaagcaaatgggaaatgccgacgggttcgaacatgggcgaggccaaaccgtggaaagcaattcgcgtagatctgctgcgttgcccctacggcggttttgcgtttgcgatgttgcagtggaccggaagccgcatgttccgtcgtgatctgcgttggtacgccactgacgagaagaacatgatgctggacaatcatgcgctgtatgacaggaccaagaaaatcttcctccctgctaaatcggaagaggaaattttcgcacatctggggcttgaatacctggaaccgttcgaacgtaacgca

SEQ ID NO: 3078 - protein, 529 aa, synthetic construct
  REGION 1..529: note = Variant of terminal deoxynucleotidyltransferase
MHHHHHHGGSGSHGIRTIDSDFGKKQQKKMDNHDSSATYEIKFHEFVLFILEEKMGATRRTFLTDLARKKGFRVENELTDEVTHIVAENLSRSEVLAWLKEHKMEKTKQFELLDISWLIESMKVGKPVDTKGKYQLAESGEMSANPDPTEGRENELPPTMKTVSPYACQRRTTLNNHNQRFTDALEILRENYEFKRNDDTALEFRRAISVLKSLPFEVRSLKDTEGLPWIGDEVKGIMEEIIEVGNSREVQAVLNDEWYQSFHRFKSVFGVGVKTADKWYRMGLRTLEDVRSSKTLKLTPMQKVGLLYYEDLARGVTRAEADAISLLVQDAVATFDPDAIVEIVGGFRRGKPQGHDVDLLISSPGAEKEQEDQLLQKVTNLWKKQGLLLYGRLEWTQWEDGGSPSGKADEGDAGAKCFLILKLYDHKVDKSKWEMPTGSNMGEAKPWKAIRVDLLRCPYGGFAFAMLQWTGSRMFRRDLRWYATDEKNMMLDNHALYDRTKKIFLPAKSEEEIFAHLGLEYLEPFERNA

SEQ ID NO: 3079 - DNA, 1587 bp, synthetic construct
  misc_feature 1..1587: note = Variant of terminal deoxynucleotidyltransferase
  source 1..1587: mol_type = other DNA
atgcaccatcatcatcatcatggcggtagcggcagccacggcattcgtaccatcgattcggacttcgggaagaaacagcagaaaaaaatggataaccacgatagttccgccacttatgaaatcaaatttcacgagtttgtgctgttcattctcgaagaaaaaatgggtgcgacgcgtcgtacttttctgacagatttagcccgcaagaaagggttccgcgtcgagaatgaactgaccgacgaagttacccacatcgtggcagaaaatctgtcacgctctgaagtattggcttggctgaaagaacacaagatggagaagaccaagcaattcgaactgctggatattagctggcttatcgaaagcatgaaagttggtaaaccggtggacaccaaggggaaataccagttggcggaatcgggtgagatgagtgcgaacccagatccgacagagggtcgtgaaaacgagctgcctcctactatgaagaccgtttctccgtatgcgtgtcaacgccgcaccaccctgaacaaccataatcaacgttttacggacgcactggaaattcttcgtgaaaattacgagttcaaacgcaacgatgatactgcgctggaatttcgtcgtgctatctccgtgctgaaaagccttccgtttgaggtacgtagcctgaaagacacggaaggattgccctggatcggtgatgaagtcaaagggattatggaagaaatcatcgaggtcgggaattcgcgtgaagtgcaggccgtgctcaatgatgagtggtatcaaagcttccaccgctttaagagtgtctttggagtgggggtgaagacagcagacaagtggtaccgtatgggtctgcgcaccctcgaggatgttcgttccagcaagaccctgaagttgaccccgatgcagaaagtaggtctgctgtattatgaagatcttgctcgcggcgttacgcgtgccgaagctgacgcgatttctctgctggttcaggatgcagtcgcaactttcgacccggatgcgatcgtggagattgtcggtggatttcgtcgtgggaaacctcagggtcacgacgttgatctgcttatcagttctccgggagctgagaaagagcaagaagaccagctcctgcagaaagtgaccaatctgtggaagaaacaagggttgttgctgtacggtcgtctggaatggacccagtgggaagatgggggttcgccatccggtaaggctgacgagggtgacgcgggtgcgaaatgctttctgatcctcaaactttatgatcataaagtggacaaaagcaaatgggaaatgccgacgggttcgaacatgggcgaggccaaagggtggaaagcaattcgcgtagatctgctgcgttgcccctacggcggttttgcgtttgcgatgttgcagtggaccggaagccgcatgttccgtcgtgatctgcgttggtacgccactgacgagaagaacatgatgctggacaatcatgcgctgtatgacctgaccaagaaaatcttcctccctgctaaatcggaagaggaaattttcgcacatctggggcttgaatacctggaaccgttcgaacgtaacgca

SEQ ID NO: 3080 - protein, 529 aa, synthetic construct
  REGION 1..529: note = Variant of terminal deoxynucleotidyltransferase
MHHHHHHGGSGSHGIRTIDSDFGKKQQKKMDNHDSSATYEIKFHEFVLFILEEKMGATRRTFLTDLARKKGFRVENELTDEVTHIVAENLSRSEVLAWLKEHKMEKTKQFELLDISWLIESMKVGKPVDTKGKYQLAESGEMSANPDPTEGRENELPPTMKTVSPYACQRRTTLNNHNQRFTDALEILRENYEFKRNDDTALEFRRAISVLKSLPFEVRSLKDTEGLPWIGDEVKGIMEEIIEVGNSREVQAVLNDEWYQSFHRFKSVFGVGVKTADKWYRMGLRTLEDVRSSKTLKLTPMQKVGLLYYEDLARGVTRAEADAISLLVQDAVATFDPDAIVEIVGGFRRGKPQGHDVDLLISSPGAEKEQEDQLLQKVTNLWKKQGLLLYGRLEWTQWEDGGSPSGKADEGDAGAKCFLILKLYDHKVDKSKWEMPTGSNMGEAKGWKAIRVDLLRCPYGGFAFAMLQWTGSRMFRRDLRWYATDEKNMMLDNHALYDLTKKIFLPAKSEEEIFAHLGLEYLEPFERNA

SEQ ID NO: 3081 - DNA, 1587 bp, synthetic construct
  misc_feature 1..1587: note = Variant of terminal deoxynucleotidyltransferase
  source 1..1587: mol_type = other DNA
atgcaccatcatcatcatcatggcggtagcggcagccacggcattcgtaccatcgattcggacttcgggaagaaacagcagaaaaaaatggataaccacgatagttccgccacttatgaaatcaaatttcacgagtttgtgctgttcattctcgaagaaaaaatgggtgcgacgcgtcgtacttttctgacagatttagcccgcaagaaagggttccgcgtcgagaatgaactgaccgacgaagttacccacatcgtggcagaaaatctgtcacgctctgaagtattggcttggctgaaagaacacaagatggagaagaccaagcaattcgaactgctggatattagctggcttatcgaaagcatgaaagttggtaaaccggtggacaccaaggggaaataccagttggcggaatcgggtgagatgagtgcgaacccagatccgacagagggtcgtgaaaacgagctgcctcctactatgaagaccgtttctccgtatgcgtgtcaacgccgcaccaccctgaacaaccataatcaacgttttacggacgcactggaaattcttcgtgaaaattacgagttcaaacgcaacgatgatactgcgctggaatttcgtcgtgctatctccgtgctgaaaagccttccgtttgaggtacgtagcctgaaagacacggaaggattgccctggatcggtgatgaagtcaaagggattatggaagaaatcatcgaggtcgggaattcgcgtgaagtgcaggccattctcaatgatgagtggtatcaaagcttccaccgctttaagagtgtctttggagtgggggtgaagacagcagacaagtggtaccgtatgggtctgcgcaccctcgaggatgttcgttccagcaagaccctgaagttgaccccgatgcagaaagtaggtctgctgtattatgaagatcttgctcgcggcgttacgcgtgccgaagctgacgcgatttctctgctggttcaggatgcagtcgcaactttcgacccggatgcgatcgtggagattgtcggtggatttcgtcgtgggaaacctcagggtcacgacgttgatctgcttatcagttctccgggagctgagaaagagcaagaagaccagctcctgcagaaagtgaccaatctgtggaagaaacaagggttgttgctgtacggtcgtctggaatggacccagtgggaagatgggggttcgccatccggtaaggctgacgagggtgacgcgggtgcgaaatgctttctgatcctcaaactttatgatcataaagtggacaaaagcaaatgggaaatgccgacgggttcgaacatgggcgaggccaaaccgtggaaagcaattcgcgtagatctgctgcgttgcccctacggcggttttgcgtttgcgatgttgcagtggaccggaagccgcatgttccgtcgtgatctgcgttggtacgccactgacgagaagaacatgatgctggacaatcatgcgctgtatgacctgaccaagaaaatcttcctccctgctaaatcggaagaggaaattttcgcacatctggggcttgaatacctggaaccgttcgaacgtaacgca

SEQ ID NO: 3082 - protein, 529 aa, synthetic construct
  REGION 1..529: note = Variant of terminal deoxynucleotidyltransferase
MHHHHHHGGSGSHGIRTIDSDFGKKQQKKMDNHDSSATYEIKFHEFVLFILEEKMGATRRTFLTDLARKKGFRVENELTDEVTHIVAENLSRSEVLAWLKEHKMEKTKQFELLDISWLIESMKVGKPVDTKGKYQLAESGEMSANPDPTEGRENELPPTMKTVSPYACQRRTTLNNHNQRFTDALEILRENYEFKRNDDTALEFRRAISVLKSLPFEVRSLKDTEGLPWIGDEVKGIMEEIIEVGNSREVQAILNDEWYQSFHRFKSVFGVGVKTADKWYRMGLRTLEDVRSSKTLKLTPMQKVGLLYYEDLARGVTRAEADAISLLVQDAVATFDPDAIVEIVGGFRRGKPQGHDVDLLISSPGAEKEQEDQLLQKVTNLWKKQGLLLYGRLEWTQWEDGGSPSGKADEGDAGAKCFLILKLYDHKVDKSKWEMPTGSNMGEAKPWKAIRVDLLRCPYGGFAFAMLQWTGSRMFRRDLRWYATDEKNMMLDNHALYDLTKKIFLPAKSEEEIFAHLGLEYLEPFERNA

SEQ ID NO: 3083 - DNA, 1587 bp, synthetic construct
  misc_feature 1..1587: note = Variant of terminal deoxynucleotidyltransferase
  source 1..1587: mol_type = other DNA
atgcaccatcatcatcatcatggcggtagcggcagccacggcattcgtaccatcgattcggacttcgggaagaaacagcagaaaaaaatggataaccacgatagttccgccacttatgaaatcaaatttcacgagtttgtgctgttcattctcgaagaaaaaatgggtgcgacgcgtcgtacttttctgacagatttagcccgcaagaaagggttccgcgtcgagaatgaactgaccgacgaagttacccacatcgtggcagaaaatctgtcacgctctgaagtattggcttggctgaaagaacacaagatggagaagaccaagcaattcgaactgctggatattagctggcttatcgaaagcatgaaagttggtaaaccggtggacaccaaggggaaataccagttggcggaatcgggtgagatgagtgcgaacccagatccgacagagggtcgtgaaaacgagctgcctcctactatgaagaccgtttctccgtatgcgtgtcaacgccgcaccaccctgaacaaccataatcaacgttttacggacgcactggaaattcttcgtgaaaattacgagttcaaacgcaacgatgatactgcgctggaatttcgtcgtgctatctccgtgctgaaaagccttccgtttgaggtacgtagcctgaaagacacggaaggattgccctggatcggtgatgaagtcaaagggattatggaagaaatcatcgaggtcgggaattcgcgtgaagtgcaggccgtgctcaatgatgagtggtatcaaagcttccaccgctttaagagtgtctttggagtgggggtgaagacagcagacaagtggtaccgtatgggtctgcgcaccctcgaggatgttcgttccagcaagaccctgaagttgaccccgatgcagaaagtaggtctgctgtattatgaagatcttgctcgcggcgttacgcgtgccgaagctgacgcgatttctctgctggttcaggatgcagtcgcaactttcgacccggatgcgatcgtggagattgtcggtggatttcgtcgtgggaaacctcagggtcacgacgttgatctgcttatcagttctccgggagctgagaaagagcaagaagaccagctcctgcagaaagtgaccaatctgtggaagaaacaagggttgttgctgtacggtcgtctggaatggacccagtgggaagatgggggttcgccatccggtaaggctgacgagggtgacgcgggtgcgaaatgctttctgatcctcaaactttatgatcataaagtggacaaaagcaaatgggaaatgccgacgggttcgaacatgggcgaggccaaaccgtggaaagcaattcgcgtagatctgctgcgttgcccctacggcggttttgcgtttgcgatgttgcagtggaccggaagccgcatgttccgtcgtgatctgcgttggtacgccactgaggagaagaacatgatgctggacaatcatgcgctgtatgacctgaccaagaaaatcttcctccctgctaaatcggaagaggaaattttcgcacatctggggcttgaatacctggaaccgttcgaacgtaacgca

SEQ ID NO: 3084 - protein, 529 aa, synthetic construct
  REGION 1..529: note = Variant of terminal deoxynucleotidyltransferase
MHHHHHHGGSGSHGIRTIDSDFGKKQQKKMDNHDSSATYEIKFHEFVLFILEEKMGATRRTFLTDLARKKGFRVENELTDEVTHIVAENLSRSEVLAWLKEHKMEKTKQFELLDISWLIESMKVGKPVDTKGKYQLAESGEMSANPDPTEGRENELPPTMKTVSPYACQRRTTLNNHNQRFTDALEILRENYEFKRNDDTALEFRRAISVLKSLPFEVRSLKDTEGLPWIGDEVKGIMEEIIEVGNSREVQAVLNDEWYQSFHRFKSVFGVGVKTADKWYRMGLRTLEDVRSSKTLKLTPMQKVGLLYYEDLARGVTRAEADAISLLVQDAVATFDPDAIVEIVGGFRRGKPQGHDVDLLISSPGAEKEQEDQLLQKVTNLWKKQGLLLYGRLEWTQWEDGGSPSGKADEGDAGAKCFLILKLYDHKVDKSKWEMPTGSNMGEAKPWKAIRVDLLRCPYGGFAFAMLQWTGSRMFRRDLRWYATEEKNMMLDNHALYDLTKKIFLPAKSEEEIFAHLGLEYLEPFERNA

SEQ ID NO: 3085 - DNA, 1587 bp, synthetic construct
  misc_feature 1..1587: note = Variant of terminal deoxynucleotidyltransferase
  source 1..1587: mol_type = other DNA
atgcaccatcatcatcatcatggcggtagcggcagccacggcattcgtaccatcgattcggacttcgggaagaaacagcagaaaaaaatggataaccacgatagttccgccacttatgaaatcaaatttcacgagtttgtgctgttcattctcgaagaaaaaatgggtgcgacgcgtcgtacttttctgacagatttagcccgcaagaaagggttccgcgtcgagaatgaactgaccgacgaagttacccacatcgtggcagaaaatctgtcacgctctgaagtattggcttggctgaaagaacacaagatggagaagaccaagcaattcgaactgctggatattagctggcttatcgaaagcatgaaagttggtaaaccggtggacaccaaggggaaataccagttggcggaatcgggtgagatgagtgcgaacccagatccgacagagggtcgtgaaaacgagctgcctcctactatgaagaccgtttctccgtatgcgtgtcaacgccgcaccaccctgaacaaccataatcaacgttttacggacgcactggaaattcttcgtgaaaattacgagttcaaacgcaacgatgatactgcgctggaatttcgtcgtgctatctccgtgctgaaaagccttccgtttgaggtacgtagcctgaaagacacggaaggattgccctggatcggtgatgaagtcaaagggattatggaagaaatcatcgaggtcgggaattcgcgtgaagtgcaggccgtgctcaatgatgagtggtatcaaagcttccaccgctttaagagtgtctttggagtgggggtgaagacagcagacaagtggtaccgtatgggtctgcgcaccctcgaggatgttcgttccagcaagaccctgaagttgaccccgatgcagaaagtaggtctgctgtattatgaagatcttgctcgcggcgttacgcgtgccgaagctgacgcgatttctctgctggttcaggatgcagtcgcaactttcgacccggatgcgatcgtggagattgtcggtggatttcgtcgtgggaaacctcagggtcacgacgttgatctgcttatcagttctccgggagctgagaaagagatggaagaccagctcctgcagaaagtgaccaatctgtggaagaaacaagggttgttgctgtacggtcgtctggaatggacccagtgggaagatgggggttcgccatccggtaaggctgacgagggtgacgcgggtgcgaaatgctttctgatcctcaaactttatgatcataaagtggacaaaagcaaatgggaaatgccgacgggttcgaacatgggcgaggccaaaccgtggaaagcaattcgcgtagatctgctgcgttgcccctacggcggttttgcgtttgcgatgttgcagtggaccggaagccgcatgttccgtcgtgatctgcgttggtacgccactgacgagaagaacatgatgctggacaatcatgcgctgtatgacctgaccaagaaaatcttcctccctgctaaatcggaagaggaaattttcgcacatctggggcttgaatacctggaaccgttcgaacgtaacgca

SEQ ID NO: 3086 - protein, 529 aa, synthetic construct
  REGION 1..529: note = Variant of terminal deoxynucleotidyltransferase
MHHHHHHGGSGSHGIRTIDSDFGKKQQKKMDNHDSSATYEIKFHEFVLFILEEKMGATRRTFLTDLARKKGFRVENELTDEVTHIVAENLSRSEVLAWLKEHKMEKTKQFELLDISWLIESMKVGKPVDTKGKYQLAESGEMSANPDPTEGRENELPPTMKTVSPYACQRRTTLNNHNQRFTDALEILRENYEFKRNDDTALEFRRAISVLKSLPFEVRSLKDTEGLPWIGDEVKGIMEEIIEVGNSREVQAVLNDEWYQSFHRFKSVFGVGVKTADKWYRMGLRTLEDVRSSKTLKLTPMQKVGLLYYEDLARGVTRAEADAISLLVQDAVATFDPDAIVEIVGGFRRGKPQGHDVDLLISSPGAEKEMEDQLLQKVTNLWKKQGLLLYGRLEWTQWEDGGSPSGKADEGDAGAKCFLILKLYDHKVDKSKWEMPTGSNMGEAKPWKAIRVDLLRCPYGGFAFAMLQWTGSRMFRRDLRWYATDEKNMMLDNHALYDLTKKIFLPAKSEEEIFAHLGLEYLEPFERNA

SEQ ID NO: 3087 - DNA, 1587 bp, synthetic construct
  misc_feature 1..1587: note = Variant of terminal deoxynucleotidyltransferase
  source 1..1587: mol_type = other DNA
atgcaccatcatcatcatcatggcggtagcggcagccacggcattcgtaccatcgattcggacttcgggaagaaacagcagaaaaaaatggataaccacgatagttccgccacttatgaaatcaaatttcacgagtttgtgctgttcattctcgaagaaaaaatgggtgcgacgcgtcgtacttttctgacagatttagcccgcaagaaagggttccgcgtcgagaatgaactgaccgacgaagttacccacatcgtggcagaaaatctgtcacgctctgaagtattggcttggctgaaagaacacaagatggagaagaccaagcaattcgaactgctggatattagctggcttatcgaaagcatgaaagttggtaaaccggtggacaccaaggggaaataccagttggcggaatcgggtgagatgagtgcgaacccagatccgacagagggtcgtgaaaacgagctgcctcctactatgaagaccgtttctccgtatgcgtgtcaacgccgcaccaccctgaacaaccataatcaacgttttacggacgcactggaaattcttcgtgaaaattacgagttcaaacgcaacgatgatactgcgctggaatttcgtcgtgctatctccgtgctgaaaagccttccgtttgaggtacgtagcctgaaagacacggaaggattgccctggatcggtgatgaagtcaaagggattatggaagaaatcatcgaggtcgggaattcgcgtgaagtgcaggccgtgctcaatgatgagtggtatcaaagcttccaccgctttaagagtgtctttggagtgggggtgaagacagcagacaagtggtaccgtatgggtctgcgcaccctcgaggatgttcgttccagcaagaccctgaagttgaccccgatgcagaaagtaggtctgctgtattatgaagatcttgctcgcggcgttacgcgtgccgaagctgacgcgatttctctgctggttcaggatgcagtcgcaactttcgacccggatgcgatcgtggagattgtcggtggatttcgtcgtgggaaacctcagggtcacgacgttgatctgcttatcagttctccgggagctgagaaagagcaagaagaccagctcctgcagaaagtgaccaatctgtggaagaaacaagggttgttgctgtacggtcgtctggaatggacccagtgggaagatgggggttcgccatccggtaaggctgacgagggtgacgcgggtgcgaaatgctttctgatcctcaaactttatgatcataaagtggacaaaagcaaaccggaaatgccgacgggttcgaacatgggcgaggccaaaccgtggaaagcaattcgcgtagatctgctgcgttgcccctacggcggttttgcgtttgcgatgttgcagtggaccggaagccgcatgttccgtcgtgatctgcgttggtacgccactgacgagaagaacatgatgctggacaatcatgcgctgtatgacctgaccaagaaaatcttcctccctgctaaatcggaagaggaaattttcgcacatctggggcttgaatacctggaaccgttcgaacgtaacgca

SEQ ID NO: 3088 - protein, 529 aa, synthetic construct
  REGION 1..529: note = Variant of terminal deoxynucleotidyltransferase
MHHHHHHGGSGSHGIRTIDSDFGKKQQKKMDNHDSSATYEIKFHEFVLFILEEKMGATRRTFLTDLARKKGFRVENELTDEVTHIVAENLSRSEVLAWLKEHKMEKTKQFELLDISWLIESMKVGKPVDTKGKYQLAESGEMSANPDPTEGRENELPPTMKTVSPYACQRRTTLNNHNQRFTDALEILRENYEFKRNDDTALEFRRAISVLKSLPFEVRSLKDTEGLPWIGDEVKGIMEEIIEVGNSREVQAVLNDEWYQSFHRFKSVFGVGVKTADKWYRMGLRTLEDVRSSKTLKLTPMQKVGLLYYEDLARGVTRAEADAISLLVQDAVATFDPDAIVEIVGGFRRGKPQGHDVDLLISSPGAEKEQEDQLLQKVTNLWKKQGLLLYGRLEWTQWEDGGSPSGKADEGDAGAKCFLILKLYDHKVDKSKPEMPTGSNMGEAKPWKAIRVDLLRCPYGGFAFAMLQWTGSRMFRRDLRWYATDEKNMMLDNHALYDLTKKIFLPAKSEEEIFAHLGLEYLEPFERNA

SEQ ID NO: 3089 - DNA, 1587 bp, synthetic construct
  misc_feature 1..1587: note = Variant of terminal deoxynucleotidyltransferase
  source 1..1587: mol_type = other DNA
atgcaccatcatcatcatcatggcggtagcggcagccacggcattcgtaccatcgattcggacttcgggaagaaacagcagaaaaaaatggataaccacgatagttccgccacttatgaaatcaaatttcacgagtttgtgctgttcattctcgaagaaaaaatgggtgcgacgcgtcgtacttttctgacagatttagcccgcaagaaagggttccgcgtcgagaatgaactgaccgacgaagttacccacatcgtggcagaaaatctgtcacgctctgaagtattggcttggctgaaagaacacaagatggagaagaccaagcaattcgaactgctggatattagctggcttatcgaaagcatgaaagttggtaaaccggtggacaccaaggggaaataccagttggcggaatcgggtgagatgagtgcgaacccagatccgacagagggtcgtgaaaacgagctgcctcctactatgaagaccgtttctccgtatgcgtgtcaacgccgcaccaccctgaacaaccataatcaacgttttacggacgcactggaaattcttcgtgaaaattacgagttcaaacgcaacgatgatactgcgctggaatttcgtcgtgctatctccgtgctgaaaagccttccgtttgaggtacgtagcctgaaagacacggaaggattgccctggatcggtgatgaagtcaaagggattatggaagaaatcatcgaggtcgggaattcgcgtgaagtgcaggccgtgctcaatgatgagtggtatcaaagcttccaccgctttaagagtgtctttggagtgggggtgaagacagcagacaagtggtaccgtatgggtctgcgcaccctcgaggatgttcgttccagcaagaccctgaagttgaccccgatgcagaaagtaggtctgctgtattatgaagatcttgctcgcggcgttacgcgtgccgaagctgacgcgatttctctgctggttcaggatgcagtcgcaactttcgacccggatgcgatcgtggagattgtcggtggatttcgtcgtgggaaacctcagggtcacgacgttgatctgcttatcagttctccgggagctgagaaagagcaagaagaccagctcctgcagaaagtgaccaatctgtggaagaaacaagggttgttgctgtacggtcgtctggaatggacccagtgggaagatgggggttcgccatccggtaaggctgacgagggtgacgcgggtgcgaaatgctttctgatcctcaaactttatgatcataaagtggacaaaagcaaatgggaaatgccgacgggttcgaacatgggcgagcgtaaaccgtggaaagcaattcgcgtagatctgctgcgttgcccctacggcggttttgcgtttgcgatgttgcagtggaccggaagccgcatgttccgtcgtgatctgcgttggtacgccactgacgagaagaacatgatgctggacaatcatgcgctgtatgacctgaccaagaaaatcttcctccctgctaaatcggaagaggaaattttcgcacatctggggcttgaatacctggaaccgttcgaacgtaacgca

SEQ ID NO: 3090 - protein, 529 aa, synthetic construct
  REGION 1..529: note = Variant of terminal deoxynucleotidyltransferase
MHHHHHHGGSGSHGIRTIDSDFGKKQQKKMDNHDSSATYEIKFHEFVLFILEEKMGATRRTFLTDLARKKGFRVENELTDEVTHIVAENLSRSEVLAWLKEHKMEKTKQFELLDISWLIESMKVGKPVDTKGKYQLAESGEMSANPDPTEGRENELPPTMKTVSPYACQRRTTLNNHNQRFTDALEILRENYEFKRNDDTALEFRRAISVLKSLPFEVRSLKDTEGLPWIGDEVKGIMEEIIEVGNSREVQAVLNDEWYQSFHRFKSVFGVGVKTADKWYRMGLRTLEDVRSSKTLKLTPMQKVGLLYYEDLARGVTRAEADAISLLVQDAVATFDPDAIVEIVGGFRRGKPQGHDVDLLISSPGAEKEQEDQLLQKVTNLWKKQGLLLYGRLEWTQWEDGGSPSGKADEGDAGAKCFLILKLYDHKVDKSKWEMPTGSNMGERKPWKAIRVDLLRCPYGGFAFAMLQWTGSRMFRRDLRWYATDEKNMMLDNHALYDLTKKIFLPAKSEEEIFAHLGLEYLEPFERNA

SEQ ID NO: 3091 - DNA, 1587 bp, synthetic construct
  misc_feature 1..1587: note = Variant of terminal deoxynucleotidyltransferase
  source 1..1587: mol_type = other DNA
atgcaccatcatcatcatcatggcggtagcggcagccacggcattcgtaccatcgattcggacttcgggaagaaacagcagaaaaaaatggataaccacgatagttccgccacttatgaaatcaaatttcacgagtttgtgctgttcattctcgaagaaaaaatgggtgcgacgcgtcgtacttttctgacagatttagcccgcaagaaagggttccgcgtcgagaatgaactgaccgacgaagttacccacatcgtggcagaaaatctgtcacgctctgaagtattggcttggctgaaagaacacaagatggagaagaccaagcaattcgaactgctggatattagctggcttatcgaaagcatgaaagttggtaaaccggtggacaccaaggggaaataccagttggcggaatcgggtgagatgagtgcgaacccagatccgacagagggtcgtgaaaacgagctgcctcctactatgaagaccgtttctccgtatgcgtgtcaacgccgcaccaccctgaacaaccataatcaacgttttacggacgcactggaaattcttcgtgaaaattacgagttcaaacgcaacgatgatactgcgctggaatttcgtcgtgctatctccgtgctgaaaagccttccgtttgaggtacgtagcctgaaagacacggaaggattgccctggatcggtgatgaagtcaaagggattatggaagaaatcatcgaggtcgggaattcgcgtgaagtgcaggccgtgctcaatgatgagtggtatcaaagcttccaccgctttaagagtgtctttggagtgggggtgaagacagcagacaagtggtaccgtatgggtctgcgcaccctcgaggatgttcgttccagcaagaccctgaagttgaccccgatgcagaaagtaggtctgctgtattatgaagatcttgctcgcggcgttacgcgtgccgaagctgacgcgatttctctgctggttcaggatgcagtcgcaactttcgacccggatgcgatcgtggagattgtcggtggatttcgtcgtgggaaacctcagggtcacgacgttgatctgcttatcagttctccgggagctgagaaagagcaagaagaccagctcctgcagaaagtgaccaatctgtggaagaaacaagggttgttgctgtacggtcgtctggaatggacccagtgggaagatgggggttcgccatccggtaaggctgacgagggtgacgcgggtgcgaaatgctttctgatcctcaaactttatgatcataaagtggacaaaagcaaatgggaaatgccgacgggttcgaacatgggcgaggccaaaccgtggaaagcaattcgcgtagatctgctgcgttgcccctacggcggttttgcgtttgcgatgttgcagtggaccggaagccgcatgttccgtcgtgatctgcgttggtacgccactgacgagaagaacatgatgctggacaatcatgcgctgtatgacctgaccaagaaaatcttcctccctgctaaatcggaagaggaaattttcgcacatctggggcttgaatacctggaaccgcgtgaacgtaacgca

SEQ ID NO: 3092 - protein, 529 aa, synthetic construct
  REGION 1..529: note = Variant of terminal deoxynucleotidyltransferase
MHHHHHHGGSGSHGIRTIDSDFGKKQQKKMDNHDSSATYEIKFHEFVLFILEEKMGATRRTFLTDLARKKGFRVENELTDEVTHIVAENLSRSEVLAWLKEHKMEKTKQFELLDISWLIESMKVGKPVDTKGKYQLAESGEMSANPDPTEGRENELPPTMKTVSPYACQRRTTLNNHNQRFTDALEILRENYEFKRNDDTALEFRRAISVLKSLPFEVRSLKDTEGLPWIGDEVKGIMEEIIEVGNSREVQAVLNDEWYQSFHRFKSVFGVGVKTADKWYRMGLRTLEDVRSSKTLKLTPMQKVGLLYYEDLARGVTRAEADAISLLVQDAVATFDPDAIVEIVGGFRRGKPQGHDVDLLISSPGAEKEQEDQLLQKVTNLWKKQGLLLYGRLEWTQWEDGGSPSGKADEGDAGAKCFLILKLYDHKVDKSKWEMPTGSNMGEAKPWKAIRVDLLRCPYGGFAFAMLQWTGSRMFRRDLRWYATDEKNMMLDNHALYDLTKKIFLPAKSEEEIFAHLGLEYLEPRERNA

SEQ ID NO: 3093 - DNA, 1587 bp, synthetic construct
  misc_feature 1..1587: note = Variant of terminal deoxynucleotidyltransferase
  source 1..1587: mol_type = other DNA
atgcaccatcatcatcatcatggcggtagcggcagccacggcattcgtaccatcgattcggacttcgggaagaaacagcagaaaaaaatggataaccacgatagttccgccacttatgaaatcaaatttcacgagtttgtgctgttcattctcgaagaaaaaatgggtgcgacgcgtcgtacttttctgacagatttagcccgcaagaaagggttccgcgtcgagaatgaactgaccgacgaagttacccacatcgtggcagaaaatctgtcacgctctgaagtattggcttggctgaaagaacacaagatggagaagaccaagcaattcgaactgctggatattagctggcttatcgaaagcatgaaagttggtaaaccggtggacaccaaggggaaataccagttggcggaatcgggtgagatgagtgcgaacccagatccgacagagggtcgtgaaaacgagctgcctcctactatgaagaccgtttctccgtatgcgtgtcaacgccgcaccaccctgaacaaccataatcaacgttttacggacgcactggaaattcttcgtgaaaattacgagttcaaacgcaacgatgatactgcgctggaatttcgtcgtgctatctccgtgctgaaaagccttccgtttgaggtacgtagcctgaaagacacggaaggattgccctggatcagtgatgaagtcaaagggattatggaagaaatcatcgaggtcgggaattcgcgtgaagtgcaggccgtgctcaatgatgagtggtatcaaagcttccaccgctttaagagtgtctttggagtgggggtgaagacagcagacaagtggtaccgtatgggtctgcgcaccctcgaggatgttcgttccagcaagaccctgaagttgaccccgatgcagaaagtaggtctgctgtattatgaagatcttgctcgcggcgttacgcgtgccgaagctgacgcgatttctctgctggttcaggatgcagtcgcaactttcgacccggatgcgatcgtggagattgtcggtggatttcgtcgtgggaaacctcagggtcacgacgttgatctgcttatcagttctccgggagctgagaaagagcaagaagaccagctcctgcagaaagtgaccaatctgtggaagaaacaagggttgttgctgtacggtcgtctggaatggacccagtgggaagatgggggttcgccatccggtaaggctgacgagggtgacgcgggtgcgaaatgctttctgatcctcaaactttatgatcataaagtggacaaaagcaaatgggaaatgccgacgggttcgaacatgggcgaggccaaaccgtggaaagcaattcgcgtagatctgctgcgttgcccctacggcggttttgcgtttgcgatgttgcagtggaccggaagccgcatgttccgtcgtgatctgcgttggtacgccactgacgagaagaacatgatgctggacaatcatgcgctgtatgacctgaccaagaaaatcttcctccctgctaaatcggaagaggaaattttcgcacatctggggcttgaatacctggaaccgttcgaacgtaacgca

SEQ ID NO: 3094 - protein, 529 aa, synthetic construct
  REGION 1..529: note = Variant of terminal deoxynucleotidyltransferase
MHHHHHHGGSGSHGIRTIDSDFGKKQQKKMDNHDSSATYEIKFHEFVLFILEEKMGATRRTFLTDLARKKGFRVENELTDEVTHIVAENLSRSEVLAWLKEHKMEKTKQFELLDISWLIESMKVGKPVDTKGKYQLAESGEMSANPDPTEGRENELPPTMKTVSPYACQRRTTLNNHNQRFTDALEILRENYEFKRNDDTALEFRRAISVLKSLPFEVRSLKDTEGLPWISDEVKGIMEEIIEVGNSREVQAVLNDEWYQSFHRFKSVFGVGVKTADKWYRMGLRTLEDVRSSKTLKLTPMQKVGLLYYEDLARGVTRAEADAISLLVQDAVATFDPDAIVEIVGGFRRGKPQGHDVDLLISSPGAEKEQEDQLLQKVTNLWKKQGLLLYGRLEWTQWEDGGSPSGKADEGDAGAKCFLILKLYDHKVDKSKWEMPTGSNMGEAKPWKAIRVDLLRCPYGGFAFAMLQWTGSRMFRRDLRWYATDEKNMMLDNHALYDLTKKIFLPAKSEEEIFAHLGLEYLEPFERNA

SEQ ID NO: 3095 - DNA, 1587 bp, synthetic construct
  misc_feature 1..1587: note = Variant of terminal deoxynucleotidyltransferase
  source 1..1587: mol_type = other DNA
atgcaccatcatcatcatcatggcggtagcggcagccacggcattcgtaccatcgattcggacttcgggaagaaacagcagaaaaaaatggataaccacgatagttccgccacttatgaaatcaaatttcacgagtttgtgctgttcattctcgaagaaaaaatgggtgcgacgcgtcgtacttttctgacagatttagcccgcaagaaagggttccgcgtcgagaatgaactgaccgacgaagttacccacatcgtggcagaaaatctgtcacgctctgaagtattggcttggctgaaagaacacaagatggagaagaccaagcaattcgaactgctggatattagctggcttatcgaaagcatgaaagttggtaaaccggtggacaccaaggggaaataccagttggcggaatcgggtgagatgagtgcgaacccagatccgacagagggtcgtgaaaacgagctgcctcctactatgaagaccgtttctccgtatgcgtgtcaacgccgcaccaccctgaacaaccataatcaacgttttacggacgcactggaaattcttcgtgaaaattacgagttcaaacgcaacgaggatactgcgctggaatttcgtcgtgctatctccgtgctgaaaagccttccgtttgaggtacgtagcctgaaagacacggaaggattgccctggatcggtgatgaagtcaaagggattatggaagaaatcatcgaggtcgggaattcgcgtgaagtgcaggccgtgctcaatgatgagtggtatcaaagcttccaccgctttaagagtgtctttggagtgggggtgaagacagcagacaagtggtaccgtatgggtctgcgcaccctcgaggatgttcgttccagcaagaccctgaagttgaccccgatgcagaaagtaggtctgctgtattatgaagatcttgctcgcggcgttacgcgtgccgaagctgacgcgatttctctgctggttcaggatgcagtcgcaactttcgacccggatgcgatcgtggagattgtcggtggatttcgtcgtgggaaacctcagggtcacgacgttgatctgcttatcagttctccgggagctgagaaagagcaagaagaccagctcctgcagaaagtgaccaatctgtggaagaaacaagggttgttgctgtacggtcgtctggaatggacccagtgggaagatgggggttcgccatccggtaaggctgacgagggtgacgcgggtgcgaaatgctttctgatcctcaaactttatgatcataaagtggacaaaagcaaatgggaaatgccgacgggttcgaacatgggcgaggccaaaccgtggaaagcaattcgcgtagatctgctgcgttgcccctacggcggttttgcgtttgcgatgttgcagtggaccggaagccgcatgttccgtcgtgatctgcgttggtacgccactgacgagaagaacatgatgctggacaatcatgcgctgtatgacctgaccaagaaaatcttcctccctgctaaatcggaagaggaaattttcgcacatctggggcttgaatacctggaaccgttcgaacgtaacgca

SEQ ID NO: 3096 - protein, 529 aa, synthetic construct
  REGION 1..529: note = Variant of terminal deoxynucleotidyltransferase
MHHHHHHGGSGSHGIRTIDSDFGKKQQKKMDNHDSSATYEIKFHEFVLFILEEKMGATRRTFLTDLARKKGFRVENELTDEVTHIVAENLSRSEVLAWLKEHKMEKTKQFELLDISWLIESMKVGKPVDTKGKYQLAESGEMSANPDPTEGRENELPPTMKTVSPYACQRRTTLNNHNQRFTDALEILRENYEFKRNEDTALEFRRAISVLKSLPFEVRSLKDTEGLPWIGDEVKGIMEEIIEVGNSREVQAVLNDEWYQSFHRFKSVFGVGVKTADKWYRMGLRTLEDVRSSKTLKLTPMQKVGLLYYEDLARGVTRAEADAISLLVQDAVATFDPDAIVEIVGGFRRGKPQGHDVDLLISSPGAEKEQEDQLLQKVTNLWKKQGLLLYGRLEWTQWEDGGSPSGKADEGDAGAKCFLILKLYDHKVDKSKWEMPTGSNMGEAKPWKAIRVDLLRCPYGGFAFAMLQWTGSRMFRRDLRWYATDEKNMMLDNHALYDLTKKIFLPAKSEEEIFAHLGLEYLEPFERNA

SEQ ID NO: 3097 - DNA, 1587 bp, synthetic construct
  misc_feature 1..1587: note = Variant of terminal deoxynucleotidyltransferase
  source 1..1587: mol_type = other DNA
atgcaccatcatcatcatcatggcggtagcggcagccacggcattcgtaccatcgattcggacttcgggaagaaacagcagaaaaaaatggataaccacgatagttccgccacttatgaaatcaaatttcacgagtttgtgctgttcattctcgaagaaaaaatgggtgcgacgcgtcgtacttttctgacagatttagcccgcaagaaagggttccgcgtcgagaatgaactgaccgacgaagttacccacatcgtggcagaaaatctgtcacgctctgaagtattggcttggctgaaagaacacaagatggagaagaccaagcaattcgaactgctggatattagctggcttatcgaaagcatgaaagttggtaaaccggtggacaccaaggggaaataccagttggcggaatcgggtgagatgagtgcgaacccagatccgacagagggtcgtgaaaacgagctgcctcctactatgaagaccgtttctccgtatgcgtgtcaacgccgcaccaccctgaacaaccataatcaacgttttacggacgcactggaaattcttcgtgaaaattacgagttcaaacgcaacgatgatactgcgctggaatttcgtcgtgctatctccgtgctgaaaagccttccgtttgaggtacgtagcctgaaagacacggaaggattgccctggatcggtgatgaagtcaaagggattatggaagaaatcatcgaggtcgggaattcgcgtgaagtgcaggccgtgctcaatgatgagtggtatcaaagcttccaccgctttaagagtgtctttggagtgggggtgaagacagcagacaagtggtaccgtatgggtctgcgcaccctcgaggatgttcgttccagcaagaccctgaagttgaccccgatgcagaaagtaggtctgctgtattatgaagatcttgctcgcggcgttacgcgtgccgaagctgacgcgatttctctgctggttcaggatgcagtcgcaactttcgacccggatgcgatcgtggagattgtcggtggatttcgtcgtgggaaacctcagggtcacgacgttgatctgcttatcagttctccgggagctgagaaagagcaagaagaccagctcctgcagaaagtgaccaatctgtggaagaaacaagggttgttgctgtacggtcgtctggaatggacccagtgggaagatgggggttcgccatccggtaaggctgacgagggtgacgcgggtgcgaaatgctttctgatcctcaaactttatgatcataaagtggacaaaagcaaatgggaaatgccgacgggttcgaacatgggcgagggtaaaccgtggaaagcaattcgcgtagatctgctgcgttgcccctacggcggttttgcgtttgcgatgttgcagtggaccggaagccgcatgttccgtcgtgatctgcgttggtacgccactgacgagaagaacatgatgctggacaatcatgcgctgtatgacctgaccaagaaaatcttcctccctgctaaatcggaagaggaaattttcgcacatctggggcttgaatacctggaaccgttcgaacgtaacgca

SEQ ID NO: 3098 - protein, 529 aa, synthetic construct
  REGION 1..529: note = Variant of terminal deoxynucleotidyltransferase
MHHHHHHGGSGSHGIRTIDSDFGKKQQKKMDNHDSSATYEIKFHEFVLFILEEKMGATRRTFLTDLARKKGFRVENELTDEVTHIVAENLSRSEVLAWLKEHKMEKTKQFELLDISWLIESMKVGKPVDTKGKYQLAESGEMSANPDPTEGRENELPPTMKTVSPYACQRRTTLNNHNQRFTDALEILRENYEFKRNDDTALEFRRAISVLKSLPFEVRSLKDTEGLPWIGDEVKGIMEEIIEVGNSREVQAVLNDEWYQSFHRFKSVFGVGVKTADKWYRMGLRTLEDVRSSKTLKLTPMQKVGLLYYEDLARGVTRAEADAISLLVQDAVATFDPDAIVEIVGGFRRGKPQGHDVDLLISSPGAEKEQEDQLLQKVTNLWKKQGLLLYGRLEWTQWEDGGSPSGKADEGDAGAKCFLILKLYDHKVDKSKWEMPTGSNMGEGKPWKAIRVDLLRCPYGGFAFAMLQWTGSRMFRRDLRWYATDEKNMMLDNHALYDLTKKIFLPAKSEEEIFAHLGLEYLEPFERNA

SEQ ID NO: 3099 - DNA, 1587 bp, synthetic construct
  misc_feature 1..1587: note = Variant of terminal deoxynucleotidyltransferase
  source 1..1587: mol_type = other DNA
atgcaccatcatcatcatcatggcggtagcggcagccacggcattcgtaccatcgattcggacttcgggaagaaacagcagaaaaaaatggataaccacgatagttccgccacttatgaaatcaaatttcacgagtttgtgctgttcattctcgaagaaaaaatgggtgcgacgcgtcgtacttttctgacagatttagcccgcaagaaagggttccgcgtcgagaatgaactgaccgacgaagttacccacatcgtggcagaaaatctgtcacgctctgaagtattggcttggctgaaagaacacaagatggagaagaccaagcaattcgaactgctggatattagctggcttatcgaaagcatgaaagttggtaaaccggtggacaccaaggggaaataccagttggcggaatcgggtgagatgagtgcgaacccagatccgacagagggtcgtgaaaacgagctgcctcctactatgaagaccgtttctccgtatgcgtgtcaacgccgcaccaccctgaacaaccataatcaacgttttacggacgcactggaaattcttcgtgaaaattacgagttcaaacgcaacgatgatactgcgctggaatttcgtcgtgctatctccgtgctgaaaagccttccgtttgaggtacgtagcctgaaagacacggaaggattgccctggatcggtgatgaagtcaaagggattatggaagaaatcatcgaggtcgggaattcgcgtgaagtgcaggccgtgctcaatgatgagtggtatcaaagcttccaccgctttaagagtgtctttggagtgggggtgaagacagcagacaagtggtaccgtatgggtctgcgcaccctcgaggatgttcgttccagcaagaccctgaagttgaccccgatgcagaaagtaggtctgctgtattatgaagatcttgctcgcggcgttacgcgtgccgaagctgacgcgatttctctgctggttcaggatgcagtcgcaactttcgacccggatgcgatcgtggagattgtcggtggatttcgtcgtgggaaacctcagggtcacgacgttgatctgcttatcagttctccgggagctgagaaagagcaagaagaccagctcctgcagaaagtgaccaatctgtggaagaaacaagggttgttgctgtacggtcgtctggaatggacccagtgggaagatgggggttcgccatccggtaaggctgacgagggtgacgcgggtgcgaaatgctttctgatcctcaaactttatgatcataaagtggacaaaagcaaatgggaaatgccggggggttcgaacatgggcgaggccaaaccgtggaaagcaattcgcgtagatctgctgcgttgcccctacggcggttttgcgtttgcgatgttgcagtggaccggaagccgcatgttccgtcgtgatctgcgttggtacgccactgacgagaagaacatgatgctggacaatcatgcgctgtatgacctgaccaagaaaatcttcctccctgctaaatcggaagaggaaattttcgcacatctggggcttgaatacctggaaccgttcgaacgtaacgca

SEQ ID NO: 3100 - protein, 529 aa, synthetic construct
  REGION 1..529: note = Variant of terminal deoxynucleotidyltransferase
MHHHHHHGGSGSHGIRTIDSDFGKKQQKKMDNHDSSATYEIKFHEFVLFILEEKMGATRRTFLTDLARKKGFRVENELTDEVTHIVAENLSRSEVLAWLKEHKMEKTKQFELLDISWLIESMKVGKPVDTKGKYQLAESGEMSANPDPTEGRENELPPTMKTVSPYACQRRTTLNNHNQRFTDALEILRENYEFKRNDDTALEFRRAISVLKSLPFEVRSLKDTEGLPWIGDEVKGIMEEIIEVGNSREVQAVLNDEWYQSFHRFKSVFGVGVKTADKWYRMGLRTLEDVRSSKTLKLTPMQKVGLLYYEDLARGVTRAEADAISLLVQDAVATFDPDAIVEIVGGFRRGKPQGHDVDLLISSPGAEKEQEDQLLQKVTNLWKKQGLLLYGRLEWTQWEDGGSPSGKADEGDAGAKCFLILKLYDHKVDKSKWEMPGGSNMGEAKPWKAIRVDLLRCPYGGFAFAMLQWTGSRMFRRDLRWYATDEKNMMLDNHALYDLTKKIFLPAKSEEEIFAHLGLEYLEPFERNA

SEQ ID NO: 3101 - DNA, 1587 bp, synthetic construct
  misc_feature 1..1587: note = Variant of terminal deoxynucleotidyltransferase
  source 1..1587: mol_type = other DNA
atgcaccatcatcatcatcatggcggtagcggcagccacggcattcgtaccatcgattcggacttcgggaagaaacagcagaaaaaaatggataaccacgatagttccgccacttatgaaatcaaatttcacgagtttgtgctgttcattctcgaagaaaaaatgggtgcgacgcgtcgtacttttctgacagatttagcccgcaagaaagggttccgcgtcgagaatgaactgaccgacgaagttacccacatcgtggcagaaaatctgtcacgctctgaagtattggcttggctgaaagaacacaagatggagaagaccaagcaattcgaactgctggatattagctggcttatcgaaagcatgaaagttggtaaaccggtggacaccaaggggaaataccagttggcggaatcgggtgagatgagtgcgaacccagatccgacagagggtcgtgaaaacgagctgcctcctactatgaagaccgtttctccgtatgcgtgtcaacgccgcaccaccctgaacaaccataatcaacgttttacggacgcactggaaattcttcgtgaaaattacgagttcaaacgcaacgatgatactgcgctggaatttcgtcgtgctatctccgtgctgaaaagccttccgtttgaggtacgtagcctgaaagacacggaaggattgccctggatcggtgatagggtcaaagggattatggaagaaatcatcgaggtcgggaattcgcgtgaagtgcaggccgtgctcaatgatgagtggtatcaaagcttccaccgctttaagagtgtctttggagtgggggtgaagacagcagacaagtggtaccgtatgggtctgcgcaccctcgaggatgttcgttccagcaagaccctgaagttgaccccgatgcagaaagtaggtctgctgtattatgaagatcttgctcgcggcgttacgcgtgccgaagctgacgcgatttctctgctggttcaggatgcagtcgcaactttcgacccggatgcgatcgtggagattgtcggtggatttcgtcgtgggaaacctcagggtcacgacgttgatctgcttatcagttctccgggagctgagaaagagcaagaagaccagctcctgcagaaagtgaccaatctgtggaagaaacaagggttgttgctgtacggtcgtctggaatggacccagtgggaagatgggggttcgccatccggtaaggctgacgagggtgacgcgggtgcgaaatgctttctgatcctcaaactttatgatcataaagtggacaaaagcaaatgggaaatgccgacgggttcgaacatgggcgaggccaaaccgtggaaagcaattcgcgtagatctgctgcgttgcccctacggcggttttgcgtttgcgatgttgcagtggaccggaagccgcatgttccgtcgtgatctgcgttggtacgccactgacgagaagaacatgatgctggacaatcatgcgctgtatgacctgaccaagaaaatcttcctccctgctaaatcggaagaggaaattttcgcacatctggggcttgaatacctggaaccgttcgaacgtaacgca

SEQ ID NO: 3102 - protein, 529 aa, synthetic construct
  REGION 1..529: note = Variant of terminal deoxynucleotidyltransferase
MHHHHHHGGSGSHGIRTIDSDFGKKQQKKMDNHDSSATYEIKFHEFVLFILEEKMGATRRTFLTDLARKKGFRVENELTDEVTHIVAENLSRSEVLAWLKEHKMEKTKQFELLDISWLIESMKVGKPVDTKGKYQLAESGEMSANPDPTEGRENELPPTMKTVSPYACQRRTTLNNHNQRFTDALEILRENYEFKRNDDTALEFRRAISVLKSLPFEVRSLKDTEGLPWIGDRVKGIMEEIIEVGNSREVQAVLNDEWYQSFHRFKSVFGVGVKTADKWYRMGLRTLEDVRSSKTLKLTPMQKVGLLYYEDLARGVTRAEADAISLLVQDAVATFDPDAIVEIVGGFRRGKPQGHDVDLLISSPGAEKEQEDQLLQKVTNLWKKQGLLLYGRLEWTQWEDGGSPSGKADEGDAGAKCFLILKLYDHKVDKSKWEMPTGSNMGEAKPWKAIRVDLLRCPYGGFAFAMLQWTGSRMFRRDLRWYATDEKNMMLDNHALYDLTKKIFLPAKSEEEIFAHLGLEYLEPFERNA

SEQ ID NO: 3103 - DNA, 1587 bp, synthetic construct
  misc_feature 1..1587: note = Variant of terminal deoxynucleotidyltransferase
  source 1..1587: mol_type = other DNA
atgcaccatcatcatcatcatggcggtagcggcagccacggcattcgtaccatcgattcggacttcgggaagaaacagcagaaaaaaatggataaccacgatagttccgccacttatgaaatcaaatttcacgagtttgtgctgttcattctcgaagaaaaaatgggtgcgacgcgtcgtacttttctgacagatttagcccgcaagaaagggttccgcgtcgagaatgaactgaccgacgaagttacccacatcgtggcagaaaatctgtcacgctctgaagtattggcttggctgaaagaacacaagatggagaagaccaagcaattcgaactgctggatattagctggcttatcgaaagcatgaaagttggtaaaccggtggacaccaaggggaaataccagttggcggaatcgggtgagatgagtgcgaacccagatccgacagagggtcgtgaaaacgagctgcctcctactatgaagaccgtttctccgtatgcgtgtcaacgccgcaccaccctgaacaaccataatcaacgttttacggacgcactggaaattcttcgtgaaaattacgagttcaaacgcaacgatgatactgcgctggaatttcgtcgtgctatctccgtgctgaaaagccttccgtttgaggtacgtagcctgaaagacacggaaggattgccctggatcggtgatgaagtcaaagggattatggaagaaatcatcgaggtcgggaattcgcgtgaagtgcaggccgtgctcaatgatgagtggtatcaaagcttccaccgctttaagagtgtctttggagtgggggtgaagacagcagacaagtggtaccgtatgggtctgcgcaccctcgaggatgttcgttccagcaagaccctgaagttgaccccgatgcagaaagtaggtctgctgtattatgaagatcttgctcgcggcgttacgcgtgccgaagctgacgcgatttctctgctggttcaggatgcagtcgcaactttcgacccggatgcgatcgtggagattgtcggtggatttcgtcgtgggaaacctcagggtcacgacgttgatctgcttatcagttctccgggagctgagaaagagcaagaagaccagctcctgcagaaagtgaccaatctgtggaagaaacaagggttgttgctgtacggtcgtctggaatggacccagtgggaagatgggggttcgccatccggtaaggctgacgagggtgacgcgggtgcgaaatgctttctgatcctcaaactttatgatcataaagtggacaaaagcaaatgggaaatgccgacgggttcgaacatgggcgaggccaaaccgtggaaagcaattcgcgtagatctgctgcgttgcccctacggcggttttgcgtttgcgatgttgcagtggaccggaagccgcatgttccgtcgtgatctgcgttggtacgccactgacgagaagaacatgatgctggacaatcatgcgctgtatgacctgaccaagaaaatcttcctccctgctaaatcggaagaggaaattttcgcacatctggggcttgaatacctggaaccgcaggaacgtaacgca

SEQ ID NO: 3104 - protein, 529 aa, synthetic construct
  REGION 1..529: note = Variant of terminal deoxynucleotidyltransferase
MHHHHHHGGSGSHGIRTIDSDFGKKQQKKMDNHDSSATYEIKFHEFVLFILEEKMGATRRTFLTDLARKKGFRVENELTDEVTHIVAENLSRSEVLAWLKEHKMEKTKQFELLDISWLIESMKVGKPVDTKGKYQLAESGEMSANPDPTEGRENELPPTMKTVSPYACQRRTTLNNHNQRFTDALEILRENYEFKRNDDTALEFRRAISVLKSLPFEVRSLKDTEGLPWIGDEVKGIMEEIIEVGNSREVQAVLNDEWYQSFHRFKSVFGVGVKTADKWYRMGLRTLEDVRSSKTLKLTPMQKVGLLYYEDLARGVTRAEADAISLLVQDAVATFDPDAIVEIVGGFRRGKPQGHDVDLLISSPGAEKEQEDQLLQKVTNLWKKQGLLLYGRLEWTQWEDGGSPSGKADEGDAGAKCFLILKLYDHKVDKSKWEMPTGSNMGEAKPWKAIRVDLLRCPYGGFAFAMLQWTGSRMFRRDLRWYATDEKNMMLDNHALYDLTKKIFLPAKSEEEIFAHLGLEYLEPQERNA

SEQ ID NO: 3105 - DNA, 1587 bp, synthetic construct
  misc_feature 1..1587: note = Variant of terminal deoxynucleotidyltransferase
  source 1..1587: mol_type = other DNA
atgcaccatcatcatcatcatggcggtagcggcagccacggcattcgtaccatcgattcggacttcgggaagaaacagcagaaaaaaatggataaccacgatagttccgccacttatgaaatcaaatttcacgagtttgtgctgttcattctcgaagaaaaaatgggtgcgacgcgtcgtacttttctgacagatttagcccgcaagaaagggttccgcgtcgagaatgaactgaccgacgaagttacccacatcgtggcagaaaatctgtcacgctctgaagtattggcttggctgaaagaacacaagatggagaagaccaagcaattcgaactgctggatattagctggcttatcgaaagcatgaaagttggtaaaccggtggacaccaaggggaaataccagttggcggaatcgggtgagatgagtgcgaacccagatccgacagagggtcgtgaaaacgagctgcctcctactatgaagaccgtttctccgtatgcgtgtcaacgccgcaccaccctgaacaaccataatcaacgttttacggacgcactggaaattcttcgtgaaaattacgagttcaaacgcaacgatgatactgcgctggaatttcgtcgtgctatctccgtgctgaaaagccttccgtttgaggtacgtagcctgaaagacacggaaggattgccctggatcggtgatgaagtcaaagggattatggaagaaatcatcgaggtcgggaattcgactgaagtgcaggccgtgctcaatgatgagtggtatcaaagcttccaccgctttaagagtgtctttggagtgggggtgaagacagcagacaagtggtaccgtatgggtctgcgcaccctcgaggatgttcgttccagcaagaccctgaagttgaccccgatgcagaaagtaggtctgctgtattatgaagatcttgctcgcggcgttacgcgtgccgaagctgacgcgatttctctgctggttcaggatgcagtcgcaactttcgacccggatgcgatcgtggagattgtcggtggatttcgtcgtgggaaacctcagggtcacgacgttgatctgcttatcagttctccgggagctgagaaagagcaagaagaccagctcctgcagaaagtgaccaatctgtggaagaaacaagggttgttgctgtacggtcgtctggaatggacccagtgggaagatgggggttcgccatccggtaaggctgacgagggtgacgcgggtgcgaaatgctttctgatcctcaaactttatgatcataaagtggacaaaagcaaatgggaaatgccgacgggttcgaacatgggcgaggccaaaccgtggaaagcaattcgcgtagatctgctgcgttgcccctacggcggttttgcgtttgcgatgttgcagtggaccggaagccgcatgttccgtcgtgatctgcgttggtacgccactgacgagaagaacatgatgctggacaatcatgcgctgtatgacctgaccaagaaaatcttcctccctgctaaatcggaagaggaaattttcgcacatctggggcttgaatacctggaaccgttcgaacgtaacgca

SEQ ID NO: 3106 - protein, 529 aa, synthetic construct
  REGION 1..529: note = Variant of terminal deoxynucleotidyltransferase
MHHHHHHGGSGSHGIRTIDSDFGKKQQKKMDNHDSSATYEIKFHEFVLFILEEKMGATRRTFLTDLARKKGFRVENELTDEVTHIVAENLSRSEVLAWLKEHKMEKTKQFELLDISWLIESMKVGKPVDTKGKYQLAESGEMSANPDPTEGRENELPPTMKTVSPYACQRRTTLNNHNQRFTDALEILRENYEFKRNDDTALEFRRAISVLKSLPFEVRSLKDTEGLPWIGDEVKGIMEEIIEVGNSTEVQAVLNDEWYQSFHRFKSVFGVGVKTADKWYRMGLRTLEDVRSSKTLKLTPMQKVGLLYYEDLARGVTRAEADAISLLVQDAVATFDPDAIVEIVGGFRRGKPQGHDVDLLISSPGAEKEQEDQLLQKVTNLWKKQGLLLYGRLEWTQWEDGGSPSGKADEGDAGAKCFLILKLYDHKVDKSKWEMPTGSNMGEAKPWKAIRVDLLRCPYGGFAFAMLQWTGSRMFRRDLRWYATDEKNMMLDNHALYDLTKKIFLPAKSEEEIFAHLGLEYLEPFERNA

SEQ ID NO: 3107 - DNA, 1587 bp, synthetic construct
  misc_feature 1..1587: note = Variant of terminal deoxynucleotidyltransferase
  source 1..1587: mol_type = other DNA
atgcaccatcatcatcatcatggcggtagcggcagccacggcattcgtaccatcgattcggacttcgggaagaaacagcagaaaaaaatggataaccacgatagttccgccacttatgaaatcaaatttcacgagtttgtgctgttcattctcgaagaaaaaatgggtgcgacgcgtcgtacttttctgacagatttagcccgcaagaaagggttccgcgtcgagaatgaactgaccgacgaagttacccacatcgtggcagaaaatctgtcacgctctgaagtattggcttggctgaaagaacacaagatggagaagaccaagcaattcgaactgctggatattagctggcttatcgaaagcatgaaagttggtaaaccggtggacaccaaggggaaataccagttggcggaatcgggtgagatgagtgcgaacccagatccgacagagggtcgtgaaaacgagctgcctcctactatgaagaccgtttctccgtatgcgtgtcaacgccgcaccaccctgaacaaccataatcaacgttttacggacgcactggaaattcttcgtgaaaattacgagttcaaacgcaacgatgatactgcgctggaatttcgtcgtgctatctccgtgctgaaaagccttccgtttgaggtacgtagcctgaaagacacggaaggattgccctggatcggtgatgaagtcaaagggattatggaagaaatcatcgaggtcgggaattcgcgtgaagtgcaggccgtgctcaatgatgagtggtatcaaagcttccaccgctttacgagtgtctttggagtgggggtgaagacagcagacaagtggtaccgtatgggtctgcgcaccctcgaggatgttcgttccagcaagaccctgaagttgaccccgatgcagaaagtaggtctgctgtattatgaagatcttgctcgcggcgttacgcgtgccgaagctgacgcgatttctctgctggttcaggatgcagtcgcaactttcgacccggatgcgatcgtggagattgtcggtggatttcgtcgtgggaaacctcagggtcacgacgttgatctgcttatcagttctccgggagctgagaaagagcaagaagaccagctcctgcagaaagtgaccaatctgtggaagaaacaagggttgttgctgtacggtcgtctggaatggacccagtgggaagatgggggttcgccatccggtaaggctgacgagggtgacgcgggtgcgaaatgctttctgatcctcaaactttatgatcataaagtggacaaaagcaaatgggaaatgccgacgggttcgaacatgggcgaggccaaaccgtggaaagcaattcgcgtagatctgctgcgttgcccctacggcggttttgcgtttgcgatgttgcagtggaccggaagccgcatgttccgtcgtgatctgcgttggtacgccactgacgagaagaacatgatgctggacaatcatgcgctgtatgacctgaccaagaaaatcttcctccctgctaaatcggaagaggaaattttcgcacatctggggcttgaatacctggaaccgttcgaacgtaacgca

SEQ ID NO: 3108 - protein, 529 aa, synthetic construct
  REGION 1..529: note = Variant of terminal deoxynucleotidyltransferase
MHHHHHHGGSGSHGIRTIDSDFGKKQQKKMDNHDSSATYEIKFHEFVLFILEEKMGATRRTFLTDLARKKGFRVENELTDEVTHIVAENLSRSEVLAWLKEHKMEKTKQFELLDISWLIESMKVGKPVDTKGKYQLAESGEMSANPDPTEGRENELPPTMKTVSPYACQRRTTLNNHNQRFTDALEILRENYEFKRNDDTALEFRRAISVLKSLPFEVRSLKDTEGLPWIGDEVKGIMEEIIEVGNSREVQAVLNDEWYQSFHRFTSVFGVGVKTADKWYRMGLRTLEDVRSSKTLKLTPMQKVGLLYYEDLARGVTRAEADAISLLVQDAVATFDPDAIVEIVGGFRRGKPQGHDVDLLISSPGAEKEQEDQLLQKVTNLWKKQGLLLYGRLEWTQWEDGGSPSGKADEGDAGAKCFLILKLYDHKVDKSKWEMPTGSNMGEAKPWKAIRVDLLRCPYGGFAFAMLQWTGSRMFRRDLRWYATDEKNMMLDNHALYDLTKKIFLPAKSEEEIFAHLGLEYLEPFERNA

SEQ ID NO: 3109 - DNA, 1587 bp, synthetic construct
  misc_feature 1..1587: note = Variant of terminal deoxynucleotidyltransferase
  source 1..1587: mol_type = other DNA
atgcaccatcatcatcatcatggcggtagcggcagccacggcattcgtaccatcgattcggacttcgggaagaaacagcagaaaaaaatggataaccacgatagttccgccacttatgaaatcaaatttcacgagtttgtgctgttcattctcgaagaaaaaatgggtgcgacgcgtcgtacttttctgacagatttagcccgcaagaaagggttccgcgtcgagaatgaactgaccgacgaagttacccacatcgtggcagaaaatctgtcacgctctgaagtattggcttggctgaaagaacacaagatggagaagaccaagcaattcgaactgctggatattagctggcttatcgaaagcatgaaagttggtaaaccggtggacaccaaggggaaataccagttggcggaatcgggtgagatgagtgcgaacccagatccgacagagggtcgtgaaaacgagctgcctcctactatgaagaccgtttctccgtatgcgtgtcaacgccgcaccaccctgaacaaccataatcaacgttttacggacgcactggaaattcttcgtgaaaattacgagttcaaacgcaacgatgatactgcgctggaatttcgtcgtgctatctccgtgctgaaaagccttccgtttgaggtacgtagcctgaaagacacggaaggattgccctggatcggtgatgaagtcaaagggattatggaagaaatcatcgaggtcgggaattcgcgtgaagtgcaggccgtgctcaatgatgagtggtatcaaagcttccaccgctttaagagtgtctttggagtgggggtgaagacagcagacaagtggtaccgtatgggtctgcgcaccctcgaggatgttcgttccagcaagaccctgaagttgaccccgatgcagaaagtaggtctgctgtattatgaagatcttgctcgcggcgttacgcgtgccgaagctgacgcgatttctctgctggttcaggatgcagtcgcaactttcgacccggatgcgatcgtggagattgtcggtggatttcgtcgtgggaaacctcagggtcacgacgttgatctgcttatcagttctccgggagtggagaaagagcaagaagaccagctcctgcagaaagtgaccaatctgtggaagaaacaagggttgttgctgtacggtcgtctggaatggacccagtgggaagatgggggttcgccatccggtaaggctgacgagggtgacgcgggtgcgaaatgctttctgatcctcaaactttatgatcataaagtggacaaaagcaaatgggaaatgccgacgggttcgaacatgggcgaggccaaaccgtggaaagcaattcgcgtagatctgctgcgttgcccctacggcggttttgcgtttgcgatgttgcagtggaccggaagccgcatgttccgtcgtgatctgcgttggtacgccactgacgagaagaacatgatgctggacaatcatgcgctgtatgacctgaccaagaaaatcttcctccctgctaaatcggaagaggaaattttcgcacatctggggcttgaatacctggaaccgttcgaacgtaacgca

SEQ ID NO: 3110 - protein, 529 aa, synthetic construct
  REGION 1..529: note = Variant of terminal deoxynucleotidyltransferase
MHHHHHHGGSGSHGIRTIDSDFGKKQQKKMDNHDSSATYEIKFHEFVLFILEEKMGATRRTFLTDLARKKGFRVENELTDEVTHIVAENLSRSEVLAWLKEHKMEKTKQFELLDISWLIESMKVGKPVDTKGKYQLAESGEMSANPDPTEGRENELPPTMKTVSPYACQRRTTLNNHNQRFTDALEILRENYEFKRNDDTALEFRRAISVLKSLPFEVRSLKDTEGLPWIGDEVKGIMEEIIEVGNSREVQAVLNDEWYQSFHRFKSVFGVGVKTADKWYRMGLRTLEDVRSSKTLKLTPMQKVGLLYYEDLARGVTRAEADAISLLVQDAVATFDPDAIVEIVGGFRRGKPQGHDVDLLISSPGVEKEQEDQLLQKVTNLWKKQGLLLYGRLEWTQWEDGGSPSGKADEGDAGAKCFLILKLYDHKVDKSKWEMPTGSNMGEAKPWKAIRVDLLRCPYGGFAFAMLQWTGSRMFRRDLRWYATDEKNMMLDNHALYDLTKKIFLPAKSEEEIFAHLGLEYLEPFERNA

SEQ ID NO: 3111 - DNA, 1587 bp, synthetic construct
  misc_feature 1..1587: note = Variant of terminal deoxynucleotidyltransferase
  source 1..1587: mol_type = other DNA
atgcaccatcatcatcatcatggcggtagcggcagccacggcattcgtaccatcgattcggacttcgggaagaaacagcagaaaaaaatggataaccacgatagttccgccacttatgaaatcaaatttcacgagtttgtgctgttcattctcgaagaaaaaatgggtgcgacgcgtcgtacttttctgacagatttagcccgcaagaaagggttccgcgtcgagaatgaactgaccgacgaagttacccacatcgtggcagaaaatctgtcacgctctgaagtattggcttggctgaaagaacacaagatggagaagaccaagcaattcgaactgctggatattagctggcttatcgaaagcatgaaagttggtaaaccggtggacaccaaggggaaataccagttggcggaatcgggtgagatgagtgcgaacccagatccgacagagggtcgtgaaaacgagctgcctcctactatgaagaccgtttctccgtatgcgtgtcaacgccgcaccaccctgaacaaccataatcaacgttttacggacgcactggatattcttcgtgaaaattacgagttcaaacgcaacgatgatactgcgctggaatttcgtcgtgctatctccgtgctgaaaagccttccgtttgaggtacgtagcctgaaagacacggaaggattgccctggatcggtgatgaagtcaaagggattatggaagaaatcatcgaggtcgggaattcgcgtgaagtgcaggccgtgctcaatgatgagtggtatcaaagcttccaccgctttaagagtgtctttggagtgggggtgaagacagcagacaagtggtaccgtatgggtctgcgcaccctcgaggatgttcgttccagcaagaccctgaagttgaccccgatgcagaaagtaggtctgctgtattatgaagatcttgctcgcggcgttacgcgtgccgaagctgacgcgatttctctgctggttcaggatgcagtcgcaactttcgacccggatgcgatcgtggagattgtcggtggatttcgtcgtgggaaacctcagggtcacgacgttgatctgcttatcagttctccgggagctgagaaagagcaagaagaccagctcctgcagaaagtgaccaatctgtggaagaaacaagggttgttgctgtacggtcgtctggaatggacccagtgggaagatgggggttcgccatccggtaaggctgacgagggtgacgcgggtgcgaaatgctttctgatcctcaaactttatgatcataaagtggacaaaagcaaatgggaaatgccgacgggttcgaacatgggcgaggccaaaccgtggaaagcaattcgcgtagatctgctgcgttgcccctacggcggttttgcgtttgcgatgttgcagtggaccggaagccgcatgttccgtcgtgatctgcgttggtacgccactgacgagaagaacatgatgctggacaatcatgcgctgtatgacctgaccaagaaaatcttcctccctgctaaatcggaagaggaaattttcgcacatctggggcttgaatacctggaaccgttcgaacgtaacgca

SEQ ID NO: 3112 - protein, 529 aa, synthetic construct
  REGION 1..529: note = Variant of terminal deoxynucleotidyltransferase
MHHHHHHGGSGSHGIRTIDSDFGKKQQKKMDNHDSSATYEIKFHEFVLFILEEKMGATRRTFLTDLARKKGFRVENELTDEVTHIVAENLSRSEVLAWLKEHKMEKTKQFELLDISWLIESMKVGKPVDTKGKYQLAESGEMSANPDPTEGRENELPPTMKTVSPYACQRRTTLNNHNQRFTDALDILRENYEFKRNDDTALEFRRAISVLKSLPFEVRSLKDTEGLPWIGDEVKGIMEEIIEVGNSREVQAVLNDEWYQSFHRFKSVFGVGVKTADKWYRMGLRTLEDVRSSKTLKLTPMQKVGLLYYEDLARGVTRAEADAISLLVQDAVATFDPDAIVEIVGGFRRGKPQGHDVDLLISSPGAEKEQEDQLLQKVTNLWKKQGLLLYGRLEWTQWEDGGSPSGKADEGDAGAKCFLILKLYDHKVDKSKWEMPTGSNMGEAKPWKAIRVDLLRCPYGGFAFAMLQWTGSRMFRRDLRWYATDEKNMMLDNHALYDLTKKIFLPAKSEEEIFAHLGLEYLEPFERNA

SEQ ID NO: 3113 - DNA, 1587 bp, synthetic construct
  misc_feature 1..1587: note = Variant of terminal deoxynucleotidyltransferase
  source 1..1587: mol_type = other DNA
atgcaccatcatcatcatcatggcggtagcggcagccacggcattcgtaccatcgattcggacttcgggaagaaacagcagaaaaaaatggataaccacgatagttccgccacttatgaaatcaaatttcacgagtttgtgctgttcattctcgaagaaaaaatgggtgcgacgcgtcgtacttttctgacagatttagcccgcaagaaagggttccgcgtcgagaatgaactgaccgacgaagttacccacatcgtggcagaaaatctgtcacgctctgaagtattggcttggctgaaagaacacaagatggagaagaccaagcaattcgaactgctggatattagctggcttatcgaaagcatgaaagttggtaaaccggtggacaccaaggggaaataccagttggcggaatcgggtgagatgagtgcgaacccagatccgacagagggtcgtgaaaacgagctgcctcctactatgaagaccgtttctccgtatgcgtgtcaacgccgcaccaccctgaacaaccataatcaacgttttacggacgcactggaaattcttcgtgaaaattacgagttcaaacgcaacgatgatactgcgctggaatttcgtcgtgctatctccgtgctgaaaagccttccgtttgaggtacgtagcctgaaagacacggaaggattgccctggatcggtgatgaagtcaaagggattatggaagaaatcatcgaggtcgggaattcgcgtgaagtgcaggccgtgctcaatgatgagtggtatcaaagcttccaccgctttaagagtgtctttggagtgggggtgaagacagcagacaagtggtaccgtatgggtctgcgcaccctcgaggatgttcgttccagcaagaccctgaagttgaccccgatgcagaaagtaggtctgctgtattatgaagatcttgctcgcggcgttacgcgtgccgaagctgacgcgatttctctgctggttcaggatgcagtcgcaactttcgacccggatgcgatcgtggagattgtcggtggatttcgtcgtgggaaacctcagggtcacgacgttgatctgcttatcagttctccgggagctgagagggagcaagaagaccagctcctgcagaaagtgaccaatctgtggaagaaacaagggttgttgctgtacggtcgtctggaatggacccagtgggaagatgggggttcgccatccggtaaggctgacgagggtgacgcgggtgcgaaatgctttctgatcctcaaactttatgatcataaagtggacaaaagcaaatgggaaatgccgacgggttcgaacatgggcgaggccaaaccgtggaaagcaattcgcgtagatctgctgcgttgcccctacggcggttttgcgtttgcgatgttgcagtggaccggaagccgcatgttccgtcgtgatctgcgttggtacgccactgacgagaagaacatgatgctggacaatcatgcgctgtatgacctgaccaagaaaatcttcctccctgctaaatcggaagaggaaattttcgcacatctggggcttgaatacctggaaccgttcgaacgtaacgca

SEQ ID NO: 3114 - protein, 529 aa, synthetic construct
  REGION 1..529: note = Variant of terminal deoxynucleotidyltransferase
MHHHHHHGGSGSHGIRTIDSDFGKKQQKKMDNHDSSATYEIKFHEFVLFILEEKMGATRRTFLTDLARKKGFRVENELTDEVTHIVAENLSRSEVLAWLKEHKMEKTKQFELLDISWLIESMKVGKPVDTKGKYQLAESGEMSANPDPTEGRENELPPTMKTVSPYACQRRTTLNNHNQRFTDALEILRENYEFKRNDDTALEFRRAISVLKSLPFEVRSLKDTEGLPWIGDEVKGIMEEIIEVGNSREVQAVLNDEWYQSFHRFKSVFGVGVKTADKWYRMGLRTLEDVRSSKTLKLTPMQKVGLLYYEDLARGVTRAEADAISLLVQDAVATFDPDAIVEIVGGFRRGKPQGHDVDLLISSPGAEREQEDQLLQKVTNLWKKQGLLLYGRLEWTQWEDGGSPSGKADEGDAGAKCFLILKLYDHKVDKSKWEMPTGSNMGEAKPWKAIRVDLLRCPYGGFAFAMLQWTGSRMFRRDLRWYATDEKNMMLDNHALYDLTKKIFLPAKSEEEIFAHLGLEYLEPFERNA

SEQ ID NO: 3115 - DNA, 1587 bp, synthetic construct
  misc_feature 1..1587: note = Variant of terminal deoxynucleotidyltransferase
  source 1..1587: mol_type = other DNA
atgcaccatcatcatcatcatggcggtagcggcagccacggcattcgtaccatcgattcggacttcgggaagaaacagcagaaaaaaatggataaccacgatagttccgccacttatgaaatcaaatttcacgagtttgtgctgttcattctcgaagaaaaaatgggtgcgacgcgtcgtacttttctgacagatttagcccgcaagaaagggttccgcgtcgagaatgaactgaccgacgaagttacccacatcgtggcagaaaatctgtcacgctctgaagtattggcttggctgaaagaacacaagatggagaagaccaagcaattcgaactgctggatattagctggcttatcgaaagcatgaaagttggtaaaccggtggacaccaaggggaaataccagttggcggaatcgggtgagatgagtgcgaacccagatccgacagagggtcgtgaaaacgagctgcctcctactatgaagaccgtttctccgtatgcgtgtcaacgccgcaccaccctgaacaaccataatcaacgttttacggacgcactggaaattcttcgtgaaaattacgagttcaaacgcaacgatgatactgcgctggaatttcgtcgtgctatctccgtgctgaaaagccttccgtttgaggtacgtagcctgaaagacacggaaggattgccctggatcggtgatgaagtcaaagggattatggaagaaatcatcgaggtcgggaattcgcgtgaagtgcaggccgtgctcaatgatgagtggtatcaaagcttccaccgctttaagagtgtctttggagtgggggtgaagacagcagacaagtggtaccgtatgggtctgcgcaccctcgaggatgttcgttccagcaagaccctgaagttgaccccgatgcagaaagtaggtctgctgtattatgaagatcttgctcgcggcgttacgcgtgccgaagctgacgcgatttctctgctggttcaggatgcagtcgcaactttcgacccggatgcgatcgtggagattgtcggtggatttcgtcgtgggaaacctcagggtcacgacgttgatctgcttatcagttctccgggagctgagaaagagaatgaagaccagctcctgcagaaagtgaccaatctgtggaagaaacaagggttgttgctgtacggtcgtctggaatggacccagtgggaagatgggggttcgccatccggtaaggctgacgagggtgacgcgggtgcgaaatgctttctgatcctcaaactttatgatcataaagtggacaaaagcaaatgggaaatgccgacgggttcgaacatgggcgaggccaaaccgtggaaagcaattcgcgtagatctgctgcgttgcccctacggcggttttgcgtttgcgatgttgcagtggaccggaagccgcatgttccgtcgtgatctgcgttggtacgccactgacgagaagaacatgatgctggacaatcatgcgctgtatgacctgaccaagaaaatcttcctccctgctaaatcggaagaggaaattttcgcacatctggggcttgaatacctggaaccgttcgaacgtaacgca

SEQ ID NO: 3116 - protein, 529 aa, synthetic construct
  REGION 1..529: note = Variant of terminal deoxynucleotidyltransferase
MHHHHHHGGSGSHGIRTIDSDFGKKQQKKMDNHDSSATYEIKFHEFVLFILEEKMGATRRTFLTDLARKKGFRVENELTDEVTHIVAENLSRSEVLAWLKEHKMEKTKQFELLDISWLIESMKVGKPVDTKGKYQLAESGEMSANPDPTEGRENELPPTMKTVSPYACQRRTTLNNHNQRFTDALEILRENYEFKRNDDTALEFRRAISVLKSLPFEVRSLKDTEGLPWIGDEVKGIMEEIIEVGNSREVQAVLNDEWYQSFHRFKSVFGVGVKTADKWYRMGLRTLEDVRSSKTLKLTPMQKVGLLYYEDLARGVTRAEADAISLLVQDAVATFDPDAIVEIVGGFRRGKPQGHDVDLLISSPGAEKENEDQLLQKVTNLWKKQGLLLYGRLEWTQWEDGGSPSGKADEGDAGAKCFLILKLYDHKVDKSKWEMPTGSNMGEAKPWKAIRVDLLRCPYGGFAFAMLQWTGSRMFRRDLRWYATDEKNMMLDNHALYDLTKKIFLPAKSEEEIFAHLGLEYLEPFERNA

SEQ ID NO: 3117 - DNA, 1587 bp, synthetic construct
  misc_feature 1..1587: note = Variant of terminal deoxynucleotidyltransferase
  source 1..1587: mol_type = other DNA
atgcaccatcatcatcatcatggcggtagcggcagccacggcattcgtaccatcgattcggacttcgggaagaaacagcagaaaaaaatggataaccacgatagttccgccacttatgaaatcaaatttcacgagtttgtgctgttcattctcgaagaaaaaatgggtgcgacgcgtcgtacttttctgacagatttagcccgcaagaaagggttccgcgtcgagaatgaactgaccgacgaagttacccacatcgtggcagaaaatctgtcacgctctgaagtattggcttggctgaaagaacacaagatggagaagaccaagcaattcgaactgctggatattagctggcttatcgaaagcatgaaagttggtaaaccggtggacaccaaggggaaataccagttggcggaatcgggtgagatgagtgcgaacccagatccgacagagggtcgtgaaaacgagctgcctcctactatgaagaccgtttctccgtatgcgtgtcaacgccgcaccaccctgaacaaccataatcaacgttttacggacgcactggaaattcttcgtgaaaattacgagttcaaacgcaacgatgatactgcgctggaatttcgtcgtgctatctccgtgctgaaaagccttccgtttgaggtacgtagcctgaaagacacggaaggattgccctggatcggtgatgaagtcaaagggattatggaagaaatcatcgaggtcgggaattcgcgtgaagtgcaggccgtgctcaatgatgagtggtatcaaagcttccaccgctttaagagtgtctttggagtgggggtgaagacagcagacaagtggtaccgtatgggtctgcgcaccctcgaggatgttcgttccagcaagaccctgaagttgaccccgatgcagaaagtaggtctgctgtattatgaagatcttgctcgcggcgttacgcgtgccgaagctgacgcgatttctctgctggttcaggatgcagtcgcaactttcgacccggatgcgatcgtggagattgtcggtggatttcgtcgtgggaaacctcagggtcacgacgttgatctgcttatcagttctccgggagctgagaaagagcaagaagaccagctcctgcagaaagtgaccaatctgtggaagaaacaagggttgttgctgtacggtcgtctggaatggacccagtgggaagatgggggttcgccatccggtaaggctgacgagggtgacgcgggtgcgaaatgctttctgatcctcaaactttatgatcataaagtggacaaaagcaaagtggaaatgccgacgggttcgaacatgggcgaggccaaaccgtggaaagcaattcgcgtagatctgctgcgttgcccctacggcggttttgcgtttgcgatgttgcagtggaccggaagccgcatgttccgtcgtgatctgcgttggtacgccactgacgagaagaacatgatgctggacaatcatgcgctgtatgacctgaccaagaaaatcttcctccctgctaaatcggaagaggaaattttcgcacatctggggcttgaatacctggaaccgttcgaacgtaacgca

SEQ ID NO: 3118 - protein, 529 aa, synthetic construct
  REGION 1..529: note = Variant of terminal deoxynucleotidyltransferase
MHHHHHHGGSGSHGIRTIDSDFGKKQQKKMDNHDSSATYEIKFHEFVLFILEEKMGATRRTFLTDLARKKGFRVENELTDEVTHIVAENLSRSEVLAWLKEHKMEKTKQFELLDISWLIESMKVGKPVDTKGKYQLAESGEMSANPDPTEGRENELPPTMKTVSPYACQRRTTLNNHNQRFTDALEILRENYEFKRNDDTALEFRRAISVLKSLPFEVRSLKDTEGLPWIGDEVKGIMEEIIEVGNSREVQAVLNDEWYQSFHRFKSVFGVGVKTADKWYRMGLRTLEDVRSSKTLKLTPMQKVGLLYYEDLARGVTRAEADAISLLVQDAVATFDPDAIVEIVGGFRRGKPQGHDVDLLISSPGAEKEQEDQLLQKVTNLWKKQGLLLYGRLEWTQWEDGGSPSGKADEGDAGAKCFLILKLYDHKVDKSKVEMPTGSNMGEAKPWKAIRVDLLRCPYGGFAFAMLQWTGSRMFRRDLRWYATDEKNMMLDNHALYDLTKKIFLPAKSEEEIFAHLGLEYLEPFERNA

SEQ ID NO: 3119 - DNA, 1587 bp, synthetic construct
  misc_feature 1..1587: note = Variant of terminal deoxynucleotidyltransferase
  source 1..1587: mol_type = other DNA
atgcaccatcatcatcatcatggcggtagcggcagccacggcattcgtaccatcgattcggacttcgggaagaaacagcagaaaaaaatggataaccacgatagttccgccacttatgaaatcaaatttcacgagtttgtgctgttcattctcgaagaaaaaatgggtgcgacgcgtcgtacttttctgacagatttagcccgcaagaaagggttccgcgtcgagaatgaactgaccgacgaagttacccacatcgtggcagaaaatctgtcacgctctgaagtattggcttggctgaaagaacacaagatggagaagaccaagcaattcgaactgctggatattagctggcttatcgaaagcatgaaagttggtaaaccggtggacaccaaggggaaataccagttggcggaatcgggtgagatgagtgcgaacccagatccgacagagggtcgtgaaaacgagctgcctcctactatgaagaccgtttctccgtatgcgtgtcaacgccgcaccaccctgaacaaccataatcaacgttttacggacgcactggaaattcttcgtgaaaattacgagttcaaacgcaacgatgatactgcgctggaatttcgtcgtgctatctccgtgctgaaaagccttccgtttgaggtacgtagcctgaaagacacggaaggattgccctggatcggtgatgaagtcaaagggattatggaagaaatcatcgaggtcgggaattcgcgtgaagtgcaggccgtgctcaatgatgagtggtatcaaagcttccacgcttttaagagtgtctttggagtgggggtgaagacagcagacaagtggtaccgtatgggtctgcgcaccctcgaggatgttcgttccagcaagaccctgaagttgaccccgatgcagaaagtaggtctgctgtattatgaagatcttgctcgcggcgttacgcgtgccgaagctgacgcgatttctctgctggttcaggatgcagtcgcaactttcgacccggatgcgatcgtggagattgtcggtggatttcgtcgtgggaaacctcagggtcacgacgttgatctgcttatcagttctccgggagctgagaaagagcaagaagaccagctcctgcagaaagtgaccaatctgtggaagaaacaagggttgttgctgtacggtcgtctggaatggacccagtgggaagatgggggttcgccatccggtaaggctgacgagggtgacgcgggtgcgaaatgctttctgatcctcaaactttatgatcataaagtggacaaaagcaaatgggaaatgccgacgggttcgaacatgggcgaggccaaaccgtggaaagcaattcgcgtagatctgctgcgttgcccctacggcggttttgcgtttgcgatgttgcagtggaccggaagccgcatgttccgtcgtgatctgcgttggtacgccactgacgagaagaacatgatgctggacaatcatgcgctgtatgacctgaccaagaaaatcttcctccctgctaaatcggaagaggaaattttcgcacatctggggcttgaatacctggaaccgttcgaacgtaacgca

SEQ ID NO: 3120 - protein, 529 aa, synthetic construct
  REGION 1..529: note = Variant of terminal deoxynucleotidyltransferase
MHHHHHHGGSGSHGIRTIDSDFGKKQQKKMDNHDSSATYEIKFHEFVLFILEEKMGATRRTFLTDLARKKGFRVENELTDEVTHIVAENLSRSEVLAWLKEHKMEKTKQFELLDISWLIESMKVGKPVDTKGKYQLAESGEMSANPDPTEGRENELPPTMKTVSPYACQRRTTLNNHNQRFTDALEILRENYEFKRNDDTALEFRRAISVLKSLPFEVRSLKDTEGLPWIGDEVKGIMEEIIEVGNSREVQAVLNDEWYQSFHAFKSVFGVGVKTADKWYRMGLRTLEDVRSSKTLKLTPMQKVGLLYYEDLARGVTRAEADAISLLVQDAVATFDPDAIVEIVGGFRRGKPQGHDVDLLISSPGAEKEQEDQLLQKVTNLWKKQGLLLYGRLEWTQWEDGGSPSGKADEGDAGAKCFLILKLYDHKVDKSKWEMPTGSNMGEAKPWKAIRVDLLRCPYGGFAFAMLQWTGSRMFRRDLRWYATDEKNMMLDNHALYDLTKKIFLPAKSEEEIFAHLGLEYLEPFERNA

SEQ ID NO: 3121 - DNA, 1587 bp, synthetic construct
  misc_feature 1..1587: note = Variant of terminal deoxynucleotidyltransferase
  source 1..1587: mol_type = other DNA
atgcaccatcatcatcatcatggcggtagcggcagccacggcattcgtaccatcgattcggacttcgggaagaaacagcagaaaaaaatggataaccacgatagttccgccacttatgaaatcaaatttcacgagtttgtgctgttcattctcgaagaaaaaatgggtgcgacgcgtcgtacttttctgacagatttagcccgcaagaaagggttccgcgtcgagaatgaactgaccgacgaagttacccacatcgtggcagaaaatctgtcacgctctgaagtattggcttggctgaaagaacacaagatggagaagaccaagcaattcgaactgctggatattagctggcttatcgaaagcatgaaagttggtaaaccggtggacaccaaggggaaataccagttggcggaatcgggtgagatgagtgcgaacccagatccgacagagggtcgtgaaaacgagctgcctcctactatgaagaccgtttctccgtatgcgtgtcaacgccgcaccaccctgaacaaccataatcaacgttttacggacgcactggaaattcttcgtgaaaattacgagttcaaacgcaacgatgatactgcgctggaatttcgtcgtgctatctccgtgctgaaaagccttccgtttgaggtacgtagcctgaaagacacggaaggattgccctggatcggtgatgaagtcaaagggattatggaagaaatcatcgaggtcgggaattcgcgtgaagtgcaggccgtgctcaatgatgagtggtatcaaagcttccaccgctttaagagtgtctttggagtgggggtgaagacagcagacaagtggtaccgtatgggtctgcgcaccctcgaggatgttcgttccagcaagaccctgaagttgaccccgatgcagaaagtaggtctgctgtattatgaagatcttgctcgcggcgttacgcgtgccgaagctgacgcgatttctctgctggttcaggatgcagtcgcaactttcgacccggatgcgatcgtggagattgtcggtggatttcgtcgtgggaaacctcagggtcacgacgttgatctgcttatcagttctccgggagctgagaaagagcaagaagaccagctcctgcagaaagtgaccaatctgtggaagaaacaagggttgttgctgtacggtcgtctggaatggacccagtgggaagatgggggttcgccatccggtaaggctgacgagggtgacgcgggtgcgaaatgctttctgatcctcaaactttatgatcataaagtggacaaaagcaaatgggaaatgccgacgggttcgaacatgggcgaggccaaaccgtggaaagcaattcgcgtagatctgctgcgttgcccctacggcggttttgcgtttgcgatgttgcagtggaccggaagccgcatgttccgtcgtgatctgcgttggtacgccactgacgagaagaacatgatgctggacaatcatgcgctgtatgacctgacccggaaaatcttcctccctgctaaatcggaagaggaaattttcgcacatctggggcttgaatacctggaaccgttcgaacgtaacgca

SEQ ID NO: 3122 - protein, 529 aa, synthetic construct
  REGION 1..529: note = Variant of terminal deoxynucleotidyltransferase
MHHHHHHGGSGSHGIRTIDSDFGKKQQKKMDNHDSSATYEIKFHEFVLFILEEKMGATRRTFLTDLARKKGFRVENELTDEVTHIVAENLSRSEVLAWLKEHKMEKTKQFELLDISWLIESMKVGKPVDTKGKYQLAESGEMSANPDPTEGRENELPPTMKTVSPYACQRRTTLNNHNQRFTDALEILRENYEFKRNDDTALEFRRAISVLKSLPFEVRSLKDTEGLPWIGDEVKGIMEEIIEVGNSREVQAVLNDEWYQSFHRFKSVFGVGVKTADKWYRMGLRTLEDVRSSKTLKLTPMQKVGLLYYEDLARGVTRAEADAISLLVQDAVATFDPDAIVEIVGGFRRGKPQGHDVDLLISSPGAEKEQEDQLLQKVTNLWKKQGLLLYGRLEWTQWEDGGSPSGKADEGDAGAKCFLILKLYDHKVDKSKWEMPTGSNMGEAKPWKAIRVDLLRCPYGGFAFAMLQWTGSRMFRRDLRWYATDEKNMMLDNHALYDLTRKIFLPAKSEEEIFAHLGLEYLEPFERNA

SEQ ID NO: 3123 - DNA, 1587 bp, synthetic construct
  misc_feature 1..1587: note = Variant of terminal deoxynucleotidyltransferase
  source 1..1587: mol_type = other DNA
atgcaccatcatcatcatcatggcggtagcggcagccacggcattcgtaccatcgattcggacttcgggaagaaacagcagaaaaaaatggataaccacgatagttccgccacttatgaaatcaaatttcacgagtttgtgctgttcattctcgaagaaaaaatgggtgcgacgcgtcgtacttttctgacagatttagcccgcaagaaagggttccgcgtcgagaatgaactgaccgacgaagttacccacatcgtggcagaaaatctgtcacgctctgaagtattggcttggctgaaagaacacaagatggagaagaccaagcaattcgaactgctggatattagctggcttatcgaaagcatgaaagttggtaaaccggtggacaccaaggggaaataccagttggcggaatcgggtgagatgagtgcgaacccagatccgacagagggtcgtgaaaacgagctgcctcctactatgaagaccgtttctccgtatgcgtgtcaacgccgcaccaccctgaacaaccataatcaacgttttacggacgcactggaaattcttcgtgaaaattacgagttcaaacgcaacgatgatactgcgctggaatttcgtcgtgctatctccgtgctgaaaagccttccgtttgaggtacgtagcctgaaagacacggaaggattgccctggatcggtgatgaagtccgggggattatggaagaaatcatcgaggtcgggaattcgcgtgaagtgcaggccgtgctcaatgatgagtggtatcaaagcttccaccgctttaagagtgtctttggagtgggggtgaagacagcagacaagtggtaccgtatgggtctgcgcaccctcgaggatgttcgttccagcaagaccctgaagttgaccccgatgcagaaagtaggtctgctgtattatgaagatcttgctcgcggcgttacgcgtgccgaagctgacgcgatttctctgctggttcaggatgcagtcgcaactttcgacccggatgcgatcgtggagattgtcggtggatttcgtcgtgggaaacctcagggtcacgacgttgatctgcttatcagttctccgggagctgagaaagagcaagaagaccagctcctgcagaaagtgaccaatctgtggaagaaacaagggttgttgctgtacggtcgtctggaatggacccagtgggaagatgggggttcgccatccggtaaggctgacgagggtgacgcgggtgcgaaatgctttctgatcctcaaactttatgatcataaagtggacaaaagcaaatgggaaatgccgacgggttcgaacatgggcgaggccaaaccgtggaaagcaattcgcgtagatctgctgcgttgcccctacggcggttttgcgtttgcgatgttgcagtggaccggaagccgcatgttccgtcgtgatctgcgttggtacgccactgacgagaagaacatgatgctggacaatcatgcgctgtatgacctgaccaagaaaatcttcctccctgctaaatcggaagaggaaattttcgcacatctggggcttgaatacctggaaccgttcgaacgtaacgca

SEQ ID NO: 3124 - protein, 529 aa, synthetic construct
  REGION 1..529: note = Variant of terminal deoxynucleotidyltransferase
MHHHHHHGGSGSHGIRTIDSDFGKKQQKKMDNHDSSATYEIKFHEFVLFILEEKMGATRRTFLTDLARKKGFRVENELTDEVTHIVAENLSRSEVLAWLKEHKMEKTKQFELLDISWLIESMKVGKPVDTKGKYQLAESGEMSANPDPTEGRENELPPTMKTVSPYACQRRTTLNNHNQRFTDALEILRENYEFKRNDDTALEFRRAISVLKSLPFEVRSLKDTEGLPWIGDEVRGIMEEIIEVGNSREVQAVLNDEWYQSFHRFKSVFGVGVKTADKWYRMGLRTLEDVRSSKTLKLTPMQKVGLLYYEDLARGVTRAEADAISLLVQDAVATFDPDAIVEIVGGFRRGKPQGHDVDLLISSPGAEKEQEDQLLQKVTNLWKKQGLLLYGRLEWTQWEDGGSPSGKADEGDAGAKCFLILKLYDHKVDKSKWEMPTGSNMGEAKPWKAIRVDLLRCPYGGFAFAMLQWTGSRMFRRDLRWYATDEKNMMLDNHALYDLTKKIFLPAKSEEEIFAHLGLEYLEPFERNA

SEQ ID NO: 3125 - DNA, 1587 bp, synthetic construct
  misc_feature 1..1587: note = Variant of terminal deoxynucleotidyltransferase
  source 1..1587: mol_type = other DNA
atgcaccatcatcatcatcatggcggtagcggcagccacggcattcgtaccatcgattcggacttcgggaagaaacagcagaaaaaaatggataaccacgatagttccgccacttatgaaatcaaatttcacgagtttgtgctgttcattctcgaagaaaaaatgggtgcgacgcgtcgtacttttctgacagatttagcccgcaagaaagggttccgcgtcgagaatgaactgaccgacgaagttacccacatcgtggcagaaaatctgtcacgctctgaagtattggcttggctgaaagaacacaagatggagaagaccaagcaattcgaactgctggatattagctggcttatcgaaagcatgaaagttggtaaaccggtggacaccaaggggaaataccagttggcggaatcgggtgagatgagtgcgaacccagatccgacagagggtcgtgaaaacgagctgcctcctactatgaagaccgtttctccgtatgcgtgtcaacgccgcaccaccctgaacaaccataatcaacgttttacggacgcactggaaattcttcgtgaaaattacgagttcaaacgcaacgatgatactgcgctggaatttcgtcgtgctatctccgtgctgaaaagccttccgtttgaggtacgtagcctgaaagacacggaaggattgccctggatcggtgatgaagtcaaagggattatggaagaaatcatcgaggtcgggaattcgcgtgaagtgcaggccgtgctcaatgatgagtggtatcaaagcttccaccgctttaagagtgtctttggagtgggggtgaagacagcagacaagtggtaccgtatgggtctgcgcaccctcgaggatgttcgttccagcaagaccctgaagttgaccccgatgcagaaagtaggtctgctgtattatgaagatcttgctcgcggcgttacgcgtgccgaagctgacgcgatttctctgctggttcaggatgcagtcgcaactttcgacccggatgcgatcgtggagattgtcggtggatttcgtcgtgggaaacctcagggtcacgacgttgatctgcttatcagttctccgggagctgcgaaagagcaagaagaccagctcctgcagaaagtgaccaatctgtggaagaaacaagggttgttgctgtacggtcgtctggaatggacccagtgggaagatgggggttcgccatccggtaaggctgacgagggtgacgcgggtgcgaaatgctttctgatcctcaaactttatgatcataaagtggacaaaagcaaatgggaaatgccgacgggttcgaacatgggcgaggccaaaccgtggaaagcaattcgcgtagatctgctgcgttgcccctacggcggttttgcgtttgcgatgttgcagtggaccggaagccgcatgttccgtcgtgatctgcgttggtacgccactgacgagaagaacatgatgctggacaatcatgcgctgtatgacctgaccaagaaaatcttcctccctgctaaatcggaagaggaaattttcgcacatctggggcttgaatacctggaaccgttcgaacgtaacgca

SEQ ID NO: 3126 - protein, 529 aa, synthetic construct
  REGION 1..529: note = Variant of terminal deoxynucleotidyltransferase
MHHHHHHGGSGSHGIRTIDSDFGKKQQKKMDNHDSSATYEIKFHEFVLFILEEKMGATRRTFLTDLARKKGFRVENELTDEVTHIVAENLSRSEVLAWLKEHKMEKTKQFELLDISWLIESMKVGKPVDTKGKYQLAESGEMSANPDPTEGRENELPPTMKTVSPYACQRRTTLNNHNQRFTDALEILRENYEFKRNDDTALEFRRAISVLKSLPFEVRSLKDTEGLPWIGDEVKGIMEEIIEVGNSREVQAVLNDEWYQSFHRFKSVFGVGVKTADKWYRMGLRTLEDVRSSKTLKLTPMQKVGLLYYEDLARGVTRAEADAISLLVQDAVATFDPDAIVEIVGGFRRGKPQGHDVDLLISSPGAAKEQEDQLLQKVTNLWKKQGLLLYGRLEWTQWEDGGSPSGKADEGDAGAKCFLILKLYDHKVDKSKWEMPTGSNMGEAKPWKAIRVDLLRCPYGGFAFAMLQWTGSRMFRRDLRWYATDEKNMMLDNHALYDLTKKIFLPAKSEEEIFAHLGLEYLEPFERNA

SEQ ID NO: 3127 - DNA, 1587 bp, synthetic construct
  misc_feature 1..1587: note = Variant of terminal deoxynucleotidyltransferase
  source 1..1587: mol_type = other DNA
atgcaccatcatcatcatcatggcggtagcggcagccacggcattcgtaccatcgattcggacttcgggaagaaacagcagaaaaaaatggataaccacgatagttccgccacttatgaaatcaaatttcacgagtttgtgctgttcattctcgaagaaaaaatgggtgcgacgcgtcgtacttttctgacagatttagcccgcaagaaagggttccgcgtcgagaatgaactgaccgacgaagttacccacatcgtggcagaaaatctgtcacgctctgaagtattggcttggctgaaagaacacaagatggagaagaccaagcaattcgaactgctggatattagctggcttatcgaaagcatgaaagttggtaaaccggtggacaccaaggggaaataccagttggcggaatcgggtgagatgagtgcgaacccagatccgacagagggtcgtgaaaacgagctgcctcctactatgaagaccgtttctccgtatgcgtgtcaacgccgcaccaccctgaacaaccataatcaacgttttacggacgcactggaaattcttcgtgaaaattacgagttcaaacgcaacgatgatactgcgctggaatttcgtcgtgctatctccgtgctgaaaagccttccgtttgaggtacgtagcctgaaagacacggaaggattgccctggatcggtgatgaagtcaaagggattatggaagaaatcatcgaggtcgggaattcgcgtgaagtgcaggccgtgctcaatgatgagtggtatcaaagcttccaccgctttaagagtgtctttggagtgggggtgaagacagcagacaagtggtaccgtatgggtctgcgcaccctcgaggatgttcgttccagcaagaccctgaagttgaccccgatgcagaaagtaggtctgctgtattatgaagatcttgctcgcggcgttacgcgtgccgaagctgacgcgatttctctgctggttcaggatgcagtcgcaactttcgacccggatgcgatcgtggagattgtcggtggatttcgtcgtgggaaacctcagggtcacgacgttgatctgcttatcagttctccgggagctgagaaagagcaagaagaccagctcctgcagaaagtgaccaatctgtggaagaaacaagggttgttgctgtacggtcgtctggaatggacccagtgggaagatgggggttcgccatccggtaaggctgacgagggtgacgcgggtgcgaaatgctttctgatcctcaaactttatgatcataaagtggacaaaagcaaatgggaaatgccgacgggttcgaacatgggcgagcataaaccgtggaaagcaattcgcgtagatctgctgcgttgcccctacggcggttttgcgtttgcgatgttgcagtggaccggaagccgcatgttccgtcgtgatctgcgttggtacgccactgacgagaagaacatgatgctggacaatcatgcgctgtatgacctgaccaagaaaatcttcctccctgctaaatcggaagaggaaattttcgcacatctggggcttgaatacctggaaccgttcgaacgtaacgca

SEQ ID NO: 3128 - protein, 529 aa, synthetic construct
  REGION 1..529: note = Variant of terminal deoxynucleotidyltransferase
MHHHHHHGGSGSHGIRTIDSDFGKKQQKKMDNHDSSATYEIKFHEFVLFILEEKMGATRRTFLTDLARKKGFRVENELTDEVTHIVAENLSRSEVLAWLKEHKMEKTKQFELLDISWLIESMKVGKPVDTKGKYQLAESGEMSANPDPTEGRENELPPTMKTVSPYACQRRTTLNNHNQRFTDALEILRENYEFKRNDDTALEFRRAISVLKSLPFEVRSLKDTEGLPWIGDEVKGIMEEIIEVGNSREVQAVLNDEWYQSFHRFKSVFGVGVKTADKWYRMGLRTLEDVRSSKTLKLTPMQKVGLLYYEDLARGVTRAEADAISLLVQDAVATFDPDAIVEIVGGFRRGKPQGHDVDLLISSPGAEKEQEDQLLQKVTNLWKKQGLLLYGRLEWTQWEDGGSPSGKADEGDAGAKCFLILKLYDHKVDKSKWEMPTGSNMGEHKPWKAIRVDLLRCPYGGFAFAMLQWTGSRMFRRDLRWYATDEKNMMLDNHALYDLTKKIFLPAKSEEEIFAHLGLEYLEPFERNA

SEQ ID NO: 3129 - DNA, 1587 bp, synthetic construct
  misc_feature 1..1587: note = Variant of terminal deoxynucleotidyltransferase
  source 1..1587: mol_type = other DNA
atgcaccatcatcatcatcatggcggtagcggcagccacggcattcgtaccatcgattcggacttcgggaagaaacagcagaaaaaaatggataaccacgatagttccgccacttatgaaatcaaatttcacgagtttgtgctgttcattctcgaagaaaaaatgggtgcgacgcgtcgtacttttctgacagatttagcccgcaagaaagggttccgcgtcgagaatgaactgaccgacgaagttacccacatcgtggcagaaaatctgtcacgctctgaagtattggcttggctgaaagaacacaagatggagaagaccaagcaattcgaactgctggatattagctggcttatcgaaagcatgaaagttggtaaaccggtggacaccaaggggaaataccagttggcggaatcgggtgagatgagtgcgaacccagatccgacagagggtcgtgaaaacgagctgcctcctactatgaagaccgtttctccgtatgcgtgtcaacgccgcaccaccctgaacaaccataatcaacgttttacggacgcactggaaattattcgtgaaaattacgagttcaaacgcaacgatgatactgcgctggaatttcgtcgtgctatctccgtgctgaaaagccttccgtttgaggtacgtagcctgaaagacacggaaggattgccctggatcggtgatgaagtcaaagggattatggaagaaatcatcgaggtcgggaattcgcgtgaagtgcaggccgtgctcaatgatgagtggtatcaaagcttccaccgctttaagagtgtctttggagtgggggtgaagacagcagacaagtggtaccgtatgggtctgcgcaccctcgaggatgttcgttccagcaagaccctgaagttgaccccgatgcagaaagtaggtctgctgtattatgaagatcttgctcgcggcgttacgcgtgccgaagctgacgcgatttctctgctggttcaggatgcagtcgcaactttcgacccggatgcgatcgtggagattgtcggtggatttcgtcgtgggaaacctcagggtcacgacgttgatctgcttatcagttctccgggagctgagaaagagcaagaagaccagctcctgcagaaagtgaccaatctgtggaagaaacaagggttgttgctgtacggtcgtctggaatggacccagtgggaagatgggggttcgccatccggtaaggctgacgagggtgacgcgggtgcgaaatgctttctgatcctcaaactttatgatcataaagtggacaaaagcaaatgggaaatgccgacgggttcgaacatgggcgaggccaaaccgtggaaagcaattcgcgtagatctgctgcgttgcccctacggcggttttgcgtttgcgatgttgcagtggaccggaagccgcatgttccgtcgtgatctgcgttggtacgccactgacgagaagaacatgatgctggacaatcatgcgctgtatgacctgaccaagaaaatcttcctccctgctaaatcggaagaggaaattttcgcacatctggggcttgaatacctggaaccgttcgaacgtaacgca

SEQ ID NO: 3130 - protein, 529 aa, synthetic construct
  REGION 1..529: note = Variant of terminal deoxynucleotidyltransferase
MHHHHHHGGSGSHGIRTIDSDFGKKQQKKMDNHDSSATYEIKFHEFVLFILEEKMGATRRTFLTDLARKKGFRVENELTDEVTHIVAENLSRSEVLAWLKEHKMEKTKQFELLDISWLIESMKVGKPVDTKGKYQLAESGEMSANPDPTEGRENELPPTMKTVSPYACQRRTTLNNHNQRFTDALEIIRENYEFKRNDDTALEFRRAISVLKSLPFEVRSLKDTEGLPWIGDEVKGIMEEIIEVGNSREVQAVLNDEWYQSFHRFKSVFGVGVKTADKWYRMGLRTLEDVRSSKTLKLTPMQKVGLLYYEDLARGVTRAEADAISLLVQDAVATFDPDAIVEIVGGFRRGKPQGHDVDLLISSPGAEKEQEDQLLQKVTNLWKKQGLLLYGRLEWTQWEDGGSPSGKADEGDAGAKCFLILKLYDHKVDKSKWEMPTGSNMGEAKPWKAIRVDLLRCPYGGFAFAMLQWTGSRMFRRDLRWYATDEKNMMLDNHALYDLTKKIFLPAKSEEEIFAHLGLEYLEPFERNA

SEQ ID NO: 3131 - DNA, 1587 bp, synthetic construct
  misc_feature 1..1587: note = Variant of terminal deoxynucleotidyltransferase
  source 1..1587: mol_type = other DNA
atgcaccatcatcatcatcatggcggtagcggcagccacggcattcgtaccatcgattcggacttcgggaagaaacagcagaaaaaaatggataaccacgatagttccgccacttatgaaatcaaatttcacgagtttgtgctgttcattctcgaagaaaaaatgggtgcgacgcgtcgtacttttctgacagatttagcccgcaagaaagggttccgcgtcgagaatgaactgaccgacgaagttacccacatcgtggcagaaaatctgtcacgctctgaagtattggcttggctgaaagaacacaagatggagaagaccaagcaattcgaactgctggatattagctggcttatcgaaagcatgaaagttggtaaaccggtggacaccaaggggaaataccagttggcggaatcgggtgagatgagtgcgaacccagatccgacagagggtcgtgaaaacgagctgcctcctactatgaagaccgtttctccgtatgcgtgtcaacgccgcaccaccctgaacaaccataatcaacgttttacggacgcactggaaattcttcgtgaaaattacgagttcaaacgcaacgatgatactgcgctggaatttcgtcgtgctatctccgtgctgaaaagccttccgtttgaggtacgtagcctgaaagacacggaaggattgccctggatcggtgatgaagtcaaagggattatggaagaaatcatcgaggtcgggaattcgcgtgaagtgcaggccgtgctcaatgatgagtggtatcaaagcttccaccgctttaagagtgtctttggagtgggggtgaagacagcagacaagtggtaccgtatgggtctgcgcaccctcgaggatgttcgttccagcaagaccctgaagttgaccccgatgcagaaagtaggtctgctgtattatgaagatcttgctcgcggcgttacgcgtgccgaagctgacgcgatttctctgctggttcaggatgcagtcgcaactttcgacccggatgcgatcgtggagattgtcggtggatttcgtcgtgggaaacctcagggtcacgacgttgatctgcttatcagttctccgggagctgagaaagagcaagaagaccagctcctgcagaaagtgaccaatctgtggaagaaacaagggttgttgctgtacggtcgtctggaatggacccagtgggaagatgggggttcgccatccggtaaggctgacgagggtgacgcgggtgcgaaatgctttctgatcctcaaactttatgatcataaagtggacaaaagcaaatgggaaccgccgacgggttcgaacatgggcgaggccaaaccgtggaaagcaattcgcgtagatctgctgcgttgcccctacggcggttttgcgtttgcgatgttgcagtggaccggaagccgcatgttccgtcgtgatctgcgttggtacgccactgacgagaagaacatgatgctggacaatcatgcgctgtatgacctgaccaagaaaatcttcctccctgctaaatcggaagaggaaattttcgcacatctggggcttgaatacctggaaccgttcgaacgtaacgca

SEQ ID NO: 3132 - protein, 529 aa, synthetic construct
  REGION 1..529: note = Variant of terminal deoxynucleotidyltransferase
MHHHHHHGGSGSHGIRTIDSDFGKKQQKKMDNHDSSATYEIKFHEFVLFILEEKMGATRRTFLTDLARKKGFRVENELTDEVTHIVAENLSRSEVLAWLKEHKMEKTKQFELLDISWLIESMKVGKPVDTKGKYQLAESGEMSANPDPTEGRENELPPTMKTVSPYACQRRTTLNNHNQRFTDALEILRENYEFKRNDDTALEFRRAISVLKSLPFEVRSLKDTEGLPWIGDEVKGIMEEIIEVGNSREVQAVLNDEWYQSFHRFKSVFGVGVKTADKWYRMGLRTLEDVRSSKTLKLTPMQKVGLLYYEDLARGVTRAEADAISLLVQDAVATFDPDAIVEIVGGFRRGKPQGHDVDLLISSPGAEKEQEDQLLQKVTNLWKKQGLLLYGRLEWTQWEDGGSPSGKADEGDAGAKCFLILKLYDHKVDKSKWEPPTGSNMGEAKPWKAIRVDLLRCPYGGFAFAMLQWTGSRMFRRDLRWYATDEKNMMLDNHALYDLTKKIFLPAKSEEEIFAHLGLEYLEPFERNA

SEQ ID NO: 3133 - DNA, 1587 bp, synthetic construct
  misc_feature 1..1587: note = Variant of terminal deoxynucleotidyltransferase
  source 1..1587: mol_type = other DNA
atgcaccatcatcatcatcatggcggtagcggcagccacggcattcgtaccatcgattcggacttcgggaagaaacagcagaaaaaaatggataaccacgatagttccgccacttatgaaatcaaatttcacgagtttgtgctgttcattctcgaagaaaaaatgggtgcgacgcgtcgtacttttctgacagatttagcccgcaagaaagggttccgcgtcgagaatgaactgaccgacgaagttacccacatcgtggcagaaaatctgtcacgctctgaagtattggcttggctgaaagaacacaagatggagaagaccaagcaattcgaactgctggatattagctggcttatcgaaagcatgaaagttggtaaaccggtggacaccaaggggaaataccagttggcggaatcgggtgagatgagtgcgaacccagatccgacagagggtcgtgaaaacgagctgcctcctactatgaagaccgtttctccgtatgcgtgtcaacgccgcaccaccctgaacaaccataatcaacgttttacggacgcactggaaattcttcgtgaaaattacgagttcaaacgcaacgatgatactgcgctggaatttcgtcgtgctatctccgtgctgaaaagccttccgtttgaggtacgtagcctgaaagacacggaaggattgccctggatcggtgatgaagtcaaagggattatggaagaaatcatcgaggtcgggaattcgcgtgaagtgcaggccgtgctcaatgatgagtggtatcaaagcttccaccgctttaagagtgtctttggagtgggggtgaagacagcagacaagtggtaccgtatgggtctgcgcaccctcgaggatgttcgttccagcaagaccctgaagttgaccccgatgcagaaagtaggtctgctgtattatgaagatcttgctcgcggcgttacgcgtgccgaagctgacgcgatttctctgctggttcaggatgcagtcgcaactttcgacccggatgcgatcgtggagattgtcggtggatttcgtcgtgggaaacctcagggtcacgacgttgatctgcttatcagttctccgggagctgagaaagagcaagaagaccagctcctgcagaaagtgaccaatctgtggaagaaacaagggttgttgctgtacggtcgtctggaatggacccagtgggaagatgggggttcgccatccggtaaggctgacgagggtgacgcgggtgcgaaatgctttctgatcctcaaactttatgatcataaagtggacaaaagcaaatgggaaattccgacgggttcgaacatgggcgaggccaaaccgtggaaagcaattcgcgtagatctgctgcgttgcccctacggcggttttgcgtttgcgatgttgcagtggaccggaagccgcatgttccgtcgtgatctgcgttggtacgccactgacgagaagaacatgatgctggacaatcatgcgctgtatgacctgaccaagaaaatcttcctccctgctaaatcggaagaggaaattttcgcacatctggggcttgaatacctggaaccgttcgaacgtaacgca

SEQ ID NO: 3134 - protein, 529 aa, synthetic construct
  REGION 1..529: note = Variant of terminal deoxynucleotidyltransferase
MHHHHHHGGSGSHGIRTIDSDFGKKQQKKMDNHDSSATYEIKFHEFVLFILEEKMGATRRTFLTDLARKKGFRVENELTDEVTHIVAENLSRSEVLAWLKEHKMEKTKQFELLDISWLIESMKVGKPVDTKGKYQLAESGEMSANPDPTEGRENELPPTMKTVSPYACQRRTTLNNHNQRFTDALEILRENYEFKRNDDTALEFRRAISVLKSLPFEVRSLKDTEGLPWIGDEVKGIMEEIIEVGNSREVQAVLNDEWYQSFHRFKSVFGVGVKTADKWYRMGLRTLEDVRSSKTLKLTPMQKVGLLYYEDLARGVTRAEADAISLLVQDAVATFDPDAIVEIVGGFRRGKPQGHDVDLLISSPGAEKEQEDQLLQKVTNLWKKQGLLLYGRLEWTQWEDGGSPSGKADEGDAGAKCFLILKLYDHKVDKSKWEIPTGSNMGEAKPWKAIRVDLLRCPYGGFAFAMLQWTGSRMFRRDLRWYATDEKNMMLDNHALYDLTKKIFLPAKSEEEIFAHLGLEYLEPFERNA

SEQ ID NO: 3135 - DNA, 1587 bp, synthetic construct
  misc_feature 1..1587: note = Variant of terminal deoxynucleotidyltransferase
  source 1..1587: mol_type = other DNA
atgcaccatcatcatcatcatggcggtagcggcagccacggcattcgtaccatcgattcggacttcgggaagaaacagcagaaaaaaatggataaccacgatagttccgccacttatgaaatcaaatttcacgagtttgtgctgttcattctcgaagaaaaaatgggtgcgacgcgtcgtacttttctgacagatttagcccgcaagaaagggttccgcgtcgagaatgaactgaccgacgaagttacccacatcgtggcagaaaatctgtcacgctctgaagtattggcttggctgaaagaacacaagatggagaagaccaagcaattcgaactgctggatattagctggcttatcgaaagcatgaaagttggtaaaccggtggacaccaaggggaaataccagttggcggaatcgggtgagatgagtgcgaacccagatccgacagagggtcgtgaaaacgagctgcctcctactatgaagaccgtttctccgtatgcgtgtcaacgccgcaccaccctgaacaaccataatcaacgttttacggacgcactggaaattcttcgtgaaaattacgagttcaaacgcaacgatgatactgcgctggaatttcgtcgtgctatctccgtgctgaaaagccttccgtttgaggtacgtagcctgaaagacacggaaggattgccctggatcggtgatgaagtcaaagggattatggaagaaatcatcgaggtcgggaattcgcgtgaagtgcaggccgtgctcaatgatgagtggtatcaaagcttccaccgctttaagagtgtctttggagtgggggtgaagacagcagacaagtggtaccgtatgggtctgcgcaccctcgaggatgttcgttccagcaagaccctgaagttgaccccgatgcagaaagtaggtctgctgtattatgaagatcttgctcgcggcgttacgcgtgccgaagctgacgcgatttctctgctggttcaggatgcagtcgcaactttcgacccggatgcgatcgtggagattgtcggtggatttcgtcgtgggaaacctcagggtcacgacgttgatctgcttatcagttctccgggagctgagaaagagcaagaagaccagctcctgcagaaagtgaccaatctgtggaagaaacaagggttgttgctgtacggtcgtctggaatggacccagtgggaagatgggggttcgccatccggtaaggctgacgagggtgacgcgggtgcgaaatgctttctgatcctcaaactttatgatcataaagtggacaaaagcaaatgggaaatgccgccgggttcgaacatgggcgaggccaaaccgtggaaagcaattcgcgtagatctgctgcgttgcccctacggcggttttgcgtttgcgatgttgcagtggaccggaagccgcatgttccgtcgtgatctgcgttggtacgccactgacgagaagaacatgatgctggacaatcatgcgctgtatgacctgaccaagaaaatcttcctccctgctaaatcggaagaggaaattttcgcacatctggggcttgaatacctggaaccgttcgaacgtaacgca

SEQ ID NO: 3136 - protein, 529 aa, synthetic construct
  REGION 1..529: note = Variant of terminal deoxynucleotidyltransferase
MHHHHHHGGSGSHGIRTIDSDFGKKQQKKMDNHDSSATYEIKFHEFVLFILEEKMGATRRTFLTDLARKKGFRVENELTDEVTHIVAENLSRSEVLAWLKEHKMEKTKQFELLDISWLIESMKVGKPVDTKGKYQLAESGEMSANPDPTEGRENELPPTMKTVSPYACQRRTTLNNHNQRFTDALEILRENYEFKRNDDTALEFRRAISVLKSLPFEVRSLKDTEGLPWIGDEVKGIMEEIIEVGNSREVQAVLNDEWYQSFHRFKSVFGVGVKTADKWYRMGLRTLEDVRSSKTLKLTPMQKVGLLYYEDLARGVTRAEADAISLLVQDAVATFDPDAIVEIVGGFRRGKPQGHDVDLLISSPGAEKEQEDQLLQKVTNLWKKQGLLLYGRLEWTQWEDGGSPSGKADEGDAGAKCFLILKLYDHKVDKSKWEMPPGSNMGEAKPWKAIRVDLLRCPYGGFAFAMLQWTGSRMFRRDLRWYATDEKNMMLDNHALYDLTKKIFLPAKSEEEIFAHLGLEYLEPFERNA

SEQ ID NO: 3137 - DNA, 1587 bp, synthetic construct
  misc_feature 1..1587: note = Variant of terminal deoxynucleotidyltransferase
  source 1..1587: mol_type = other DNA
atgcaccatcatcatcatcatggcggtagcggcagccacggcattcgtaccatcgattcggacttcgggaagaaacagcagaaaaaaatggataaccacgatagttccgccacttatgaaatcaaatttcacgagtttgtgctgttcattctcgaagaaaaaatgggtgcgacgcgtcgtacttttctgacagatttagcccgcaagaaagggttccgcgtcgagaatgaactgaccgacgaagttacccacatcgtggcagaaaatctgtcacgctctgaagtattggcttggctgaaagaacacaagatggagaagaccaagcaattcgaactgctggatattagctggcttatcgaaagcatgaaagttggtaaaccggtggacaccaaggggaaataccagttggcggaatcgggtgagatgagtgcgaacccagatccgacagagggtcgtgaaaacgagctgcctcctactatgaagaccgtttctccgtatgcgtgtcaacgccgcaccaccctgaacaaccataatcaacgttttacggacgcactggaaattcttcgtgaaaattacgagttcaaacgcaacgatgatactgcgctggaatttcgtcgtgctatctccgtgctgaaaagccttccgtttgaggtacgtagcctgaaagacacggaaggattgccctggatcggtgatgaagtcaaagggattatggaagaaatcatcgaggtcgggaattcgcgtgaagtgcaggccgtgctcaatgatgagtggtatcaaagcttccaccgctttaagagtgtctttggagtgggggtgaagacagcagacaagtggtaccgtatgggtctgcgcaccctcgaggatgttcgttccagcaagaccctgaagttgaccccgatgcagaaagtaggtctgctgtattatgaagatcttgctcgcggcgttacgcgtgccgaagctgacgcgatttctctgctggttcaggatgcagtcgcaactttcgacccggatgcgatcgtggagattgtcggtggatttcgtcgtgggaaacctcagggtcacgacgttgatctgcttatcagttctccgggagctgagaaagagcaagaagaccagctcctgcagaaagtgaccaatctgtggaagaaacaagggttgttgctgtacggtcgtctggaatggacccagtgggaagatgggggttcgccatccggtaaggctgacgagggtgacgcgggtgcgaaatgctttctgatcctcaaactttatgatcataaagtggacaaaagcaaatgggaaatgccgacgggttcgaacatgggcgaggccaaaccgtggaaagcaattcgcgtagatctgctgcgttgcccctacggcggttttgcgtttgcgatgttgcagtggaccggaagccgcatgttccgtcgtgatctgcgttggtacgccactgacgagaagaacatgatgctggacaatcatgcgctgtatgacctgaccaagaaaatcttcctccctgctaaatcggaagaggaaattttcgagcatctggggcttgaatacctggaaccgttcgaacgtaacgca

SEQ ID NO: 3138 - protein, 529 aa, synthetic construct
  REGION 1..529: note = Variant of terminal deoxynucleotidyltransferase
MHHHHHHGGSGSHGIRTIDSDFGKKQQKKMDNHDSSATYEIKFHEFVLFILEEKMGATRRTFLTDLARKKGFRVENELTDEVTHIVAENLSRSEVLAWLKEHKMEKTKQFELLDISWLIESMKVGKPVDTKGKYQLAESGEMSANPDPTEGRENELPPTMKTVSPYACQRRTTLNNHNQRFTDALEILRENYEFKRNDDTALEFRRAISVLKSLPFEVRSLKDTEGLPWIGDEVKGIMEEIIEVGNSREVQAVLNDEWYQSFHRFKSVFGVGVKTADKWYRMGLRTLEDVRSSKTLKLTPMQKVGLLYYEDLARGVTRAEADAISLLVQDAVATFDPDAIVEIVGGFRRGKPQGHDVDLLISSPGAEKEQEDQLLQKVTNLWKKQGLLLYGRLEWTQWEDGGSPSGKADEGDAGAKCFLILKLYDHKVDKSKWEMPTGSNMGEAKPWKAIRVDLLRCPYGGFAFAMLQWTGSRMFRRDLRWYATDEKNMMLDNHALYDLTKKIFLPAKSEEEIFEHLGLEYLEPFERNA

SEQ ID NO: 3139 - DNA, 1587 bp, synthetic construct
  misc_feature 1..1587: note = Variant of terminal deoxynucleotidyltransferase
  source 1..1587: mol_type = other DNA
atgcaccatcatcatcatcatggcggtagcggcagccacggcattcgtaccatcgattcggacttcgggaagaaacagcagaaaaaaatggataaccacgatagttccgccacttatgaaatcaaatttcacgagtttgtgctgttcattctcgaagaaaaaatgggtgcgacgcgtcgtacttttctgacagatttagcccgcaagaaagggttccgcgtcgagaatgaactgaccgacgaagttacccacatcgtggcagaaaatctgtcacgctctgaagtattggcttggctgaaagaacacaagatggagaagaccaagcaattcgaactgctggatattagctggcttatcgaaagcatgaaagttggtaaaccggtggacaccaaggggaaataccagttggcggaatcgggtgagatgagtgcgaacccagatccgacagagggtcgtgaaaacgagctgcctcctactatgaagaccgtttctccgtatgcgtgtcaacgccgcaccaccctgaacaaccataatcaacgttttacggacgcactggaaattcttcgtgaaaattacgagttcaaacgcaacgatgatactgcgctggaatttcgtcgtgctatctccgtgctgaaaagccttccgtttgaggtacgtagcctgaaagacacggaaggattgccctggatcggtgatgaagtcaaagggattatggaagaaatcatctctgtcgggaattcgcgtgaagtgcaggccgtgctcaatgatgagtggtatcaaagcttccaccgctttaagagtgtctttggagtgggggtgaagacagcagacaagtggtaccgtatgggtctgcgcaccctcgaggatgttcgttccagcaagaccctgaagttgaccccgatgcagaaagtaggtctgctgtattatgaagatcttgctcgcggcgttacgcgtgccgaagctgacgcgatttctctgctggttcaggatgcagtcgcaactttcgacccggatgcgatcgtggagattgtcggtggatttcgtcgtgggaaacctcagggtcacgacgttgatctgcttatcagttctccgggagctgagaaagagcaagaagaccagctcctgcagaaagtgaccaatctgtggaagaaacaagggttgttgctgtacggtcgtctggaatggacccagtgggaagatgggggttcgccatccggtaaggctgacgagggtgacgcgggtgcgaaatgctttctgatcctcaaactttatgatcataaagtggacaaaagcaaatgggaaatgccgacgggttcgaacatgggcgaggccaaaccgtggaaagcaattcgcgtagatctgctgcgttgcccctacggcggttttgcgtttgcgatgttgcagtggaccggaagccgcatgttccgtcgtgatctgcgttggtacgccactgacgagaagaacatgatgctggacaatcatgcgctgtatgacctgaccaagaaaatcttcctccctgctaaatcggaagaggaaattttcgcacatctggggcttgaatacctggaaccgttcgaacgtaacgca

SEQ ID NO: 3140 - protein, 529 aa, synthetic construct
  REGION 1..529: note = Variant of terminal deoxynucleotidyltransferase
MHHHHHHGGSGSHGIRTIDSDFGKKQQKKMDNHDSSATYEIKFHEFVLFILEEKMGATRRTFLTDLARKKGFRVENELTDEVTHIVAENLSRSEVLAWLKEHKMEKTKQFELLDISWLIESMKVGKPVDTKGKYQLAESGEMSANPDPTEGRENELPPTMKTVSPYACQRRTTLNNHNQRFTDALEILRENYEFKRNDDTALEFRRAISVLKSLPFEVRSLKDTEGLPWIGDEVKGIMEEIISVGNSREVQAVLNDEWYQSFHRFKSVFGVGVKTADKWYRMGLRTLEDVRSSKTLKLTPMQKVGLLYYEDLARGVTRAEADAISLLVQDAVATFDPDAIVEIVGGFRRGKPQGHDVDLLISSPGAEKEQEDQLLQKVTNLWKKQGLLLYGRLEWTQWEDGGSPSGKADEGDAGAKCFLILKLYDHKVDKSKWEMPTGSNMGEAKPWKAIRVDLLRCPYGGFAFAMLQWTGSRMFRRDLRWYATDEKNMMLDNHALYDLTKKIFLPAKSEEEIFAHLGLEYLEPFERNA

SEQ ID NO: 3141 - DNA, 1587 bp, synthetic construct
  misc_feature 1..1587: note = Variant of terminal deoxynucleotidyltransferase
  source 1..1587: mol_type = other DNA
atgcaccatcatcatcatcatggcggtagcggcagccacggcattcgtaccatcgattcggacttcgggaagaaacagcagaaaaaaatggataaccacgatagttccgccacttatgaaatcaaatttcacgagtttgtgctgttcattctcgaagaaaaaatgggtgcgacgcgtcgtacttttctgacagatttagcccgcaagaaagggttccgcgtcgagaatgaactgaccgacgaagttacccacatcgtggcagaaaatctgtcacgctctgaagtattggcttggctgaaagaacacaagatggagaagaccaagcaattcgaactgctggatattagctggcttatcgaaagcatgaaagttggtaaaccggtggacaccaaggggaaataccagttggcggaatcgggtgagatgagtgcgaacccagatccgacagagggtcgtgaaaacgagctgcctcctactatgaagaccgtttctccgtatgcgtgtcaacgccgcaccaccctgaacaaccataatcaacgttttacggacgcactggaaattcttcgtgaaaattacgagttcaaacgcaacgatgatactgcgctggaatttcgtcgtgctatctccgtgctgaaaagccttccgtttgaggtacgtagcctgaaagacacggaaggattgccctggatcggtgatgaagtcaaagggattatggaagaaatcatcgaggtcgggaattcgcgtgaagtgcaggccgtgctcaatgatgagtggtatcaaagcttccaccgctttaagagtgtctttggagtgggggtgaagacagcagacaagtggtaccgtatgggtctgcgcaccctcgaggatgttcgttccagcaagaccctgaagttgaccccgatgcagaaagtaggtctgctgtattatgaagatcttgctcgcggcgttacgcgtgccgaagctgacgcgatttctctgctggttcaggatgcagtcgcaactttcgacccggatgcgatcgtggagattgtcggtggatttcgtcgtgggaaacctcagggtcacgacgttgatctgcttatcagttctccgggagctgagaaagagcaagaagaccagctcctgcagaaagtgaccaatctgtggaagaaacaagggttgttgctgtacggtcgtctggaatggacccagtgggaagatgggggttcgccatccggtaaggctgacgagggtgacgcgggtgcgaaatgctttctgatcctcaaactttatgatcataaagtggacaaaagcaaatgggaaatgccggcgggttcgaacatgggcgaggccaaaccgtggaaagcaattcgcgtagatctgctgcgttgcccctacggcggttttgcgtttgcgatgttgcagtggaccggaagccgcatgttccgtcgtgatctgcgttggtacgccactgacgagaagaacatgatgctggacaatcatgcgctgtatgacctgaccaagaaaatcttcctccctgctaaatcggaagaggaaattttcgcacatctggggcttgaatacctggaaccgttcgaacgtaacgca

SEQ ID NO: 3142 - protein, 529 aa, synthetic construct
  REGION 1..529: note = Variant of terminal deoxynucleotidyltransferase
MHHHHHHGGSGSHGIRTIDSDFGKKQQKKMDNHDSSATYEIKFHEFVLFILEEKMGATRRTFLTDLARKKGFRVENELTDEVTHIVAENLSRSEVLAWLKEHKMEKTKQFELLDISWLIESMKVGKPVDTKGKYQLAESGEMSANPDPTEGRENELPPTMKTVSPYACQRRTTLNNHNQRFTDALEILRENYEFKRNDDTALEFRRAISVLKSLPFEVRSLKDTEGLPWIGDEVKGIMEEIIEVGNSREVQAVLNDEWYQSFHRFKSVFGVGVKTADKWYRMGLRTLEDVRSSKTLKLTPMQKVGLLYYEDLARGVTRAEADAISLLVQDAVATFDPDAIVEIVGGFRRGKPQGHDVDLLISSPGAEKEQEDQLLQKVTNLWKKQGLLLYGRLEWTQWEDGGSPSGKADEGDAGAKCFLILKLYDHKVDKSKWEMPAGSNMGEAKPWKAIRVDLLRCPYGGFAFAMLQWTGSRMFRRDLRWYATDEKNMMLDNHALYDLTKKIFLPAKSEEEIFAHLGLEYLEPFERNA

SEQ ID NO: 3143 - DNA, 1587 bp, synthetic construct
  misc_feature 1..1587: note = Variant of terminal deoxynucleotidyltransferase
  source 1..1587: mol_type = other DNA
atgcaccatcatcatcatcatggcggtagcggcagccacggcattcgtaccatcgattcggacttcgggaagaaacagcagaaaaaaatggataaccacgatagttccgccacttatgaaatcaaatttcacgagtttgtgctgttcattctcgaagaaaaaatgggtgcgacgcgtcgtacttttctgacagatttagcccgcaagaaagggttccgcgtcgagaatgaactgaccgacgaagttacccacatcgtggcagaaaatctgtcacgctctgaagtattggcttggctgaaagaacacaagatggagaagaccaagcaattcgaactgctggatattagctggcttatcgaaagcatgaaagttggtaaaccggtggacaccaaggggaaataccagttggcggaatcgggtgagatgagtgcgaacccagatccgacagagggtcgtgaaaacgagctgcctcctactatgaagaccgtttctccgtatgcgtgtcaacgccgcaccaccctgaacaaccataatcaacgttttacggacgcactggaaattcttcgtgaaaattacgagttcaaacgcaacgatgatactgcgctggaatttcgtcgtgctatctccgtgctgaaaagccttccgtttgaggtacgtagcctgaaagacacggaaggattgccctggatcggtgatgaagtcaaagggattatggaagaaatcatcgaggtcgggaattcgcgtgaagtgcaggccgtgctcaatgatgagtggtatcaaagcttccaccgctttaagagtgtctttggagtgggggtgaagacagcagacaagtggtaccgtatgggtctgcgcaccctcgaggatgttcgttccagcaagaccctgaagttgaccccgatgcagaaagtaggtctgctgtattatgaagatcttgctcgcggcgttacgcgtgccgaagctgacgcgatttctctgctggttcaggatgcagtcgcaactttcgacccggatgcgatcgtggagattgtcggtggatttcgtcgtgggaaacctcagggtcacgacgttgatctgcttatcagttctccgggagctgagaaagagcaagaagaccagctcctgcagaaagtgaccaatctgtggaagaaacaagggttgttgctgtacggtcgtctggaatggacccagtgggaagatgggggttcgccatccggtaaggctgacgagggtgacgcgggtgcgaaatgctttctgatcctcaaactttatgatcataaagtggacaaaagcaaatgggaaatgccgacgggttcgaacatggctgaggccaaaccgtggaaagcaattcgcgtagatctgctgcgttgcccctacggcggttttgcgtttgcgatgttgcagtggaccggaagccgcatgttccgtcgtgatctgcgttggtacgccactgacgagaagaacatgatgctggacaatcatgcgctgtatgacctgaccaagaaaatcttcctccctgctaaatcggaagaggaaattttcgcacatctggggcttgaatacctggaaccgttcgaacgtaacgca

SEQ ID NO: 3144 - protein, 529 aa, synthetic construct
  REGION 1..529: note = Variant of terminal deoxynucleotidyltransferase
MHHHHHHGGSGSHGIRTIDSDFGKKQQKKMDNHDSSATYEIKFHEFVLFILEEKMGATRRTFLTDLARKKGFRVENELTDEVTHIVAENLSRSEVLAWLKEHKMEKTKQFELLDISWLIESMKVGKPVDTKGKYQLAESGEMSANPDPTEGRENELPPTMKTVSPYACQRRTTLNNHNQRFTDALEILRENYEFKRNDDTALEFRRAISVLKSLPFEVRSLKDTEGLPWIGDEVKGIMEEIIEVGNSREVQAVLNDEWYQSFHRFKSVFGVGVKTADKWYRMGLRTLEDVRSSKTLKLTPMQKVGLLYYEDLARGVTRAEADAISLLVQDAVATFDPDAIVEIVGGFRRGKPQGHDVDLLISSPGAEKEQEDQLLQKVTNLWKKQGLLLYGRLEWTQWEDGGSPSGKADEGDAGAKCFLILKLYDHKVDKSKWEMPTGSNMAEAKPWKAIRVDLLRCPYGGFAFAMLQWTGSRMFRRDLRWYATDEKNMMLDNHALYDLTKKIFLPAKSEEEIFAHLGLEYLEPFERNA

SEQ ID NO: 3145 - DNA, 1587 bp, synthetic construct
  misc_feature 1..1587: note = Variant of terminal deoxynucleotidyltransferase
  source 1..1587: mol_type = other DNA
atgcaccatcatcatcatcatggcggtagcggcagccacggcattcgtaccatcgattcggacttcgggaagaaacagcagaaaaaaatggataaccacgatagttccgccacttatgaaatcaaatttcacgagtttgtgctgttcattctcgaagaaaaaatgggtgcgacgcgtcgtacttttctgacagatttagcccgcaagaaagggttccgcgtcgagaatgaactgaccgacgaagttacccacatcgtggcagaaaatctgtcacgctctgaagtattggcttggctgaaagaacacaagatggagaagaccaagcaattcgaactgctggatattagctggcttatcgaaagcatgaaagttggtaaaccggtggacaccaaggggaaataccagttggcggaatcgggtgagatgagtgcgaacccagatccgacagagggtcgtgaaaacgagctgcctcctactatgaagaccgtttctccgtatgcgtgtcaacgccgcaccaccctgaacaaccataatcaacgttttacggacgcactggaaattcttcgtgaaaattacgagttcaaacgcaacgatgatactgcgctggaatttcgtcgtgctatctccgtgctgaaaagccttccgtttgaggtacgtagcctgaaagacacggaaggattgccctggatcggtgatgaagtcaaagggattatggaagaaatcatcgaggtcgggaattcgcgtgaagtgcaggccgtgctcaatgatgagtggtatcaaagcttccaccgctttaagagtgtctttggagtgggggtgaagacagcagacaagtggtaccgtatgggtctgcgcaccattgaggatgttcgttccagcaagaccctgaagttgaccccgatgcagaaagtaggtctgctgtattatgaagatcttgctcgcggcgttacgcgtgccgaagctgacgcgatttctctgctggttcaggatgcagtcgcaactttcgacccggatgcgatcgtggagattgtcggtggatttcgtcgtgggaaacctcagggtcacgacgttgatctgcttatcagttctccgggagctgagaaagagcaagaagaccagctcctgcagaaagtgaccaatctgtggaagaaacaagggttgttgctgtacggtcgtctggaatggacccagtgggaagatgggggttcgccatccggtaaggctgacgagggtgacgcgggtgcgaaatgctttctgatcctcaaactttatgatcataaagtggacaaaagcaaatgggaaatgccgacgggttcgaacatgggcgaggccaaaccgtggaaagcaattcgcgtagatctgctgcgttgcccctacggcggttttgcgtttgcgatgttgcagtggaccggaagccgcatgttccgtcgtgatctgcgttggtacgccactgacgagaagaacatgatgctggacaatcatgcgctgtatgacctgaccaagaaaatcttcctccctgctaaatcggaagaggaaattttcgcacatctggggcttgaatacctggaaccgttcgaacgtaacgca

SEQ ID NO: 3146 - protein, 529 aa, synthetic construct
  REGION 1..529: note = Variant of terminal deoxynucleotidyltransferase
MHHHHHHGGSGSHGIRTIDSDFGKKQQKKMDNHDSSATYEIKFHEFVLFILEEKMGATRRTFLTDLARKKGFRVENELTDEVTHIVAENLSRSEVLAWLKEHKMEKTKQFELLDISWLIESMKVGKPVDTKGKYQLAESGEMSANPDPTEGRENELPPTMKTVSPYACQRRTTLNNHNQRFTDALEILRENYEFKRNDDTALEFRRAISVLKSLPFEVRSLKDTEGLPWIGDEVKGIMEEIIEVGNSREVQAVLNDEWYQSFHRFKSVFGVGVKTADKWYRMGLRTIEDVRSSKTLKLTPMQKVGLLYYEDLARGVTRAEADAISLLVQDAVATFDPDAIVEIVGGFRRGKPQGHDVDLLISSPGAEKEQEDQLLQKVTNLWKKQGLLLYGRLEWTQWEDGGSPSGKADEGDAGAKCFLILKLYDHKVDKSKWEMPTGSNMGEAKPWKAIRVDLLRCPYGGFAFAMLQWTGSRMFRRDLRWYATDEKNMMLDNHALYDLTKKIFLPAKSEEEIFAHLGLEYLEPFERNA

SEQ ID NO: 3147 - DNA, 1587 bp, synthetic construct
  misc_feature 1..1587: note = Variant of terminal deoxynucleotidyltransferase
  source 1..1587: mol_type = other DNA
atgcaccatcatcatcatcatggcggtagcggcagccacggcattcgtaccatcgattcggacttcgggaagaaacagcagaaaaaaatggataaccacgatagttccgccacttatgaaatcaaatttcacgagtttgtgctgttcattctcgaagaaaaaatgggtgcgacgcgtcgtacttttctgacagatttagcccgcaagaaagggttccgcgtcgagaatgaactgaccgacgaagttacccacatcgtggcagaaaatctgtcacgctctgaagtattggcttggctgaaagaacacaagatggagaagaccaagcaattcgaactgctggatattagctggcttatcgaaagcatgaaagttggtaaaccggtggacaccaaggggaaataccagttggcggaatcgggtgagatgagtgcgaacccagatccgacagagggtcgtgaaaacgagctgcctcctactatgaagaccgtttctccgtatgcgtgtcaacgccgcaccaccctgaacaaccataatcaacgttttacggacgcactggaaattcttcgtgaaaattacgagttcaaacgcaacgatgatactgcgctggaatttcgtcgtgctatctccgtgctgaaaagccttccgtttgaggtacgtagcctgaaagacacggaaggattgccctggatcggtgatgaagtcaaagggattatggaagaaatcatcttggtcgggaattcgcgtgaagtgcaggccgtgctcaatgatgagtggtatcaaagcttccaccgctttaagagtgtctttggagtgggggtgaagacagcagacaagtggtaccgtatgggtctgcgcaccctcgaggatgttcgttccagcaagaccctgaagttgaccccgatgcagaaagtaggtctgctgtattatgaagatcttgctcgcggcgttacgcgtgccgaagctgacgcgatttctctgctggttcaggatgcagtcgcaactttcgacccggatgcgatcgtggagattgtcggtggatttcgtcgtgggaaacctcagggtcacgacgttgatctgcttatcagttctccgggagctgagaaagagcaagaagaccagctcctgcagaaagtgaccaatctgtggaagaaacaagggttgttgctgtacggtcgtctggaatggacccagtgggaagatgggggttcgccatccggtaaggctgacgagggtgacgcgggtgcgaaatgctttctgatcctcaaactttatgatcataaagtggacaaaagcaaatgggaaatgccgacgggttcgaacatgggcgaggccaaaccgtggaaagcaattcgcgtagatctgctgcgttgcccctacggcggttttgcgtttgcgatgttgcagtggaccggaagccgcatgttccgtcgtgatctgcgttggtacgccactgacgagaagaacatgatgctggacaatcatgcgctgtatgacctgaccaagaaaatcttcctccctgctaaatcggaagaggaaattttcgcacatctggggcttgaatacctggaaccgttcgaacgtaacgca

SEQ ID NO: 3148 - protein, 529 aa, synthetic construct
  REGION 1..529: note = Variant of terminal deoxynucleotidyltransferase
MHHHHHHGGSGSHGIRTIDSDFGKKQQKKMDNHDSSATYEIKFHEFVLFILEEKMGATRRTFLTDLARKKGFRVENELTDEVTHIVAENLSRSEVLAWLKEHKMEKTKQFELLDISWLIESMKVGKPVDTKGKYQLAESGEMSANPDPTEGRENELPPTMKTVSPYACQRRTTLNNHNQRFTDALEILRENYEFKRNDDTALEFRRAISVLKSLPFEVRSLKDTEGLPWIGDEVKGIMEEIILVGNSREVQAVLNDEWYQSFHRFKSVFGVGVKTADKWYRMGLRTLEDVRSSKTLKLTPMQKVGLLYYEDLARGVTRAEADAISLLVQDAVATFDPDAIVEIVGGFRRGKPQGHDVDLLISSPGAEKEQEDQLLQKVTNLWKKQGLLLYGRLEWTQWEDGGSPSGKADEGDAGAKCFLILKLYDHKVDKSKWEMPTGSNMGEAKPWKAIRVDLLRCPYGGFAFAMLQWTGSRMFRRDLRWYATDEKNMMLDNHALYDLTKKIFLPAKSEEEIFAHLGLEYLEPFERNA

SEQ ID NO: 3149 - DNA, 1587 bp, synthetic construct
  misc_feature 1..1587: note = Variant of terminal deoxynucleotidyltransferase
  source 1..1587: mol_type = other DNA
atgcaccatcatcatcatcatggcggtagcggcagccacggcattcgtaccatcgattcggacttcgggaagaaacagcagaaaaaaatggataaccacgatagttccgccacttatgaaatcaaatttcacgagtttgtgctgttcattctcgaagaaaaaatgggtgcgacgcgtcgtacttttctgacagatttagcccgcaagaaagggttccgcgtcgagaatgaactgaccgacgaagttacccacatcgtggcagaaaatctgtcacgctctgaagtattggcttggctgaaagaacacaagatggagaagaccaagcaattcgaactgctggatattagctggcttatcgaaagcatgaaagttggtaaaccggtggacaccaaggggaaataccagttggcggaatcgggtgagatgagtgcgaacccagatccgacagagggtcgtgaaaacgagctgcctcctactatgaagaccgtttctccgtatgcgtgtcaacgccgcaccaccctgaacaaccataatcaacgttttacggacgcactggaaattcttcgtgaaaattacgagttcaaacgcaacgatgatactgcgctggaatttcgtcgtgctatctccgtgctgaaaagccttccgtttgaggtacgtagcctgaaagacacggaaggattgccctggatcggtgatgaagtcaaagggattatggaagaaatcatcgaggtcgggaattcgcgtgaagtgcaggccgtgctcaatgatgagtggtatcaaagcttccaccgctttaagagtgtctttggagtgggggtgaagacagcagacaagtggtaccgtatgggtctgcgcaccctcgaggatgttcgttccagcaagaccctgagtttgaccccgatgcagaaagtaggtctgctgtattatgaagatcttgctcgcggcgttacgcgtgccgaagctgacgcgatttctctgctggttcaggatgcagtcgcaactttcgacccggatgcgatcgtggagattgtcggtggatttcgtcgtgggaaacctcagggtcacgacgttgatctgcttatcagttctccgggagctgagaaagagcaagaagaccagctcctgcagaaagtgaccaatctgtggaagaaacaagggttgttgctgtacggtcgtctggaatggacccagtgggaagatgggggttcgccatccggtaaggctgacgagggtgacgcgggtgcgaaatgctttctgatcctcaaactttatgatcataaagtggacaaaagcaaatgggaaatgccgacgggttcgaaaatgggcgaggccaaaccgtggaaagcaattcgcgtagatctgctgcgttgcccctacggcggttttgcgtttgcgatgttgcagtggaccggaagccgcatgttccgtcgtgatctgcgttggtacgccactgacgagaagaacatgatgctggacaatcatgcgctgtatgacctgaccaagaaaatcttcctccctgctaaatcggaagaggaaattttcgcacatctggggcttgaatacctggaaccgttcgaacgtaacgca

SEQ ID NO: 3150 - protein, 529 aa, synthetic construct
  REGION 1..529: note = Variant of terminal deoxynucleotidyltransferase
MHHHHHHGGSGSHGIRTIDSDFGKKQQKKMDNHDSSATYEIKFHEFVLFILEEKMGATRRTFLTDLARKKGFRVENELTDEVTHIVAENLSRSEVLAWLKEHKMEKTKQFELLDISWLIESMKVGKPVDTKGKYQLAESGEMSANPDPTEGRENELPPTMKTVSPYACQRRTTLNNHNQRFTDALEILRENYEFKRNDDTALEFRRAISVLKSLPFEVRSLKDTEGLPWIGDEVKGIMEEIIEVGNSREVQAVLNDEWYQSFHRFKSVFGVGVKTADKWYRMGLRTLEDVRSSKTLSLTPMQKVGLLYYEDLARGVTRAEADAISLLVQDAVATFDPDAIVEIVGGFRRGKPQGHDVDLLISSPGAEKEQEDQLLQKVTNLWKKQGLLLYGRLEWTQWEDGGSPSGKADEGDAGAKCFLILKLYDHKVDKSKWEMPTGSKMGEAKPWKAIRVDLLRCPYGGFAFAMLQWTGSRMFRRDLRWYATDEKNMMLDNHALYDLTKKIFLPAKSEEEIFAHLGLEYLEPFERNA

SEQ ID NO: 3151 - DNA, 1587 bp, synthetic construct
  misc_feature 1..1587: note = Variant of terminal deoxynucleotidyltransferase
  source 1..1587: mol_type = other DNA
atgcaccatcatcatcatcatggcggtagcggcagccacggcattcgtaccatcgattcggacttcgggaagaaacagcagaaaaaaatggataaccacgatagttccgccacttatgaaatcaaatttcacgagtttgtgctgttcattctcgaagaaaaaatgggtgcgacgcgtcgtacttttctgacagatttagcccgcaagaaagggttccgcgtcgagaatgaactgaccgacgaagttacccacatcgtggcagaaaatctgtcacgctctgaagtattggcttggctgaaagaacacaagatggagaagaccaagcaattcgaactgctggatattagctggcttatcgaaagcatgaaagttggtaaaccggtggacaccaaggggaaataccagttggcggaatcgggtgagatgagtgcgaacccagatccgacagagggtcgtgaaaacgagctgcctcctactatgaagaccgtttctccgtatgcgtgtcaacgccgcaccaccctgaacaaccataatcaacgttttacggacgcactggaaattcttcgtgaaaattacgagttcaaacgcaacgatgatactgcgctggaatttcgtcgtgctatctccgtgctgaaaagccttccgtttgaggtacgtagcctgaaagacacggaaggattgccctggatcggtgatgaagtcaaagggattatggaagaaatcatcacggtcgggaattcgcgtgaagtgcaggccgtgctcaatgatgagtggtatcaaagcttccaccgctttaagagtgtctttggagtgggggtgaagacagcagacaagtggtaccgtatgggtctgcgcaccctcgaggatgttcgttccagcaagaccctgaagttgaccccgatgcagaaagtaggtctgctgtattatgaagatcttgctcgcggcgttacgcgtgccgaagctgacgcgatttctctgctggttcaggatgcagtcgcaactttcgacccggatgcgatcgtggagattgtcggtggatttcgtcgtgggaaacctcagggtcacgacgttgatctgcttatcagttctccgggagctgagaaagagcaagaagaccagctcctgcagaaagtgaccaatctgtggaagaaacaagggttgttgctgtacggtcgtctggaatggacccagtgggaagatgggggttcgccatccggtaaggctgacgagggtgacgcgggtgcgaaatgctttctgatcctcaaactttatgatcataaagtggacaaaagcaaatgggaaatgccgacgggttcgaacatgggcgaggccaaaccgtggaaagcaattcgcgtagatctgctgcgttgcccctacggcggttttgcgtttgcgatgttgcagtggaccggaagccgcatgttccgtcgtgatctgcgttggtacgccactgacgagaagaacatgatgctggacaatcatgcgctgtatgacctgaccaagaaaatcttcctccctgctaaatcggaagaggaaattttcgcacatctggggcttgaatacctggaaccgttcgaacgtaacgca

SEQ ID NO: 3152 - protein, 529 aa, synthetic construct
  REGION 1..529: note = Variant of terminal deoxynucleotidyltransferase
MHHHHHHGGSGSHGIRTIDSDFGKKQQKKMDNHDSSATYEIKFHEFVLFILEEKMGATRRTFLTDLARKKGFRVENELTDEVTHIVAENLSRSEVLAWLKEHKMEKTKQFELLDISWLIESMKVGKPVDTKGKYQLAESGEMSANPDPTEGRENELPPTMKTVSPYACQRRTTLNNHNQRFTDALEILRENYEFKRNDDTALEFRRAISVLKSLPFEVRSLKDTEGLPWIGDEVKGIMEEIITVGNSREVQAVLNDEWYQSFHRFKSVFGVGVKTADKWYRMGLRTLEDVRSSKTLKLTPMQKVGLLYYEDLARGVTRAEADAISLLVQDAVATFDPDAIVEIVGGFRRGKPQGHDVDLLISSPGAEKEQEDQLLQKVTNLWKKQGLLLYGRLEWTQWEDGGSPSGKADEGDAGAKCFLILKLYDHKVDKSKWEMPTGSNMGEAKPWKAIRVDLLRCPYGGFAFAMLQWTGSRMFRRDLRWYATDEKNMMLDNHALYDLTKKIFLPAKSEEEIFAHLGLEYLEPFERNA

SEQ ID NO: 3153 - DNA, 1587 bp, synthetic construct
  misc_feature 1..1587: note = Variant of terminal deoxynucleotidyltransferase
  source 1..1587: mol_type = other DNA
atgcaccatcatcatcatcatggcggtagcggcagccacggcattcgtaccatcgattcggacttcgggaagaaacagcagaaaaaaatggataaccacgatagttccgccacttatgaaatcaaatttcacgagtttgtgctgttcattctcgaagaaaaaatgggtgcgacgcgtcgtacttttctgacagatttagcccgcaagaaagggttccgcgtcgagaatgaactgaccgacgaagttacccacatcgtggcagaaaatctgtcacgctctgaagtattggcttggctgaaagaacacaagatggagaagaccaagcaattcgaactgctggatattagctggcttatcgaaagcatgaaagttggtaaaccggtggacaccaaggggaaataccagttggcggaatcgggtgagatgagtgcgaacccagatccgacagagggtcgtgaaaacgagctgcctcctactatgaagaccgtttctccgtatgcgtgtcaacgccgcaccaccctgaacaaccataatcaacgttttacggacgcactggaaattcttcgtgaaaattacgagttcaaacgcaacgatgatactgcgctggaatttcgtcgtgctatctccgtgctgaaaagccttccgtttgaggtacgtagcctgaaagacacggaaggattgccctggatcggtgatgaagtcaaagggattatggaagaaatcatcgaggtcgggaattcgcgtgaagtgcaggccgtgctcaatgatgagtggtatcaaagcttccaccgctttaagagtgtctttggagtgggggtgaagacagcagacaagtggtaccgtatgggtctgcgcaccctcgaggatgttcgttccagcaagaccctgaagttgaccccgatgcagaaagtaggtctgctgtattatgaagatcttgctcgcggcgttacgcgtgccgaagctgacgcgatttctctgctggttcaggatgcagtcgcaactttcgacccggatgcgatcgtggagattgtcggtggatttcgtcgtgggaaacctcagggtcacgacgttgatctgcttatcagttctccgggagctgagaaagagcaagaagaccagctcctgcagaaagtgaccaatctgtggaagaaacaagggttgttgctgtacggtcgtctggaatggacccagtgggaagatgggggttcgccatccggtaaggctgacgagggtgacgcgggtgcgaaatgctttctgatcctcaaactttatgatcataaagtggacaaaagcaaatgggaaatgccgacgggtggtaacatgggcgaggccaaaccgtggaaagcaattcgcgtagatctgctgcgttgcccctacggcggttttgcgtttgcgatgttgcagtggaccggaagccgcatgttccgtcgtgatctgcgttggtacgccactgacgagaagaacatgatgctggacaatcatgcgctgtatgacctgaccaagaaaatcttcctccctgctaaatcggaagaggaaattttcgcacatctggggcttgaatacctggaaccgttcgaacgtaacgca

SEQ ID NO: 3154 - protein, 529 aa, synthetic construct
  REGION 1..529: note = Variant of terminal deoxynucleotidyltransferase
MHHHHHHGGSGSHGIRTIDSDFGKKQQKKMDNHDSSATYEIKFHEFVLFILEEKMGATRRTFLTDLARKKGFRVENELTDEVTHIVAENLSRSEVLAWLKEHKMEKTKQFELLDISWLIESMKVGKPVDTKGKYQLAESGEMSANPDPTEGRENELPPTMKTVSPYACQRRTTLNNHNQRFTDALEILRENYEFKRNDDTALEFRRAISVLKSLPFEVRSLKDTEGLPWIGDEVKGIMEEIIEVGNSREVQAVLNDEWYQSFHRFKSVFGVGVKTADKWYRMGLRTLEDVRSSKTLKLTPMQKVGLLYYEDLARGVTRAEADAISLLVQDAVATFDPDAIVEIVGGFRRGKPQGHDVDLLISSPGAEKEQEDQLLQKVTNLWKKQGLLLYGRLEWTQWEDGGSPSGKADEGDAGAKCFLILKLYDHKVDKSKWEMPTGGNMGEAKPWKAIRVDLLRCPYGGFAFAMLQWTGSRMFRRDLRWYATDEKNMMLDNHALYDLTKKIFLPAKSEEEIFAHLGLEYLEPFERNA

SEQ ID NO: 3155 - DNA, 1587 bp, synthetic construct
  misc_feature 1..1587: note = Variant of terminal deoxynucleotidyltransferase
  source 1..1587: mol_type = other DNA
atgcaccatcatcatcatcatggcggtagcggcagccacggcattcgtaccatcgattcggacttcgggaagaaacagcagaaaaaaatggataaccacgatagttccgccacttatgaaatcaaatttcacgagtttgtgctgttcattctcgaagaaaaaatgggtgcgacgcgtcgtacttttctgacagatttagcccgcaagaaagggttccgcgtcgagaatgaactgaccgacgaagttacccacatcgtggcagaaaatctgtcacgctctgaagtattggcttggctgaaagaacacaagatggagaagaccaagcaattcgaactgctggatattagctggcttatcgaaagcatgaaagttggtaaaccggtggacaccaaggggaaataccagttggcggaatcgggtgagatgagtgcgaacccagatccgacagagggtcgtgaaaacgagctgcctcctactatgaagaccgtttctccgtatgcgtgtcaacgccgcaccaccctgaacaaccataatcaacgttttacggacgcactggaaattcttcgtgaaaattacgagttcaaacgcaacgatgatactgcgctggaatttcgtcgtgctatctccgtgctgaaaagccttccgtttgaggtacgtagcctgaaagacacggaaggattgccctggatcggtgatgaagtcaaagggattatggaagaaatcatccgtgtcgggaattcgcgtgaagtgcaggccgtgctcaatgatgagtggtatcaaagcttccaccgctttaagagtgtctttggagtgggggtgaagacagcagacaagtggtaccgtatgggtctgcgcaccctcgaggatgttcgttccagcaagaccctgaagttgaccccgatgcagaaagtaggtctgctgtattatgaagatcttgctcgcggcgttacgcgtgccgaagctgacgcgatttctctgctggttcaggatgcagtcgcaactttcgacccggatgcgatcgtggagattgtcggtggatttcgtcgtgggaaacctcagggtcacgacgttgatctgcttatcagttctccgggagctgagaaagagcaagaagaccagctcctgcagaaagtgaccaatctgtggaagaaacaagggttgttgctgtacggtcgtctggaatggacccagtgggaagatgggggttcgccatccggtaaggctgacgagggtgacgcgggtgcgaaatgctttctgatcctcaaactttatgatcataaagtggacaaaagcaaatgggaaatgccgacgggttcgaacatgggcgaggccaaaccgtggaaagcaattcgcgtagatctgctgcgttgcccctacggcggttttgcgtttgcgatgttgcagtggaccggaagccgcatgttccgtcgtgatctgcgttggtacgccactgacgagaagaacatgatgctggacaatcatgcgctgtatgacctgaccaagaaaatcttcctccctgctaaatcggaagaggaaattttcgcacatctggggcttgaatacctggaaccgttcgaacgtaacgca

SEQ ID NO: 3156 - protein, 529 aa, synthetic construct
  REGION 1..529: note = Variant of terminal deoxynucleotidyltransferase
MHHHHHHGGSGSHGIRTIDSDFGKKQQKKMDNHDSSATYEIKFHEFVLFILEEKMGATRRTFLTDLARKKGFRVENELTDEVTHIVAENLSRSEVLAWLKEHKMEKTKQFELLDISWLIESMKVGKPVDTKGKYQLAESGEMSANPDPTEGRENELPPTMKTVSPYACQRRTTLNNHNQRFTDALEILRENYEFKRNDDTALEFRRAISVLKSLPFEVRSLKDTEGLPWIGDEVKGIMEEIIRVGNSREVQAVLNDEWYQSFHRFKSVFGVGVKTADKWYRMGLRTLEDVRSSKTLKLTPMQKVGLLYYEDLARGVTRAEADAISLLVQDAVATFDPDAIVEIVGGFRRGKPQGHDVDLLISSPGAEKEQEDQLLQKVTNLWKKQGLLLYGRLEWTQWEDGGSPSGKADEGDAGAKCFLILKLYDHKVDKSKWEMPTGSNMGEAKPWKAIRVDLLRCPYGGFAFAMLQWTGSRMFRRDLRWYATDEKNMMLDNHALYDLTKKIFLPAKSEEEIFAHLGLEYLEPFERNA

SEQ ID NO: 3157 - DNA, 1587 bp, synthetic construct
  misc_feature 1..1587: note = Variant of terminal deoxynucleotidyltransferase
  source 1..1587: mol_type = other DNA
atgcaccatcatcatcatcatggcggtagcggcagccacggcattcgtaccatcgattcggacttcgggaagaaacagcagaaaaaaatggataaccacgatagttccgccacttatgaaatcaaatttcacgagtttgtgctgttcattctcgaagaaaaaatgggtgcgacgcgtcgtacttttctgacagatttagcccgcaagaaagggttccgcgtcgagaatgaactgaccgacgaagttacccacatcgtggcagaaaatctgtcacgctctgaagtattggcttggctgaaagaacacaagatggagaagaccaagcaattcgaactgctggatattagctggcttatcgaaagcatgaaagttggtaaaccggtggacaccaaggggaaataccagttggcggaatcgggtgagatgagtgcgaacccagatccgacagagggtcgtgaaaacgagctgcctcctactatgaagaccgtttctccgtatgcgtgtcaacgccgcaccaccctgaacaaccataatcaacgttttacggacgcactggaaattcttcgtgaaaattacgagttcaaacgcaacgatgatactgcgctggaatttcgtcgtgctatctccgtgctgaaaagccttccgtttgaggtacgtagcctgaaagacacggaaggattgccctggatcggtgatgaagtcaaagggattatggaagaaatcatcgaggtcgggaattcgcgtgaagtgcaggccgtgctcaatgatgagtggtatcaaagcttccaccgctttaagagtgtctttggagtgggggtgaagacagcagacaagtggtaccgtatgggtctgcgcaccctcgaggatgttcgttccagcaagaccctgaagttgaccccgatgcagaaagtaggtctgctgtattatgaagatcttgctcgcggcgttacgcgtgccgaagctgacgcgatttctctgctggttcaggatgcagtcgcaactttcgacccggatgcgatcgtggagattgtcggtggatttcgtcgtgggaaacctcagggtcacgacgttgatctgcttatcagttctccgggagctgagaaagagcaagaagaccagctcctgcagaaagtgaccaatctgtggaagaaacaagggttgttgctgtacggtcgtctggaatggacccagtgggaagatgggggttcgccatccggtaaggctgacgagggtgacgcgggtgcgaaatgctttctgatcctcaaactttatgatcataaagtggacaaaagcaaatgggaaatgccgacgggttcgaacatgggcgaggccaaaccgtggaaagcaattcgcgtagatctgctgcgttgcccctacggcggttttgcgtttgcgatgttgcagtggaccggaagccgcatgttccgtcgtgatctgcgttggtacgccacttctgagaagaacatgatgctggacaatcatgcgctgtatgacctgaccaagaaaatcttcctccctgctaaatcggaagaggaaattttcgcacatctggggcttgaatacctggaaccgttcgaacgtaacgca

SEQ ID NO: 3158 - protein, 529 aa, synthetic construct
  REGION 1..529: note = Variant of terminal deoxynucleotidyltransferase
MHHHHHHGGSGSHGIRTIDSDFGKKQQKKMDNHDSSATYEIKFHEFVLFILEEKMGATRRTFLTDLARKKGFRVENELTDEVTHIVAENLSRSEVLAWLKEHKMEKTKQFELLDISWLIESMKVGKPVDTKGKYQLAESGEMSANPDPTEGRENELPPTMKTVSPYACQRRTTLNNHNQRFTDALEILRENYEFKRNDDTALEFRRAISVLKSLPFEVRSLKDTEGLPWIGDEVKGIMEEIIEVGNSREVQAVLNDEWYQSFHRFKSVFGVGVKTADKWYRMGLRTLEDVRSSKTLKLTPMQKVGLLYYEDLARGVTRAEADAISLLVQDAVATFDPDAIVEIVGGFRRGKPQGHDVDLLISSPGAEKEQEDQLLQKVTNLWKKQGLLLYGRLEWTQWEDGGSPSGKADEGDAGAKCFLILKLYDHKVDKSKWEMPTGSNMGEAKPWKAIRVDLLRCPYGGFAFAMLQWTGSRMFRRDLRWYATSEKNMMLDNHALYDLTKKIFLPAKSEEEIFAHLGLEYLEPFERNA

SEQ ID NO: 3159 - DNA, 1587 bp, synthetic construct
  misc_feature 1..1587: note = Variant of terminal deoxynucleotidyltransferase
  source 1..1587: mol_type = other DNA
atgcaccatcatcatcatcatggcggtagcggcagccacggcattcgtaccatcgattcggacttcgggaagaaacagcagaaaaaaatggataaccacgatagttccgccacttatgaaatcaaatttcacgagtttgtgctgttcattctcgaagaaaaaatgggtgcgacgcgtcgtacttttctgacagatttagcccgcaagaaagggttccgcgtcgagaatgaactgaccgacgaagttacccacatcgtggcagaaaatctgtcacgctctgaagtattggcttggctgaaagaacacaagatggagaagaccaagcaattcgaactgctggatattagctggcttatcgaaagcatgaaagttggtaaaccggtggacaccaaggggaaataccagttggcggaatcgggtgagatgagtgcgaacccagatccgacagagggtcgtgaaaacgagctgcctcctactatgaagaccgtttctccgtatgcgtgtcaacgccgcaccaccctgaacaaccataatcaacgttttacggacgcactggaaattcttcgtgaaaattacgagttcaaacgcaacgatgatactgcgctggaatttcgtcgtgctatctccgtgctgaaaagccttccgtttgaggtacgtagcctgaaagacacggaaggattgccctggatcggtgatgaagtcaaagggattatggaagaaatcatcgaggtcgggaattcgcgtgaagtgcaggccgtgctcaatgatgagtggtatcaaagcttccaccgctttaagagtgtctttggagtgggggtgaagacagcagacaagtggtaccgtatgggtctgcgcaccctcgaggatgttcgttccagcaagaccctgaagttgaccccgatgcagaaagtaggtctgctgtattatgaagatcttgctcgcggcgttacgcgtgccgaagctgacgcgatttctctgctggttcaggatgcagtcgcaactttcgacccggatgcgatcgtggagattgtcggtggatttcgtcgtgggaaacctcagggtcacgacgttgatctgcttatcagttctccgggagctgagaaagagcaagaagaccagctcctgcagaaagtgaccaatctgtggaagaaacaagggttgttgctgtacggtcgtctggaatggacccagtgggaagatgggggttcgccatccggtaaggctgacgagggtgacgcgggtgcgaaatgctttctgatcctcaaactttatgatcataaagtggacaaaagcaaatgggaaatgccgacgggtcctaacatgggcgaggccaaaccgtggaaagcaattcgcgtagatctgctgcgttgcccctacggcggttttgcgtttgcgatgttgcagtggaccggaagccgcatgttccgtcgtgatctgcgttggtacgccactgacgagaagaacatgatgctggacaatcatgcgctgtatgacctgaccaagaaaatcttcctccctgctaaatcggaagaggaaattttcgcacatctggggcttgaatacctggaaccgttcgaacgtaacgca

SEQ ID NO: 3160 - protein, 529 aa, synthetic construct
  REGION 1..529: note = Variant of terminal deoxynucleotidyltransferase
MHHHHHHGGSGSHGIRTIDSDFGKKQQKKMDNHDSSATYEIKFHEFVLFILEEKMGATRRTFLTDLARKKGFRVENELTDEVTHIVAENLSRSEVLAWLKEHKMEKTKQFELLDISWLIESMKVGKPVDTKGKYQLAESGEMSANPDPTEGRENELPPTMKTVSPYACQRRTTLNNHNQRFTDALEILRENYEFKRNDDTALEFRRAISVLKSLPFEVRSLKDTEGLPWIGDEVKGIMEEIIEVGNSREVQAVLNDEWYQSFHRFKSVFGVGVKTADKWYRMGLRTLEDVRSSKTLKLTPMQKVGLLYYEDLARGVTRAEADAISLLVQDAVATFDPDAIVEIVGGFRRGKPQGHDVDLLISSPGAEKEQEDQLLQKVTNLWKKQGLLLYGRLEWTQWEDGGSPSGKADEGDAGAKCFLILKLYDHKVDKSKWEMPTGPNMGEAKPWKAIRVDLLRCPYGGFAFAMLQWTGSRMFRRDLRWYATDEKNMMLDNHALYDLTKKIFLPAKSEEEIFAHLGLEYLEPFERNA

SEQ ID NO: 3161 - DNA, 1587 bp, synthetic construct
  misc_feature 1..1587: note = Variant of terminal deoxynucleotidyltransferase
  source 1..1587: mol_type = other DNA
atgcaccatcatcatcatcatggcggtagcggcagccacggcattcgtaccatcgattcggacttcgggaagaaacagcagaaaaaaatggataaccacgatagttccgccacttatgaaatcaaatttcacgagtttgtgctgttcattctcgaagaaaaaatgggtgcgacgcgtcgtacttttctgacagatttagcccgcaagaaagggttccgcgtcgagaatgaactgaccgacgaagttacccacatcgtggcagaaaatctgtcacgctctgaagtattggcttggctgaaagaacacaagatggagaagaccaagcaattcgaactgctggatattagctggcttatcgaaagcatgaaagttggtaaaccggtggacaccaaggggaaataccagttggcggaatcgggtgagatgagtgcgaacccagatccgacagagggtcgtgaaaacgagctgcctcctactatgaagaccgtttctccgtatgcgtgtcaacgccgcaccaccctgaacaaccataatcaacgttttacggacgcactggaaattcttcgtgaaaattacgagttcaaacgcaacgatgatactgcgctggaatttcgtcgtgctatctccgtgctgaaaagccttccgtttgaggtacgtagcctgaaagacacggaaggattgccctggatcggtgatgcggtcaaagggattatggaagaaatcatcgaggtcgggaattcgcgtgaagtgcaggccgtgctcaatgatgagtggtatcaaagcttccaccgctttaagagtgtctttggagtgggggtgaagacagcagacaagtggtaccgtatgggtctgcgcaccctcgaggatgttcgttccagcaagaccctgaagttgaccccgatgcagaaagtaggtctgctgtattatgaagatcttgctcgcggcgttacgcgtgccgaagctgacgcgatttctctgctggttcaggatgcagtcgcaactttcgacccggatgcgatcgtggagattgtcggtggatttcgtcgtgggaaacctcagggtcacgacgttgatctgcttatcagttctccgggagctgagaaagagcaagaagaccagctcctgcagaaagtgaccaatctgtggaagaaacaagggttgttgctgtacggtcgtctggaatggacccagtgggaagatgggggttcgccatccggtaaggctgacgagggtgacgcgggtgcgaaatgctttctgatcctcaaactttatgatcataaagtggacaaaagcaaatgggaaatgccgacgggttcgaacatgggcgaggccaaaccgtggaaagcaattcgcgtagatctgctgcgttgcccctacggcggttttgcgtttgcgatgttgcagtggaccggaagccgcatgttccgtcgtgatctgcgttggtacgccactgacgagaagaacatgatgctggacaatcatgcgctgtatgacctgaccaagaaaatcttcctccctgctaaatcggaagaggaaattttcgcacatctggggcttgaatacctggaaccgttcgaacgtaacgca

SEQ ID NO: 3162 - protein, 529 aa, synthetic construct
  REGION 1..529: note = Variant of terminal deoxynucleotidyltransferase
MHHHHHHGGSGSHGIRTIDSDFGKKQQKKMDNHDSSATYEIKFHEFVLFILEEKMGATRRTFLTDLARKKGFRVENELTDEVTHIVAENLSRSEVLAWLKEHKMEKTKQFELLDISWLIESMKVGKPVDTKGKYQLAESGEMSANPDPTEGRENELPPTMKTVSPYACQRRTTLNNHNQRFTDALEILRENYEFKRNDDTALEFRRAISVLKSLPFEVRSLKDTEGLPWIGDAVKGIMEEIIEVGNSREVQAVLNDEWYQSFHRFKSVFGVGVKTADKWYRMGLRTLEDVRSSKTLKLTPMQKVGLLYYEDLARGVTRAEADAISLLVQDAVATFDPDAIVEIVGGFRRGKPQGHDVDLLISSPGAEKEQEDQLLQKVTNLWKKQGLLLYGRLEWTQWEDGGSPSGKADEGDAGAKCFLILKLYDHKVDKSKWEMPTGSNMGEAKPWKAIRVDLLRCPYGGFAFAMLQWTGSRMFRRDLRWYATDEKNMMLDNHALYDLTKKIFLPAKSEEEIFAHLGLEYLEPFERNA

SEQ ID NO: 3163 - DNA, 1587 bp, synthetic construct
  misc_feature 1..1587: note = Variant of terminal deoxynucleotidyltransferase
  source 1..1587: mol_type = other DNA
atgcaccatcatcatcatcatggcggtagcggcagccacggcattcgtaccatcgattcggacttcgggaagaaacagcagaaaaaaatggataaccacgatagttccgccacttatgaaatcaaatttcacgagtttgtgctgttcattctcgaagaaaaaatgggtgcgacgcgtcgtacttttctgacagatttagcccgcaagaaagggttccgcgtcgagaatgaactgaccgacgaagttacccacatcgtggcagaaaatctgtcacgctctgaagtattggcttggctgaaagaacacaagatggagaagaccaagcaattcgaactgctggatattagctggcttatcgaaagcatgaaagttggtaaaccggtggacaccaaggggaaataccagttggcggaatcgggtgagatgagtgcgaacccagatccgacagagggtcgtgaaaacgagctgcctcctactatgaagaccgtttctccgtatgcgtgtcaacgccgcaccaccctgaacaaccataatcaacgttttacggacgcactggaaattcttcgtgaaaattacgagttcaaacgcaacgatgatactgcgctggaatttcgtcgtgctatctccgtgctgaaaagccttccgtttgaggtacgtagcctgaaagacacggaaggattgccctggatcggtgatgaagtcaaagggattatggaagaaatcatcgaggtcgggaattcgcgtgaagtgcaggccgtgctcaatgatgagtggtatcaaagcttccaccgctttaagagtgtctttggagtgggggtgaagacagcagacaagtggtaccgtatgggtctgcgcaccctcgaggatgttcgttccagcaagaccctgaagttgaccccgatgcagaaagtaggtctgctgtattatgaagatcttgctcgcggcgttacgcgtgccgaagctgacgcgatttctctgctggttcaggatgcagtcgcaactttcgacccggatgcgatcgtggagattgtcggtggatttcgtcgtgggaaacctcagggtcacgacgttgatctgcttatcagttctccgggagctgagaaagagcaagaagaccagctcctgcagaaagtgaccaatctgtggaagaaacaagggttgttgctgtacggtcgtctggaatggacccagtgggaagatgggggttcgccatccggtaaggctgacgagggtgacgcgggtgcgaaatgctttctgatcctcaaactttatgatcataaagtggacaaaagcaaatgggaaatgccgaagggttcgaacatgggcgaggccaaaccgtggaaagcaattcgcgtagatctgctgcgttgcccctacggcggttttgcgtttgcgatgttgcagtggaccggaagccgcatgttccgtcgtgatctgcgttggtacgccactgacgagaagaacatgatgctggacaatcatgcgctgtatgacctgaccaagaaaatcttcctccctgctaaatcggaagaggaaattttcgcacatctggggcttgaatacctggaaccgttcgaacgtaacgca

SEQ ID NO: 3164 - protein, 529 aa, synthetic construct
  REGION 1..529: note = Variant of terminal deoxynucleotidyltransferase
MHHHHHHGGSGSHGIRTIDSDFGKKQQKKMDNHDSSATYEIKFHEFVLFILEEKMGATRRTFLTDLARKKGFRVENELTDEVTHIVAENLSRSEVLAWLKEHKMEKTKQFELLDISWLIESMKVGKPVDTKGKYQLAESGEMSANPDPTEGRENELPPTMKTVSPYACQRRTTLNNHNQRFTDALEILRENYEFKRNDDTALEFRRAISVLKSLPFEVRSLKDTEGLPWIGDEVKGIMEEIIEVGNSREVQAVLNDEWYQSFHRFKSVFGVGVKTADKWYRMGLRTLEDVRSSKTLKLTPMQKVGLLYYEDLARGVTRAEADAISLLVQDAVATFDPDAIVEIVGGFRRGKPQGHDVDLLISSPGAEKEQEDQLLQKVTNLWKKQGLLLYGRLEWTQWEDGGSPSGKADEGDAGAKCFLILKLYDHKVDKSKWEMPKGSNMGEAKPWKAIRVDLLRCPYGGFAFAMLQWTGSRMFRRDLRWYATDEKNMMLDNHALYDLTKKIFLPAKSEEEIFAHLGLEYLEPFERNA

SEQ ID NO: 3165 - DNA, 1587 bp, synthetic construct
  misc_feature 1..1587: note = Variant of terminal deoxynucleotidyltransferase
  source 1..1587: mol_type = other DNA
atgcaccatcatcatcatcatggcggtagcggcagccacggcattcgtaccatcgattcggacttcgggaagaaacagcagaaaaaaatggataaccacgatagttccgccacttatgaaatcaaatttcacgagtttgtgctgttcattctcgaagaaaaaatgggtgcgacgcgtcgtacttttctgacagatttagcccgcaagaaagggttccgcgtcgagaatgaactgaccgacgaagttacccacatcgtggcagaaaatctgtcacgctctgaagtattggcttggctgaaagaacacaagatggagaagaccaagcaattcgaactgctggatattagctggcttatcgaaagcatgaaagttggtaaaccggtggacaccaaggggaaataccagttggcggaatcgggtgagatgagtgcgaacccagatccgacagagggtcgtgaaaacgagctgcctcctactatgaagaccgtttctccgtatgcgtgtcaacgccgcaccaccctgaacaaccataatcaacgttttacggacgcactggaaattcttcgtgaaaattacgagttcaaacgcaacgatgatactgcgctggaatttcgtcgtgctatctccgtgctgaaaagccttccgtttgaggtacgtagcctgaaagacacggaaggattgccctggatcggtgatgaagtcaaagggattatggaagaaatcatcgaggtcgggaattcgagtgaagtgcaggccgtgctcaatgatgagtggtatcaaagcttccaccgctttaagagtgtctttggagtgggggtgaagacagcagacaagtggtaccgtatgggtctgcgcaccctcgaggatgttcgttccagcaagaccctgaagttgaccccgatgcagaaagtaggtctgctgtattatgaagatcttgctcgcggcgttacgcgtgccgaagctgacgcgatttctctgctggttcaggatgcagtcgcaactttcgacccggatgcgatcgtggagattgtcggtggatttcgtcgtgggaaacctcagggtcacgacgttgatctgcttatcagttctccgggagctgagaaagagcaagaagaccagctcctgcagaaagtgaccaatctgtggaagaaacaagggttgttgctgtacggtcgtctggaatggacccagtgggaagatgggggttcgccatccggtaaggctgacgagggtgacgcgggtgcgaaatgctttctgatcctcaaactttatgatcataaagtggacaaaagcaaatgggaaatgccgacgggttcgaacatgggcgaggccaaaccgtggaaagcaattcgcgtagatctgctgcgttgcccctacggcggttttgcgtttgcgatgttgcagtggaccggaagccgcatgttccgtcgtgatctgcgttggtacgccactgacgagaagaacatgatgctggacaatcatgcgctgtatgacctgaccaagaaaatcttcctccctgctaaatcggaagaggaaattttcgcacatctggggcttgaatacctggaaccgttcgaacgtaacgca

SEQ ID NO: 3166 - protein, 529 aa, synthetic construct
  REGION 1..529: note = Variant of terminal deoxynucleotidyltransferase
MHHHHHHGGSGSHGIRTIDSDFGKKQQKKMDNHDSSATYEIKFHEFVLFILEEKMGATRRTFLTDLARKKGFRVENELTDEVTHIVAENLSRSEVLAWLKEHKMEKTKQFELLDISWLIESMKVGKPVDTKGKYQLAESGEMSANPDPTEGRENELPPTMKTVSPYACQRRTTLNNHNQRFTDALEILRENYEFKRNDDTALEFRRAISVLKSLPFEVRSLKDTEGLPWIGDEVKGIMEEIIEVGNSSEVQAVLNDEWYQSFHRFKSVFGVGVKTADKWYRMGLRTLEDVRSSKTLKLTPMQKVGLLYYEDLARGVTRAEADAISLLVQDAVATFDPDAIVEIVGGFRRGKPQGHDVDLLISSPGAEKEQEDQLLQKVTNLWKKQGLLLYGRLEWTQWEDGGSPSGKADEGDAGAKCFLILKLYDHKVDKSKWEMPTGSNMGEAKPWKAIRVDLLRCPYGGFAFAMLQWTGSRMFRRDLRWYATDEKNMMLDNHALYDLTKKIFLPAKSEEEIFAHLGLEYLEPFERNA

SEQ ID NO: 3167 - DNA, 1587 bp, synthetic construct
  misc_feature 1..1587: note = Variant of terminal deoxynucleotidyltransferase
  source 1..1587: mol_type = other DNA
atgcaccatcatcatcatcatggcggtagcggcagccacggcattcgtaccatcgattcggacttcgggaagaaacagcagaaaaaaggcgataaccacgatagttccgccacttatgaaatcaaatttcacgagtttgtgctgttcattctcgaagaaaaaatgggtgcgacgcgtcgtacttttctgacagatttagcccgcaagaaagggttccgcgtcgagaatgaactgaccgacgaagttacccacatcgtggcagaaaatctgtcacgctctgaagtattggcttggctgaaagaacacaagatggagaagaccaagcaattcgaactgctggatattagctggcttatcgaaagcatgaaagttggtaaaccggtggacaccaaggggaaataccagttggcggaatcggttgaggtgagtgcgaacccagatccgacagagggtcgtgtaaacgagctgcctcctactatgaagaccgtttctccgtatgcgtgtcaacgccgcaccaccctgaacaaccataatcaacgttttacggactcgctggaaattcttcgtgaaaattacgagttcaaacgcaacgatgatactgcgctggaatttcgtcgtgctatctccgtgctgaaaagccttccgtttgaggtacgtagcctgaaagacacggaaggattgccctggatcggtgatgaagtcaaagggattatggaagaaatcatcgaggtcggggagtcgcgtgaagtgcaggccgtgctcaatgatgagtggtatcaaagcttccaccgctttaagagtgtctttggagtgggggtgaagacagcagacaagtggtaccgtatgggtctgcgcaccctcgaggatgttcgttccagcaagaccctgaagttgaccccgatgcagaaagtaggtctgctgtattatgaagatcttgctcgcggcgttacgcgtgccgaagctgacgcgatttggctgctggttcaggatgcagtcgcaactttcgacccggatgcgatcgtggagattgtcggtggatttcgtcgtgggaaacctcagggtcacgacgttgatctgcttatcagttctccgggagctgagaaagagcaagaagaccagctcctgcagaaagtgatgaatctgtggaagaaacaagggttgttgctgtacggtcgtctggaatggacccagtgggaagatgggggttcgccttccggtaaggctgacgagggtgacgcgggtgcgaaatgctttctgatcctcaaactttatgatcatctggtgcgtaaaagcaaatgggaaatgccgacgggttcgaacatgggcgaggccaaaccgtggaaagcaattcgcgtagatctgctgcgttgcccctatggcggttttgcgtttgcgatgttgcagtggaccggaagccgcatgttccgtcgtgatctgcgttggtacgccctggacgagaagaacatgatgctggacaatcattcgctgtatgacctgaccaagaaaatcttcctccctgctaaatcggaagaggaaattttcgcacatctggggcttgaatacctggaaccgttcgaacgtaacgca

SEQ ID NO: 3168 - protein, 529 aa, synthetic construct
  REGION 1..529: note = Variant of terminal deoxynucleotidyltransferase
MHHHHHHGGSGSHGIRTIDSDFGKKQQKKGDNHDSSATYEIKFHEFVLFILEEKMGATRRTFLTDLARKKGFRVENELTDEVTHIVAENLSRSEVLAWLKEHKMEKTKQFELLDISWLIESMKVGKPVDTKGKYQLAESVEVSANPDPTEGRVNELPPTMKTVSPYACQRRTTLNNHNQRFTDSLEILRENYEFKRNDDTALEFRRAISVLKSLPFEVRSLKDTEGLPWIGDEVKGIMEEIIEVGESREVQAVLNDEWYQSFHRFKSVFGVGVKTADKWYRMGLRTLEDVRSSKTLKLTPMQKVGLLYYEDLARGVTRAEADAIWLLVQDAVATFDPDAIVEIVGGFRRGKPQGHDVDLLISSPGAEKEQEDQLLQKVMNLWKKQGLLLYGRLEWTQWEDGGSPSGKADEGDAGAKCFLILKLYDHLVRKSKWEMPTGSNMGEAKPWKAIRVDLLRCPYGGFAFAMLQWTGSRMFRRDLRWYALDEKNMMLDNHSLYDLTKKIFLPAKSEEEIFAHLGLEYLEPFERNA

SEQ ID NO: 3169 - DNA, 1587 bp, synthetic construct
  misc_feature 1..1587: note = Variant of terminal deoxynucleotidyltransferase
  source 1..1587: mol_type = other DNA
atgcaccatcatcatcatcatggcggtagcggcagccacggcattcgtaccatcgattcggacttcgggaagaaacagcagaaaaaaggcgataaccacgatagttccgccacttatgaaatcaaatttcacgagtttgtgctgttcattctcgaagaaaaaatgggtgcgacgcgtcgtacttttctgacagatttagcccgcaagaaagggttccgcgtcgagaatgaactgaccgacgaagttacccacatcgtggcagaaaatctgtcacgctctgaagtattggcttggctgaaagaacacaagatggagaagaccaagcaattcgaactgctggatattagctggcttatcgaaagcatgaaagttggtaaaccggtggacaccaaggggaaataccagttggcggaatcgggtgaggtgagtgcgaacccagatccgacaccaggtcgtgaaaacgagctgccttctactatgaagaccgtttctccgtatgcgtgtcaacgccgcaccaccctgaacaaccgtaatcaacgttttacggactcgctggaaattcttcgtgaaaattacgagttcaaacgcaacgatgatactgcgctggaatttcgtcgtgctatctccgtgctgaaaagccttccgtttgaggtacgtagcctgaaagacacggaaggattgccctggatcggtgatgaagtcaaagggattatggaagaaatcatcgaggtcggggagtcgcgtgaagtgcaggccgtgctcaatgatgagtggtatcaaagcttccaccgctttaagagtgtctttggagtgggggtgaagacagcagacaagtggtaccgtatgggtctgcgcaccctcgaggatgttcgttccagcaagaccctgaagttgaccccgatgcagaaagtaggtctgctgtattatgaagatcttgctcgcggcgttacgcgtgccgaagctgacgcgatttggctgctggttcaggatgcagtcgcaactttcgacccggatgcgatcgtggagattgtcggtggatttcgtcgtgggaaacctcagggtcacgacgttgatctgcttatcagttctccgggggctgagaaagagcaagaagaccaactcctgcagaaagtgatgaatctgtggaagaaacaagggttgttgctgtacggtcgtctggaatggacccagtgggaagatgggggttcgccgtccggtaaggctgacgagggtgacgcgggtgcgaaatgctttctgatcctcaaactttatgatcatctggtgcgtaaaagcaaatgggaaatgccgacgggttcgaacatgggcgaggccaacccgtggaaagcaattcgcgtagatctgctgcgttgcccctatggcggttttgcgtttgcgatgttgcagtggaccggaagccgcatgttccgtcgtgatctgcgttggtacgccactgacgagaagaacatgatgctggacaatcattcgctgtatgacctgaccaagaaaatcttcctccctgctaaatcggaagaggaaattttcgcacatctggggcttgaatacctggaaccgttcgaacgtaacgca

SEQ ID NO: 3170 - protein, 529 aa, synthetic construct
  REGION 1..529: note = Variant of terminal deoxynucleotidyltransferase
MHHHHHHGGSGSHGIRTIDSDFGKKQQKKGDNHDSSATYEIKFHEFVLFILEEKMGATRRTFLTDLARKKGFRVENELTDEVTHIVAENLSRSEVLAWLKEHKMEKTKQFELLDISWLIESMKVGKPVDTKGKYQLAESGEVSANPDPTPGRENELPSTMKTVSPYACQRRTTLNNRNQRFTDSLEILRENYEFKRNDDTALEFRRAISVLKSLPFEVRSLKDTEGLPWIGDEVKGIMEEIIEVGESREVQAVLNDEWYQSFHRFKSVFGVGVKTADKWYRMGLRTLEDVRSSKTLKLTPMQKVGLLYYEDLARGVTRAEADAIWLLVQDAVATFDPDAIVEIVGGFRRGKPQGHDVDLLISSPGAEKEQEDQLLQKVMNLWKKQGLLLYGRLEWTQWEDGGSPSGKADEGDAGAKCFLILKLYDHLVRKSKWEMPTGSNMGEANPWKAIRVDLLRCPYGGFAFAMLQWTGSRMFRRDLRWYATDEKNMMLDNHSLYDLTKKIFLPAKSEEEIFAHLGLEYLEPFERNA

SEQ ID NO: 3171 - DNA, 1587 bp, synthetic construct
  misc_feature 1..1587: note = Variant of terminal deoxynucleotidyltransferase
  source 1..1587: mol_type = other DNA
atgcaccatcatcatcatcatggcggtagcggcagccacggcattcgtaccatcgattcggacttcgggaagaaacagcagaaaaaaggcgataaccacgatagttccgccacttatgaaatcaaatttcacgagtttgtgctgttcattctcgaagaaaaaatgggtgcgacgcgtcgtacttttctgacagatttagcccgcaagaaagggttccgcgtcgagaatgaactgaccgacgaagttacccacatcgtggcagaaaatctgtcacgctctgaagtattggcttggctgaaagaacacaagatggagaagaccaagcaattcgaactgctggatattagctggcttatcgaaagcatgaaagttggtaaaccggtggacaccaaggggaaataccagttggcggaatcggttgagatgagtgcgaacccagatccgacagagggtcgtgaaaacgagctgcctcctactatgcataccgtttctccgtatgcgtgtcaacgccgcaccaccctgaacaaccgtaatcaacgttttacggactcgctggaaattcttcgtgaaaattacgagttcaaacgcaacgatgatactgcgctggaatttcgtcgtgctatctccgtgctgaaaagccttccgtttgaggtacgtagcctgaaagacacggaaggattgccctggatcggtgatgaagtcaaagggattatggaagaaatcatcgaggtcggggagtcgcgtgaagtgcaggccgtgctcaatgatgagtggtatcaaagcttccaccgctttaagagtgtctttggagtgggggtgaagacagcagacaagtggtaccgtatgggtctgcgcaccctcgaggatgttcgttccagcaagaccctgaagttgaccccgatgcagaaagtaggtctgctgtattatgaagatcttgctcgcggcgttacgcgtgccgaagctgacgcgatttggctgctggttcaggatgcagtcgcaactttcgacccggatgcgatcgtggagattgtcggtggatttcgtcgtgggaaacctcagggtcacgacgttgatctgcttatcagttctccgggagctgagaaagagcaagaagaccaactcctgcagaaagtgatgaatctgtggaagaaacaagggttgttgctgtacggtcgtctggaatggacccagtgggaagatgggggttcggattccggtaaggctgacgagggtgacgcgggtgcgaaatgctttctgatcctcaaactttatgatcatctggtgcgtaaaagcaaatgggaaatgccgacgggttcgaacatgggcgaggccaaaccgtggaaagcaattcgcgtagatctgctgcgttgcccctatggcggttttgcgtttgcgatgttgcagtggaccggaagccgcatgttccgtcgtgatctgcgttggtacgccctggacgagaagaacatgatgctggacaatcattcgctgtatgacctgaccaagaaaatcttcctccctgctaaatcggaagaggaaattttcgcacatctggggcttgaatacctggaaccgttcgaacgtaacgca

SEQ ID NO: 3172 - protein, 529 aa, synthetic construct
  REGION 1..529: note = Variant of terminal deoxynucleotidyltransferase
MHHHHHHGGSGSHGIRTIDSDFGKKQQKKGDNHDSSATYEIKFHEFVLFILEEKMGATRRTFLTDLARKKGFRVENELTDEVTHIVAENLSRSEVLAWLKEHKMEKTKQFELLDISWLIESMKVGKPVDTKGKYQLAESVEMSANPDPTEGRENELPPTMHTVSPYACQRRTTLNNRNQRFTDSLEILRENYEFKRNDDTALEFRRAISVLKSLPFEVRSLKDTEGLPWIGDEVKGIMEEIIEVGESREVQAVLNDEWYQSFHRFKSVFGVGVKTADKWYRMGLRTLEDVRSSKTLKLTPMQKVGLLYYEDLARGVTRAEADAIWLLVQDAVATFDPDAIVEIVGGFRRGKPQGHDVDLLISSPGAEKEQEDQLLQKVMNLWKKQGLLLYGRLEWTQWEDGGSDSGKADEGDAGAKCFLILKLYDHLVRKSKWEMPTGSNMGEAKPWKAIRVDLLRCPYGGFAFAMLQWTGSRMFRRDLRWYALDEKNMMLDNHSLYDLTKKIFLPAKSEEEIFAHLGLEYLEPFERNA

SEQ ID NO: 3173 - DNA, 1587 bp, synthetic construct
  misc_feature 1..1587: note = Variant of terminal deoxynucleotidyltransferase
  source 1..1587: mol_type = other DNA
atgcaccatcatcatcatcatggcggtagcggcagccacggcattcgtaccatcgattcggacttcgggaagaaacagcagaaaaaaggcgataaccacgatagttccgccacttatgaaatcaaatttcacgagtttgtgctgttcattctcgaagaaaaaatgggtgcgacgcgtcgtacttttctgacagatttagcccgcaagaaagggttccgcgtcgagaatgaactgaccgacgaagttacccacatcgtggcagaaaatctgtcacgctctgaagtattggcttggctgaaagaacacaagatggagaagaccaagcaattcgaactgctggatattagctggcttatcgaaagcatgaaagttggtaaaccggtggacaccaaggggaaataccagttggcggaatcggttgaggtgagtgcgaacccagatccgacagaaggtcgtgtaaacgagctgcctcctactatgaaaaccgtttctccgtatgcgtgtcaacgccgcaccaccctgaacaaccgtaatcaacgttttacggactcgctggaaattcttcgtgaaaattacgagttcaaacgcaacgatgatactgcgctggaatttcgtcgtgctatctccgtgctgaaaagccttccgtttgaggtacgtagcctgaaagacacggaaggattgccctggatcggtgatgaagtcaaagggattatggaagaaatcatcgaggtcggggagtcgcgtgaagtgcaggccgtgctcaatgatgagtggtatcaaagcttccaccgctttaagagtgtctttggagtgggggtgaagacagcagacaagtggtaccgtatgggtctgcgcaccctcgaggatgttcgttccagcaagaccctgaagttgaccccgatgcagaaagtaggtctgctgtattatgaagatcttgctcgcggcgttacgcgtgccgaagctgacgcgatttggctgctggttcaggatgcagtcgcaactttcgacccggatgcgatcgtggagattgtcggtggatttcgtcgtgggaaacctcagggtcacgacgttgatctgcttatcagttctccgggagctgagaaagagcaagaagaccaactcctgcagaaagtgatgaatctgtggaagaaacaagggttgttgctgtacggtcgtctggaatggacccagtgggaagatgggggttcgccttccggtaaggctgacgagggtgacgcgggtgcgaaatgctttctgatcctcaaactttatgatcatctggtgcgtaaaagcaaatggaacatgccgacgggttcgaacgtgggcgagtccaaaccgtggaaagcaattcgcgtagatctgctgcgttgcccctatggcagttttgcgtttgcgatgttgcagtggaccggaagccgcatgttccgtcgtgatctgcgttggtacgccactgacgagaagaacatgatgctggacaatcattcgctgtatgacctgaccaagggtatcttcctccctgctaaatcggaagaggaaattttcgcacatctggggcttgaatacctggaaccgttcgaacgtaacgca

SEQ ID NO: 3174 - protein, 529 aa, synthetic construct
  REGION 1..529: note = Variant of terminal deoxynucleotidyltransferase
MHHHHHHGGSGSHGIRTIDSDFGKKQQKKGDNHDSSATYEIKFHEFVLFILEEKMGATRRTFLTDLARKKGFRVENELTDEVTHIVAENLSRSEVLAWLKEHKMEKTKQFELLDISWLIESMKVGKPVDTKGKYQLAESVEVSANPDPTEGRVNELPPTMKTVSPYACQRRTTLNNRNQRFTDSLEILRENYEFKRNDDTALEFRRAISVLKSLPFEVRSLKDTEGLPWIGDEVKGIMEEIIEVGESREVQAVLNDEWYQSFHRFKSVFGVGVKTADKWYRMGLRTLEDVRSSKTLKLTPMQKVGLLYYEDLARGVTRAEADAIWLLVQDAVATFDPDAIVEIVGGFRRGKPQGHDVDLLISSPGAEKEQEDQLLQKVMNLWKKQGLLLYGRLEWTQWEDGGSPSGKADEGDAGAKCFLILKLYDHLVRKSKWNMPTGSNVGESKPWKAIRVDLLRCPYGSFAFAMLQWTGSRMFRRDLRWYATDEKNMMLDNHSLYDLTKGIFLPAKSEEEIFAHLGLEYLEPFERNA

SEQ ID NO: 3175 - DNA, 1587 bp, synthetic construct
  misc_feature 1..1587: note = Variant of terminal deoxynucleotidyltransferase
  source 1..1587: mol_type = other DNA
atgcaccatcatcatcatcatggcggtagcggcagccacggcattcgtaccatcgattcggacttcgggaagaaacagcagaaaaaaggcgataaccacgatagttccgccacttatgaaatcaaatttcacgagtttgtgctgttcattctcgaagaaaaaatgggtgcgacgcgtcgtacttttctgacagatttagcccgcaagaaagggttccgcgtcgagaatgaactgaccgacgaagttacccacatcgtggcagaaaatctgtcacgctctgaagtattggcttggctgaaagaacacaagatggagaagaccaagcaattcgaactgctggatattagctggcttatcgaaagcatgaaagttggtaaaccggtggacaccaaggggaaataccagttggcggaatcgggtgagatgagtgcgaacccagatccgacagagggtcgtgaaaacgagctgcctcctactatgaagaccgtttctccgtatgcgtgtcaacgccgcaccaccctgaacaaccgtaatcaacgttttacggactcgctggaaattcttcgtgaaaattacgagttcaaacgcaacgatgatactgcgctggaatttcgtcgtgctatctccgtgctgaaaagccttccgtttgaggtacgtagcctgaaagacacggaaggattgccctggatcggtgatgaagtcaaagggattatggaagaaatcatcgaggtcggggagtcgcgtgaagtgcaggccgtgctcaatgatgagtggtatcaaagcttccaccgctttaagagtgtctttggagtgggggtgaagacagcagacaagtggtaccgtatgggtctgcgcaccctcgaggatgttcgttccagcaagaccctgaagttgaccccgatgcagaaagtaggtctgctgtattatgaagatcttgctcgcggcgttacgcgtgccgaagctgacgcgatttggctgctggttcaggatgcagtcgcaactttcgacccggatgcgatcgtggagattgtcggtggatttcgtcgtgggaaacctcagggtcacgacgttgatctgcttatcagttctccggcggctgagaaagagcaagaagaccaactcctgcagaaagtgatgaatctgtggaagaaacaagggttgttgctgtacggtcgtctggaatggacccagtgggaagatgggggttcgccgtccggtaaggctgacgagggtgacgcgggtgcgaaatgctttctgatcctcaaactttatgatcatctggtgcgtaaaagcaaatggaacatgccgacgggttcgaacatgggcgaggccaaaccgtggaaagcaattcgcgtagatctgctgcgttgcccctatggcggttttgcgtttgcgatgttgcagtggaccggaagccgcatgttccgtcgtgatctgcgttggtacgccactgacgagaagaacatgatgctggacaatcattcgctgtatgacctgaccaagaagatcttcctccctgctaaatcggaagaggaaattttcgcacatctggggcttgaatacctggaaccgttcgaacgtaacgca

SEQ ID NO: 3176 - protein, 529 aa, synthetic construct
  REGION 1..529: note = Variant of terminal deoxynucleotidyltransferase
MHHHHHHGGSGSHGIRTIDSDFGKKQQKKGDNHDSSATYEIKFHEFVLFILEEKMGATRRTFLTDLARKKGFRVENELTDEVTHIVAENLSRSEVLAWLKEHKMEKTKQFELLDISWLIESMKVGKPVDTKGKYQLAESGEMSANPDPTEGRENELPPTMKTVSPYACQRRTTLNNRNQRFTDSLEILRENYEFKRNDDTALEFRRAISVLKSLPFEVRSLKDTEGLPWIGDEVKGIMEEIIEVGESREVQAVLNDEWYQSFHRFKSVFGVGVKTADKWYRMGLRTLEDVRSSKTLKLTPMQKVGLLYYEDLARGVTRAEADAIWLLVQDAVATFDPDAIVEIVGGFRRGKPQGHDVDLLISSPAAEKEQEDQLLQKVMNLWKKQGLLLYGRLEWTQWEDGGSPSGKADEGDAGAKCFLILKLYDHLVRKSKWNMPTGSNMGEAKPWKAIRVDLLRCPYGGFAFAMLQWTGSRMFRRDLRWYATDEKNMMLDNHSLYDLTKKIFLPAKSEEEIFAHLGLEYLEPFERNA

SEQ ID NO: 3177 - DNA, 1587 bp, synthetic construct
  misc_feature 1..1587: note = Variant of terminal deoxynucleotidyltransferase
  source 1..1587: mol_type = other DNA
atgcaccatcatcatcatcatggcggtagcggcagccacggcattcgtaccatcgattcggacttcgggaagaaacagcagaaaaaaggcgataaccacgatagttccgccacttatgaaatcaaatttcacgagtttgtgctgttcattctcgaagaaaaaatgggtgcgacgcgtcgtacttttctgacagatttagcccgcaagaaagggttccgcgtcgagaatgaactgaccgacgaagttacccacatcgtggcagaaaatctgtcacgctctgaagtattggcttggctgaaagaacacaagatggagaagaccaagcaattcgaactgctggatattagctggcttatcgaaagcatgaaagttggtaaaccggtggacaccaaggggaaataccagttggcggaatcgggtgagatgagtgcgaacccagatccgacagagggtcgtgaaaacgagctgcctcctactatgaaaaccgtttctccgtatgcgtgtcaacgccgcaccaccctgaacaaccataatcaacgttttacggactcgctggaaattcttcgtgaaaattacgagttcaaacgcaacgatgatactgcgctggaatttcgtcgtgctatctccgtgctgaaaagccttccgtttgaggtacgtagcctgaaagacacggaaggattgccctggatcggtgatgaagtcaaagggattatggaagaaatcatcgaggtcggggagtcgcgtgaagtgcaggccgtgctcaatgatgagtggtatcaaagcttccaccgctttaagagtgtctttggagtgggggtgaagacagcagacaagtggtaccgtatgggtctgcgcaccctcgaggatgttcgttccagcaagaccctgaagttgaccccgatgcagaaagtaggtctgctgtattatgaagatcttgctcgcggcgttacgcgtgccgaagctgacgcgatttggctgctggttcaggatgcagtcgcaactttcgacccggatgcgatcgtggagattgtcggtggatttcgtcgtgggaaacctcagggtcacgacgttgatctgcttatcagttctccgggagctgagaaagagcaagaagaccagctcctgcagaaagtgatgaatctgtggaagaaacaagggttgttgctgtacggtcgtctggaatggacccagtgggaagatgggggttcgccttccggtaaggctgacgagggtgacgcgggtgcgaaatgctttctgatcctcaaactttatgatcatctggtgcgtaaaagcaaatgggaaatgccgacgggttcgaacatgggcgaggccaaaccgtggaaagcaattcgcgtagatctgctgcgttgcccctatggcggttttgcgtttgcgatgttgcagtggaccggaagccgcatgttccgtcgtgatctgcgttggtacgccactgacgagaagaacatgatgctggacaatcattcgctgtatgacctgaccaagaagatcttcctccctgctaaatcggaagaggaaattttcgcacatctggggcttgaatacctggaaccgttcgaacgtaacgca

SEQ ID NO: 3178 - protein, 529 aa, synthetic construct
  REGION 1..529: note = Variant of terminal deoxynucleotidyltransferase
MHHHHHHGGSGSHGIRTIDSDFGKKQQKKGDNHDSSATYEIKFHEFVLFILEEKMGATRRTFLTDLARKKGFRVENELTDEVTHIVAENLSRSEVLAWLKEHKMEKTKQFELLDISWLIESMKVGKPVDTKGKYQLAESGEMSANPDPTEGRENELPPTMKTVSPYACQRRTTLNNHNQRFTDSLEILRENYEFKRNDDTALEFRRAISVLKSLPFEVRSLKDTEGLPWIGDEVKGIMEEIIEVGESREVQAVLNDEWYQSFHRFKSVFGVGVKTADKWYRMGLRTLEDVRSSKTLKLTPMQKVGLLYYEDLARGVTRAEADAIWLLVQDAVATFDPDAIVEIVGGFRRGKPQGHDVDLLISSPGAEKEQEDQLLQKVMNLWKKQGLLLYGRLEWTQWEDGGSPSGKADEGDAGAKCFLILKLYDHLVRKSKWEMPTGSNMGEAKPWKAIRVDLLRCPYGGFAFAMLQWTGSRMFRRDLRWYATDEKNMMLDNHSLYDLTKKIFLPAKSEEEIFAHLGLEYLEPFERNA

SEQ ID NO: 3179 - DNA, 1587 bp, synthetic construct
  misc_feature 1..1587: note = Variant of terminal deoxynucleotidyltransferase
  source 1..1587: mol_type = other DNA
atgcaccatcatcatcatcatggcggtagcggcagccacggcattcgtaccatcgattcggacttcgggaagaaacagcagaaaaaaggcgataaccacgatagttccgccacttatgaaatcaaatttcacgagtttgtgctgttcattctcgaagaaaaaatgggtgcgacgcgtcgtacttttctgacagatttagcccgcaagaaagggttccgcgtcgagaatgaactgaccgacgaagttacccacatcgtggcagaaaatctgtcacgctctgaagtattggcttggctgaaagaacacaagatggagaagaccaagcaattcgaactgctggatattagctggcttatcgaaagcatgaaagttggtaaaccggtggacaccaaggggaaataccagttggcggaatcggttgaggtgagtgcgaacccagatccgacagagggtcgtgaaaacgagctgcctcctactatgaagaccgtttctccgtatgcgtgtcaacgccgcaccaccctgaacaaccataatcagcgttttacggactcgctggaaattcttcgtgaaaattacgagttcaaacgcaacgatgatactgcgctggaatttcgtcgtgctatctccgtgctgaaaagccttccgtttgaggtacgtagcctgaaagacacggaaggattgccctggatcggtgatgaagtcaaagggattatggaagaaatcatcgaggtcggggagtcgcgtgaagtgcaggccgtgctcaatgatgagtggtatcaaagcttccaccgctttaagagtgtctttggagtgggggtgaagacagcagacaagtggtaccgtatgggtctgcgcaccctcgaggatgttcgttccagcaagaccctgaagttgaccccgatgcagaaagtaggtctgctgtattatgaagatcttgctcgcggcgttacgcgtgccgaagctgacgcgatttggctgctggttcaggatgcagtcgcaactttcgacccggatgcgatcgtggagattgtcggtggatttcgtcgtgggaaacctcagggtcacgacgttgatctgcttatcagttctccgggggctgagaaagagcaagaagaccgcctcctgcagaaagtgatgaatctgtggaagaaacaagggttgttgctgtacggtcgtctggaatggacccagtgggaagatgggggttcgccgtccggtaaggctgacgagggtgacgcgggtgcgaaatgctttctgatcctcaaactttatgatcatctggtgcgtaaaagcaaatgggaaatgccgacgggttcgaacatgggcgaggccaaaccgtggaaagcaattcgcgtagatctgctgcgttgcccctatggcggttttgcgtttgcgatgttgcagtggaccggaagccgcatgttccgtcgtgatctgcgttggtacgccctggacgagaagaacatgatgctggacaatcattcgctgtatgacctgaccaagaaaatcttcctccctgctaaatcggaagaggaaattttcgcacatctggggcttgaatacctggaaccgttcgaacgtaacgca

SEQ ID NO: 3180 - protein, 529 aa, synthetic construct
  REGION 1..529: note = Variant of terminal deoxynucleotidyltransferase
MHHHHHHGGSGSHGIRTIDSDFGKKQQKKGDNHDSSATYEIKFHEFVLFILEEKMGATRRTFLTDLARKKGFRVENELTDEVTHIVAENLSRSEVLAWLKEHKMEKTKQFELLDISWLIESMKVGKPVDTKGKYQLAESVEVSANPDPTEGRENELPPTMKTVSPYACQRRTTLNNHNQRFTDSLEILRENYEFKRNDDTALEFRRAISVLKSLPFEVRSLKDTEGLPWIGDEVKGIMEEIIEVGESREVQAVLNDEWYQSFHRFKSVFGVGVKTADKWYRMGLRTLEDVRSSKTLKLTPMQKVGLLYYEDLARGVTRAEADAIWLLVQDAVATFDPDAIVEIVGGFRRGKPQGHDVDLLISSPGAEKEQEDRLLQKVMNLWKKQGLLLYGRLEWTQWEDGGSPSGKADEGDAGAKCFLILKLYDHLVRKSKWEMPTGSNMGEAKPWKAIRVDLLRCPYGGFAFAMLQWTGSRMFRRDLRWYALDEKNMMLDNHSLYDLTKKIFLPAKSEEEIFAHLGLEYLEPFERNA

SEQ ID NO: 3181 - DNA, 1587 bp, synthetic construct
  misc_feature 1..1587: note = Variant of terminal deoxynucleotidyltransferase
  source 1..1587: mol_type = other DNA
atgcaccatcatcatcatcatggcggtagcggcagccacggcattcgtaccatcgattcggacttcgggaagaaacagcagaaaaaaggcgataaccacgatagttccgccacttatgaaatcaaatttcacgagtttgtgctgttcattctcgaagaaaaaatgggtgcgacgcgtcgtacttttctgacagatttagcccgcaagaaagggttccgcgtcgagaatgaactgaccgacgaagttacccacatcgtggcagaaaatctgtcacgctctgaagtattggcttggctgaaagaacacaagatggagaagaccaagcaattcgaactgctggatattagctggcttatcgaaagcatgaaagttggtaaaccggtggacaccaaggggaaataccagttggcggaatcggttgagatgagtgcgaacccagatccgacaccaggtcgtgtaaacgagctgcctcctactatgaaaaccgtttctccgtatgcgtgtcaacgccgcaccaccctgaacaaccataatcaacgttttacggactcgctggaaattcttcgtgaaaattacgagttcaaacgcaacgatgatactgcgctggaatttcgtcgtgctatctccgtgctgaaaagccttccgtttgaggtacgtagcctgaaagacacggaaggattgccctggatcggtgatgaagtcaaagggattatggaagaaatcatcgaggtcggggagtcgcgtgaagtgcaggccgtgctcaatgatgagtggtatcaaagcttccaccgctttaagagtgtctttggagtgggggtgaagacagcagacaagtggtaccgtatgggtctgcgcaccctcgaggatgttcgttccagcaagaccctgaagttgaccccgatgcagaaagtaggtctgctgtattatgaagatcttgctcgcggcgttacgcgtgccgaagctgacgcgatttggctgctggttcaggatgcagtcgcaactttcgacccggatgcgatcgtggagattgtcggtggatttcgtcgtgggaaacctcagggtcacgacgttgatctgcttatcagttctccggcggctgagaaagagcaagaagaccgcctcctgcagaaagtgatgaatctgtggaagaaacaagggttgttgctgtacggtcgtctggaatggacccagtgggaagatgggggttcgccgtccggtaaggctgacgagggtgacgcgggtgcgaaatgctttctgatcctcaaactttatgatcatctggtgcgtaaaagcaaatgggaaatgccgacgggttcgaacatgggcgaggccaaaccgtggaaagcaattcgcgtagatctgctgcgttgcccctatggcggttttgcgtttgcgatgttgcagtggaccggaagccgcatgttccgtcgtgatctgcgttggtacgccctggacgagaagaacatgatgctggacaatcattcgctgtatgacctgaccaagaagatcttcctccctgctaaatcggaagaggaaattttcgcacatctggggcttgaatacctggaaccgttcgaacgtaacgca

SEQ ID NO: 3182 - protein, 529 aa, synthetic construct
  REGION 1..529: note = Variant of terminal deoxynucleotidyltransferase
MHHHHHHGGSGSHGIRTIDSDFGKKQQKKGDNHDSSATYEIKFHEFVLFILEEKMGATRRTFLTDLARKKGFRVENELTDEVTHIVAENLSRSEVLAWLKEHKMEKTKQFELLDISWLIESMKVGKPVDTKGKYQLAESVEMSANPDPTPGRVNELPPTMKTVSPYACQRRTTLNNHNQRFTDSLEILRENYEFKRNDDTALEFRRAISVLKSLPFEVRSLKDTEGLPWIGDEVKGIMEEIIEVGESREVQAVLNDEWYQSFHRFKSVFGVGVKTADKWYRMGLRTLEDVRSSKTLKLTPMQKVGLLYYEDLARGVTRAEADAIWLLVQDAVATFDPDAIVEIVGGFRRGKPQGHDVDLLISSPAAEKEQEDRLLQKVMNLWKKQGLLLYGRLEWTQWEDGGSPSGKADEGDAGAKCFLILKLYDHLVRKSKWEMPTGSNMGEAKPWKAIRVDLLRCPYGGFAFAMLQWTGSRMFRRDLRWYALDEKNMMLDNHSLYDLTKKIFLPAKSEEEIFAHLGLEYLEPFERNA

SEQ ID NO: 3183 - DNA, 1587 bp, synthetic construct
  misc_feature 1..1587: note = Variant of terminal deoxynucleotidyltransferase
  source 1..1587: mol_type = other DNA
atgcaccatcatcatcatcatggcggtagcggcagccacggcattcgtaccatcgattcggacttcgggaagaaacagcagaaaaaaggcgataaccacgatagttccgccacttatgaaatcaaatttcacgagtttgtgctgttcattctcgaagaaaaaatgggtgcgacgcgtcgtacttttctgacagatttagcccgcaagaaagggttccgcgtcgagaatgaactgaccgacgaagttacccacatcgtggcagaaaatctgtcacgctctgaagtattggcttggctgaaagaacacaagatggagaagaccaagcaattcgaactgctggatattagctggcttatcgaaagcatgaaagttggtaaaccggtggacaccaaggggaaataccagttggcggaatcgggtgaggtgagtgcgaacccagatccgacagagggtcgtgtaaacgagctgcctcctactatgaagaccgtttctccgtatgcgtgtcaacgccgcaccaccctgaacaaccgtaatcaacgttttacggactcgctggaaattcttcgtgaaaattacgagttcaaacgcaacgatgatactgcgctggaatttcgtcgtgctatctccgtgctgaaaagccttccgtttgaggtacgtagcctgaaagacacggaaggattgccctggatcggtgatgaagtcaaagggattatggaagaaatcatcgaggtcggggagtcgcgtgaagtgcaggccgtgctcaatgatgagtggtatcaaagcttccaccgctttaagagtgtctttggagtgggggtgaagacagcagacaagtggtaccgtatgggtctgcgcaccctcgaggatgttcgttccagcaagaccctgaagttgaccccgatgcagaaagtaggtctgctgtattatgaagatcttgctcgcggcgttacgcgtgccgaagctgacgcgatttggctgctggttcaggatgcagtcgcaactttcgacccggatgcgatcgtggagattgtcggtggatttcgtcgtgggaaacctcagggtcacgacgttgatctgcttatcagttctccgggagctgagaaagagcaagaagaccagctcctgcagaaagtgatgaatctgtggaagaaacaagggttgttgctgtacggtcgtctggaatggacccagtgggaagatgggggttcgccttccggtaaggctgacgagggtgacgcgggtgcgaaatgctttctgatcctcaaactttatgatcataaagtgcgtaaaagcaaatgggaaatgccgacgggttcgaacgtgggcgagtccaaaccgtggaaagcaattcgcgtagatctgctgcgttgcccctatggcggttttgcgtttgcgatgttgcagtggaccggaagccgcatgttccgtcgtgatctgcgttggtacgccactgacgagaagaacatgatgctggacaatcattcgctgtatgacctgaccaagaagatcttcctccctgctaaatcggaagaggaaattttcgcacatctggggcttgaatacctggaaccgttcgaacgtaacgca

SEQ ID NO: 3184 - protein, 529 aa, synthetic construct
  REGION 1..529: note = Variant of terminal deoxynucleotidyltransferase
MHHHHHHGGSGSHGIRTIDSDFGKKQQKKGDNHDSSATYEIKFHEFVLFILEEKMGATRRTFLTDLARKKGFRVENELTDEVTHIVAENLSRSEVLAWLKEHKMEKTKQFELLDISWLIESMKVGKPVDTKGKYQLAESGEVSANPDPTEGRVNELPPTMKTVSPYACQRRTTLNNRNQRFTDSLEILRENYEFKRNDDTALEFRRAISVLKSLPFEVRSLKDTEGLPWIGDEVKGIMEEIIEVGESREVQAVLNDEWYQSFHRFKSVFGVGVKTADKWYRMGLRTLEDVRSSKTLKLTPMQKVGLLYYEDLARGVTRAEADAIWLLVQDAVATFDPDAIVEIVGGFRRGKPQGHDVDLLISSPGAEKEQEDQLLQKVMNLWKKQGLLLYGRLEWTQWEDGGSPSGKADEGDAGAKCFLILKLYDHKVRKSKWEMPTGSNVGESKPWKAIRVDLLRCPYGGFAFAMLQWTGSRMFRRDLRWYATDEKNMMLDNHSLYDLTKKIFLPAKSEEEIFAHLGLEYLEPFERNA

SEQ ID NO: 3185 - DNA, 1587 bp, synthetic construct
  misc_feature 1..1587: note = Variant of terminal deoxynucleotidyltransferase
  source 1..1587: mol_type = other DNA
atgcaccatcatcatcatcatggcggtagcggcagccacggcattcgtaccatcgattcggacttcgggaagaaacagcagaaaaaaggcgataaccacgatagttccgccacttatgaaatcaaatttcacgagtttgtgctgttcattctcgaagaaaaaatgggtgcgacgcgtcgtacttttctgacagatttagcccgcaagaaagggttccgcgtcgagaatgaactgaccgacgaagttacccacatcgtggcagaaaatctgtcacgctctgaagtattggcttggctgaaagaacacaagatggagaagaccaagcaattcgaactgctggatattagctggcttatcgaaagcatgaaagttggtaaaccggtggacaccaaggggaaataccagttggcggaatcggttgaggtgagtgcgaacccagatccgacagagggtcgtgaaaacgagctgcctcctactatgaaaaccgtttctccgtatgcgtgtcaacgccgcaccaccctgaacaaccataatcaacgttttacggactcgctggaaattcttcgtgaaaattacgagttcaaacgcaacgatgatactgcgctggaatttcgtcgtgctatctccgtgctgaaaagccttccgtttgaggtacgtagcctgaaagacacggaaggattgccctggatcggtgatgaagtcaaagggattatggaagaaatcatcgaggtcggggagtcgcgtgaagtgcaggccgtgctcaatgatgagtggtatcaaagcttccaccgctttaagagtgtctttggagtgggggtgaagacagcagacaagtggtaccgtatgggtctgcgcaccctcgaggatgttcgttccagcaagaccctgaagttgaccccgatgcagaaagtaggtctgctgtattatgaagatcttgctcgcggcgttacgcgtgccgaagctgacgcgatttggctgctggttcaggatgcagtcgcaactttcgacccggatgcgatcgtggagattgtcggtggatttcgtcgtgggaaacctcagggtcacgacgttgatctgcttatcagttctccggcggctgagaaagagcaagaagaccgcctcctgcagaaagtgatgaatctgtggaagaaacaagggttgttgctgtacggtcgtctggaatggacccagtgggaagatgggggttcggattccggtaaggctgacgagggtgacgcgggtgcgaaatgctttctgatcctcaaactttatgatcatctggtgcgtaaaagcaaatgggaaatgccgacgggttcgaacatgggcgaggccaaaccgtggaaagcaattcgcgtagatctgctgcgttgcccctatggcggttttgcgtttgcgatgttgcagtggaccggaagccgcatgttccgtcgtgatctgcgttggtacgccctggacgagaagaacatgatgctggacaatcattcgctgtatgacctgaccaagaagatcttcctccctgctaaatcggaagaggaaattttcgcacatctggggcttgaatacctggaaccgttcgaacgtaacgca

SEQ ID NO: 3186 - protein, 529 aa, synthetic construct
  REGION 1..529: note = Variant of terminal deoxynucleotidyltransferase
MHHHHHHGGSGSHGIRTIDSDFGKKQQKKGDNHDSSATYEIKFHEFVLFILEEKMGATRRTFLTDLARKKGFRVENELTDEVTHIVAENLSRSEVLAWLKEHKMEKTKQFELLDISWLIESMKVGKPVDTKGKYQLAESVEVSANPDPTEGRENELPPTMKTVSPYACQRRTTLNNHNQRFTDSLEILRENYEFKRNDDTALEFRRAISVLKSLPFEVRSLKDTEGLPWIGDEVKGIMEEIIEVGESREVQAVLNDEWYQSFHRFKSVFGVGVKTADKWYRMGLRTLEDVRSSKTLKLTPMQKVGLLYYEDLARGVTRAEADAIWLLVQDAVATFDPDAIVEIVGGFRRGKPQGHDVDLLISSPAAEKEQEDRLLQKVMNLWKKQGLLLYGRLEWTQWEDGGSDSGKADEGDAGAKCFLILKLYDHLVRKSKWEMPTGSNMGEAKPWKAIRVDLLRCPYGGFAFAMLQWTGSRMFRRDLRWYALDEKNMMLDNHSLYDLTKKIFLPAKSEEEIFAHLGLEYLEPFERNA

SEQ ID NO: 3187 - DNA, 1587 bp, synthetic construct
  misc_feature 1..1587: note = Variant of terminal deoxynucleotidyltransferase
  source 1..1587: mol_type = other DNA
atgcaccatcatcatcatcatggcggtagcggcagccacggcattcgtaccatcgattcggacttcgggaagaaacagcagaaaaaaggcgataaccacgatagttccgccacttatgaaatcaaatttcacgagtttgtgctgttcattctcgaagaaaaaatgggtgcgacgcgtcgtacttttctgacagatttagcccgcaagaaagggttccgcgtcgagaatgaactgaccgacgaagttacccacatcgtggcagaaaatctgtcacgctctgaagtattggcttggctgaaagaacacaagatggagaagaccaagcaattcgaactgctggatattagctggcttatcgaaagcatgaaagttggtaaaccggtggacaccaaggggaaataccagttggcggaatcgggtgagatgagtgcgaacccagatccgacagagggtcgtgaaaacgagctgcctcctactatgaagaccgtttctccgtatgcgtgtcaacgccgcaccaccctgaacaaccgtaatcaacgttttacggactcgctggaaattcttcgtgaaaattacgagttcaaacgcaacgatgatactgcgctggaatttcgtcgtgctatctccgtgctgaaaagccttccgtttgaggtacgtagcctgaaagacacggaaggattgccctggatcggtgatgaagtcaaagggattatggaagaaatcatcgaggtcggggagtcgcgtgaagtgcaggccgtgctcaatgatgagtggtatcaaagcttccaccgctttaagagtgtctttggagtgggggtgaagacagcagacaagtggtaccgtatgggtctgcgcaccctcgaggatgttcgttccagcaagaccctgaagttgaccccgatgcagaaagtaggtctgctgtattatgaagatcttgctcgcggcgttacgcgtgccgaagctgacgcgatttggctgctggttcaggatgcagtcgcaactttcgacccggatgcgatcgtggagattgtcggtggatttcgtcgtgggaaacctcagggtcacgacgttgatctgcttatcagttctccgggagctgagaaagagcaagaagaccagctcctgcagaaagtgatgaatctgtggaagaaacaagggttgttgctgtacggtcgtctggaatggacccagtgggaagatgggggttcgccgtccggtaaggctgacgagggtgacgcgggtgcgaaatgctttctgatcctcaaactttatgatcataaagtgcgtaaaagcaaatgggaaatgccgacgggttcgaacatgggcgaggccaaaccgtggaaagcaattcgcgtagatctgctgcgttgcccctatggcggttttgcgtttgcgatgttgcagtggaccggaagccgcatgttccgtcgtgatctgcgttggtacgccactgacgagaagaacatgatgctggacaatcattcgctgtatgacctgaccaagaaaatcttcctccctgctaaatcggaagaggaaattttcgcacatctggggcttgaatacctggaaccgttcgaacgtaacgca

SEQ ID NO: 3188 - protein, 529 aa, synthetic construct
  REGION 1..529: note = Variant of terminal deoxynucleotidyltransferase
MHHHHHHGGSGSHGIRTIDSDFGKKQQKKGDNHDSSATYEIKFHEFVLFILEEKMGATRRTFLTDLARKKGFRVENELTDEVTHIVAENLSRSEVLAWLKEHKMEKTKQFELLDISWLIESMKVGKPVDTKGKYQLAESGEMSANPDPTEGRENELPPTMKTVSPYACQRRTTLNNRNQRFTDSLEILRENYEFKRNDDTALEFRRAISVLKSLPFEVRSLKDTEGLPWIGDEVKGIMEEIIEVGESREVQAVLNDEWYQSFHRFKSVFGVGVKTADKWYRMGLRTLEDVRSSKTLKLTPMQKVGLLYYEDLARGVTRAEADAIWLLVQDAVATFDPDAIVEIVGGFRRGKPQGHDVDLLISSPGAEKEQEDQLLQKVMNLWKKQGLLLYGRLEWTQWEDGGSPSGKADEGDAGAKCFLILKLYDHKVRKSKWEMPTGSNMGEAKPWKAIRVDLLRCPYGGFAFAMLQWTGSRMFRRDLRWYATDEKNMMLDNHSLYDLTKKIFLPAKSEEEIFAHLGLEYLEPFERNA

SEQ ID NO: 3189 - DNA, 1587 bp, synthetic construct
  misc_feature 1..1587: note = Variant of terminal deoxynucleotidyltransferase
  source 1..1587: mol_type = other DNA
atgcaccatcatcatcatcatggcggtagcggcagccacggcattcgtaccatcgattcggacttcgggaagaaacagcagaaaaaaggcgataaccacgatagttccgccacttatgaaatcaaatttcacgagtttgtgctgttcattctcgaagaaaaaatgggtgcgacgcgtcgtacttttctgacagatttagcccgcaagaaagggttccgcgtcgagaatgaactgaccgacgaagttacccacatcgtggcagaaaatctgtcacgctctgaagtattggcttggctgaaagaacacaagatggagaagaccaagcaattcgaactgctggatattagctggcttatcgaaagcatgaaagttggtaaaccggtggacaccaaggggaaataccagttggcggaatcggttgagatgagtgcgaacccagatccgacagagggtcgtgaaaacgagctgcctcctactatgaaaaccgtttctccgtatgcgtgtcaacgccgcaccaccctgaacaaccgtaatcaacgttttacggactcgctggaaattcttcgtgaaaattacgagttcaaacgcaacgatgatactgcgctggaatttcgtcgtgctatctccgtgctgaaaagccttccgtttgaggtacgtagcctgaaagacacggaaggattgccctggatcggtgatgaagtcaaagggattatggaagaaatcatcgaggtcggggagtcgcgtgaagtgcaggccgtgctcaatgatgagtggtatcaaagcttccaccgctttaagagtgtctttggagtgggggtgaagacagcagacaagtggtaccgtatgggtctgcgcaccctcgaggatgttcgttccagcaagaccctgaagttgaccccgatgcagaaagtaggtctgctgtattatgaagatcttgctcgcggcgttacgcgtgccgaagctgacgcgatttggctgctggttcaggatgcagtcgcaactttcgacccggatgcgatcgtggagattgtcggtggatttcgtcgtgggaaacctcagggtcacgacgttgatctgcttatcagttctccgggagctgagaaagagcaagaagaccagctcctgcagaaagtgatgaatctgtggaagaaacaagggttgttgctgtacggtcgtctggaatggacccagtgggaagatgggggttcggattccggtaaggctgacgagggtgacgcgggtgcgaaatgctttctgatcctcaaactttatgatcataaggtgcgtaaaagcaaatgggaaatgccgacgggttcgaacatgggcgaggccaaaccgtggaaagcaattcgcgtagatctgctgcgttgcccctatggcggttttgcgtttgcgatgttgcagtggaccggaagccgcatgttccgtcgtgatctgcgttggtacgccctggacgagaagaacatgatgctggacaatcattcgctgtatgacctgaccaagaagatcttcctccctgctaaatcggaagaggaaattttcgcacatctggggcttgaatacctggaaccgttcgaacgtaacgca

SEQ ID NO: 3190 - protein, 529 aa, synthetic construct
  REGION 1..529: note = Variant of terminal deoxynucleotidyltransferase
MHHHHHHGGSGSHGIRTIDSDFGKKQQKKGDNHDSSATYEIKFHEFVLFILEEKMGATRRTFLTDLARKKGFRVENELTDEVTHIVAENLSRSEVLAWLKEHKMEKTKQFELLDISWLIESMKVGKPVDTKGKYQLAESVEMSANPDPTEGRENELPPTMKTVSPYACQRRTTLNNRNQRFTDSLEILRENYEFKRNDDTALEFRRAISVLKSLPFEVRSLKDTEGLPWIGDEVKGIMEEIIEVGESREVQAVLNDEWYQSFHRFKSVFGVGVKTADKWYRMGLRTLEDVRSSKTLKLTPMQKVGLLYYEDLARGVTRAEADAIWLLVQDAVATFDPDAIVEIVGGFRRGKPQGHDVDLLISSPGAEKEQEDQLLQKVMNLWKKQGLLLYGRLEWTQWEDGGSDSGKADEGDAGAKCFLILKLYDHKVRKSKWEMPTGSNMGEAKPWKAIRVDLLRCPYGGFAFAMLQWTGSRMFRRDLRWYALDEKNMMLDNHSLYDLTKKIFLPAKSEEEIFAHLGLEYLEPFERNA

SEQ ID NO: 3191 - DNA, 1587 bp, synthetic construct
  misc_feature 1..1587: note = Variant of terminal deoxynucleotidyltransferase
  source 1..1587: mol_type = other DNA
atgcaccatcatcatcatcatggcggtagcggcagccacggcattcgtaccatcgattcggacttcgggaagaaacagcagaaaaaaggcgataaccacgatagttccgccacttatgaaatcaaatttcacgagtttgtgctgttcattctcgaagaaaaaatgggtgcgacgcgtcgtacttttctgacagatttagcccgcaagaaagggttccgcgtcgagaatgaactgaccgacgaagttacccacatcgtggcagaaaatctgtcacgctctgaagtattggcttggctgaaagaacacaagatggagaagaccaagcaattcgaactgctggatattagctggcttatcgaaagcatgaaagttggtaaaccggtggacaccaaggggaaataccagttggcggaatcgggtgagatgagtgcgaacccagatccgacaccaggtcgtgaaaacgagctgcctcctactatgaagaccgtttctccgtatgcgtgtcaacgccgcaccaccctgaacaaccgtaatcaacgttttacggactcgctggaaattcttcgtgaaaattacgagttcaaacgcaacgatgatactgcgctggaatttcgtcgtgctatctccgtgctgaaaagccttccgtttgaggtacgtagcctgaaagacacggaaggattgccctggatcggtgatgaagtcaaagggattatggaagaaatcatcgaggtcggggagtcgcgtgaagtgcaggccgtgctcaatgatgagtggtatcaaagcttccaccgctttaagagtgtctttggagtgggggtgaagacagcagacaagtggtaccgtatgggtctgcgcaccctcgaggatgttcgttccagcaagaccctgaagttgaccccgatgcagaaagtaggtctgctgtattatgaagatcttgctcgcggcgttacgcgtgccgaagctgacgcgatttggctgctggttcaggatgcagtcgcaactttcgacccggatgcgatcgtggagattgtcggtggatttcgtcgtgggaaacctcagggtcacgacgttgatctgcttatcagttctccgggagctgagaaagagcaagaagaccagctcctgcagaaagtgatgaatctgtggaagaaacaagggttgttgctgtacggtcgtctggaatggacccagtgggaagatgggggttcgccgtccggtaaggctgacgagggtgacgcgggtgcgaaatgctttctgatcctcaaactttatgatcataaagtgcgtaaaagcaaatgggaaatgccgacgggttcgaacatgggcgaggccaaaccgtggaaagcaattcgcgtagatctgctgcgttgcccctatggcggttttgcgtttgcgatgttgcagtggaccggaagccgcatgttccgtcgtgatctgcgttggtacgccactgacgagaagaacatgatgctggacaatcattcgctgtatgacctgaccaagaaaatcttcctccctgctaaatcggaagaggaaattttcgcacatctggggcttgaatacctggaaccgttcgaacgtaacgca

SEQ ID NO: 3192 - protein, 529 aa, synthetic construct
  REGION 1..529: note = Variant of terminal deoxynucleotidyltransferase
MHHHHHHGGSGSHGIRTIDSDFGKKQQKKGDNHDSSATYEIKFHEFVLFILEEKMGATRRTFLTDLARKKGFRVENELTDEVTHIVAENLSRSEVLAWLKEHKMEKTKQFELLDISWLIESMKVGKPVDTKGKYQLAESGEMSANPDPTPGRENELPPTMKTVSPYACQRRTTLNNRNQRFTDSLEILRENYEFKRNDDTALEFRRAISVLKSLPFEVRSLKDTEGLPWIGDEVKGIMEEIIEVGESREVQAVLNDEWYQSFHRFKSVFGVGVKTADKWYRMGLRTLEDVRSSKTLKLTPMQKVGLLYYEDLARGVTRAEADAIWLLVQDAVATFDPDAIVEIVGGFRRGKPQGHDVDLLISSPGAEKEQEDQLLQKVMNLWKKQGLLLYGRLEWTQWEDGGSPSGKADEGDAGAKCFLILKLYDHKVRKSKWEMPTGSNMGEAKPWKAIRVDLLRCPYGGFAFAMLQWTGSRMFRRDLRWYATDEKNMMLDNHSLYDLTKKIFLPAKSEEEIFAHLGLEYLEPFERNA

SEQ ID NO: 3193 - DNA, 1587 bp, synthetic construct
  misc_feature 1..1587: note = Variant of terminal deoxynucleotidyltransferase
  source 1..1587: mol_type = other DNA
atgcaccatcatcatcatcatggcggtagcggcagccacggcattcgtaccatcgattcggacttcgggaagaaacagcagaaaaaaggcgataaccacgatagttccgccacttatgaaatcaaatttcacgagtttgtgctgttcattctcgaagaaaaaatgggtgcgacgcgtcgtacttttctgacagatttagcccgcaagaaagggttccgcgtcgagaatgaactgaccgacgaagttacccacatcgtggcagaaaatctgtcacgctctgaagtattggcttggctgaaagaacacaagatggagaagaccaagcaattcgaactgctggatattagctggcttatcgaaagcatgaaagttggtaaaccggtggacaccaaggggaaataccagttggcggaatcgggtgaggtgagtgcgaacccagatccgacaccaggtcgtgaaaacgagctgcctcctactatgaagaccgtttctccgtatgcgtgtcaacgccgcaccaccctgaacaaccgtaatcaacgttttacggactcgctggaaattcttcgtgaaaattacgagttcaaacgcaacgatgatactgcgctggaatttcgtcgtgctatctccgtgctgaaaagccttccgtttgaggtacgtagcctgaaagacacggaaggattgccctggatcggtgatgaagtcaaagggattatggaagaaatcatcgaggtcggggagtcgcgtgaagtgcaggccgtgctcaatgatgagtggtatcaaagcttccaccgctttaagagtgtctttggagtgggggtgaagacagcagacaagtggtaccgtatgggtctgcgcaccctcgaggatgttcgttccagcaagaccctgaagttgaccccgatgcagaaagtaggtctgctgtattatgaagatcttgctcgcggcgttacgcgtgccgaagctgacgcgatttggctgctggttcaggatgcagtcgcaactttcgacccggatgcgatcgtggagattgtcggtggatttcgtcgtgggaaacctcagggtcacgacgttgatctgcttatcagttctccgggggctgagaaagagcaagaagaccaactcctgcagaaagtgatgaatctgtggaagaaacaagggttgttgctgtacggtcgtctggaatggacccagtgggaagatgggggttcggattccggtaaggctgacgagggtgacgcgggtgcgaaatgctttctgatcctcaaactttatgatcataaagtgcgtaaaagcaaatgggaaatgccgacgggttcgaacatgggcgaggccaaaccgtggaaagcaattcgcgtagatctgctgcgttgcccctatggcggttttgcgtttgcgatgttgcagtggaccggaagccgcatgttccgtcgtgatctgcgttggtacgccactgacgagaagaacatgatgctggacaatcattcgctgtatgacctgaccaagaaaatcttcctccctgctaaatcggaagaggaaattttcgcacatctggggcttgaatacctggaaccgttcgaacgtaacgca

SEQ ID NO: 3194 - protein, 529 aa, synthetic construct
  REGION 1..529: note = Variant of terminal deoxynucleotidyltransferase
MHHHHHHGGSGSHGIRTIDSDFGKKQQKKGDNHDSSATYEIKFHEFVLFILEEKMGATRRTFLTDLARKKGFRVENELTDEVTHIVAENLSRSEVLAWLKEHKMEKTKQFELLDISWLIESMKVGKPVDTKGKYQLAESGEVSANPDPTPGRENELPPTMKTVSPYACQRRTTLNNRNQRFTDSLEILRENYEFKRNDDTALEFRRAISVLKSLPFEVRSLKDTEGLPWIGDEVKGIMEEIIEVGESREVQAVLNDEWYQSFHRFKSVFGVGVKTADKWYRMGLRTLEDVRSSKTLKLTPMQKVGLLYYEDLARGVTRAEADAIWLLVQDAVATFDPDAIVEIVGGFRRGKPQGHDVDLLISSPGAEKEQEDQLLQKVMNLWKKQGLLLYGRLEWTQWEDGGSDSGKADEGDAGAKCFLILKLYDHKVRKSKWEMPTGSNMGEAKPWKAIRVDLLRCPYGGFAFAMLQWTGSRMFRRDLRWYATDEKNMMLDNHSLYDLTKKIFLPAKSEEEIFAHLGLEYLEPFERNA

SEQ ID NO: 3195 - DNA, 1587 bp, synthetic construct
  misc_feature 1..1587: note = Variant of terminal deoxynucleotidyltransferase
  source 1..1587: mol_type = other DNA
atgcaccatcatcatcatcatggcggtagcggcagccacggcattcgtaccatcgattcggacttcgggaagaaacagcagaaaaaaggcgataaccacgatagttccgccacttatgaaatcaaatttcacgagtttgtgctgttcattctcgaagaaaaaatgggtgcgacgcgtcgtacttttctgacagatttagcccgcaagaaagggttccgcgtcgagaatgaactgaccgacgaagttacccacatcgtggcagaaaatctgtcacgctctgaagtattggcttggctgaaagaacacaagatggagaagaccaagcaattcgaactgctggatattagctggcttatcgaaagcatgaaagttggtaaaccggtggacaccaaggggaaataccagttggcggaatcgggtgaggtgagtgcgaacccagatccgacagagggtcgtgaaaacgagctgcctcctactatgaagaccgtttctccgtatgcgtgtcaacgccgcaccaccctgaacaaccataatcaacgttttacggactcgctggaaattcttcgtgaaaattacgagttcaaacgcaacgatgatactgcgctggaatttcgtcgtgctatctccgtgctgaaaagccttccgtttgaggtacgtagcctgaaagacacggaaggattgccctggatcggtgatgaagtcaaagggattatggaagaaatcatcgaggtcggggagtcgcgtgaagtgcaggccgtgctcaatgatgagtggtatcaaagcttccaccgctttaagagtgtctttggagtgggggtgaagacagcagacaagtggtaccgtatgggtctgcgcaccctcgaggatgttcgttccagcaagaccctgaagttgaccccgatgcagaaagtaggtctgctgtattatgaagatcttgctcgcggcgttacgcgtgccgaagctgacgcgatttggctgctggttcaggatgcagtcgcaactttcgacccggatgcgatcgtggagattgtcggtggatttcgtcgtgggaaacctcagggtcacgacgttgatctgcttatcagttctccgggagctgagaaagagcaagaagaccagctcctgcagaaagtgatgaatctgtggaagaaacaagggttgttgctgtacggtcgtctggaatggacccagtgggaagatgggggttcgccttccggtaaggctgacgagggtgacgcgggtgcgaaatgctttctgatcctcaaactttatgatcataaggtgcgtaaaagcaaatgggaaatgccgacgggttcgaacatgggcgaggccaaaccgtggaaagcaattcgcgtagatctgctgcgttgcccctatggcagttttgcgtttgcgatgttgcagtggaccggaagccgcatgttccgtcgtgatctgcgttggtacgccctggacgagaagaacatgatgctggacaatcattcgctgtatgacctgaccaagggtatcttcctccctgctaaatcggaagaggaaattttcgcacatctggggcttgaatacctggaaccgttcgaacgtaacgca

SEQ ID NO: 3196 - protein, 529 aa, synthetic construct
  REGION 1..529: note = Variant of terminal deoxynucleotidyltransferase
MHHHHHHGGSGSHGIRTIDSDFGKKQQKKGDNHDSSATYEIKFHEFVLFILEEKMGATRRTFLTDLARKKGFRVENELTDEVTHIVAENLSRSEVLAWLKEHKMEKTKQFELLDISWLIESMKVGKPVDTKGKYQLAESGEVSANPDPTEGRENELPPTMKTVSPYACQRRTTLNNHNQRFTDSLEILRENYEFKRNDDTALEFRRAISVLKSLPFEVRSLKDTEGLPWIGDEVKGIMEEIIEVGESREVQAVLNDEWYQSFHRFKSVFGVGVKTADKWYRMGLRTLEDVRSSKTLKLTPMQKVGLLYYEDLARGVTRAEADAIWLLVQDAVATFDPDAIVEIVGGFRRGKPQGHDVDLLISSPGAEKEQEDQLLQKVMNLWKKQGLLLYGRLEWTQWEDGGSPSGKADEGDAGAKCFLILKLYDHKVRKSKWEMPTGSNMGEAKPWKAIRVDLLRCPYGSFAFAMLQWTGSRMFRRDLRWYALDEKNMMLDNHSLYDLTKGIFLPAKSEEEIFAHLGLEYLEPFERNA

SEQ ID NO: 3197 - DNA, 1587 bp, synthetic construct
  misc_feature 1..1587: note = Variant of terminal deoxynucleotidyltransferase
  source 1..1587: mol_type = other DNA
atgcaccatcatcatcatcatggcggtagcggcagccacggcattcgtaccatcgattcggacttcgggaagaaacagcagaaaaaaggcgataaccacgatagttccgccacttatgaaatcaaatttcacgagtttgtgctgttcattctcgaagaaaaaatgggtgcgacgcgtcgtacttttctgacagatttagcccgcaagaaagggttccgcgtcgagaatgaactgaccgacgaagttacccacatcgtggcagaaaatctgtcacgctctgaagtattggcttggctgaaagaacacaagatggagaagaccaagcaattcgaactgctggatattagctggcttatcgaaagcatgaaagttggtaaaccggtggacaccaaggggaaataccagttggcggaatcgggtgagatgagtgcgaacccagatccgacagagggtcgtgtaaacgagctgcctcctactatgaagaccgtttctccgtatgcgtgtcaacgccgcaccaccctgaacaaccataatcaacgttttacggactcgctggaaattcttcgtgaaaattacgagttcaaacgcaacgatgatactgcgctggaatttcgtcgtgctatctccgtgctgaaaagccttccgtttgaggtacgtagcctgaaagacacggaaggattgccctggatcggtgatgaagtcaaagggattatggaagaaatcatcgaggtcggggagtcgcgtgaagtgcaggccgtgctcaatgatgagtggtatcaaagcttccaccgctttaagagtgtctttggagtgggggtgaagacagcagacaagtggtaccgtatgggtctgcgcaccctcgaggatgttcgttccagcaagaccctgaagttgaccccgatgcagaaagtaggtctgctgtattatgaagatcttgctcgcggcgttacgcgtgccgaagctgacgcgatttggctgctggttcaggatgcagtcgcaactttcgacccggatgcgatcgtggagattgtcggtggatttcgtcgtgggaaacctcagggtcacgacgttgatctgcttatcagttctccgggggctgagaaagagcaagaagaccagctcctgcagaaagtgatgaatctgtggaagaaacaagggttgttgctgtacggtcgtctggaatggacccagtgggaagatgggggttcgccgtccggtaaggctgacgagggtgacgcgggtgcgaaatgctttctgatcctcaaactttatgatcataaagtgcgtaaaagcaaatgggaaatgccgacgggttcgaacatgggcgaggccaaaccgtggaaagcaattcgcgtagatctgctgcgttgcccctatggcggttttgcgtttgcgatgttgcagtggaccggaagccgcatgttccgtcgtgatctgcgttggtacgccctggacgagaagaacatgatgctggacaatcattcgctgtatgacctgaccaagaaaatcttcctccctgctaaatcggaagaggaaattttcgcacatctggggcttgaatacctggaaccgttcgaacgtaacgca

SEQ ID NO: 3198 - protein, 529 aa, synthetic construct
  REGION 1..529: note = Variant of terminal deoxynucleotidyltransferase
MHHHHHHGGSGSHGIRTIDSDFGKKQQKKGDNHDSSATYEIKFHEFVLFILEEKMGATRRTFLTDLARKKGFRVENELTDEVTHIVAENLSRSEVLAWLKEHKMEKTKQFELLDISWLIESMKVGKPVDTKGKYQLAESGEMSANPDPTEGRVNELPPTMKTVSPYACQRRTTLNNHNQRFTDSLEILRENYEFKRNDDTALEFRRAISVLKSLPFEVRSLKDTEGLPWIGDEVKGIMEEIIEVGESREVQAVLNDEWYQSFHRFKSVFGVGVKTADKWYRMGLRTLEDVRSSKTLKLTPMQKVGLLYYEDLARGVTRAEADAIWLLVQDAVATFDPDAIVEIVGGFRRGKPQGHDVDLLISSPGAEKEQEDQLLQKVMNLWKKQGLLLYGRLEWTQWEDGGSPSGKADEGDAGAKCFLILKLYDHKVRKSKWEMPTGSNMGEAKPWKAIRVDLLRCPYGGFAFAMLQWTGSRMFRRDLRWYALDEKNMMLDNHSLYDLTKKIFLPAKSEEEIFAHLGLEYLEPFERNA

SEQ ID NO: 3199 - DNA, 1587 bp, synthetic construct
  misc_feature 1..1587: note = Variant of terminal deoxynucleotidyltransferase
  source 1..1587: mol_type = other DNA
atgcaccatcatcatcatcatggcggtagcggcagccacggcattcgtaccatcgattcggacttcgggaagaaacagcagaaaaaaggcgataaccacgatagttccgccacttatgaaatcaaatttcacgagtttgtgctgttcattctcgaagaaaaaatgggtgcgacgcgtcgtacttttctgacagatttagcccgcaagaaagggttccgcgtcgagaatgaactgaccgacgaagttacccacatcgtggcagaaaatctgtcacgctctgaagtattggcttggctgaaagaacacaagatggagaagaccaagcaattcgaactgctggatattagctggcttatcgaaagcatgaaagttggtaaaccggtggacaccaaggggaaataccagttggcggaatcgggtgagatgagtgcgaacccagatccgacagaaggtcgtgaaaacgagctgcctcctactatgaagaccgtttctccgtatgcgtgtcaacgccgcaccaccctgaacaaccataatcaacgttttacggactcgctggaaattcttcgtgaaaattacgagttcaaacgcaacgatgatactgcgctggaatttcgtcgtgctatctccgtgctgaaaagccttccgtttgaggtacgtagcctgaaagacacggaaggattgccctggatcggtgatgaagtcaaagggattatggaagaaatcatcgaggtcggggagtcgcgtgaagtgcaggccgtgctcaatgatgagtggtatcaaagcttccaccgctttaagagtgtctttggagtgggggtgaagacagcagacaagtggtaccgtatgggtctgcgcaccctcgaggatgttcgttccagcaagaccctgaagttgaccccgatgcagaaagtaggtctgctgtattatgaagatcttgctcgcggcgttacgcgtgccgaagctgacgcgattctgctgctggttcaggatgcagtcgcaactttcgacccggatgcgatcgtggagattgtcggtggatttcgtcgtgggaaacctcagggtcacgacgttgatctgcttatcagttctccgggagctgagaaagagcaagaagaccaactcctgcagaaagtgatgaatctgtggaagaaacaagggttgttgctgtacggtcgtctggaatggacccagtgggaagatgggggttcgccttccggtaaggctgacgagggtgacgcgggtgcgaaatgctttctgatcctcaaactttatgatcatctggtgcgtaaaagcaaatgggaaatgccgacgggttcgaacatgggcgaggccaaaccgtggaaagcaattcgcgtagatctgctgcgttgcccctatggcggttttgcgtttgcgatgttgcagtggaccggaagccgcatgttccgtcgtgatctgcgttggtacgccactgacgagaagaacatgatgctggacaatcattcgctgtatgacctgaccaagaaaatcttcctccctgctaaatcggaagaggaaattttcgcacatctggggcttgaatacctggaaccgttcgaacgtaacgca

SEQ ID NO: 3200 - protein, 529 aa, synthetic construct
  REGION 1..529: note = Variant of terminal deoxynucleotidyltransferase
MHHHHHHGGSGSHGIRTIDSDFGKKQQKKGDNHDSSATYEIKFHEFVLFILEEKMGATRRTFLTDLARKKGFRVENELTDEVTHIVAENLSRSEVLAWLKEHKMEKTKQFELLDISWLIESMKVGKPVDTKGKYQLAESGEMSANPDPTEGRENELPPTMKTVSPYACQRRTTLNNHNQRFTDSLEILRENYEFKRNDDTALEFRRAISVLKSLPFEVRSLKDTEGLPWIGDEVKGIMEEIIEVGESREVQAVLNDEWYQSFHRFKSVFGVGVKTADKWYRMGLRTLEDVRSSKTLKLTPMQKVGLLYYEDLARGVTRAEADAILLLVQDAVATFDPDAIVEIVGGFRRGKPQGHDVDLLISSPGAEKEQEDQLLQKVMNLWKKQGLLLYGRLEWTQWEDGGSPSGKADEGDAGAKCFLILKLYDHLVRKSKWEMPTGSNMGEAKPWKAIRVDLLRCPYGGFAFAMLQWTGSRMFRRDLRWYATDEKNMMLDNHSLYDLTKKIFLPAKSEEEIFAHLGLEYLEPFERNA

SEQ ID NO: 3201 - DNA, 1587 bp, synthetic construct
  misc_feature 1..1587: note = Variant of terminal deoxynucleotidyltransferase
  source 1..1587: mol_type = other DNA
atgcaccatcatcatcatcatggcggtagcggcagccacggcattcgtaccatcgattcggacttcgggaagaaacagcagaaaaaaggcgataaccacgatagttccgccacttatgaaatcaaatttcacgagtttgtgctgttcattctcgaagaaaaaatgggtgcgacgcgtcgtacttttctgacagatttagcccgcaagaaagggttccgcgtcgagaatgaactgaccgacgaagttacccacatcgtggcagaaaatctgtcacgctctgaagtattggcttggctgaaagaacacaagatggagaagaccaagcaattcgaactgctggatattagctggcttatcgaaagcatgaaagttggtaaaccggtggacaccaaggggaaataccagttggcggaatcggttgaggtgagtgcgaacccagatccgacagagggtcgtgaaaacgagctgcctcctactatgaaaaccgtttctccgtatgcgtgtcaacgccgcaccaccctgaacaaccgtaatcaacgttttacggactcgctggaaattcttcgtgaaaattacgagttcaaacgcaacgatgatactgcgctggaatttcgtcgtgctatctccgtgctgaaaagccttccgtttgaggtacgtagcctgaaagacacggaaggattgccctggatcggtgatgaagtcaaagggattatggaagaaatcatcgaggtcggggagtcgcgtgaagtgcaggccgtgctcaatgatgagtggtatcaaagcttccaccgctttaagagtgtctttggagtgggggtgaagacagcagacaagtggtaccgtatgggtctgcgcaccctcgaggatgttcgttccagcaagaccctgaagttgaccccgatgcagaaagtaggtctgctgtattatgaagatcttgctcgcggcgttacgcgtgccgaagctgacgcgatttggctgctggttcaggatgcagtcgcaactttcgacccggatgcgatcgtggagattgtcggtggatttcgtcgtgggaaacctcagggtcacgacgttgatctgcttatcagttctccgggggctgagaaagagcaagaagaccaactcctgcagaaagtgatgaatctgtggaagaaacaagggttgttgctgtacggtcgtctggaatggacccagtgggaagatgggggttcgccttccggtaaggctgacgagggtgacgcgggtgcgaaatgctttctgatcctcaaactttatgatcataaagtgcgtaaaagcaaatgggaaatgccgacgggttcgaacgtgggcgaggccaaaccgtggaaagcaattcgcgtagatctgctgcgttgcccctatggcggttttgcgtttgcgatgttgcagtggaccggaagccgcatgttccgtcgtgatctgcgttggtacgccactgacgagaagaacatgatgctggacaatcattcgctgtatgacctgaccaagaagatcttcctccctgctaaatcggaagaggaaattttcgcacatctggggcttgaatacctggaaccgttcgaacgtaacgca

SEQ ID NO: 3202 - protein, 529 aa, synthetic construct
  REGION 1..529: note = Variant of terminal deoxynucleotidyltransferase
MHHHHHHGGSGSHGIRTIDSDFGKKQQKKGDNHDSSATYEIKFHEFVLFILEEKMGATRRTFLTDLARKKGFRVENELTDEVTHIVAENLSRSEVLAWLKEHKMEKTKQFELLDISWLIESMKVGKPVDTKGKYQLAESVEVSANPDPTEGRENELPPTMKTVSPYACQRRTTLNNRNQRFTDSLEILRENYEFKRNDDTALEFRRAISVLKSLPFEVRSLKDTEGLPWIGDEVKGIMEEIIEVGESREVQAVLNDEWYQSFHRFKSVFGVGVKTADKWYRMGLRTLEDVRSSKTLKLTPMQKVGLLYYEDLARGVTRAEADAIWLLVQDAVATFDPDAIVEIVGGFRRGKPQGHDVDLLISSPGAEKEQEDQLLQKVMNLWKKQGLLLYGRLEWTQWEDGGSPSGKADEGDAGAKCFLILKLYDHKVRKSKWEMPTGSNVGEAKPWKAIRVDLLRCPYGGFAFAMLQWTGSRMFRRDLRWYATDEKNMMLDNHSLYDLTKKIFLPAKSEEEIFAHLGLEYLEPFERNA

SEQ ID NO: 3203 - DNA, 1587 bp, synthetic construct
  misc_feature 1..1587: note = Variant of terminal deoxynucleotidyltransferase
  source 1..1587: mol_type = other DNA
atgcaccatcatcatcatcatggcggtagcggcagccacggcattcgtaccatcgattcggacttcgggaagaaacagcagaaaaaaggcgataaccacgatagttccgccacttatgaaatcaaatttcacgagtttgtgctgttcattctcgaagaaaaaatgggtgcgacgcgtcgtacttttctgacagatttagcccgcaagaaagggttccgcgtcgagaatgaactgaccgacgaagttacccacatcgtggcagaaaatctgtcacgctctgaagtattggcttggctgaaagaacacaagatggagaagaccaagcaattcgaactgctggatattagctggcttatcgaaagcatgaaagttggtaaaccggtggacaccaaggggaaataccagttggcggaatcggttgagatgagtgcgaacccagatccgacagagggtcgtgaaaacgagctgcctcctactatgaagaccgtttctccgtatgcgtgtcaacgccgcaccaccctgaacaaccgtaatcaacgttttacggactcgctggaaattcttcgtgaaaattacgagttcaaacgcaacgatgatactgcgctggaatttcgtcgtgctatctccgtgctgaaaagccttccgtttgaggtacgtagcctgaaagacacggaaggattgccctggatcggtgatgaagtcaaagggattatggaagaaatcatcgaggtcggggagtcgcgtgaagtgcaggccgtgctcaatgatgagtggtatcaaagcttccaccgctttaagagtgtctttggagtgggggtgaagacagcagacaagtggtaccgtatgggtctgcgcaccctcgaggatgttcgttccagcaagaccctgaagttgaccccgatgcagaaagtaggtctgctgtattatgaagatcttgctcgcggcgttacgcgtgccgaagctgacgcgatttggctgctggttcaggatgcagtcgcaactttcgacccggatgcgatcgtggagattgtcggtggatttcgtcgtgggaaacctcagggtcacgacgttgatctgcttatcagttctccgggagctgagaaagagcaagaagaccagctcctgcagaaagtgatgaatctgtggaagaaacaagggttgttgctgtacggtcgtctggaatggacccagtgggaagatgggggttcggattccggtaaggctgacgagggtgacgcgggtgcgaaatgctttctgatcctcaaactttatgatcataaggtgcgtaaaagcaaatgggaaatgccgacgggttcgaacatgggcgaggccaaaccgtggaaagcaattcgcgtagatctgctgcgttgcccctatggcggttttgcgtttgcgatgttgcagtggaccggaagccgcatgttccgtcgtgatctgcgttggtacgccactgacgagaagaacatgatgctggacaatcattcgctgtatgacctgaccaagaaaatcttcctccctgctaaatcggaagaggaaattttcgcacatctggggcttgaatacctggaaccgttcgaacgtaacgca

SEQ ID NO: 3204 - protein, 529 aa, synthetic construct
  REGION 1..529: note = Variant of terminal deoxynucleotidyltransferase
MHHHHHHGGSGSHGIRTIDSDFGKKQQKKGDNHDSSATYEIKFHEFVLFILEEKMGATRRTFLTDLARKKGFRVENELTDEVTHIVAENLSRSEVLAWLKEHKMEKTKQFELLDISWLIESMKVGKPVDTKGKYQLAESVEMSANPDPTEGRENELPPTMKTVSPYACQRRTTLNNRNQRFTDSLEILRENYEFKRNDDTALEFRRAISVLKSLPFEVRSLKDTEGLPWIGDEVKGIMEEIIEVGESREVQAVLNDEWYQSFHRFKSVFGVGVKTADKWYRMGLRTLEDVRSSKTLKLTPMQKVGLLYYEDLARGVTRAEADAIWLLVQDAVATFDPDAIVEIVGGFRRGKPQGHDVDLLISSPGAEKEQEDQLLQKVMNLWKKQGLLLYGRLEWTQWEDGGSDSGKADEGDAGAKCFLILKLYDHKVRKSKWEMPTGSNMGEAKPWKAIRVDLLRCPYGGFAFAMLQWTGSRMFRRDLRWYATDEKNMMLDNHSLYDLTKKIFLPAKSEEEIFAHLGLEYLEPFERNA

SEQ ID NO: 3205 - DNA, 1587 bp, synthetic construct
  misc_feature 1..1587: note = Variant of terminal deoxynucleotidyltransferase
  source 1..1587: mol_type = other DNA
atgcaccatcatcatcatcatggcggtagcggcagccacggcattcgtaccatcgattcggacttcgggaagaaacagcagaaaaaaggcgataaccacgatagttccgccacttatgaaatcaaatttcacgagtttgtgctgttcattctcgaagaaaaaatgggtgcgacgcgtcgtacttttctgacagatttagcccgcaagaaagggttccgcgtcgagaatgaactgaccgacgaagttacccacatcgtggcagaaaatctgtcacgctctgaagtattggcttggctgaaagaacacaagatggagaagaccaagcaattcgaactgctggatattagctggcttatcgaaagcatgaaagttggtaaaccggtggacaccaaggggaaataccagttggcggaatcgggtgagatgagtgcgaacccagatccgacagagggtcgtgaaaacgagctgcctcctactatgaaaaccgtttctccgtatgcgtgtcaacgccgcaccaccctgaacaaccataatcaacgttttacggactcgctggaaattcttcgtgaaaattacgagttcaaacgcaacgatgatactgcgctggaatttcgtcgtgctatctccgtgctgaaaagccttccgtttgaggtacgtagcctgaaagacacggaaggattgccctggatcggtgatgaagtcaaagggattatggaagaaatcatcgaggtcggggagtcgcgtgaagtgcaggccgtgctcaatgatgagtggtatcaaagcttccaccgctttaagagtgtctttggagtgggggtgaagacagcagacaagtggtaccgtatgggtctgcgcaccctcgaggatgttcgttccagcaagaccctgaagttgaccccgatgcagaaagtaggtctgctgtattatgaagatcttgctcgcggcgttacgcgtgccgaagctgacgcgatttggctgctggttcaggatgcagtcgcaactttcgacccggatgcgatcgtggagattgtcggtggatttcgtcgtgggaaacctcagggtcacgacgttgatctgcttatcagttctccgggagctgagaaagagcaagaagaccagctcctgcagaaagtgatgaatctgtggaagaaacaagggttgttgctgtacggtcgtctggaatggacccagtgggaagatgggggttcgccgtccggtaaggctgacgagggtgacgcgggtgcgaaatgctttctgatcctcaaactttatgatcataaagtgcgtaaaagcaaatgggaaatgccgacgggttcgaacatgggcgaggccaaaccgtggaaagcaattcgcgtagatctgctgcgttgcccctatggcggttttgcgtttgcgatgttgcagtggaccggaagccgcatgttccgtcgtgatctgcgttggtacgccctggacgagaagaacatgatgctggacaatcattcgctgtatgacctgaccaagaaaatcttcctccctgctaaatcggaagaggaaattttcgcacatctggggcttgaatacctggaaccgttcgaacgtaacgca

SEQ ID NO: 3206 - protein, 529 aa, synthetic construct
  REGION 1..529: note = Variant of terminal deoxynucleotidyltransferase
MHHHHHHGGSGSHGIRTIDSDFGKKQQKKGDNHDSSATYEIKFHEFVLFILEEKMGATRRTFLTDLARKKGFRVENELTDEVTHIVAENLSRSEVLAWLKEHKMEKTKQFELLDISWLIESMKVGKPVDTKGKYQLAESGEMSANPDPTEGRENELPPTMKTVSPYACQRRTTLNNHNQRFTDSLEILRENYEFKRNDDTALEFRRAISVLKSLPFEVRSLKDTEGLPWIGDEVKGIMEEIIEVGESREVQAVLNDEWYQSFHRFKSVFGVGVKTADKWYRMGLRTLEDVRSSKTLKLTPMQKVGLLYYEDLARGVTRAEADAIWLLVQDAVATFDPDAIVEIVGGFRRGKPQGHDVDLLISSPGAEKEQEDQLLQKVMNLWKKQGLLLYGRLEWTQWEDGGSPSGKADEGDAGAKCFLILKLYDHKVRKSKWEMPTGSNMGEAKPWKAIRVDLLRCPYGGFAFAMLQWTGSRMFRRDLRWYALDEKNMMLDNHSLYDLTKKIFLPAKSEEEIFAHLGLEYLEPFERNA

SEQ ID NO: 3207 - DNA, 1587 bp, synthetic construct
  misc_feature 1..1587: note = Variant of terminal deoxynucleotidyltransferase
  source 1..1587: mol_type = other DNA
atgcaccatcatcatcatcatggcggtagcggcagccacggcattcgtaccatcgattcggacttcgggaagaaacagcagaaaaaaggcgataaccacgatagttccgccacttatgaaatcaaatttcacgagtttgtgctgttcattctcgaagaaaaaatgggtgcgacgcgtcgtacttttctgacagatttagcccgcaagaaagggttccgcgtcgagaatgaactgaccgacgaagttacccacatcgtggcagaaaatctgtcacgctctgaagtattggcttggctgaaagaacacaagatggagaagaccaagcaattcgaactgctggatattagctggcttatcgaaagcatgaaagttggtaaaccggtggacaccaaggggaaataccagttggcggaatcgggtgagatgagtgcgaacccagatccgacagagggtcgtgtaaacgagctgcctcctactatgcataccgtttctccgtatgcgtgtcaacgccgcaccaccctgaacaaccataatcaacgttttacggactcgctggaaattcttcgtgaaaattacgagttcaaacgcaacgatgatactgcgctggaatttcgtcgtgctatctccgtgctgaaaagccttccgtttgaggtacgtagcctgaaagacacggaaggattgccctggatcggtgatgaagtcaaagggattatggaagaaatcatcgaggtcggggagtcgcgtgaagtgcaggccgtgctcaatgatgagtggtatcaaagcttccaccgctttaagagtgtctttggagtgggggtgaagacagcagacaagtggtaccgtatgggtctgcgcaccctcgaggatgttcgttccagcaagaccctgaagttgaccccgatgcagaaagtaggtctgctgtattatgaagatcttgctcgcggcgttacgcgtgccgaagctgacgcgattctgctgctggttcaggatgcagtcgcaactttcgacccggatgcgatcgtggagattgtcggtggatttcgtcgtgggaaacctcagggtcacgacgttgatctgcttatcagttctccgggggctgagaaagagcaagaagaccagctcctgcagaaagtgatgaatctgtggaagaaacaagggttgttgctgtacggtcgtctggaatggacccagtgggaagatgggggttcggattccggtaaggctgacgagggtgacgcgggtgcgaaatgctttctgatcctcaaactttatgatcatctggtgcgtaaaagcaaatgggaaatgccgacgggttcgaacgtgggcgaggccaaaccgtggaaagcaattcgcgtagatctgctgcgttgcccctatggcggttttgcgtttgcgatgttgcagtggaccggaagccgcatgttccgtcgtgatctgcgttggtacgccctggacgagaagaacatgatgctggacaatcattcgctgtatgacctgaccaagaagatcttcctccctgctaaatcggaagaggaaattttcgcacatctggggcttgaatacctggaaccgttcgaacgtaacgca

SEQ ID NO: 3208 - protein, 529 aa, synthetic construct
  REGION 1..529: note = Variant of terminal deoxynucleotidyltransferase
MHHHHHHGGSGSHGIRTIDSDFGKKQQKKGDNHDSSATYEIKFHEFVLFILEEKMGATRRTFLTDLARKKGFRVENELTDEVTHIVAENLSRSEVLAWLKEHKMEKTKQFELLDISWLIESMKVGKPVDTKGKYQLAESGEMSANPDPTEGRVNELPPTMHTVSPYACQRRTTLNNHNQRFTDSLEILRENYEFKRNDDTALEFRRAISVLKSLPFEVRSLKDTEGLPWIGDEVKGIMEEIIEVGESREVQAVLNDEWYQSFHRFKSVFGVGVKTADKWYRMGLRTLEDVRSSKTLKLTPMQKVGLLYYEDLARGVTRAEADAILLLVQDAVATFDPDAIVEIVGGFRRGKPQGHDVDLLISSPGAEKEQEDQLLQKVMNLWKKQGLLLYGRLEWTQWEDGGSDSGKADEGDAGAKCFLILKLYDHLVRKSKWEMPTGSNVGEAKPWKAIRVDLLRCPYGGFAFAMLQWTGSRMFRRDLRWYALDEKNMMLDNHSLYDLTKKIFLPAKSEEEIFAHLGLEYLEPFERNA

SEQ ID NO: 3209 - DNA, 1587 bp, synthetic construct
  misc_feature 1..1587: note = Variant of terminal deoxynucleotidyltransferase
  source 1..1587: mol_type = other DNA
atgcaccatcatcatcatcatggcggtagcggcagccacggcattcgtaccatcgattcggacttcgggaagaaacagcagaaaaaaggcgataaccacgatagttccgccacttatgaaatcaaatttcacgagtttgtgctgttcattctcgaagaaaaaatgggtgcgacgcgtcgtacttttctgacagatttagcccgcaagaaagggttccgcgtcgagaatgaactgaccgacgaagttacccacatcgtggcagaaaatctgtcacgctctgaagtattggcttggctgaaagaacacaagatggagaagaccaagcaattcgaactgctggatattagctggcttatcgaaagcatgaaagttggtaaaccggtggacaccaaggggaaataccagttggcggaatcgggtgaggtgagtgcgaacccagatccgacagagggtcgtgaaaacgagctgcctcctactatgaaaaccgtttctccgtatgcgtgtcaacgccgcaccaccctgaacaaccgtaatcaacgttttacggactcgctggaaattcttcgtgaaaattacgagttcaaacgcaacgatgatactgcgctggaatttcgtcgtgctatctccgtgctgaaaagccttccgtttgaggtacgtagcctgaaagacacggaaggattgccctggatcggtgatgaagtcaaagggattatggaagaaatcatcgaggtcggggagtcgcgtgaagtgcaggccgtgctcaatgatgagtggtatcaaagcttccaccgctttaagagtgtctttggagtgggggtgaagacagcagacaagtggtaccgtatgggtctgcgcaccctcgaggatgttcgttccagcaagaccctgaagttgaccccgatgcagaaagtaggtctgctgtattatgaagatcttgctcgcggcgttacgcgtgccgaagctgacgcgatttggctgctggttcaggatgcagtcgcaactttcgacccggatgcgatcgtggagattgtcggtggatttcgtcgtgggaaacctcagggtcacgacgttgatctgcttatcagttctccgggagctgagaaagagcaagaagaccgcctcctgcagaaagtgatgaatctgtggaagaaacaagggttgttgctgtacggtcgtctggaatggacccagtgggaagatgggggttcgccgtccggtaaggctgacgagggtgacgcgggtgcgaaatgctttctgatcctcaaactttatgatcataaagtgcgtaaaagcaaatgggaaatgccgacgggttcgaacgtgggcgaggccaaaccgtggaaagcaattcgcgtagatctgctgcgttgcccctatggcggttttgcgtttgcgatgttgcagtggaccggaagccgcatgttccgtcgtgatctgcgttggtacgccactgacgagaagaacatgatgctggacaatcattcgctgtatgacctgaccaagaaaatcttcctccctgctaaatcggaagaggaaattttcgcacatctggggcttgaatacctggaaccgttcgaacgtaacgca

SEQ ID NO: 3210 - protein, 529 aa, synthetic construct
  REGION 1..529: note = Variant of terminal deoxynucleotidyltransferase
MHHHHHHGGSGSHGIRTIDSDFGKKQQKKGDNHDSSATYEIKFHEFVLFILEEKMGATRRTFLTDLARKKGFRVENELTDEVTHIVAENLSRSEVLAWLKEHKMEKTKQFELLDISWLIESMKVGKPVDTKGKYQLAESGEVSANPDPTEGRENELPPTMKTVSPYACQRRTTLNNRNQRFTDSLEILRENYEFKRNDDTALEFRRAISVLKSLPFEVRSLKDTEGLPWIGDEVKGIMEEIIEVGESREVQAVLNDEWYQSFHRFKSVFGVGVKTADKWYRMGLRTLEDVRSSKTLKLTPMQKVGLLYYEDLARGVTRAEADAIWLLVQDAVATFDPDAIVEIVGGFRRGKPQGHDVDLLISSPGAEKEQEDRLLQKVMNLWKKQGLLLYGRLEWTQWEDGGSPSGKADEGDAGAKCFLILKLYDHKVRKSKWEMPTGSNVGEAKPWKAIRVDLLRCPYGGFAFAMLQWTGSRMFRRDLRWYATDEKNMMLDNHSLYDLTKKIFLPAKSEEEIFAHLGLEYLEPFERNA

SEQ ID NO: 3211 - DNA, 1587 bp, synthetic construct
  misc_feature 1..1587: note = Variant of terminal deoxynucleotidyltransferase
  source 1..1587: mol_type = other DNA
atgcaccatcatcatcatcatggcggtagcggcagccacggcattcgtaccatcgattcggacttcgggaagaaacagcagaaaaaaggcgataaccacgatagttccgccacttatgaaatcaaatttcacgagtttgtgctgttcattctcgaagaaaaaatgggtgcgacgcgtcgtacttttctgacagatttagcccgcaagaaagggttccgcgtcgagaatgaactgaccgacgaagttacccacatcgtggcagaaaatctgtcacgctctgaagtattggcttggctgaaagaacacaagatggagaagaccaagcaattcgaactgctggatattagctggcttatcgaaagcatgaaagttggtaaaccggtggacaccaaggggaaataccagttggcggaatcggttgagatgagtgcgaacccagatacgacagagggtcgtgaaaacgagctgcctcctactatgcataccgtttctccgtatgcgtgtcaacgccgcaccaccctgaacaaccgtaatcaacgttttacggactcgctggaaattcttcgtgaaaattacgagttcaaacgcaacgatgatactgcgctggaatttcgtcgtgctatctccgtgctgaaaagccttccgtttgaggtacgtagcctgaaagacacggaaggattgccctggatcggtgatgaagtcaaagggattatggaagaaatcatcgaggtcggggagtcgcgtgaagtgcaggccgtgctcaatgatgagtggtatcaaagcttccaccgctttaagagtgtctttggagtgggggtgaagacagcagacaagtggtaccgtatgggtctgcgcaccctcgaggatgttcgttccagcaagaccctgaagttgaccccgatgcagaaagtaggtctgctgtattatgaagatcttgctcgcggcgttacgcgtgccgaagctgacgcgatttggctgctggttcaggatgcagtcgcaactttcgacccggatgcgatcgtggagattgtcggtggatttcgtcgtgggaaacctcagggtcacgacgttgatctgcttatcagttctccgggggctgagaaagagcaagaagaccaactcctgcagaaagtgatgaatctgtggaagaaacaagggttgttgctgtacggtcgtctggaatggacccagtgggaagatgggggttcggattccggtaaggctgacgagggtgacgcgggtgcgaaatgctttctgatcctcaaactttatgatcataaggtgcgtaaaagcaaatgggaaatgccgacgggttcgaacatgggcgaggccaaaccgtggaaagcaattcgcgtagatctgctgcgttgcccctatggcggttttgcgtttgcgatgttgcagtggaccggaagccgcatgttccgtcgtgatctgcgttggtacgccactgacgagaagaacatgatgctggacaatcattcgctgtatgacctgaccaagaagatcttcctccctgctaaatcggaagaggaaattttcgcacatctggggcttgaatacctggaaccgttcgaacgtaacgca

SEQ ID NO: 3212 - protein, 529 aa, synthetic construct
  REGION 1..529: note = Variant of terminal deoxynucleotidyltransferase
MHHHHHHGGSGSHGIRTIDSDFGKKQQKKGDNHDSSATYEIKFHEFVLFILEEKMGATRRTFLTDLARKKGFRVENELTDEVTHIVAENLSRSEVLAWLKEHKMEKTKQFELLDISWLIESMKVGKPVDTKGKYQLAESVEMSANPDTTEGRENELPPTMHTVSPYACQRRTTLNNRNQRFTDSLEILRENYEFKRNDDTALEFRRAISVLKSLPFEVRSLKDTEGLPWIGDEVKGIMEEIIEVGESREVQAVLNDEWYQSFHRFKSVFGVGVKTADKWYRMGLRTLEDVRSSKTLKLTPMQKVGLLYYEDLARGVTRAEADAIWLLVQDAVATFDPDAIVEIVGGFRRGKPQGHDVDLLISSPGAEKEQEDQLLQKVMNLWKKQGLLLYGRLEWTQWEDGGSDSGKADEGDAGAKCFLILKLYDHKVRKSKWEMPTGSNMGEAKPWKAIRVDLLRCPYGGFAFAMLQWTGSRMFRRDLRWYATDEKNMMLDNHSLYDLTKKIFLPAKSEEEIFAHLGLEYLEPFERNA

SEQ ID NO: 3213 - DNA, 1587 bp, synthetic construct
  misc_feature 1..1587: note = Variant of terminal deoxynucleotidyltransferase
  source 1..1587: mol_type = other DNA
atgcaccatcatcatcatcatggcggtagcggcagccacggcattcgtaccatcgattcggacttcgggaagaaacagcagaaaaaaggcgataaccacgatagttccgccacttatgaaatcaaatttcacgagtttgtgctgttcattctcgaagaaaaaatgggtgcgacgcgtcgtacttttctgacagatttagcccgcaagaaagggttccgcgtcgagaatgaactgaccgacgaagttacccacatcgtggcagaaaatctgtcacgctctgaagtattggcttggctgaaagaacacaagatggagaagaccaagcaattcgaactgctggatattagctggcttatcgaaagcatgaaagttggtaaaccggtggacaccaaggggaaataccagttggcggaatcggttgaggtgagtgcgaacccagatccgacagagggtcgtgaaaacgagctgcctcctactatgaagaccgtttctccgtatgcgtgtcaacgccgcaccaccctgaacaaccgtaatcaacgttttacggactcgctggaaattcttcgtgaaaattacgagttcaaacgcaacgatgatactgcgctggaatttcgtcgtgctatctccgtgctgaaaagccttccgtttgaggtacgtagcctgaaagacacggaaggattgccctggatcggtgatgaagtcaaagggattatggaagaaatcatcgaggtcggggagtcgcgtgaagtgcaggccgtgctcaatgatgagtggtatcaaagcttccaccgctttaagagtgtctttggagtgggggtgaagacagcagacaagtggtaccgtatgggtctgcgcaccctcgaggatgttcgttccagcaagaccctgaagttgaccccgatgcagaaagtaggtctgctgtattatgaagatcttgctcgcggcgttacgcgtgccgaagctgacgcgatttggctgctggttcaggatgcagtcgcaactttcgacccggatgcgatcgtggagattgtcggtggatttcgtcgtgggaaacctcagggtcacgacgttgatctgcttatcagttctccgggagctgagaaagagcaagaagaccaactcctgcagaaagtgatgaatctgtggaagaaacaagggttgttgctgtacggtcgtctggaatggacccagtgggaagatgggggttcgccttccggtaaggctgacgagggtgacgcgggtgcgaaatgctttctgatcctcaaactttatgatcataaggtgcgtaaaagcaaatgggaaatgccgacgggttcgaacatgggcgaggccaaaccgtggaaagcaattcgcgtagatctgctgcgttgcccctatggcggttttgcgtttgcgatgttgcagtggaccggaagccgcatgttccgtcgtgatctgcgttggtacgccactgacgagaagaacatgatgctggacaatcattcgctgtatgacctgaccaagaagatcttcctccctgctaaatcggaagaggaaattttcgcacatctggggcttgaatacctggaaccgttcgaacgtaacgca

SEQ ID NO: 3214 - protein, 529 aa, synthetic construct
  REGION 1..529: note = Variant of terminal deoxynucleotidyltransferase
MHHHHHHGGSGSHGIRTIDSDFGKKQQKKGDNHDSSATYEIKFHEFVLFILEEKMGATRRTFLTDLARKKGFRVENELTDEVTHIVAENLSRSEVLAWLKEHKMEKTKQFELLDISWLIESMKVGKPVDTKGKYQLAESVEVSANPDPTEGRENELPPTMKTVSPYACQRRTTLNNRNQRFTDSLEILRENYEFKRNDDTALEFRRAISVLKSLPFEVRSLKDTEGLPWIGDEVKGIMEEIIEVGESREVQAVLNDEWYQSFHRFKSVFGVGVKTADKWYRMGLRTLEDVRSSKTLKLTPMQKVGLLYYEDLARGVTRAEADAIWLLVQDAVATFDPDAIVEIVGGFRRGKPQGHDVDLLISSPGAEKEQEDQLLQKVMNLWKKQGLLLYGRLEWTQWEDGGSPSGKADEGDAGAKCFLILKLYDHKVRKSKWEMPTGSNMGEAKPWKAIRVDLLRCPYGGFAFAMLQWTGSRMFRRDLRWYATDEKNMMLDNHSLYDLTKKIFLPAKSEEEIFAHLGLEYLEPFERNA

SEQ ID NO: 3215 - DNA, 1587 bp, synthetic construct
  misc_feature 1..1587: note = Variant of terminal deoxynucleotidyltransferase
  source 1..1587: mol_type = other DNA
atgcaccatcatcatcatcatggcggtagcggcagccacggcattcgtaccatcgattcggacttcgggaagaaacagcagaaaaaaggcgataaccacgatagttccgccacttatgaaatcaaatttcacgagtttgtgctgttcattctcgaagaaaaaatgggtgcgacgcgtcgtacttttctgacagatttagcccgcaagaaagggttccgcgtcgagaatgaactgaccgacgaagttacccacatcgtggcagaaaatctgtcacgctctgaagtattggcttggctgaaagaacacaagatggagaagaccaagcaattcgaactgctggatattagctggcttatcgaaagcatgaaagttggtaaaccggtggacaccaaggggaaataccagttggcggaatcgggtgaggtgagtgcgaacccagatccgacagagggtcgtgaaaacgagctgcctcctactatgaaaaccgtttctccgtatgcgtgtcaacgccgcaccaccctgaacaaccgtaatcaacgttttacggactcgctggaaattcttcgtgaaaattacgagttcaaacgcaacgatgatactgcgctggaatttcgtcgtgctatctccgtgctgaaaagccttccgtttgaggtacgtagcctgaaagacacggaaggattgccctggatcggtgatgaagtcaaagggattatggaagaaatcatcgaggtcggggagtcgcgtgaagtgcaggccgtgctcaatgatgagtggtatcaaagcttccaccgctttaagagtgtctttggagtgggggtgaagacagcagacaagtggtaccgtatgggtctgcgcaccctcgaggatgttcgttccagcaagaccctgaagttgaccccgatgcagaaagtaggtctgctgtattatgaagatcttgctcgcggcgttacgcgtgccgaagctgacgcgatttggctgctggttcaggatgcagtcgcaactttcgacccggatgcgatcgtggagattgtcggtggatttcgtcgtgggaaacctcagggtcacgacgttgatctgcttatcagttctccgggagctgagaaagagcaagaagaccgcctcctgcagaaagtgatgaatctgtggaagaaacaagggttgttgctgtacggtcgtctggaatggacccagtgggaagatgggggttcgccgtccggtaaggctgacgagggtgacgcgggtgcgaaatgctttctgatcctcaaactttatgatcataaagtgcgtaaaagcaaatgggaaatgccgacgggttcgaacatgggcgaggccaaaccgtggaaagcaattcgcgtagatctgctgcgttgcccctatggcggttttgcgtttgcgatgttgcagtggaccggaagccgcatgttccgtcgtgatctgcgttggtacgccactgacgagaagaacatgatgctggacaatcattcgctgtatgacctgaccaagaaaatcttcctccctgctaaatcggaagaggaaattttcgcacatctggggcttgaatacctggaaccgttcgaacgtaacgca

SEQ ID NO: 3216 - protein, 529 aa, synthetic construct
  REGION 1..529: note = Variant of terminal deoxynucleotidyltransferase
MHHHHHHGGSGSHGIRTIDSDFGKKQQKKGDNHDSSATYEIKFHEFVLFILEEKMGATRRTFLTDLARKKGFRVENELTDEVTHIVAENLSRSEVLAWLKEHKMEKTKQFELLDISWLIESMKVGKPVDTKGKYQLAESGEVSANPDPTEGRENELPPTMKTVSPYACQRRTTLNNRNQRFTDSLEILRENYEFKRNDDTALEFRRAISVLKSLPFEVRSLKDTEGLPWIGDEVKGIMEEIIEVGESREVQAVLNDEWYQSFHRFKSVFGVGVKTADKWYRMGLRTLEDVRSSKTLKLTPMQKVGLLYYEDLARGVTRAEADAIWLLVQDAVATFDPDAIVEIVGGFRRGKPQGHDVDLLISSPGAEKEQEDRLLQKVMNLWKKQGLLLYGRLEWTQWEDGGSPSGKADEGDAGAKCFLILKLYDHKVRKSKWEMPTGSNMGEAKPWKAIRVDLLRCPYGGFAFAMLQWTGSRMFRRDLRWYATDEKNMMLDNHSLYDLTKKIFLPAKSEEEIFAHLGLEYLEPFERNA

SEQ ID NO: 3217 - DNA, 1587 bp, synthetic construct
  misc_feature 1..1587: note = Variant of terminal deoxynucleotidyltransferase
  source 1..1587: mol_type = other DNA
atgcaccatcatcatcatcatggcggtagcggcagccacggcattcgtaccatcgattcggacttcgggaagaaacagcagaaaaaaggcgataaccacgatagttccgccacttatgaaatcaaatttcacgagtttgtgctgttcattctcgaagaaaaaatgggtgcgacgcgtcgtacttttctgacagatttagcccgcaagaaagggttccgcgtcgagaatgaactgaccgacgaagttacccacatcgtggcagaaaatctgtcacgctctgaagtattggcttggctgaaagaacacaagatggagaagaccaagcaattcgaactgctggatattagctggcttatcgaaagcatgaaagttggtaaaccggtggacaccaaggggaaataccagttggcggaatcgggtgagatgagtgcgaacccagatccgacagagggtcgtgtaaacgagctgcctcctactatgaaaaccgtttctccgtatgcgtgtcaacgccgcaccaccctgaacaaccataatcaacgttttacggactcgctggaaattcttcgtgaaaattacgagttcaaacgcaacgatgatactgcgctggaatttcgtcgtgctatctccgtgctgaaaagccttccgtttgaggtacgtagcctgaaagacacggaaggattgccctggatcggtgatgaagtcaaagggattatggaagaaatcatcgaggtcggggagtcgcgtgaagtgcaggccgtgctcaatgatgagtggtatcaaagcttccaccgctttaagagtgtctttggagtgggggtgaagacagcagacaagtggtaccgtatgggtctgcgcaccctcgaggatgttcgttccagcaagaccctgaagttgaccccgatgcagaaagtaggtctgctgtattatgaagatcttgctcgcggcgttacgcgtgccgaagctgacgcgatttggctgctggttcaggatgcagtcgcaactttcgacccggatgcgatcgtggagattgtcggtggatttcgtcgtgggaaacctcagggtcacgacgttgatctgcttatcagttctccgggagctgagaaagagcaagaagaccagctcctgcagaaagtgatgaatctgtggaagaaacaagggttgttgctgtacggtcgtctggaatggacccagtgggaagatgggggttcgccttccggtaaggctgacgagggtgacgcgggtgcgaaatgctttctgatcctcaaactttatgatcataaagtgcgtaaaagcaaatgggaaatgccgacgggttcgaacatgggcgaggccaaaccgtggaaagcaattcgcgtagatctgctgcgttgcccctatggcggttttgcgtttgcgatgttgcagtggaccggaagccgcatgttccgtcgtgatctgcgttggtacgccactgacgagaagaacatgatgctggacaatcattcgctgtatgacctgaccaagaaaatcttcctccctgctaaatcggaagaggaaattttcgcacatctggggcttgaatacctggaaccgttcgaacgtaacgca

SEQ ID NO: 3218 - protein, 529 aa, synthetic construct
  REGION 1..529: note = Variant of terminal deoxynucleotidyltransferase
MHHHHHHGGSGSHGIRTIDSDFGKKQQKKGDNHDSSATYEIKFHEFVLFILEEKMGATRRTFLTDLARKKGFRVENELTDEVTHIVAENLSRSEVLAWLKEHKMEKTKQFELLDISWLIESMKVGKPVDTKGKYQLAESGEMSANPDPTEGRVNELPPTMKTVSPYACQRRTTLNNHNQRFTDSLEILRENYEFKRNDDTALEFRRAISVLKSLPFEVRSLKDTEGLPWIGDEVKGIMEEIIEVGESREVQAVLNDEWYQSFHRFKSVFGVGVKTADKWYRMGLRTLEDVRSSKTLKLTPMQKVGLLYYEDLARGVTRAEADAIWLLVQDAVATFDPDAIVEIVGGFRRGKPQGHDVDLLISSPGAEKEQEDQLLQKVMNLWKKQGLLLYGRLEWTQWEDGGSPSGKADEGDAGAKCFLILKLYDHKVRKSKWEMPTGSNMGEAKPWKAIRVDLLRCPYGGFAFAMLQWTGSRMFRRDLRWYATDEKNMMLDNHSLYDLTKKIFLPAKSEEEIFAHLGLEYLEPFERNA

SEQ ID NO: 3219 - DNA, 1587 bp, synthetic construct
  misc_feature 1..1587: note = Variant of terminal deoxynucleotidyltransferase
  source 1..1587: mol_type = other DNA
atgcaccatcatcatcatcatggcggtagcggcagccacggcattcgtaccatcgattcggacttcgggaagaaacagcagaaaaaaggcgataaccacgatagttccgccacttatgaaatcaaatttcacgagtttgtgctgttcattctcgaagaaaaaatgggtgcgacgcgtcgtacttttctgacagatttagcccgcaagaaagggttccgcgtcgagaatgaactgaccgacgaagttacccacatcgtggcagaaaatctgtcacgctctgaagtattggcttggctgaaagaacacaagatggagaagaccaagcaattcgaactgctggatattagctggcttatcgaaagcatgaaagttggtaaaccggtggacaccaaggggaaataccagttggcggaatcggttgagatgagtgcgaacccagatccgacaccaggtcgtgaaaacgagctgcctcctactatgaaaaccgtttctccgtatgcgtgtcaacgccgcaccaccctgaacaaccgtaatcaacgttttacggactcgctggaaattcttcgtgaaaattacgagttcaaacgcaacgatgatactgcgctggaatttcgtcgtgctatctccgtgctgaaaagccttccgtttgaggtacgtagcctgaaagacacggaaggattgccctggatcggtgatgaagtcaaagggattatggaagaaatcatcgaggtcggggagtcgcgtgaagtgcaggccgtgctcaatgatgagtggtatcaaagcttccaccgctttaagagtgtctttggagtgggggtgaagacagcagacaagtggtaccgtatgggtctgcgcaccctcgaggatgttcgttccagcaagaccctgaagttgaccccgatgcagaaagtaggtctgctgtattatgaagatcttgctcgcggcgttacgcgtgccgaagctgacgcgatttggctgctggttcaggatgcagtcgcaactttcgacccggatgcgatcgtggagattgtcggtggatttcgtcgtgggaaacctcagggtcacgacgttgatctgcttatcagttctccgggagctgagaaagagcaagaagaccaactcctgcagaaagtgatgaatctgtggaagaaacaagggttgttgctgtacggtcgtctggaatggacccagtgggaagatgggggttcggattccggtaaggctgacgagggtgacgcgggtgcgaaatgctttctgatcctcaaactttatgatcataaggtgcgtaaaagcaaatgggaaatgtcgacgggttcgaacgtgggcgaggccaaaccgtggaaagcaattcgcgtagatctgctgcgttgcccctatggcggttttgcgtttgcgatgttgcagtggaccggaagccgcatgttccgtcgtgatctgcgttggtacgccctggacgagaagaacatgatgctggacaatcattcgctgtatgacctgaccaagggtatcttcctccctgctaaatcggaagaggaaattttcgcacatctggggcttgaatacctggaaccgttcgaacgtaacgca

SEQ ID NO: 3220 - protein, 529 aa, synthetic construct
  REGION 1..529: note = Variant of terminal deoxynucleotidyltransferase
MHHHHHHGGSGSHGIRTIDSDFGKKQQKKGDNHDSSATYEIKFHEFVLFILEEKMGATRRTFLTDLARKKGFRVENELTDEVTHIVAENLSRSEVLAWLKEHKMEKTKQFELLDISWLIESMKVGKPVDTKGKYQLAESVEMSANPDPTPGRENELPPTMKTVSPYACQRRTTLNNRNQRFTDSLEILRENYEFKRNDDTALEFRRAISVLKSLPFEVRSLKDTEGLPWIGDEVKGIMEEIIEVGESREVQAVLNDEWYQSFHRFKSVFGVGVKTADKWYRMGLRTLEDVRSSKTLKLTPMQKVGLLYYEDLARGVTRAEADAIWLLVQDAVATFDPDAIVEIVGGFRRGKPQGHDVDLLISSPGAEKEQEDQLLQKVMNLWKKQGLLLYGRLEWTQWEDGGSDSGKADEGDAGAKCFLILKLYDHKVRKSKWEMSTGSNVGEAKPWKAIRVDLLRCPYGGFAFAMLQWTGSRMFRRDLRWYALDEKNMMLDNHSLYDLTKGIFLPAKSEEEIFAHLGLEYLEPFERNA

SEQ ID NO: 3221 - DNA, 1587 bp, synthetic construct
  misc_feature 1..1587: note = Variant of terminal deoxynucleotidyltransferase
  source 1..1587: mol_type = other DNA
atgcaccatcatcatcatcatggcggtagcggcagccacggcattcgtaccatcgattcggacttcgggaagaaacagcagaaaaaaggcgataaccacgatagttccgccacttatgaaatcaaatttcacgagtttgtgctgttcattctcgaagaaaaaatgggtgcgacgcgtcgtacttttctgacagatttagcccgcaagaaagggttccgcgtcgagaatgaactgaccgacgaagttacccacatcgtggcagaaaatctgtcacgctctgaagtattggcttggctgaaagaacacaagatggagaagaccaagcaattcgaactgctggatattagctggcttatcgaaagcatgaaagttggtaaaccggtggacaccaaggggaaataccagttggcggaatcggttgaggtgagtgcgaacccagatccgacagaaggtcgtgtaaacgagctgcctcctactatgaaaaccgtttctccgtatgcgtgtcaacgccgcaccaccctgaacaaccgtaatcaacgttttacggactcgctggaaattcttcgtgaaaattacgagttcaaacgcaacgatgatactgcgctggaatttcgtcgtgctatctccgtgctgaaaagccttccgtttgaggtacgtagcctgaaagacacggaaggattgccctggatcggtgatgaagtcaaagggattatggaagaaatcatcgaagtcggggagtcgcgtgaagtgcaggccgtgctcaatgatgagtggtatcaaagcttccacgcatttacgagtgtctttggagtgggggtgaagacagcagacaagtggtaccgtatgggtctgcgcaccctcgaggatgttcgttccagcaagaccctgaagttgaccccgatgcagaaagtaggtctgctgtattatgaagatcttgctcgcggcgttacgcgtgccgaagctgacgcgatttggctgctggttcaggatgcagtcgcaactttcgacccggatgcgatcgtggagattgtcggtggatttcgtcgtgggaaacctcagggtcacgacgttgatctgcttatcagttctccgggagctgagaaagagcaagaagaccaactcctgcagaaagtgatgaatctgtggaagaaacaagggttgttgctgtacggtcgtctggaatggagccagtgggaagatgggggttcgccttccggtaaggctgacgagggtgacgcggaggcgaaatgctttctgatcctcaaactttatgatcatctggtgcgtaaaagtaaacgcaatatgccgactggttcgaacatgggcgagtccaaaccgtggaaagcaattcgcgtagatctgctgcgttgcccctatggcagttttgcgtttgcgatgttgcagtggaccggaagccgcatgttccgtcgtgatctgcgttggtacgccactgacgagaagaacatgatgctggacaatcattcgctgtatgacctgaccaaaggcatcttcctccctgctaaatcggaagaggaaattttcgaacatctggggcttgaatacctggaaccgttcgaacgtaacgca

SEQ ID NO: 3222 - protein, 529 aa, synthetic construct
  REGION 1..529: note = Variant of terminal deoxynucleotidyltransferase
MHHHHHHGGSGSHGIRTIDSDFGKKQQKKGDNHDSSATYEIKFHEFVLFILEEKMGATRRTFLTDLARKKGFRVENELTDEVTHIVAENLSRSEVLAWLKEHKMEKTKQFELLDISWLIESMKVGKPVDTKGKYQLAESVEVSANPDPTEGRVNELPPTMKTVSPYACQRRTTLNNRNQRFTDSLEILRENYEFKRNDDTALEFRRAISVLKSLPFEVRSLKDTEGLPWIGDEVKGIMEEIIEVGESREVQAVLNDEWYQSFHAFTSVFGVGVKTADKWYRMGLRTLEDVRSSKTLKLTPMQKVGLLYYEDLARGVTRAEADAIWLLVQDAVATFDPDAIVEIVGGFRRGKPQGHDVDLLISSPGAEKEQEDQLLQKVMNLWKKQGLLLYGRLEWSQWEDGGSPSGKADEGDAEAKCFLILKLYDHLVRKSKRNMPTGSNMGESKPWKAIRVDLLRCPYGSFAFAMLQWTGSRMFRRDLRWYATDEKNMMLDNHSLYDLTKGIFLPAKSEEEIFEHLGLEYLEPFERNA

SEQ ID NO: 3223 - DNA, 1587 bp, synthetic construct
  misc_feature 1..1587: note = Variant of terminal deoxynucleotidyltransferase
  source 1..1587: mol_type = other DNA
atgcaccatcatcatcatcatggcggtagcggcagccacggcattcgtaccatcgattcggacttcgggaagaaacagcagaaaaaaggcgataaccacgatagttccgccacttatgaaatcaaatttcacgagtttgtgctgttcattctcgaagaaaaaatgggtgcgacgcgtcgtacttttctgacagatttagcccgcaagaaagggttccgcgtcgagaatgaactgaccgacgaagttacccacatcgtggcagaaaatctgtcacgctctgaagtattggcttggctgaaagaacacaagatggagaagaccaagcaattcgaactgctggatattagctggcttatcgaaagcatgaaagttggtaaaccggtggacaccaaggggaaataccagttggcggaatcggttgaggtgagtgcgaacccagatccgacagaaggtcgtgtaaacgagctgcctcctactatgaaaaccgtttctccgtatgcgtgtcaacgccgcaccaccctgaacaaccgtaatcaacgttttacggactcgctggaaattcttcgtgaaaattacgagttcaaacgcaacgaggatactgcgctggaatttcgtcgtgctatctccgtgctgaaaagccttccgtttgaggtacgtagcctgaaagacacggaaggattgccctggatcggtgatgaagtcaaagggattatggaagaaatcatcgaagtcggggagtcgcgtgaagtgcaggccgtgctcaatgatgagtggtatcaaagcttccacgcatttacgagtgtctttggagtgggggtgaagacagcagacaagtggtaccgtatgggtctgcgcaccctcgaggatgttcgttccagcaagaccctgaagttgaccccgatgcagaaagtaggtctgctgtattatgaagatcttgctcgcggcgttacgcgtgccgaagctgacgcgatttggctgctggttcaggatgcagtcgcaactttcgacccggatgcgatcgtggagattgtcggtggatttcgtcgtgggaaacctcagggtcacgacgttgatctgcttatcagttctccgggagctgagaaagagcaagaagaccaactcctgcagaaagtgatgaatctgtggaagaaacaagggttgttgctgtacggtcgtctggaatggacccagtgggaagatgggggttcgccttccggtaaggctgacgagggtgacgcggaggcgaaatgctttctgatcctcaaactttatgatcatctggtgcgtaaaagcaaatggaacatgccgacgggttcgaacgtgggcgagtccaaaccgtggaaagcaattcgcgtagatctgctgcgttgcccctatggcagttttgcgtttgcgatgttgcagtggaccggaagccgcatgttccgtcgtgatctgcgttggtacgccactgacgagaagaacatgatgctggacaatcattcgctgtatgacctgaccaagggtatcttcctccctgctaaatcggaagaggaaattttcgcacatctggggcttgaatacctggaaccgttcgaacgtaacgca

SEQ ID NO: 3224 - protein, 529 aa, synthetic construct
  REGION 1..529: note = Variant of terminal deoxynucleotidyltransferase
MHHHHHHGGSGSHGIRTIDSDFGKKQQKKGDNHDSSATYEIKFHEFVLFILEEKMGATRRTFLTDLARKKGFRVENELTDEVTHIVAENLSRSEVLAWLKEHKMEKTKQFELLDISWLIESMKVGKPVDTKGKYQLAESVEVSANPDPTEGRVNELPPTMKTVSPYACQRRTTLNNRNQRFTDSLEILRENYEFKRNEDTALEFRRAISVLKSLPFEVRSLKDTEGLPWIGDEVKGIMEEIIEVGESREVQAVLNDEWYQSFHAFTSVFGVGVKTADKWYRMGLRTLEDVRSSKTLKLTPMQKVGLLYYEDLARGVTRAEADAIWLLVQDAVATFDPDAIVEIVGGFRRGKPQGHDVDLLISSPGAEKEQEDQLLQKVMNLWKKQGLLLYGRLEWTQWEDGGSPSGKADEGDAEAKCFLILKLYDHLVRKSKWNMPTGSNVGESKPWKAIRVDLLRCPYGSFAFAMLQWTGSRMFRRDLRWYATDEKNMMLDNHSLYDLTKGIFLPAKSEEEIFAHLGLEYLEPFERNA

SEQ ID NO: 3225 - DNA, 1587 bp, synthetic construct
  misc_feature 1..1587: note = Variant of terminal deoxynucleotidyltransferase
  source 1..1587: mol_type = other DNA
atgcaccatcatcatcatcatggcggtagcggcagccacggcattcgtaccatcgattcggacttcgggaagaaacagcagaaaaaaggcgataaccacgatagttccgccacttatgaaatcaaatttcacgagtttgtgctgttcattctcgaagaaaaaatgggtgcgacgcgtcgtacttttctgacagatttagcccgcaagaaagggttccgcgtcgagaatgaactgaccgacgaagttacccacatcgtggcagaaaatctgtcacgctctgaagtattggcttggctgaaagaacacaagatggagaagaccaagcaattcgaactgctggatattagctggcttatcgaaagcatgaaagttggtaaaccggtggacaccaaggggaaataccagttggcggaatcggttgaggtgagtgcgaacccagatccgacagaaggtcgtgtaaacgagctgcctcctactatgaaaaccgtttctccgtatgcgtgtcaacgccgcaccaccctgaacaaccgtaatcaacgttttacggactcgctggaaattcttcgtgaaaattacgagttcaaacgcaacgatgatactgcgctggaatttcgtcgtgctatctccgtgctgaaaagccttccgtttgaggtacgtagcctgaaagacacggaaggattgccctggatcggtgatgaagtcaaagggattatggaagaaatcatcgaagtcggggagtcgcgtgaagtgcaggccgtgctcaatgatgagtggtatcaaagcttccacgcatttacgagtgtctttggagtgggggtgaagacagcagacaagtggtaccgtatgggtctgcgcaccctcgaggatgttcgttccagcaagaccctgaagttgaccccgatgcagaaagtaggtctgctgtattatgaagatcttgctcgcggcgttacgcgtgccgaagctgacgcgatttggctgctggttcaggatgcagtcgcaactttcgacccggatgcgatcgtggagattgtcggtggatttcgtcgtgggaaacctcagggtcacgacgttgatctgcttatcagttctccgggagctgagaaagagcaagaagaccaactcctgcagaaagtgatgaatctgtggaagaaacaagggttgttgctgtacggtcgtctggaatggacccagtgggaagatgggggttcgccttccggtaaggctgacgagggtgacgcggaggcgaaatgctttctgatcctcaaactttatgatcatctggtgcgtaaaagtaaatggaatatgccgactggttcgaacatgggcgagtccaaaccgtggaaagcaattcgcgtagatctgctgcgttgcccctatggcagttttgcgtttgcgatgttgcagtggaccggaagccgcatgttccgtcgtgatctgcgttggtacgccactgacgagaagaacatgatgctggacaatcattcgctgtatgacatgacccgcggcatcttcctccctgctaaatcggaagaggaaattttcgaacatctggggcttgactacctggaaccgttcgaacgtaacgca

SEQ ID NO: 3226 - protein, 529 aa, synthetic construct
  REGION 1..529: note = Variant of terminal deoxynucleotidyltransferase
MHHHHHHGGSGSHGIRTIDSDFGKKQQKKGDNHDSSATYEIKFHEFVLFILEEKMGATRRTFLTDLARKKGFRVENELTDEVTHIVAENLSRSEVLAWLKEHKMEKTKQFELLDISWLIESMKVGKPVDTKGKYQLAESVEVSANPDPTEGRVNELPPTMKTVSPYACQRRTTLNNRNQRFTDSLEILRENYEFKRNDDTALEFRRAISVLKSLPFEVRSLKDTEGLPWIGDEVKGIMEEIIEVGESREVQAVLNDEWYQSFHAFTSVFGVGVKTADKWYRMGLRTLEDVRSSKTLKLTPMQKVGLLYYEDLARGVTRAEADAIWLLVQDAVATFDPDAIVEIVGGFRRGKPQGHDVDLLISSPGAEKEQEDQLLQKVMNLWKKQGLLLYGRLEWTQWEDGGSPSGKADEGDAEAKCFLILKLYDHLVRKSKWNMPTGSNMGESKPWKAIRVDLLRCPYGSFAFAMLQWTGSRMFRRDLRWYATDEKNMMLDNHSLYDMTRGIFLPAKSEEEIFEHLGLDYLEPFERNA

SEQ ID NO: 3227 - DNA, 1587 bp, synthetic construct
  misc_feature 1..1587: note = Variant of terminal deoxynucleotidyltransferase
  source 1..1587: mol_type = other DNA
atgcaccatcatcatcatcatggcggtagcggcagccacggcattcgtaccatcgattcggacttcgggaagaaacagcagaaaaaaggcgataaccacgatagttccgccacttatgaaatcaaatttcacgagtttgtgctgttcattctcgaagaaaaaatgggtgcgacgcgtcgtacttttctgacagatttagcccgcaagaaagggttccgcgtcgagaatgaactgaccgacgaagttacccacatcgtggcagaaaatctgtcacgctctgaagtattggcttggctgaaagaacacaagatggagaagaccaagcaattcgaactgctggatattagctggcttatcgaaagcatgaaagttggtaaaccggtggacaccaaggggaaataccagttggcggaatcggttgaggtgagtgcgaacccagatccgacagaaggtcgtgtaaacgagctgcctcctactatgaaaaccgtttctccgtatgcgtgtcaacgccgcaccaccctgaacaaccgtaatcaacgttttacggactcgctggaaattcttcgtgaaaattacgagttcaaacgcaacgatgatactgcgctggaatttcgtcgtgctatctccgtgctgaaaagccttccgtttgaggtacgtagcctgaaagacacggaaggattgccctggatcggtgatgaagtcaaagggattatggaagaaatcatcagtgtcggggagtcgcgtgaagtgcaggccgtgctcaatgatgagtggtatcaaagcttccaccgctttaagagtgtctttggagtgggggtgaagacagcagacaagtggtaccgtatgggtctgcgcaccctcgaggatgttcgttccagcaagaccctgaagttgaccccgatgcagaaagtaggtctgctgtattatgaagatcttgctcgcggcgttacgcgtgccgaagctgacgcgatttggctgctggttcaggatgcagtcgcaactttcgacccggatgcgatcgtggagattgtcggtggatttcgtcgtgggaaacctcagggtcacgacgttgatctgcttatcagttctccgggagctgagaaagagcaagaagaccaactcctgcagaaagtgatgaatctgtggaagaaacaagggttgttgctgtacggtcgtctggaatggagccagtgggaagatgggggttcgccttccggtaaggctgacgagggtgacgcggaggcgaaatgctttctgatcctcaaactttatgatcatctggtgcgtaaaagtaaagtaaatatgccgactggttcgaacatgggcgagtccaaaccgtggaaagcaattcgcgtagatctgctgcgttgcccctatggcagttttgcgtttgcgatgttgcagtggaccggaagccgcatgttccgtcgtgatctgcgttggtacgccactgacgagaagaacatgatgctggacaatcattcgctgtatgacctgaccaaaggcatcttcctccctgctaaatcggaagaggaaattttcgaacatctggggcttgactacctggaaccgttcgaacgtaacgca

SEQ ID NO: 3228 - protein, 529 aa, synthetic construct
  REGION 1..529: note = Variant of terminal deoxynucleotidyltransferase
MHHHHHHGGSGSHGIRTIDSDFGKKQQKKGDNHDSSATYEIKFHEFVLFILEEKMGATRRTFLTDLARKKGFRVENELTDEVTHIVAENLSRSEVLAWLKEHKMEKTKQFELLDISWLIESMKVGKPVDTKGKYQLAESVEVSANPDPTEGRVNELPPTMKTVSPYACQRRTTLNNRNQRFTDSLEILRENYEFKRNDDTALEFRRAISVLKSLPFEVRSLKDTEGLPWIGDEVKGIMEEIISVGESREVQAVLNDEWYQSFHRFKSVFGVGVKTADKWYRMGLRTLEDVRSSKTLKLTPMQKVGLLYYEDLARGVTRAEADAIWLLVQDAVATFDPDAIVEIVGGFRRGKPQGHDVDLLISSPGAEKEQEDQLLQKVMNLWKKQGLLLYGRLEWSQWEDGGSPSGKADEGDAEAKCFLILKLYDHLVRKSKVNMPTGSNMGESKPWKAIRVDLLRCPYGSFAFAMLQWTGSRMFRRDLRWYATDEKNMMLDNHSLYDLTKGIFLPAKSEEEIFEHLGLDYLEPFERNA

SEQ ID NO: 3229 - DNA, 1587 bp, synthetic construct
  misc_feature 1..1587: note = Variant of terminal deoxynucleotidyltransferase
  source 1..1587: mol_type = other DNA
atgcaccatcatcatcatcatggcggtagcggcagccacggcattcgtaccatcgattcggacttcgggaagaaacagcagaaaaaaggcgataaccacgatagttccgccacttatgaaatcaaatttcacgagtttgtgctgttcattctcgaagaaaaaatgggtgcgacgcgtcgtacttttctgacagatttagcccgcaagaaagggttccgcgtcgagaatgaactgaccgacgaagttacccacatcgtggcagaaaatctgtcacgctctgaagtattggcttggctgaaagaacacaagatggagaagaccaagcaattcgaactgctggatattagctggcttatcgaaagcatgaaagttggtaaaccggtggacaccaaggggaaataccagttggcggaatcggttgaggtgagtgcgaacccagatccgacagaaggtcgtgtaaacgagctgcctcctactatgaaaaccgtttctccgtatgcgtgtcaacgccgcaccaccctgaacaaccgtaatcaacgttttacggactcgctggaaattcttcgtgaaaattacgagttcaaacgcaacgaggatactgcgctggaatttcgtcgtgctatctccgtgctgaaaagccttccgtttgaggtacgtagcctgaaagacacggaaggattgccctggatcggtgatgaagtcaaagggattatggaagaaatcatcgaagtcggggagtcgcgtgaagtgcaggccgtgctcaatgatgagtggtatcaaagcttccacgcatttaagagtgtctttggagtgggggtgaagacagcagacaagtggtaccgtatgggtctgcgcaccctcgaggatgttcgttccagcaagaccctgaagttgaccccgatgcagaaagtaggtctgctgtattatgaagatcttgctcgcggcgttacgcgtgccgaagctgacgcgatttggctgctggttcaggatgcagtcgcaactttcgacccggatgcgatcgtggagattgtcggtggatttcgtcgtgggaaacctcagggtcacgacgttgatctgcttatcagttctccgggagctgagaaagagcaagaagaccaactcctgcagaaagtgatgaatctgtggaagaaacaagggttgttgctgtacggtcgtctggaatggagccagtgggaagatgggggttcgccttccggtaaggctgacgagggtgacgcggaggcgaaatgctttctgatcctcaaactttatgatcatctggtgcgtaaaagtaaagtaaatatgccgactggttcgaacatgggcgagtccaaaccgtggaaagcaattcgcgtagatctgctgcgttgcccctatggcagttttgcgtttgcgatgttgcagtggaccggaagccgcatgttccgtcgtgatctgcgttggtacgccactgacgagaagaacatgatgctggacaatcattcgctgtatgacctgaccaagggtatcttcctccctgctaaatcggaagaggaaattttcgaacatctggggcttgaatacctggaaccgttcgaacgtaacgca

SEQ ID NO: 3230 - protein, 529 aa, synthetic construct
  REGION 1..529: note = Variant of terminal deoxynucleotidyltransferase
MHHHHHHGGSGSHGIRTIDSDFGKKQQKKGDNHDSSATYEIKFHEFVLFILEEKMGATRRTFLTDLARKKGFRVENELTDEVTHIVAENLSRSEVLAWLKEHKMEKTKQFELLDISWLIESMKVGKPVDTKGKYQLAESVEVSANPDPTEGRVNELPPTMKTVSPYACQRRTTLNNRNQRFTDSLEILRENYEFKRNEDTALEFRRAISVLKSLPFEVRSLKDTEGLPWIGDEVKGIMEEIIEVGESREVQAVLNDEWYQSFHAFKSVFGVGVKTADKWYRMGLRTLEDVRSSKTLKLTPMQKVGLLYYEDLARGVTRAEADAIWLLVQDAVATFDPDAIVEIVGGFRRGKPQGHDVDLLISSPGAEKEQEDQLLQKVMNLWKKQGLLLYGRLEWSQWEDGGSPSGKADEGDAEAKCFLILKLYDHLVRKSKVNMPTGSNMGESKPWKAIRVDLLRCPYGSFAFAMLQWTGSRMFRRDLRWYATDEKNMMLDNHSLYDLTKGIFLPAKSEEEIFEHLGLEYLEPFERNA

SEQ ID NO: 3231 - DNA, 1587 bp, synthetic construct
  misc_feature 1..1587: note = Variant of terminal deoxynucleotidyltransferase
  source 1..1587: mol_type = other DNA
atgcaccatcatcatcatcatggcggtagcggcagccacggcattcgtaccatcgattcggacttcgggaagaaacagcagaaaaaaggcgataaccacgatagttccgccacttatgaaatcaaatttcacgagtttgtgctgttcattctcgaagaaaaaatgggtgcgacgcgtcgtacttttctgacagatttagcccgcaagaaagggttccgcgtcgagaatgaactgaccgacgaagttacccacatcgtggcagaaaatctgtcacgctctgaagtattggcttggctgaaagaacacaagatggagaagaccaagcaattcgaactgctggatattagctggcttatcgaaagcatgaaagttggtaaaccggtggacaccaaggggaaataccagttggcggaatcggttgaggtgagtgcgaacccagatccgacagaaggtcgtgtaaacgagctgcctcctactatgaaaaccgtttctccgtatgcgtgtcaacgccgcaccaccctgaacaaccgtaatcaacgttttacggactcgctggaaattcttcgtgaaaattacgagttcaaacgcaacgaggatactgcgctggaatttcgtcgtgctatctccgtgctgaaaagccttccgtttgaggtacgtagcctgaaagacacggaaggattgccctggatcggtgatgaagtcaaagggattatggaagaaatcatcagtgtcggggagtcgcgtgaagtgcaggccgtgctcaatgatgagtggtatcaaagcttccaccgttttaagagtgtctttggagtgggggtgaagacagcagacaagtggtaccgtatgggtctgcgcaccctcgaggatgttcgttccagcaagaccctgaagttgaccccgatgcagaaagtaggtctgctgtattatgaagatcttgctcgcggcgttacgcgtgccgaagctgacgcgatttggctgctggttcaggatgcagtcgcaactttcgacccggatgcgatcgtggagattgtcggtggatttcgtcgtgggaaacctcagggtcacgacgttgatctgcttatcagttctccgggagctgagaaagagcaagaagaccaactcctgcagaaagtgatgaatctgtggaagaaacaagggttgttgctgtacggtcgtctggaatggagccagtgggaagatgggggttcgccttccggtaaggctgacgagggtgacgcggaggcgaaatgctttctgatcctcaaactttatgatcatctggtgcgtaaacgtaaagtaaatatgccgactggttcgaacatgggcgagtccaaaccgtggaaagcaattcgcgtagatctgctgcgttgcccctatggcagttttgcgtttgcgatgttgcagtggaccggaagccgcatgttccgtcgtgatctgcgttggtacgccactgacgagaagaacatgatgctggacaatcattcgctgtatgacatgaccaaaggcatcttcctccctgctaaatcggaagaggaaattttcgcacatctggggcttgaatacctggaaccgttcgaacgtaacgca

SEQ ID NO: 3232 - protein, 529 aa, synthetic construct
  REGION 1..529: note = Variant of terminal deoxynucleotidyltransferase
MHHHHHHGGSGSHGIRTIDSDFGKKQQKKGDNHDSSATYEIKFHEFVLFILEEKMGATRRTFLTDLARKKGFRVENELTDEVTHIVAENLSRSEVLAWLKEHKMEKTKQFELLDISWLIESMKVGKPVDTKGKYQLAESVEVSANPDPTEGRVNELPPTMKTVSPYACQRRTTLNNRNQRFTDSLEILRENYEFKRNEDTALEFRRAISVLKSLPFEVRSLKDTEGLPWIGDEVKGIMEEIISVGESREVQAVLNDEWYQSFHRFKSVFGVGVKTADKWYRMGLRTLEDVRSSKTLKLTPMQKVGLLYYEDLARGVTRAEADAIWLLVQDAVATFDPDAIVEIVGGFRRGKPQGHDVDLLISSPGAEKEQEDQLLQKVMNLWKKQGLLLYGRLEWSQWEDGGSPSGKADEGDAEAKCFLILKLYDHLVRKRKVNMPTGSNMGESKPWKAIRVDLLRCPYGSFAFAMLQWTGSRMFRRDLRWYATDEKNMMLDNHSLYDMTKGIFLPAKSEEEIFAHLGLEYLEPFERNA

SEQ ID NO: 3233 - DNA, 1587 bp, synthetic construct
  misc_feature 1..1587: note = Variant of terminal deoxynucleotidyltransferase
  source 1..1587: mol_type = other DNA
atgcaccatcatcatcatcatggcggtagcggcagccacggcattcgtaccatcgattcggacttcgggaagaaacagcagaaaaaaggcgataaccacgatagttccgccacttatgaaatcaaatttcacgagtttgtgctgttcattctcgaagaaaaaatgggtgcgacgcgtcgtacttttctgacagatttagcccgcaagaaagggttccgcgtcgagaatgaactgaccgacgaagttacccacatcgtggcagaaaatctgtcacgctctgaagtattggcttggctgaaagaacacaagatggagaagaccaagcaattcgaactgctggatattagctggcttatcgaaagcatgaaagttggtaaaccggtggacaccaaggggaaataccagttggcggaatcggttgaggtgagtgcgaacccagatccgacagaaggtcgtgtaaacgagctgcctcctactatgaaaaccgtttctccgtatgcgtgtcaacgccgcaccaccctgaacaaccgtaatcaacgttttacggactcgctggaaattcttcgtgaaaattacgagttcaaacgcaacgatgatactgcgctggaatttcgtcgtgctatctccgtgctgaaaagccttccgtttgaggtacgtagcctgaaagacacggaaggattgccctggatcggtgatgaagtcaaagggattatggaagaaatcatcgaggtcggggagtcgcgtgaagtgcaggccgtgctcaatgatgagtggtatcaaagcttccaccgttttaagagtgtctttggagtgggggtgaagacagcagacaagtggtaccgtatgggtctgcgcaccctcgaggatgttcgttccagcaagaccctgaagttgaccccgatgcagaaagtaggtctgctgtattatgaagatcttgctcgcggcgttacgcgtgccgaagctgacgcgatttggctgctggttcaggatgcagtcgcaactttcgacccggatgcgatcgtggagattgtcggtggatttcgtcgtgggaaacctcagggtcacgacgttgatctgcttatcagttctccgggagctgagaaagagcaagaagaccaactcctgcagaaagtgatgaatctgtggaagaaacaagggttgttgctgtacggtcgtctggaatggagccagtgggaagatgggggttcgccttccggtaaggctgacgagggtgacgcggaggcgaaatgctttctgatcctcaaactttatgatcatctggtgcgtaaaagtaaatggaatatgccgactggttcgaacatgggcgagtccaaaccgtggaaagcaattcgcgtagatctgctgcgttgcccctatggcagttttgcgtttgcgatgttgcagtggaccggaagccgcatgttccgtcgtgatctgcgttggtacgccactgacgagaagaacatgatgctggacaatcattcgctgtatgacctgaccaaaggcatcttcctccctgctaaatcggaagaggaaattttcgaacatctggggcttgaatacctggaaccgttcgaacgtaacgca

SEQ ID NO: 3234 - protein, 529 aa, synthetic construct
  REGION 1..529: note = Variant of terminal deoxynucleotidyltransferase
MHHHHHHGGSGSHGIRTIDSDFGKKQQKKGDNHDSSATYEIKFHEFVLFILEEKMGATRRTFLTDLARKKGFRVENELTDEVTHIVAENLSRSEVLAWLKEHKMEKTKQFELLDISWLIESMKVGKPVDTKGKYQLAESVEVSANPDPTEGRVNELPPTMKTVSPYACQRRTTLNNRNQRFTDSLEILRENYEFKRNDDTALEFRRAISVLKSLPFEVRSLKDTEGLPWIGDEVKGIMEEIIEVGESREVQAVLNDEWYQSFHRFKSVFGVGVKTADKWYRMGLRTLEDVRSSKTLKLTPMQKVGLLYYEDLARGVTRAEADAIWLLVQDAVATFDPDAIVEIVGGFRRGKPQGHDVDLLISSPGAEKEQEDQLLQKVMNLWKKQGLLLYGRLEWSQWEDGGSPSGKADEGDAEAKCFLILKLYDHLVRKSKWNMPTGSNMGESKPWKAIRVDLLRCPYGSFAFAMLQWTGSRMFRRDLRWYATDEKNMMLDNHSLYDLTKGIFLPAKSEEEIFEHLGLEYLEPFERNA

SEQ ID NO: 3235 - DNA, 1587 bp, synthetic construct
  misc_feature 1..1587: note = Variant of terminal deoxynucleotidyltransferase
  source 1..1587: mol_type = other DNA
atgcaccatcatcatcatcatggcggtagcggcagccacggcattcgtaccatcgattcggacttcgggaagaaacagcagaaaaaaggcgataaccacgatagttccgccacttatgaaatcaaatttcacgagtttgtgctgttcattctcgaagaaaaaatgggtgcgacgcgtcgtacttttctgacagatttagcccgcaagaaagggttccgcgtcgagaatgaactgaccgacgaagttacccacatcgtggcagaaaatctgtcacgctctgaagtattggcttggctgaaagaacacaagatggagaagaccaagcaattcgaactgctggatattagctggcttatcgaaagcatgaaagttggtaaaccggtggacaccaaggggaaataccagttggcggaatcggttgaggtgagtgcgaacccagatccgacagaaggtcgtgtaaacgagctgcctcctactatgaaaaccgtttctccgtatgcgtgtcaacgccgcaccaccctgaacaaccgtaatcaacgttttacggactcgctggaaattcttcgtgaaaattacgagttcaaacgcaacgaggatactgcgctggaatttcgtcgtgctatctccgtgctgaaaagccttccgtttgaggtacgtagcctgaaagacacggaaggattgccctggatcggtgatgaagtcaaagggattatggaagaaatcatcagtgtcggggagtcgcgtgaagtgcaggccgtgctcaatgatgagtggtatcaaagcttccaccgctttaagagtgtctttggagtgggggtgaagacagcagacaagtggtaccgtatgggtctgcgcaccctcgaggatgttcgttccagcaagaccctgaagttgaccccgatgcagaaagtaggtctgctgtattatgaagatcttgctcgcggcgttacgcgtgccgaagctgacgcgatttggctgctggttcaggatgcagtcgcaactttcgacccggatgcgatcgtggagattgtcggtggatttcgtcgtgggaaacctcagggtcacgacgttgatctgcttatcagttctccgggagctgagaaagagcaagaagaccaactcctgcagaaagtgatgaatctgtggaagaaacaagggttgttgctgtacggtcgtctggaatggagccagtgggaagatgggggttcgccttccggtaaggctgacgagggtgacgcggaggcgaaatgctttctgatcctcaaactttatgatcatctggtgcgtaaaagtaaacgcaatatgccgcgcggttcgaacatgggcgagtccaaaccgtggaaagcaattcgcgtagatctgctgcgttgcccctatggcagttttgcgtttgcgatgttgcagtggaccggaagccgcatgttccgtcgtgatctgcgttggtacgccactgacgagaagaacatgatgctggacaatcattcgctgtatgacctgaccaagggtatcttcctccctgctaaatcggaagaggaaattttcgaacatctggggcttgaatacctggaaccgttcgaacgtaacgca

SEQ ID NO: 3236 - protein, 529 aa, synthetic construct
  REGION 1..529: note = Variant of terminal deoxynucleotidyltransferase
MHHHHHHGGSGSHGIRTIDSDFGKKQQKKGDNHDSSATYEIKFHEFVLFILEEKMGATRRTFLTDLARKKGFRVENELTDEVTHIVAENLSRSEVLAWLKEHKMEKTKQFELLDISWLIESMKVGKPVDTKGKYQLAESVEVSANPDPTEGRVNELPPTMKTVSPYACQRRTTLNNRNQRFTDSLEILRENYEFKRNEDTALEFRRAISVLKSLPFEVRSLKDTEGLPWIGDEVKGIMEEIISVGESREVQAVLNDEWYQSFHRFKSVFGVGVKTADKWYRMGLRTLEDVRSSKTLKLTPMQKVGLLYYEDLARGVTRAEADAIWLLVQDAVATFDPDAIVEIVGGFRRGKPQGHDVDLLISSPGAEKEQEDQLLQKVMNLWKKQGLLLYGRLEWSQWEDGGSPSGKADEGDAEAKCFLILKLYDHLVRKSKRNMPRGSNMGESKPWKAIRVDLLRCPYGSFAFAMLQWTGSRMFRRDLRWYATDEKNMMLDNHSLYDLTKGIFLPAKSEEEIFEHLGLEYLEPFERNA

SEQ ID NO: 3237 - DNA, 1587 bp, synthetic construct
  misc_feature 1..1587: note = Variant of terminal deoxynucleotidyltransferase
  source 1..1587: mol_type = other DNA
atgcaccatcatcatcatcatggcggtagcggcagccacggcattcgtaccatcgattcggacttcgggaagaaacagcagaaaaaaggcgataaccacgatagttccgccacttatgaaatcaaatttcacgagtttgtgctgttcattctcgaagaaaaaatgggtgcgacgcgtcgtacttttctgacagatttagcccgcaagaaagggttccgcgtcgagaatgaactgaccgacgaagttacccacatcgtggcagaaaatctgtcacgctctgaagtattggcttggctgaaagaacacaagatggagaagaccaagcaattcgaactgctggatattagctggcttatcgaaagcatgaaagttggtaaaccggtggacaccaaggggaaataccagttggcggaatcggttgaggtgagtgcgaacccagatccgacagaaggtcgtgtaaacgagctgcctcctactatgaaaaccgtttctccgtatgcgtgtcaacgccgcaccaccctgaacaaccgtaatcaacgttttacggactcgctggaaattcttcgtgaaaattacgagttcaaacgcaacgaggatactgcgctggaatttcgtcgtgctatctccgtgctgaaaagccttccgtttgaggtacgtagcctgaaagacacggaaggattgccctggatcggtgatgaagtcaaagggattatggaagaaatcatcgaagtcggggagtcgcgtgaagtgcaggccgtgctcaatgatgagtggtatcaaagcttccaccgttttacgagtgtctttggagtgggggtgaagacagcagacaagtggtaccgtatgggtctgcgcaccctcgaggatgttcgttccagcaagaccctgaagttgaccccgatgcagaaagtaggtctgctgtattatgaagatcttgctcgcggcgttacgcgtgccgaagctgacgcgatttggctgctggttcaggatgcagtcgcaactttcgacccggatgcgatcgtggagattgtcggtggatttcgtcgtgggaaacctcagggtcacgacgttgatctgcttatcagttctccgggagctgagaaagagcaagaagaccaactcctgcagaaagtgatgaatctgtggaagaaacaagggttgttgctgtacggtcgtctggaatggacccagtgggaagatgggggttcgccttccggtaaggctgacgagggtgacgcggaggcgaaatgctttctgatcctcaaactttatgatcatctggtgcgtaaaagtaaaagcaatatgccgactggttcgaacatgggcgagtccaaaccgtggaaagcaattcgcgtagatctgctgcgttgcccctatggcagttttgcgtttgcgatgttgcagtggaccggaagccgcatgttccgtcgtgatctgcgttggtacgccactgacgagaagaacatgatgctggacaatcattcgctgtatgacctgaccaaaggcatcttcctccctgctaaatcggaagaggaaattttcgaacatctggggcttgaatacctggaaccgttcgaacgtaacgca

SEQ ID NO: 3238 - protein, 529 aa, synthetic construct
  REGION 1..529: note = Variant of terminal deoxynucleotidyltransferase
MHHHHHHGGSGSHGIRTIDSDFGKKQQKKGDNHDSSATYEIKFHEFVLFILEEKMGATRRTFLTDLARKKGFRVENELTDEVTHIVAENLSRSEVLAWLKEHKMEKTKQFELLDISWLIESMKVGKPVDTKGKYQLAESVEVSANPDPTEGRVNELPPTMKTVSPYACQRRTTLNNRNQRFTDSLEILRENYEFKRNEDTALEFRRAISVLKSLPFEVRSLKDTEGLPWIGDEVKGIMEEIIEVGESREVQAVLNDEWYQSFHRFTSVFGVGVKTADKWYRMGLRTLEDVRSSKTLKLTPMQKVGLLYYEDLARGVTRAEADAIWLLVQDAVATFDPDAIVEIVGGFRRGKPQGHDVDLLISSPGAEKEQEDQLLQKVMNLWKKQGLLLYGRLEWTQWEDGGSPSGKADEGDAEAKCFLILKLYDHLVRKSKSNMPTGSNMGESKPWKAIRVDLLRCPYGSFAFAMLQWTGSRMFRRDLRWYATDEKNMMLDNHSLYDLTKGIFLPAKSEEEIFEHLGLEYLEPFERNA

SEQ ID NO: 3239 - DNA, 1587 bp, synthetic construct
  misc_feature 1..1587: note = Variant of terminal deoxynucleotidyltransferase
  source 1..1587: mol_type = other DNA
atgcaccatcatcatcatcatggcggtagcggcagccacggcattcgtaccatcgattcggacttcgggaagaaacagcagaaaaaaggcgataaccacgatagttccgccacttatgaaatcaaatttcacgagtttgtgctgttcattctcgaagaaaaaatgggtgcgacgcgtcgtacttttctgacagatttagcccgcaagaaagggttccgcgtcgagaatgaactgaccgacgaagttacccacatcgtggcagaaaatctgtcacgctctgaagtattggcttggctgaaagaacacaagatggagaagaccaagcaattcgaactgctggatattagctggcttatcgaaagcatgaaagttggtaaaccggtggacaccaaggggaaataccagttggcggaatcggttgaggtgagtgcgaacccagatccgacagaaggtcgtgtaaacgagctgcctcctactatgaaaaccgtttctccgtatgcgtgtcaacgccgcaccaccctgaacaaccgtaatcaacgttttacggactcgctggaaattcttcgtgaaaattacgagttcaaacgcaacgaggatactgcgctggaatttcgtcgtgctatctccgtgctgaaaagccttccgtttgaggtacgtagcctgaaagacacggaaggattgccctggatcggtgatgaagtcaaagggattatggaagaaatcatcgaagtcggggagtcgcgtgaagtgcaggccgtgctcaatgatgagtggtatcaaagcttccaccgctttaagagtgtctttggagtgggggtgaagacagcagacaagtggtaccgtatgggtctgcgcaccctcgaggatgttcgttccagcaagaccctgaagttgaccccgatgcagaaagtaggtctgctgtattatgaagatcttgctcgcggcgttacgcgtgccgaagctgacgcgatttggctgctggttcaggatgcagtcgcaactttcgacccggatgcgatcgtggagattgtcggtggatttcgtcgtgggaaacctcagggtcacgacgttgatctgcttatcagttctccgggagctgagaaagagcaagaagaccaactcctgcagaaagtgatgaatctgtggaagaaacaagggttgttgctgtacggtcgtctggaatggacccagtgggaagatgggggttcgccttccggtaaggctgacgagggtgacgcggaggcgaaatgctttctgatcctcaaactttatgatcatctggtgcgtaaaagtaaagtaaatatgccgactggttcgaacatgggcgagtccaaaccgtggaaagcaattcgcgtagatctgctgcgttgcccctatggcagttttgcgtttgcgatgttgcagtggaccggaagccgcatgttccgtcgtgatctgcgttggtacgccactgacgagaagaacatgatgctggacaatcattcgctgtatgacctgaccaagggtatcttcctccctgctaaatcggaagaggaaattttcgaacatctggggcttgactacctggaaccgttcgaacgtaacgca

SEQ ID NO: 3240 - protein, 529 aa, synthetic construct
  REGION 1..529: note = Variant of terminal deoxynucleotidyltransferase
MHHHHHHGGSGSHGIRTIDSDFGKKQQKKGDNHDSSATYEIKFHEFVLFILEEKMGATRRTFLTDLARKKGFRVENELTDEVTHIVAENLSRSEVLAWLKEHKMEKTKQFELLDISWLIESMKVGKPVDTKGKYQLAESVEVSANPDPTEGRVNELPPTMKTVSPYACQRRTTLNNRNQRFTDSLEILRENYEFKRNEDTALEFRRAISVLKSLPFEVRSLKDTEGLPWIGDEVKGIMEEIIEVGESREVQAVLNDEWYQSFHRFKSVFGVGVKTADKWYRMGLRTLEDVRSSKTLKLTPMQKVGLLYYEDLARGVTRAEADAIWLLVQDAVATFDPDAIVEIVGGFRRGKPQGHDVDLLISSPGAEKEQEDQLLQKVMNLWKKQGLLLYGRLEWTQWEDGGSPSGKADEGDAEAKCFLILKLYDHLVRKSKVNMPTGSNMGESKPWKAIRVDLLRCPYGSFAFAMLQWTGSRMFRRDLRWYATDEKNMMLDNHSLYDLTKGIFLPAKSEEEIFEHLGLDYLEPFERNA

SEQ ID NO: 3241 - DNA, 1587 bp, synthetic construct
  misc_feature 1..1587: note = Variant of terminal deoxynucleotidyltransferase
  source 1..1587: mol_type = other DNA
atgcaccatcatcatcatcatggcggtagcggcagccacggcattcgtaccatcgattcggacttcgggaagaaacagcagaaaaaaggcgataaccacgatagttccgccacttatgaaatcaaatttcacgagtttgtgctgttcattctcgaagaaaaaatgggtgcgacgcgtcgtacttttctgacagatttagcccgcaagaaagggttccgcgtcgagaatgaactgaccgacgaagttacccacatcgtggcagaaaatctgtcacgctctgaagtattggcttggctgaaagaacacaagatggagaagaccaagcaattcgaactgctggatattagctggcttatcgaaagcatgaaagttggtaaaccggtggacaccaaggggaaataccagttggcggaatcggttgaggtgagtgcgaacccagatccgacagaaggtcgtgtaaacgagctgcctcctactatgaaaaccgtttctccgtatgcgtgtcaacgccgcaccaccctgaacaaccgtaatcaacgttttacggactcgctggacattctgcgtgaaaattacgagttcaaacgcaacgatgatactgcgctggaatttcgtcgtgctatctccgtgctgaaaagccttccgtttgaggtacgtagcctgaaagacacggaaggattgccctggatcagcgatgaagtcaaagggattatggaagaaatcatcgaggtcggggagtcgaaggaagtgcaggccgttctcaatgatgagtggtatcaaagcttccaccgctttaagagtgtctttggagtgggggtgaagacagcagacaagtggtaccgtatgggtctgcgcaccctcgaggatgttcgttccagcaagaccctgaagttgaccccgatgcagaaagtaggtctgctgtattatgaagatcttgctcgcggcgttacgcgtgccgaagctgacgcgatttggctgctggttcaggatgcagtcgcaactttcgacccggatgcgatcgtggagattgtcggtggatttcgtcgtgggaaacctcagggtcacgacgttgatctgcttatcagttctccgggagctgagaaagagcaagaagaccagctcctgcagaaagtgatgaatctgtggaagaaacaagggttgttgctgtacggtcgtctggaatggacccagtgggaagatgggggttcgccttccggtaaggctgacgagggtgacgcgggtgcgaaatgctttctgatcctcaaactttatgatcatctggtgcgtaaaagcaaatggaacatgccgacgggttcgaacgtgggcgagtccaaaccgtggaaagcaattcgcgtagatctgctgcgttgcccctatggcagttttgcgtttgcgatgttgcagtggaccggaagccgcatgttccgtcgtgatctgcgttggtacgccctggatgagaagaacatgatgctggacaatcattcgctgtatgacctgaccaagggtatcttcctccctgctaaatcggaagaggaaattttcgcacatctggggcttgaatacctggaaccgttcgaacgtaacgca

SEQ ID NO: 3242 - protein, 529 aa, synthetic construct
  REGION 1..529: note = Variant of terminal deoxynucleotidyltransferase
MHHHHHHGGSGSHGIRTIDSDFGKKQQKKGDNHDSSATYEIKFHEFVLFILEEKMGATRRTFLTDLARKKGFRVENELTDEVTHIVAENLSRSEVLAWLKEHKMEKTKQFELLDISWLIESMKVGKPVDTKGKYQLAESVEVSANPDPTEGRVNELPPTMKTVSPYACQRRTTLNNRNQRFTDSLDILRENYEFKRNDDTALEFRRAISVLKSLPFEVRSLKDTEGLPWISDEVKGIMEEIIEVGESKEVQAVLNDEWYQSFHRFKSVFGVGVKTADKWYRMGLRTLEDVRSSKTLKLTPMQKVGLLYYEDLARGVTRAEADAIWLLVQDAVATFDPDAIVEIVGGFRRGKPQGHDVDLLISSPGAEKEQEDQLLQKVMNLWKKQGLLLYGRLEWTQWEDGGSPSGKADEGDAGAKCFLILKLYDHLVRKSKWNMPTGSNVGESKPWKAIRVDLLRCPYGSFAFAMLQWTGSRMFRRDLRWYALDEKNMMLDNHSLYDLTKGIFLPAKSEEEIFAHLGLEYLEPFERNA

SEQ ID NO: 3243 - DNA, 1587 bp, synthetic construct
  misc_feature 1..1587: note = Variant of terminal deoxynucleotidyltransferase
  source 1..1587: mol_type = other DNA
atgcaccatcatcatcatcatggcggtagcggcagccacggcattcgtaccatcgattcggacttcgggaagaaacagcagaaaaaaggcgataaccacgatagttccgccacttatgaaatcaaatttcacgagtttgtgctgttcattctcgaagaaaaaatgggtgcgacgcgtcgtacttttctgacagatttagcccgcaagaaagggttccgcgtcgagaatgaactgaccgacgaagttacccacatcgtggcagaaaatctgtcacgctctgaagtattggcttggctgaaagaacacaagatggagaagaccaagcaattcgaactgctggatattagctggcttatcgaaagcatgaaagttggtaaaccggtggacaccaaggggaaataccagttggcggaatcggttgaggtgagtgcgaacccagatccgacagaaggtcgtgtaaacgagctgcctcctactatgaaaaccgtttctccgtatgcgtgtcaacgccgcaccaccctgaacaaccgtaatcaacgttttacggactcgctggaaattcttcgtgaaaattacgagttcaaacgcaacgatgatactgcgctggaatttcgtcgtgctatctccgtgctgaaaagccttccgtttgaggtacgtagcctgaaagacacggaaggattgccctggatcggtgatgaagtcaaagggattatggaagaaatcatcgaagtcggggagtcgcgtgaagtgcaggccgtgctcaatgatgagtggtatcaaagcttccaccgctttaagagtgtctttggagtgggggtgaagacagcagacaagtggtaccgtatgggtctgcgcaccctcgaggatgttcgttccagcaagaccctgaagttgaccccgatgcagaaagtaggtctgctgtattatgaagatcttgctcgcggcgttacgcgtgccgaagctgacgcgatttggctgctggttcaggatgcagtcgcaactttcgacccggatgcgatcgtggagattgtcggtggatttcgtcgtgggaaacctcagggtcacgacgttgatctgcttatcagttctccgggagctgagaaagagcaagaagaccaactcctgcagaaagtgatgaatctgtggaagaaacaagggttgttgctgtacggtcgtctggaatggagccagtgggaagatgggggttcgccttccggtaaggctgacgagggtgacgcggaggcgaaatgctttctgatcctcaaactttatgatcatctggtgcgtaaaagtaaatggaatatgccgactggttcgaacatgggcgagtccaaaccgtggaaagcaattcgcgtagatctgctgcgttgcccctatggcagttttgcgtttgcgatgttgcagtggaccggaagccgcatgttccgtcgtgatctgcgttggtacgccactgacgagaagaacatgatgctggacaatcattcgctgtatgacctgaccaagggtatcttcctccctgctaaatcggaagaggaaattttcgcacatctggggcttgaatacctggaaccgttcgaacgtaacgca

SEQ ID NO: 3244 - protein, 529 aa, synthetic construct
  REGION 1..529: note = Variant of terminal deoxynucleotidyltransferase
MHHHHHHGGSGSHGIRTIDSDFGKKQQKKGDNHDSSATYEIKFHEFVLFILEEKMGATRRTFLTDLARKKGFRVENELTDEVTHIVAENLSRSEVLAWLKEHKMEKTKQFELLDISWLIESMKVGKPVDTKGKYQLAESVEVSANPDPTEGRVNELPPTMKTVSPYACQRRTTLNNRNQRFTDSLEILRENYEFKRNDDTALEFRRAISVLKSLPFEVRSLKDTEGLPWIGDEVKGIMEEIIEVGESREVQAVLNDEWYQSFHRFKSVFGVGVKTADKWYRMGLRTLEDVRSSKTLKLTPMQKVGLLYYEDLARGVTRAEADAIWLLVQDAVATFDPDAIVEIVGGFRRGKPQGHDVDLLISSPGAEKEQEDQLLQKVMNLWKKQGLLLYGRLEWSQWEDGGSPSGKADEGDAEAKCFLILKLYDHLVRKSKWNMPTGSNMGESKPWKAIRVDLLRCPYGSFAFAMLQWTGSRMFRRDLRWYATDEKNMMLDNHSLYDLTKGIFLPAKSEEEIFAHLGLEYLEPFERNA

SEQ ID NO: 3245 - DNA, 1587 bp, synthetic construct
  misc_feature 1..1587: note = Variant of terminal deoxynucleotidyltransferase
  source 1..1587: mol_type = other DNA
atgcaccatcatcatcatcatggcggtagcggcagccacggcattcgtaccatcgattcggacttcgggaagaaacagcagaaaaaaggcgataaccacgatagttccgccacttatgaaatcaaatttcacgagtttgtgctgttcattctcgaagaaaaaatgggtgcgacgcgtcgtacttttctgacagatttagcccgcaagaaagggttccgcgtcgagaatgaactgaccgacgaagttacccacatcgtggcagaaaatctgtcacgctctgaagtattggcttggctgaaagaacacaagatggagaagaccaagcaattcgaactgctggatattagctggcttatcgaaagcatgaaagttggtaaaccggtggacaccaaggggaaataccagttggcggaatcggttgaggtgagtgcgaacccagatccgacagaaggtcgtgtaaacgagctgcctcctactatgaaaaccgtttctccgtatgcgtgtcaacgccgcaccaccctgaacaaccgtaatcaacgttttacggactcgctggaaattcttcgtgaaaattacgagttcaaacgcaacgatgatactgcgctggaatttcgtcgtgctatctccgtgctgaaaagccttccgtttgaggtacgtagcctgaaagacacggaaggattgccctggatcggtgatgaagtcaaagggattatggaagaaatcatcagtgtcggggagtcgcgtgaagtgcaggccgtgctcaatgatgagtggtatcaaagcttccaccgctttaagagtgtctttggagtgggggtgaagacagcagacaagtggtaccgtatgggtctgcgcaccctcgaggatgttcgttccagcaagaccctgaagttgaccccgatgcagaaagtaggtctgctgtattatgaagatcttgctcgcggcgttacgcgtgccgaagctgacgcgatttggctgctggttcaggatgcagtcgcaactttcgacccggatgcgatcgtggagattgtcggtggatttcgtcgtgggaaacctcagggtcacgacgttgatctgcttatcagttctccgggagctgagaaagagcaagaagaccaactcctgcagaaagtgatgaatctgtggaagaaacaagggttgttgctgtacggtcgtctggaatggacccagtgggaagatgggggttcgccttccggtaaggctgacgagggtgacgcggaggcgaaatgctttctgatcctcaaactttatgatcatctggtgcgtaaaagtaaatggaatatgccgcgcggttcgaacatgggcgagtccaaaccgtggaaagcaattcgcgtagatctgctgcgttgcccctatggcagttttgcgtttgcgatgttgcagtggaccggaagccgcatgttccgtcgtgatctgcgttggtacgccactgacgagaagaacatgatgctggacaatcattcgctgtatgacctgaccaaaggcatcttcctccctgctaaatcggaagaggaaattttcgaacatctggggcttgaatacctggaaccgttcgaacgtaacgca

SEQ ID NO: 3246 - protein, 529 aa, synthetic construct
  REGION 1..529: note = Variant of terminal deoxynucleotidyltransferase
MHHHHHHGGSGSHGIRTIDSDFGKKQQKKGDNHDSSATYEIKFHEFVLFILEEKMGATRRTFLTDLARKKGFRVENELTDEVTHIVAENLSRSEVLAWLKEHKMEKTKQFELLDISWLIESMKVGKPVDTKGKYQLAESVEVSANPDPTEGRVNELPPTMKTVSPYACQRRTTLNNRNQRFTDSLEILRENYEFKRNDDTALEFRRAISVLKSLPFEVRSLKDTEGLPWIGDEVKGIMEEIISVGESREVQAVLNDEWYQSFHRFKSVFGVGVKTADKWYRMGLRTLEDVRSSKTLKLTPMQKVGLLYYEDLARGVTRAEADAIWLLVQDAVATFDPDAIVEIVGGFRRGKPQGHDVDLLISSPGAEKEQEDQLLQKVMNLWKKQGLLLYGRLEWTQWEDGGSPSGKADEGDAEAKCFLILKLYDHLVRKSKWNMPRGSNMGESKPWKAIRVDLLRCPYGSFAFAMLQWTGSRMFRRDLRWYATDEKNMMLDNHSLYDLTKGIFLPAKSEEEIFEHLGLEYLEPFERNA

SEQ ID NO: 3247 - DNA, 1587 bp, synthetic construct
  misc_feature 1..1587: note = Variant of terminal deoxynucleotidyltransferase
  source 1..1587: mol_type = other DNA
atgcaccatcatcatcatcatggcggtagcggcagccacggcattcgtaccatcgattcggacttcgggaagaaacagcagaaaaaaggcgataaccacgatagttccgccacttatgaaatcaaatttcacgagtttgtgctgttcattctcgaagaaaaaatgggtgcgacgcgtcgtacttttctgacagatttagcccgcaagaaagggttccgcgtcgagaatgaactgaccgacgaagttacccacatcgtggcagaaaatctgtcacgctctgaagtattggcttggctgaaagaacacaagatggagaagaccaagcaattcgaactgctggatattagctggcttatcgaaagcatgaaagttggtaaaccggtggacaccaaggggaaataccagttggcggaatcggttgaggtgagtgcgaacccagatccgacagaaggtcgtgtaaacgagctgcctcctactatgaaaaccgtttctccgtatgcgtgtcaacgccgcaccaccctgaacaaccgtaatcaacgttttacggactcgctggaaattcttcgtgaaaattacgagttcaaacgcaacgaggatactgcgctggaatttcgtcgtgctatctccgtgctgaaaagccttccgtttgaggtacgtagcctgaaagacacggaaggattgccctggatcggtgatgaagtcaaagggattatggaagaaatcatcgaagtcggggagtcgcgtgaagtgcaggccgtgctcaatgatgagtggtatcaaagcttccaccgttttaagagtgtctttggagtgggggtgaagacagcagacaagtggtaccgtatgggtctgcgcaccctcgaggatgttcgttccagcaagaccctgaagttgaccccgatgcagaaagtaggtctgctgtattatgaagatcttgctcgcggcgttacgcgtgccgaagctgacgcgatttggctgctggttcaggatgcagtcgcaactttcgacccggatgcgatcgtggagattgtcggtggatttcgtcgtgggaaacctcagggtcacgacgttgatctgcttatcagttctccgggagctgagaaagagcaagaagaccaactcctgcagaaagtgatgaatctgtggaagaaacaagggttgttgctgtacggtcgtctggaatggacccagtgggaagatgggggttcgccttccggtaaggctgacgagggtgacgcggaggcgaaatgctttctgatcctcaaactttatgatcatctggtgcgtaaacgtaaatggaatatgccgactggttcgaacatgggcgagtccaaaccgtggaaagcaattcgcgtagatctgctgcgttgcccctatggcagttttgcgtttgcgatgttgcagtggaccggaagccgcatgttccgtcgtgatctgcgttggtacgccactgacgagaagaacatgatgctggacaatcattcgctgtatgacatgaccaaaggcatcttcctccctgctaaatcggaagaggaaattttcgcacatctggggcttgactacctggaaccgttcgaacgtaacgca

SEQ ID NO: 3248 - protein, 529 aa, synthetic construct
  REGION 1..529: note = Variant of terminal deoxynucleotidyltransferase
MHHHHHHGGSGSHGIRTIDSDFGKKQQKKGDNHDSSATYEIKFHEFVLFILEEKMGATRRTFLTDLARKKGFRVENELTDEVTHIVAENLSRSEVLAWLKEHKMEKTKQFELLDISWLIESMKVGKPVDTKGKYQLAESVEVSANPDPTEGRVNELPPTMKTVSPYACQRRTTLNNRNQRFTDSLEILRENYEFKRNEDTALEFRRAISVLKSLPFEVRSLKDTEGLPWIGDEVKGIMEEIIEVGESREVQAVLNDEWYQSFHRFKSVFGVGVKTADKWYRMGLRTLEDVRSSKTLKLTPMQKVGLLYYEDLARGVTRAEADAIWLLVQDAVATFDPDAIVEIVGGFRRGKPQGHDVDLLISSPGAEKEQEDQLLQKVMNLWKKQGLLLYGRLEWTQWEDGGSPSGKADEGDAEAKCFLILKLYDHLVRKRKWNMPTGSNMGESKPWKAIRVDLLRCPYGSFAFAMLQWTGSRMFRRDLRWYATDEKNMMLDNHSLYDMTKGIFLPAKSEEEIFAHLGLDYLEPFERNA

SEQ ID NO: 3249 - DNA, 1587 bp, synthetic construct
  misc_feature 1..1587: note = Variant of terminal deoxynucleotidyltransferase
  source 1..1587: mol_type = other DNA
atgcaccatcatcatcatcatggcggtagcggcagccacggcattcgtaccatcgattcggacttcgggaagaaacagcagaaaaaaggcgataaccacgatagttccgccacttatgaaatcaaatttcacgagtttgtgctgttcattctcgaagaaaaaatgggtgcgacgcgtcgtacttttctgacagatttagcccgcaagaaagggttccgcgtcgagaatgaactgaccgacgaagttacccacatcgtggcagaaaatctgtcacgctctgaagtattggcttggctgaaagaacacaagatggagaagaccaagcaattcgaactgctggatattagctggcttatcgaaagcatgaaagttggtaaaccggtggacaccaaggggaaataccagttggcggaatcggttgaggtgagtgcgaacccagatccgacagaaggtcgtgtaaacgagctgcctcctactatgaaaaccgtttctccgtatgcgtgtcaacgccgcaccaccctgaacaaccgtaatcaacgttttacggactcgctggaaattcttcgtgaaaattacgagttcaaacgcaacgatgatactgcgctggaatttcgtcgtgctatctccgtgctgaaaagccttccgtttgaggtacgtagcctgaaagacacggaaggattgccctggatcggtgatgaagtcaaagggattatggaagaaatcatcgaagtcggggagtcgcgtgaagtgcaggccgtgctcaatgatgagtggtatcaaagcttccacgcatttaagagtgtctttggagtgggggtgaagacagcagacaagtggtaccgtatgggtctgcgcaccctcgaggatgttcgttccagcaagaccctgaagttgaccccgatgcagaaagtaggtctgctgtattatgaagatcttgctcgcggcgttacgcgtgccgaagctgacgcgatttggctgctggttcaggatgcagtcgcaactttcgacccggatgcgatcgtggagattgtcggtggatttcgtcgtgggaaacctcagggtcacgacgttgatctgcttatcagttctccgggagctgagaaagagcaagaagaccaactcctgcagaaagtgatgaatctgtggaagaaacaagggttgttgctgtacggtcgtctggaatggacccagtgggaagatgggggttcgccttccggtaaggctgacgagggtgacgcggaggcgaaatgctttctgatcctcaaactttatgatcatctggtgcgtaaaagcaaatggaacatgccgacgggttcgaacgtgggcgagtccaaaccgtggaaagcaattcgcgtagatctgctgcgttgcccctatggcagttttgcgtttgcgatgttgcagtggaccggaagccgcatgttccgtcgtgatctgcgttggtacgccactgacgagaagaacatgatgctggacaatcattcgctgtatgacctgaccaagggtatcttcctccctgctaaatcggaagaggaaattttcgcacatctggggcttgaatacctggaaccgttcgaacgtaacgca

SEQ ID NO: 3250 - protein, 529 aa, synthetic construct
  REGION 1..529: note = Variant of terminal deoxynucleotidyltransferase
MHHHHHHGGSGSHGIRTIDSDFGKKQQKKGDNHDSSATYEIKFHEFVLFILEEKMGATRRTFLTDLARKKGFRVENELTDEVTHIVAENLSRSEVLAWLKEHKMEKTKQFELLDISWLIESMKVGKPVDTKGKYQLAESVEVSANPDPTEGRVNELPPTMKTVSPYACQRRTTLNNRNQRFTDSLEILRENYEFKRNDDTALEFRRAISVLKSLPFEVRSLKDTEGLPWIGDEVKGIMEEIIEVGESREVQAVLNDEWYQSFHAFKSVFGVGVKTADKWYRMGLRTLEDVRSSKTLKLTPMQKVGLLYYEDLARGVTRAEADAIWLLVQDAVATFDPDAIVEIVGGFRRGKPQGHDVDLLISSPGAEKEQEDQLLQKVMNLWKKQGLLLYGRLEWTQWEDGGSPSGKADEGDAEAKCFLILKLYDHLVRKSKWNMPTGSNVGESKPWKAIRVDLLRCPYGSFAFAMLQWTGSRMFRRDLRWYATDEKNMMLDNHSLYDLTKGIFLPAKSEEEIFAHLGLEYLEPFERNA

SEQ ID NO: 3251 - DNA, 1587 bp, synthetic construct
  misc_feature 1..1587: note = Variant of terminal deoxynucleotidyltransferase
  source 1..1587: mol_type = other DNA
atgcaccatcatcatcatcatggcggtagcggcagccacggcattcgtaccatcgattcggacttcgggaagaaacagcagaaaaaaggcgataaccacgatagttccgccacttatgaaatcaaatttcacgagtttgtgctgttcattctcgaagaaaaaatgggtgcgacgcgtcgtacttttctgacagatttagcccgcaagaaagggttccgcgtcgagaatgaactgaccgacgaagttacccacatcgtggcagaaaatctgtcacgctctgaagtattggcttggctgaaagaacacaagatggagaagaccaagcaattcgaactgctggatattagctggcttatcgaaagcatgaaagttggtaaaccggtggacaccaaggggaaataccagttggcggaatcggttgaggtgagtgcgaacccagatccgacagaaggtcgtgtaaacgagctgcctcctactatgaaaaccgtttctccgtatgcgtgtcaacgccgcaccaccctgaacaaccgtaatcaacgttttacggactcgctggacattctgcgtgaaaattacgagttcaaacgcaacgatgatactgcgctggaatttcgtcgtgctatctccgtgctgaaaagccttccgtttgaggtacgtagcctgaaagacacggaaggattgccctggatcagcgatgaagtcaaagggattatggaagaaatcatcgaggtcggggagtcgaaggaagtgcaggccgttctcaatgatgagtggtatcaaagcttccaccgctttaagagtgtctttggagtgggggtgaagacagcagacaagtggtaccgtatgggtctgcgcaccctcgaggatgttcgttccagcaagaccctgaagttgaccccgatgcagaaagtaggtctgctgtattatgaagatcttgctcgcggcgttacgcgtgccgaagctgacgcgatttggctgctggttcaggatgcagtcgcaactttcgacccggatgcgatcgtggagattgtcggtggatttcgtcgtgggaaacctcagggtcacgacgttgatctgcttatcagttctccggccgtagagcgtgagcaagaagaccagctcctgcagaaagtgatgaatctgtggaagaaacaagggttgttgctgtacggtcgtctggaatggacccagtgggaagatgggggttcgccttccggtaaggctgacgagggtgacgcgggtgcgaaatgctttctgatcctcaaactttatgatcatctggtgcgtaaaagcaaatggaacatgccgacgggttcgaacgtgggcgagtccaaaccgtggaaagcaattcgcgtagatctgctgcgttgcccctatggcagttttgcgtttgcgatgttgcagtggaccggaagccgcatgttccgtcgtgatctgcgttggtacgccctggatgagaagaacatgatgctggacaatcattcgctgtatgacctgaccaagggtatcttcctccctgctaaatcggaagaggaaattttcgcacatctggggcttgaatacctggaaccgttcgaacgtaacgca

SEQ ID NO: 3252 - protein, 529 aa, synthetic construct
  REGION 1..529: note = Variant of terminal deoxynucleotidyltransferase
MHHHHHHGGSGSHGIRTIDSDFGKKQQKKGDNHDSSATYEIKFHEFVLFILEEKMGATRRTFLTDLARKKGFRVENELTDEVTHIVAENLSRSEVLAWLKEHKMEKTKQFELLDISWLIESMKVGKPVDTKGKYQLAESVEVSANPDPTEGRVNELPPTMKTVSPYACQRRTTLNNRNQRFTDSLDILRENYEFKRNDDTALEFRRAISVLKSLPFEVRSLKDTEGLPWISDEVKGIMEEIIEVGESKEVQAVLNDEWYQSFHRFKSVFGVGVKTADKWYRMGLRTLEDVRSSKTLKLTPMQKVGLLYYEDLARGVTRAEADAIWLLVQDAVATFDPDAIVEIVGGFRRGKPQGHDVDLLISSPAVEREQEDQLLQKVMNLWKKQGLLLYGRLEWTQWEDGGSPSGKADEGDAGAKCFLILKLYDHLVRKSKWNMPTGSNVGESKPWKAIRVDLLRCPYGSFAFAMLQWTGSRMFRRDLRWYALDEKNMMLDNHSLYDLTKGIFLPAKSEEEIFAHLGLEYLEPFERNA

SEQ ID NO: 3253 - DNA, 1587 bp, synthetic construct
  misc_feature 1..1587: note = Variant of terminal deoxynucleotidyltransferase
  source 1..1587: mol_type = other DNA
atgcaccatcatcatcatcatggcggtagcggcagccacggcattcgtaccatcgattcggacttcgggaagaaacagcagaaaaaaggcgataaccacgatagttccgccacttatgaaatcaaatttcacgagtttgtgctgttcattctcgaagaaaaaatgggtgcgacgcgtcgtacttttctgacagatttagcccgcaagaaagggttccgcgtcgagaatgaactgaccgacgaagttacccacatcgtggcagaaaatctgtcacgctctgaagtattggcttggctgaaagaacacaagatggagaagaccaagcaattcgaactgctggatattagctggcttatcgaaagcatgaaagttggtaaaccggtggacaccaaggggaaataccagttggcggaatcggttgaggtgagtgcgaacccagatccgacagaaggtcgtgtaaacgagctgcctcctactatgaaaaccgtttctccgtatgcgtgtcaacgccgcaccaccctgaacaaccgtaatcaacgttttacggactcgctggaaattcttcgtgaaaattacgagttcaaacgcaacgatgatactgcgctggaatttcgtcgtgctatctccgtgctgaaaagccttccgtttgaggtacgtagcctgaaagacacggaaggattgccctggatcggtgatgaagtcaaagggattatggaagaaatcatcagtgtcggggagtcgcgtgaagtgcaggccgtgctcaatgatgagtggtatcaaagcttccaccgctttaagagtgtctttggagtgggggtgaagacagcagacaagtggtaccgtatgggtctgcgcaccctcgaggatgttcgttccagcaagaccctgaagttgaccccgatgcagaaagtaggtctgctgtattatgaagatcttgctcgcggcgttacgcgtgccgaagctgacgcgatttggctgctggttcaggatgcagtcgcaactttcgacccggatgcgatcgtggagattgtcggtggatttcgtcgtgggaaacctcagggtcacgacgttgatctgcttatcagttctccgggagctgagaaagagcaagaagaccaactcctgcagaaagtgatgaatctgtggaagaaacaagggttgttgctgtacggtcgtctggaatggacccagtgggaagatgggggttcgccttccggtaaggctgacgagggtgacgcggaggcgaaatgctttctgatcctcaaactttatgatcatctggtgcgtaaaagtaaaagcaatatgccgcgcggttcgaacatgggcgagtccaaaccgtggaaagcaattcgcgtagatctgctgcgttgcccctatggcagttttgcgtttgcgatgttgcagtggaccggaagccgcatgttccgtcgtgatctgcgttggtacgccactgacgagaagaacatgatgctggacaatcattcgctgtatgacctgaccaagggtatcttcctccctgctaaatcggaagaggaaattttcgcacatctggggcttgaatacctggaaccgttcgaacgtaacgca

SEQ ID NO: 3254 - protein, 529 aa, synthetic construct
  REGION 1..529: note = Variant of terminal deoxynucleotidyltransferase
MHHHHHHGGSGSHGIRTIDSDFGKKQQKKGDNHDSSATYEIKFHEFVLFILEEKMGATRRTFLTDLARKKGFRVENELTDEVTHIVAENLSRSEVLAWLKEHKMEKTKQFELLDISWLIESMKVGKPVDTKGKYQLAESVEVSANPDPTEGRVNELPPTMKTVSPYACQRRTTLNNRNQRFTDSLEILRENYEFKRNDDTALEFRRAISVLKSLPFEVRSLKDTEGLPWIGDEVKGIMEEIISVGESREVQAVLNDEWYQSFHRFKSVFGVGVKTADKWYRMGLRTLEDVRSSKTLKLTPMQKVGLLYYEDLARGVTRAEADAIWLLVQDAVATFDPDAIVEIVGGFRRGKPQGHDVDLLISSPGAEKEQEDQLLQKVMNLWKKQGLLLYGRLEWTQWEDGGSPSGKADEGDAEAKCFLILKLYDHLVRKSKSNMPRGSNMGESKPWKAIRVDLLRCPYGSFAFAMLQWTGSRMFRRDLRWYATDEKNMMLDNHSLYDLTKGIFLPAKSEEEIFAHLGLEYLEPFERNA

SEQ ID NO: 3255 - DNA, 1587 bp, synthetic construct
  misc_feature 1..1587: note = Variant of terminal deoxynucleotidyltransferase
  source 1..1587: mol_type = other DNA
atgcaccatcatcatcatcatggcggtagcggcagccacggcattcgtaccatcgattcggacttcgggaagaaacagcagaaaaaaggcgataaccacgatagttccgccacttatgaaatcaaatttcacgagtttgtgctgttcattctcgaagaaaaaatgggtgcgacgcgtcgtacttttctgacagatttagcccgcaagaaagggttccgcgtcgagaatgaactgaccgacgaagttacccacatcgtggcagaaaatctgtcacgctctgaagtattggcttggctgaaagaacacaagatggagaagaccaagcaattcgaactgctggatattagctggcttatcgaaagcatgaaagttggtaaaccggtggacaccaaggggaaataccagttggcggaatcggttgaggtgagtgcgaacccagatccgacagaaggtcgtgtaaacgagctgcctcctactatgaaaaccgtttctccgtatgcgtgtcaacgccgcaccaccctgaacaaccgtaatcaacgttttacggactcgctggacattctgcgtgaaaattacgagttcaaacgcaacgatgatactgcgctggaatttcgtcgtgctatctccgtgctgaaaagccttccgtttgaggtacgtagcctgaaagacacggaaggattgccctggatcagcgatgaagtcaaagggattatggaagaaatcatcgaggtcggggagtcgcgtgaagtgcaggccgtgctcaatgatgagtggtatcaaagcttccaccgctttaagagtgtctttggagtgggggtgaagacagcagacaagtggtaccgtatgggtctgcgcaccctcgaggatgttcgttccagcaagaccctgaagttgaccccgatgcagaaagtaggtctgctgtattatgaagatcttgctcgcggcgttacgcgtgccgaagctgacgcgatttggctgctggttcaggatgcagtcgcaactttcgacccggatgcgatcgtggagattgtcggtggatttcgtcgtgggaaacctcagggtcacgacgttgatctgcttatcagttctccgggagctgagaaagagcaagaagaccaactcctgcagaaagtgatgaatctgtggaagaaacaagggttgttgctgtacggtcgtctggaatggacccagtgggaagatgggggttcgccttccggtaaggctgacgagggtgacgcgggtgcgaaatgctttctgatcctcaaactttatgatcatctggtgcgtaaaagcaaatggaacatgccgacgggttcgaacatgggggagcacaacccgtggaaagcaattcgcgtagatctgctgcgttgcccctatggcagttttgcgtttgcgatgttgcagtggaccggaagccgcatgttccgtcgtgatctgcgttggtacgccacggatgagaagaacatgatgctggacaatcattcgctgtatgacctgaccaagggtatcttcctccctgctaaatcggaagaggaaattttcgcacatctggggcttgaatacctggaaccgttcgaacgtaacgca

SEQ ID NO: 3256 - protein, 529 aa, synthetic construct
  REGION 1..529: note = Variant of terminal deoxynucleotidyltransferase
MHHHHHHGGSGSHGIRTIDSDFGKKQQKKGDNHDSSATYEIKFHEFVLFILEEKMGATRRTFLTDLARKKGFRVENELTDEVTHIVAENLSRSEVLAWLKEHKMEKTKQFELLDISWLIESMKVGKPVDTKGKYQLAESVEVSANPDPTEGRVNELPPTMKTVSPYACQRRTTLNNRNQRFTDSLDILRENYEFKRNDDTALEFRRAISVLKSLPFEVRSLKDTEGLPWISDEVKGIMEEIIEVGESREVQAVLNDEWYQSFHRFKSVFGVGVKTADKWYRMGLRTLEDVRSSKTLKLTPMQKVGLLYYEDLARGVTRAEADAIWLLVQDAVATFDPDAIVEIVGGFRRGKPQGHDVDLLISSPGAEKEQEDQLLQKVMNLWKKQGLLLYGRLEWTQWEDGGSPSGKADEGDAGAKCFLILKLYDHLVRKSKWNMPTGSNMGEHNPWKAIRVDLLRCPYGSFAFAMLQWTGSRMFRRDLRWYATDEKNMMLDNHSLYDLTKGIFLPAKSEEEIFAHLGLEYLEPFERNA

SEQ ID NO: 3257 - DNA, 1587 bp, synthetic construct
  misc_feature 1..1587: note = Variant of terminal deoxynucleotidyltransferase
  source 1..1587: mol_type = other DNA
atgcaccatcatcatcatcatggcggtagcggcagccacggcattcgtaccatcgattcggacttcgggaagaaacagcagaaaaaaggcgataaccacgatagttccgccacttatgaaatcaaatttcacgagtttgtgctgttcattctcgaagaaaaaatgggtgcgacgcgtcgtacttttctgacagatttagcccgcaagaaagggttccgcgtcgagaatgaactgaccgacgaagttacccacatcgtggcagaaaatctgtcacgctctgaagtattggcttggctgaaagaacacaagatggagaagaccaagcaattcgaactgctggatattagctggcttatcgaaagcatgaaagttggtaaaccggtggacaccaaggggaaataccagttggcggaatcggttgaggtgagtgcgaacccagatccgacagaaggtcgtgtaaacgagctgcctcctactatgaaaaccgtttctccgtatgcgtgtcaacgccgcaccaccctgaacaaccgtaatcaacgttttacggactcgctggaaattcttcgtgaaaattacgagttcaaacgcaacgatgatactgcgctggaatttcgtcgtgctatctccgtgctgaaaagccttccgtttgaggtacgtagcctgaaagacacggaaggattgccctggatcggtgatgaagtcaaagggattatggaagaaatcatcgaagtcggggagtcgcgtgaagtgcaggccgtgctcaatgatgagtggtatcaaagcttccaccgttttacgagtgtctttggagtgggggtgaagacagcagacaagtggtaccgtatgggtctgcgcaccctcgaggatgttcgttccagcaagaccctgaagttgaccccgatgcagaaagtaggtctgctgtattatgaagatcttgctcgcggcgttacgcgtgccgaagctgacgcgatttggctgctggttcaggatgcagtcgcaactttcgacccggatgcgatcgtggagattgtcggtggatttcgtcgtgggaaacctcagggtcacgacgttgatctgcttatcagttctccgggagctgagaaagagcaagaagaccaactcctgcagaaagtgatgaatctgtggaagaaacaagggttgttgctgtacggtcgtctggaatggacccagtgggaagatgggggttcgccttccggtaaggctgacgagggtgacgcgggtgcgaaatgctttctgatcctcaaactttatgatcatctggtgcgtaaaagcaaatggaacatgccgcgcggttcgaacatgggcgagtccaaaccgtggaaagcaattcgcgtagatctgctgcgttgcccctatggcagttttgcgtttgcgatgttgcagtggaccggaagccgcatgttccgtcgtgatctgcgttggtacgccactgacgagaagaacatgatgctggacaatcattcgctgtatgacatgaccaaaggcatcttcctccctgctaaatcggaagaggaaattttcgaacatctggggcttgactacctggaaccgttcgaacgtaacgca

SEQ ID NO: 3258 - protein, 529 aa, synthetic construct
  REGION 1..529: note = Variant of terminal deoxynucleotidyltransferase
MHHHHHHGGSGSHGIRTIDSDFGKKQQKKGDNHDSSATYEIKFHEFVLFILEEKMGATRRTFLTDLARKKGFRVENELTDEVTHIVAENLSRSEVLAWLKEHKMEKTKQFELLDISWLIESMKVGKPVDTKGKYQLAESVEVSANPDPTEGRVNELPPTMKTVSPYACQRRTTLNNRNQRFTDSLEILRENYEFKRNDDTALEFRRAISVLKSLPFEVRSLKDTEGLPWIGDEVKGIMEEIIEVGESREVQAVLNDEWYQSFHRFTSVFGVGVKTADKWYRMGLRTLEDVRSSKTLKLTPMQKVGLLYYEDLARGVTRAEADAIWLLVQDAVATFDPDAIVEIVGGFRRGKPQGHDVDLLISSPGAEKEQEDQLLQKVMNLWKKQGLLLYGRLEWTQWEDGGSPSGKADEGDAGAKCFLILKLYDHLVRKSKWNMPRGSNMGESKPWKAIRVDLLRCPYGSFAFAMLQWTGSRMFRRDLRWYATDEKNMMLDNHSLYDMTKGIFLPAKSEEEIFEHLGLDYLEPFERNA

SEQ ID NO: 3259 - DNA, 1587 bp, synthetic construct
  misc_feature 1..1587: note = Variant of terminal deoxynucleotidyltransferase
  source 1..1587: mol_type = other DNA
atgcaccatcatcatcatcatggcggtagcggcagccacggcattcgtaccatcgattcggacttcgggaagaaacagcagaaaaaaggcgataaccacgatagttccgccacttatgaaatcaaatttcacgagtttgtgctgttcattctcgaagaaaaaatgggtgcgacgcgtcgtacttttctgacagatttagcccgcaagaaagggttccgcgtcgagaatgaactgaccgacgaagttacccacatcgtggcagaaaatctgtcacgctctgaagtattggcttggctgaaagaacacaagatggagaagaccaagcaattcgaactgctggatattagctggcttatcgaaagcatgaaagttggtaaaccggtggacaccaaggggaaataccagttggcggaatcggttgaggtgagtgcgaacccagatccgacagaaggtcgtgtaaacgagctgcctcctactatgaaaaccgtttctccgtatgcgtgtcaacgccgcaccaccctgaacaaccgtaatcaacgttttacggactcgctggacattctgcgtgaaaattacgagttcaaacgcaacgatgatactgcgctggaatttcgtcgtgctatctccgtgctgaaaagccttccgtttgaggtacgtagcctgaaagacacggaaggattgccctggatcggtgatgaagtcaaagggattatggaagaaatcatcgaggtcggggagtcgcgcgaagtgcaggccgttctcaatgatgagtggtatcaaagcttccaccgctttaagagtgtctttggagtgggggtgaagacagcagacaagtggtaccgtatgggtctgcgcaccctcgaggatgttcgttccagcaagaccctgaagttgaccccgatgcagaaagtaggtctgctgtattatgaagatcttgctcgcggcgttacgcgtgccgaagctgacgcgatttggctgctggttcaggatgcagtcgcaactttcgacccggatgcgatcgtggagattgtcggtggatttcgtcgtgggaaacctcagggtcacgacgttgatctgcttatcagttctccgggagcagagaaagagcaagaagaccagctcctgcagaaagtgatgaatctgtggaagaaacaagggttgttgctgtacggtcgtctggaatggacccagtgggaagatgggggttcgccttccggtaaggctgacgagggtgacgcgggtgcgaaatgctttctgatcctcaaactttatgatcatctggtgcgtaaaagcaaatggaacatgccgacgggttcgaacgtgggcgagtccaaaccgtggaaagcaattcgcgtagatctgctgcgttgcccctatggcagttttgcgtttgcgatgttgcagtggaccggaagccgcatgttccgtcgtgatctgcgttggtacgccctggaagagaagaacatgatgctggacaatcattcgctgtatgacctgaccaagggtatcttcctccctgctaaatcggaagaggaaattttcgcacatctggggcttgaatacctggaaccgttcgaacgtaacgca

SEQ ID NO: 3260 - protein, 529 aa, synthetic construct
  REGION 1..529: note = Variant of terminal deoxynucleotidyltransferase
MHHHHHHGGSGSHGIRTIDSDFGKKQQKKGDNHDSSATYEIKFHEFVLFILEEKMGATRRTFLTDLARKKGFRVENELTDEVTHIVAENLSRSEVLAWLKEHKMEKTKQFELLDISWLIESMKVGKPVDTKGKYQLAESVEVSANPDPTEGRVNELPPTMKTVSPYACQRRTTLNNRNQRFTDSLDILRENYEFKRNDDTALEFRRAISVLKSLPFEVRSLKDTEGLPWIGDEVKGIMEEIIEVGESREVQAVLNDEWYQSFHRFKSVFGVGVKTADKWYRMGLRTLEDVRSSKTLKLTPMQKVGLLYYEDLARGVTRAEADAIWLLVQDAVATFDPDAIVEIVGGFRRGKPQGHDVDLLISSPGAEKEQEDQLLQKVMNLWKKQGLLLYGRLEWTQWEDGGSPSGKADEGDAGAKCFLILKLYDHLVRKSKWNMPTGSNVGESKPWKAIRVDLLRCPYGSFAFAMLQWTGSRMFRRDLRWYALEEKNMMLDNHSLYDLTKGIFLPAKSEEEIFAHLGLEYLEPFERNA

SEQ ID NO: 3261 - DNA, 1587 bp, synthetic construct
  misc_feature 1..1587: note = Variant of terminal deoxynucleotidyltransferase
  source 1..1587: mol_type = other DNA
atgcaccatcatcatcatcatggcggtagcggcagccacggcattcgtaccatcgattcggacttcgggaagaaacagcagaaaaaaggcgataaccacgatagttccgccacttatgaaatcaaatttcacgagtttgtgctgttcattctcgaagaaaaaatgggtgcgacgcgtcgtacttttctgacagatttagcccgcaagaaagggttccgcgtcgagaatgaactgaccgacgaagttacccacatcgtggcagaaaatctgtcacgctctgaagtattggcttggctgaaagaacacaagatggagaagaccaagcaattcgaactgctggatattagctggcttatcgaaagcatgaaagttggtaaaccggtggacaccaaggggaaataccagttggcggaatcggttgaggtgagtgcgaacccagatccgacagaaggtcgtgtaaacgagctgcctcctactatgaaaaccgtttctccgtatgcgtgtcaacgccgcaccaccctgaacaaccgtaatcaacgttttacggactcgctggaaattcttcgtgaaaattacgagttcaaacgcaacgatgatactgcgctggaatttcgtcgtgctatctccgtgctgaaaagccttccgtttgaggtacgtagcctgaaagacacggaaggattgccctggatcggtgatgaagtcaaagggattatggaagaaatcatcgaagtcggggagtcgcgtgaagtgcaggccgtgctcaatgatgagtggtatcaaagcttccaccgttttaagagtgtctttggagtgggggtgaagacagcagacaagtggtaccgtatgggtctgcgcaccctcgaggatgttcgttccagcaagaccctgaagttgaccccgatgcagaaagtaggtctgctgtattatgaagatcttgctcgcggcgttacgcgtgccgaagctgacgcgatttggctgctggttcaggatgcagtcgcaactttcgacccggatgcgatcgtggagattgtcggtggatttcgtcgtgggaaacctcagggtcacgacgttgatctgcttatcagttctccgggagctgagaaagagcaagaagaccaactcctgcagaaagtgatgaatctgtggaagaaacaagggttgttgctgtacggtcgtctggaatggacccagtgggaagatgggggttcgccttccggtaaggctgacgagggtgacgcggaggcgaaatgctttctgatcctcaaactttatgatcatctggtgcgtaaaagtaaatggaatatgccgactggttcgaacatgggcgagtccaaaccgtggaaagcaattcgcgtagatctgctgcgttgcccctatggcagttttgcgtttgcgatgttgcagtggaccggaagccgcatgttccgtcgtgatctgcgttggtacgccactgacgagaagaacatgatgctggacaatcattcgctgtatgacctgaccaaaggcatcttcctccctgctaaatcggaagaggaaattttcgcacatctggggcttgactacctggaaccgttcgaacgtaacgca

SEQ ID NO: 3262 - protein, 529 aa, synthetic construct
  REGION 1..529: note = Variant of terminal deoxynucleotidyltransferase
MHHHHHHGGSGSHGIRTIDSDFGKKQQKKGDNHDSSATYEIKFHEFVLFILEEKMGATRRTFLTDLARKKGFRVENELTDEVTHIVAENLSRSEVLAWLKEHKMEKTKQFELLDISWLIESMKVGKPVDTKGKYQLAESVEVSANPDPTEGRVNELPPTMKTVSPYACQRRTTLNNRNQRFTDSLEILRENYEFKRNDDTALEFRRAISVLKSLPFEVRSLKDTEGLPWIGDEVKGIMEEIIEVGESREVQAVLNDEWYQSFHRFKSVFGVGVKTADKWYRMGLRTLEDVRSSKTLKLTPMQKVGLLYYEDLARGVTRAEADAIWLLVQDAVATFDPDAIVEIVGGFRRGKPQGHDVDLLISSPGAEKEQEDQLLQKVMNLWKKQGLLLYGRLEWTQWEDGGSPSGKADEGDAEAKCFLILKLYDHLVRKSKWNMPTGSNMGESKPWKAIRVDLLRCPYGSFAFAMLQWTGSRMFRRDLRWYATDEKNMMLDNHSLYDLTKGIFLPAKSEEEIFAHLGLDYLEPFERNA

SEQ ID NO: 3263 - DNA, 1587 bp, synthetic construct
  misc_feature 1..1587: note = Variant of terminal deoxynucleotidyltransferase
  source 1..1587: mol_type = other DNA
atgcaccatcatcatcatcatggcggtagcggcagccacggcattcgtaccatcgattcggacttcgggaagaaacagcagaaaaaaggcgataaccacgatagttccgccacttatgaaatcaaatttcacgagtttgtgctgttcattctcgaagaaaaaatgggtgcgacgcgtcgtacttttctgacagatttagcccgcaagaaagggttccgcgtcgagaatgaactgaccgacgaagttacccacatcgtggcagaaaatctgtcacgctctgaagtattggcttggctgaaagaacacaagatggagaagaccaagcaattcgaactgctggatattagctggcttatcgaaagcatgaaagttggtaaaccggtggacaccaaggggaaataccagttggcggaatcggttgaggtgagtgcgaacccagatccgacagaaggtcgtgtaaacgagctgcctcctactatgaaaaccgtttctccgtatgcgtgtcaacgccgcaccaccctgaacaaccgtaatcaacgttttacggactcgctggaaattcttcgtgaaaattacgagttcaaacgcaacgatgatactgcgctggaatttcgtcgtgctatctccgtgctgaaaagccttccgtttgaggtacgtagcctgaaagacacggaaggattgccctggatcggtgatgaagtcaaagggattatggaagaaatcatcgaagtcggggagtcgcgtgaagtgcaggccgtgctcaatgatgagtggtatcaaagcttccacgcatttaagagtgtctttggagtgggggtgaagacagcagacaagtggtaccgtatgggtctgcgcaccctcgaggatgttcgttccagcaagaccctgaagttgaccccgatgcagaaagtaggtctgctgtattatgaagatcttgctcgcggcgttacgcgtgccgaagctgacgcgatttggctgctggttcaggatgcagtcgcaactttcgacccggatgcgatcgtggagattgtcggtggatttcgtcgtgggaaacctcagggtcacgacgttgatctgcttatcagttctccgggagctgagaaagagcaagaagaccaactcctgcagaaagtgatgaatctgtggaagaaacaagggttgttgctgtacggtcgtctggaatggacccagtgggaagatgggggttcgccttccggtaaggctgacgagggtgacgcggaggcgaaatgctttctgatcctcaaactttatgatcatctggtgcgtaaaagtaaatggaatatgccgactggttcgaacatgggcgagtccaaaccgtggaaagcaattcgcgtagatctgctgcgttgcccctatggcagttttgcgtttgcgatgttgcagtggaccggaagccgcatgttccgtcgtgatctgcgttggtacgccactgacgagaagaacatgatgctggacaatcattcgctgtatgacctgaccaagggtatcttcctccctgctaaatcggaagaggaaattttcgcacatctggggcttgaatacctggaaccgttcgaacgtaacgca

SEQ ID NO: 3264 - protein, 529 aa, synthetic construct
  REGION 1..529: note = Variant of terminal deoxynucleotidyltransferase
MHHHHHHGGSGSHGIRTIDSDFGKKQQKKGDNHDSSATYEIKFHEFVLFILEEKMGATRRTFLTDLARKKGFRVENELTDEVTHIVAENLSRSEVLAWLKEHKMEKTKQFELLDISWLIESMKVGKPVDTKGKYQLAESVEVSANPDPTEGRVNELPPTMKTVSPYACQRRTTLNNRNQRFTDSLEILRENYEFKRNDDTALEFRRAISVLKSLPFEVRSLKDTEGLPWIGDEVKGIMEEIIEVGESREVQAVLNDEWYQSFHAFKSVFGVGVKTADKWYRMGLRTLEDVRSSKTLKLTPMQKVGLLYYEDLARGVTRAEADAIWLLVQDAVATFDPDAIVEIVGGFRRGKPQGHDVDLLISSPGAEKEQEDQLLQKVMNLWKKQGLLLYGRLEWTQWEDGGSPSGKADEGDAEAKCFLILKLYDHLVRKSKWNMPTGSNMGESKPWKAIRVDLLRCPYGSFAFAMLQWTGSRMFRRDLRWYATDEKNMMLDNHSLYDLTKGIFLPAKSEEEIFAHLGLEYLEPFERNA

SEQ ID NO: 3265 - DNA, 1587 bp, synthetic construct
  misc_feature 1..1587: note = Variant of terminal deoxynucleotidyltransferase
  source 1..1587: mol_type = other DNA
atgcaccatcatcatcatcatggcggtagcggcagccacggcattcgtaccatcgattcggacttcgggaagaaacagcagaaaaaaggcgataaccacgatagttccgccacttatgaaatcaaatttcacgagtttgtgctgttcattctcgaagaaaaaatgggtgcgacgcgtcgtacttttctgacagatttagcccgcaagaaagggttccgcgtcgagaatgaactgaccgacgaagttacccacatcgtggcagaaaatctgtcacgctctgaagtattggcttggctgaaagaacacaagatggagaagaccaagcaattcgaactgctggatattagctggcttatcgaaagcatgaaagttggtaaaccggtggacaccaaggggaaataccagttggcggaatcggttgaggtgagtgcgaacccagatccgacagaaggtcgtgtaaacgagctgcctcctactatgaaaaccgtttctccgtatgcgtgtcaacgccgcaccaccctgaacaaccgtaatcaacgttttacggactcgctggacattctgcgtgaaaattacgagttcaaacgcaacgatgatactgcgctggaatttcgtcgtgctatctccgtgctgaaaagccttccgtttgaggtacgtagcctgaaagacacggaaggattgccctggatcagcgatgaagtcaaagggattatggaagaaatcatcgaggtcggggagtcgaaggaagtgcaggccattctcaatgatgagtggtatcaaagcttccaccgctttaagagtgtctttggagtgggggtgaagacagcagacaagtggtaccgtatgggtctgcgcaccctcgaggatgttcgttccagcaagaccctgaagttgaccccgatgcagaaagtaggtctgctgtattatgaagatcttgctcgcggcgttacgcgtgccgaagctgacgcgatttggctgctggttcaggatgcagtcgcaactttcgacccggatgcgatcgtggagattgtcggtggatttcgtcgtgggaaacctcagggtcacgacgttgatctgcttatcagttctccgggagctgagaaagagcaagaagaccagctcctgcagaaagtgatgaatctgtggaagaaacaagggttgttgctgtacggtcgtctggaatggacccagtgggaagatgggggttcgccttccggtaaggctgacgagggtgacgcgggtgcgaaatgctttctgatcctcaaactttatgatcatctggtgcgtaaaagcaaatggaacatgccgacgggttcgaacgtgggggagtcgaaaccgtggaaagcaattcgcgtagatctgctgcgttgcccctatggcagttttgcgtttgcgatgttgcagtggaccggaagccgcatgttccgtcgtgatctgcgttggtacgccctggatgagaagaacatgatgctggacaatcattcgctgtatgacctgaccaagggtatcttcctccctgctaaatcggaagaggaaattttcgcacatctggggcttgaatacctggaaccgttcgaacgtaacgca

SEQ ID NO: 3266 - protein, 529 aa, synthetic construct
  REGION 1..529: note = Variant of terminal deoxynucleotidyltransferase
MHHHHHHGGSGSHGIRTIDSDFGKKQQKKGDNHDSSATYEIKFHEFVLFILEEKMGATRRTFLTDLARKKGFRVENELTDEVTHIVAENLSRSEVLAWLKEHKMEKTKQFELLDISWLIESMKVGKPVDTKGKYQLAESVEVSANPDPTEGRVNELPPTMKTVSPYACQRRTTLNNRNQRFTDSLDILRENYEFKRNDDTALEFRRAISVLKSLPFEVRSLKDTEGLPWISDEVKGIMEEIIEVGESKEVQAILNDEWYQSFHRFKSVFGVGVKTADKWYRMGLRTLEDVRSSKTLKLTPMQKVGLLYYEDLARGVTRAEADAIWLLVQDAVATFDPDAIVEIVGGFRRGKPQGHDVDLLISSPGAEKEQEDQLLQKVMNLWKKQGLLLYGRLEWTQWEDGGSPSGKADEGDAGAKCFLILKLYDHLVRKSKWNMPTGSNVGESKPWKAIRVDLLRCPYGSFAFAMLQWTGSRMFRRDLRWYALDEKNMMLDNHSLYDLTKGIFLPAKSEEEIFAHLGLEYLEPFERNA

SEQ ID NO: 3267 - DNA, 1587 bp, synthetic construct
  misc_feature 1..1587: note = Variant of terminal deoxynucleotidyltransferase
  source 1..1587: mol_type = other DNA
atgcaccatcatcatcatcatggcggtagcggcagccacggcattcgtaccatcgattcggacttcgggaagaaacagcagaaaaaaggcgataaccacgatagttccgccacttatgaaatcaaatttcacgagtttgtgctgttcattctcgaagaaaaaatgggtgcgacgcgtcgtacttttctgacagatttagcccgcaagaaagggttccgcgtcgagaatgaactgaccgacgaagttacccacatcgtggcagaaaatctgtcacgctctgaagtattggcttggctgaaagaacacaagatggagaagaccaagcaattcgaactgctggatattagctggcttatcgaaagcatgaaagttggtaaaccggtggacaccaaggggaaataccagttggcggaatcggttgaggtgagtgcgaacccagatccgacagaaggtcgtgtaaacgagctgcctcctactatgaaaaccgtttctccgtatgcgtgtcaacgccgcaccaccctgaacaaccgtaatcaacgttttacggactcgctggaaattcttcgtgaaaattacgagttcaaacgcaacgaggatactgcgctggaatttcgtcgtgctatctccgtgctgaaaagccttccgtttgaggtacgtagcctgaaagacacggaaggattgccctggatcggtgatgaagtcaaagggattatggaagaaatcatcagtgtcggggagtcgcgtgaagtgcaggccgtgctcaatgatgagtggtatcaaagcttccacgcatttaagagtgtctttggagtgggggtgaagacagcagacaagtggtaccgtatgggtctgcgcaccctcgaggatgttcgttccagcaagaccctgaagttgaccccgatgcagaaagtaggtctgctgtattatgaagatcttgctcgcggcgttacgcgtgccgaagctgacgcgatttggctgctggttcaggatgcagtcgcaactttcgacccggatgcgatcgtggagattgtcggtggatttcgtcgtgggaaacctcagggtcacgacgttgatctgcttatcagttctccgggagctgagaaagagcaagaagaccaactcctgcagaaagtgatgaatctgtggaagaaacaagggttgttgctgtacggtcgtctggaatggacccagtgggaagatgggggttcgccttccggtaaggctgacgagggtgacgcgggtgcgaaatgctttctgatcctcaaactttatgatcatctggtgcgtaaacgtaaatggaatatgccgactggttcgaacatgggcgagtccaaaccgtggaaagcaattcgcgtagatctgctgcgttgcccctatggcagttttgcgtttgcgatgttgcagtggaccggaagccgcatgttccgtcgtgatctgcgttggtacgccactgacgagaagaacatgatgctggacaatcattcgctgtatgacctgaccaagggtatcttcctccctgctaaatcggaagaggaaattttcgcacatctggggcttgaatacctggaaccgttcgaacgtaacgca

SEQ ID NO: 3268 - protein, 529 aa, synthetic construct
  REGION 1..529: note = Variant of terminal deoxynucleotidyltransferase
MHHHHHHGGSGSHGIRTIDSDFGKKQQKKGDNHDSSATYEIKFHEFVLFILEEKMGATRRTFLTDLARKKGFRVENELTDEVTHIVAENLSRSEVLAWLKEHKMEKTKQFELLDISWLIESMKVGKPVDTKGKYQLAESVEVSANPDPTEGRVNELPPTMKTVSPYACQRRTTLNNRNQRFTDSLEILRENYEFKRNEDTALEFRRAISVLKSLPFEVRSLKDTEGLPWIGDEVKGIMEEIISVGESREVQAVLNDEWYQSFHAFKSVFGVGVKTADKWYRMGLRTLEDVRSSKTLKLTPMQKVGLLYYEDLARGVTRAEADAIWLLVQDAVATFDPDAIVEIVGGFRRGKPQGHDVDLLISSPGAEKEQEDQLLQKVMNLWKKQGLLLYGRLEWTQWEDGGSPSGKADEGDAGAKCFLILKLYDHLVRKRKWNMPTGSNMGESKPWKAIRVDLLRCPYGSFAFAMLQWTGSRMFRRDLRWYATDEKNMMLDNHSLYDLTKGIFLPAKSEEEIFAHLGLEYLEPFERNA

SEQ ID NO: 3269 - DNA, 1587 bp, synthetic construct
  misc_feature 1..1587: note = Variant of terminal deoxynucleotidyltransferase
  source 1..1587: mol_type = other DNA
atgcaccatcatcatcatcatggcggtagcggcagccacggcattcgtaccatcgattcggacttcgggaagaaacagcagaaaaaaggcgataaccacgatagttccgccacttatgaaatcaaatttcacgagtttgtgctgttcattctcgaagaaaaaatgggtgcgacgcgtcgtacttttctgacagatttagcccgcaagaaagggttccgcgtcgagaatgaactgaccgacgaagttacccacatcgtggcagaaaatctgtcacgctctgaagtattggcttggctgaaagaacacaagatggagaagaccaagcaattcgaactgctggatattagctggcttatcgaaagcatgaaagttggtaaaccggtggacaccaaggggaaataccagttggcggaatcggttgaggtgagtgcgaacccagatccgacagaaggtcgtgtaaacgagctgcctcctactatgaaaaccgtttctccgtatgcgtgtcaacgccgcaccaccctgaacaaccgtaatcaacgttttacggactcgctggaaattcttcgtgaaaattacgagttcaaacgcaacgatgatactgcgctggaatttcgtcgtgctatctccgtgctgaaaagccttccgtttgaggtacgtagcctgaaagacacggaaggattgccctggatcggtgatgaagtcaaagggattatggaagaaatcatcagtgtcggggagtcgcgtgaagtgcaggccgtgctcaatgatgagtggtatcaaagcttccacgcatttaagagtgtctttggagtgggggtgaagacagcagacaagtggtaccgtatgggtctgcgcaccctcgaggatgttcgttccagcaagaccctgaagttgaccccgatgcagaaagtaggtctgctgtattatgaagatcttgctcgcggcgttacgcgtgccgaagctgacgcgatttggctgctggttcaggatgcagtcgcaactttcgacccggatgcgatcgtggagattgtcggtggatttcgtcgtgggaaacctcagggtcacgacgttgatctgcttatcagttctccgggagctgagaaagagcaagaagaccaactcctgcagaaagtgatgaatctgtggaagaaacaagggttgttgctgtacggtcgtctggaatggacccagtgggaagatgggggttcgccttccggtaaggctgacgagggtgacgcgggtgcgaaatgctttctgatcctcaaactttatgatcatctggtgcgtaaaagcaaatggaacatgccgacgggttcgaacgtgggcgagtccaaaccgtggaaagcaattcgcgtagatctgctgcgttgcccctatggcagttttgcgtttgcgatgttgcagtggaccggaagccgcatgttccgtcgtgatctgcgttggtacgccactgacgagaagaacatgatgctggacaatcattcgctgtatgacctgaccaagggtatcttcctccctgctaaatcggaagaggaaattttcgaacatctggggcttgactacctggaaccgttcgaacgtaacgca

SEQ ID NO: 3270 - protein, 529 aa, synthetic construct
  REGION 1..529: note = Variant of terminal deoxynucleotidyltransferase
MHHHHHHGGSGSHGIRTIDSDFGKKQQKKGDNHDSSATYEIKFHEFVLFILEEKMGATRRTFLTDLARKKGFRVENELTDEVTHIVAENLSRSEVLAWLKEHKMEKTKQFELLDISWLIESMKVGKPVDTKGKYQLAESVEVSANPDPTEGRVNELPPTMKTVSPYACQRRTTLNNRNQRFTDSLEILRENYEFKRNDDTALEFRRAISVLKSLPFEVRSLKDTEGLPWIGDEVKGIMEEIISVGESREVQAVLNDEWYQSFHAFKSVFGVGVKTADKWYRMGLRTLEDVRSSKTLKLTPMQKVGLLYYEDLARGVTRAEADAIWLLVQDAVATFDPDAIVEIVGGFRRGKPQGHDVDLLISSPGAEKEQEDQLLQKVMNLWKKQGLLLYGRLEWTQWEDGGSPSGKADEGDAGAKCFLILKLYDHLVRKSKWNMPTGSNVGESKPWKAIRVDLLRCPYGSFAFAMLQWTGSRMFRRDLRWYATDEKNMMLDNHSLYDLTKGIFLPAKSEEEIFEHLGLDYLEPFERNA

SEQ ID NO: 3271 - DNA, 1587 bp, synthetic construct
  misc_feature 1..1587: note = Variant of terminal deoxynucleotidyltransferase
  source 1..1587: mol_type = other DNA
atgcaccatcatcatcatcatggcggtagcggcagccacggcattcgtaccatcgattcggacttcgggaagaaacagcagaaaaaaggcgataaccacgatagttccgccacttatgaaatcaaatttcacgagtttgtgctgttcattctcgaagaaaaaatgggtgcgacgcgtcgtacttttctgacagatttagcccgcaagaaagggttccgcgtcgagaatgaactgaccgacgaagttacccacatcgtggcagaaaatctgtcacgctctgaagtattggcttggctgaaagaacacaagatggagaagaccaagcaattcgaactgctggatattagctggcttatcgaaagcatgaaagttggtaaaccggtggacaccaaggggaaataccagttggcggaatcggttgaggtgagtgcgaacccagatccgacagaaggtcgtgtaaacgagctgcctcctactatgaaaaccgtttctccgtatgcgtgtcaacgccgcaccaccctgaacaaccgtaatcaacgttttacggactcgctggaaattctgcgtgaaaattacgagttcaaacgcaacgatgatactgcgctggaatttcgtcgtgctatctccgtgctgaaaagccttccgtttgaggtacgtagcctgaaagacacggaaggattgccctggatcggcgatgaagtcaaagggattatggaagaaatcatcgaggtcggggagtcgaaggaagtgcaggccgttctcaatgatgagtggtatcaaagcttccaccgctttaagagtgtctttggagtgggggtgaagacagcagacaagtggtaccgtatgggtctgcgcaccctcgaggatgttcgttccagcaagaccctgaagttgaccccgatgcagaaagtaggtctgctgtattatgaagatcttgctcgcggcgttacgcgtgccgaagctgacgcgatttggctgctggttcaggatgcagtcgcaactttcgacccggatgcgatcgtggagattgtcggtggatttcgtcgtgggaaacctcagggtcacgacgttgatctgcttatcagttctccgggagctgagaaagagcaagaagaccaactcctgcagaaagtgatgaatctgtggaagaaacaagggttgttgctgtacggtcgtctggaatggacccagtgggaagatgggggttcgccttccggtaaggctgacgagggtgacgcgggtgcgaaatgctttctgatcctcaaactttatgatcatctggtgcgtaaaagcaaatggaacatgccgacgggttcgaacgtgaaggaggcgaacccgtggaaagcaattcgcgtagatctgctgcgttgcccctatggcagttttgcgtttgcgatgttgcagtggaccggaagccgcatgttccgtcgtgatctgcgttggtacgccctggatgagaagaacatgatgctggacaatcattcgctgtatgacctgaccaagggtatcttcctccctgctaaatcggaagaggaaattttcgcacatctggggcttgaatacctggaaccgttcgaacgtaacgca

SEQ ID NO: 3272 - protein, 529 aa, synthetic construct
  REGION 1..529: note = Variant of terminal deoxynucleotidyltransferase
MHHHHHHGGSGSHGIRTIDSDFGKKQQKKGDNHDSSATYEIKFHEFVLFILEEKMGATRRTFLTDLARKKGFRVENELTDEVTHIVAENLSRSEVLAWLKEHKMEKTKQFELLDISWLIESMKVGKPVDTKGKYQLAESVEVSANPDPTEGRVNELPPTMKTVSPYACQRRTTLNNRNQRFTDSLEILRENYEFKRNDDTALEFRRAISVLKSLPFEVRSLKDTEGLPWIGDEVKGIMEEIIEVGESKEVQAVLNDEWYQSFHRFKSVFGVGVKTADKWYRMGLRTLEDVRSSKTLKLTPMQKVGLLYYEDLARGVTRAEADAIWLLVQDAVATFDPDAIVEIVGGFRRGKPQGHDVDLLISSPGAEKEQEDQLLQKVMNLWKKQGLLLYGRLEWTQWEDGGSPSGKADEGDAGAKCFLILKLYDHLVRKSKWNMPTGSNVKEANPWKAIRVDLLRCPYGSFAFAMLQWTGSRMFRRDLRWYALDEKNMMLDNHSLYDLTKGIFLPAKSEEEIFAHLGLEYLEPFERNA

SEQ ID NO: 3273 - DNA, 1587 bp, synthetic construct
  misc_feature 1..1587: note = Variant of terminal deoxynucleotidyltransferase
  source 1..1587: mol_type = other DNA
atgcaccatcatcatcatcatggcggtagcggcagccacggcattcgtaccatcgattcggacttcgggaagaaacagcagaaaaaaggcgataaccacgatagttccgccacttatgaaatcaaatttcacgagtttgtgctgttcattctcgaagaaaaaatgggtgcgacgcgtcgtacttttctgacagatttagcccgcaagaaagggttccgcgtcgagaatgaactgaccgacgaagttacccacatcgtggcagaaaatctgtcacgctctgaagtattggcttggctgaaagaacacaagatggagaagaccaagcaattcgaactgctggatattagctggcttatcgaaagcatgaaagttggtaaaccggtggacaccaaggggaaataccagttggcggaatcggttgaggtgagtgcgaacccagatccgacagaaggtcgtgtaaacgagctgcctcctactatgaaaaccgtttctccgtatgcgtgtcaacgccgcaccaccctgaacaaccgtaatcaacgttttacggactcgctggacattctgcgtgaaaattacgagttcaaacgcaacgatgatactgcgctggaatttcgtcgtgctatctccgtgctgaaaagccttccgtttgaggtacgtagcctgaaagacacggaaggattgccctggatcagcgatgaagtcaaagggattatggaagaaatcatcgaggtcggggagtcgcgcgaagtgcaggccgttctcaatgatgagtggtatcaaagcttccaccgctttaagagtgtctttggagtgggggtgaagacagcagacaagtggtaccgtatgggtctgcgcaccctcgaggatgttcgttccagcaagaccctgaagttgaccccgatgcagaaagtaggtctgctgtattatgaagatcttgctcgcggcgttacgcgtgccgaagctgacgcgatttggctgctggttcaggatgcagtcgcaactttcgacccggatgcgatcgtggagattgtcggtggatttcgtcgtgggaaacctcagggtcacgacgttgatctgcttatcagttctccgggcgcagagcgtgagcaagaagaccagctcctgcagaaagtgatgaatctgtggaagaaacaagggttgttgctgtacggtcgtctggaatggacccagtgggaagatgggggttcgccttccggtaaggctgacgagggtgacgcgggtgcgaattgctttctgatcctcaaactttatgatcatctggtgcgtaaaagcaaatggaacatgccgacgggttcgaacatgaaggaggcgaaaccgtggaaagcaattcgcgtagatctgctgcgttgcccctatggcagttttgcgtttgcgatgttgcagtggaccggaagccgcatgttccgtcgtgatctgcgttggtacgccctggaagagaagaacatgatgctggacaatcattcgctgtatgacctgaccaagggtatcttcctccctgctaaatcggaagaggaaattttcgcacatctggggcttgaatacctggaaccgttcgaacgtaacgca

SEQ ID NO: 3274 - protein, 529 aa, synthetic construct
  REGION 1..529: note = Variant of terminal deoxynucleotidyltransferase
MHHHHHHGGSGSHGIRTIDSDFGKKQQKKGDNHDSSATYEIKFHEFVLFILEEKMGATRRTFLTDLARKKGFRVENELTDEVTHIVAENLSRSEVLAWLKEHKMEKTKQFELLDISWLIESMKVGKPVDTKGKYQLAESVEVSANPDPTEGRVNELPPTMKTVSPYACQRRTTLNNRNQRFTDSLDILRENYEFKRNDDTALEFRRAISVLKSLPFEVRSLKDTEGLPWISDEVKGIMEEIIEVGESREVQAVLNDEWYQSFHRFKSVFGVGVKTADKWYRMGLRTLEDVRSSKTLKLTPMQKVGLLYYEDLARGVTRAEADAIWLLVQDAVATFDPDAIVEIVGGFRRGKPQGHDVDLLISSPGAEREQEDQLLQKVMNLWKKQGLLLYGRLEWTQWEDGGSPSGKADEGDAGANCFLILKLYDHLVRKSKWNMPTGSNMKEAKPWKAIRVDLLRCPYGSFAFAMLQWTGSRMFRRDLRWYALEEKNMMLDNHSLYDLTKGIFLPAKSEEEIFAHLGLEYLEPFERNA

SEQ ID NO: 3275 - DNA, 1587 bp, synthetic construct
  misc_feature 1..1587: note = Variant of terminal deoxynucleotidyltransferase
  source 1..1587: mol_type = other DNA
atgcaccatcatcatcatcatggcggtagcggcagccacggcattcgtaccatcgattcggacttcgggaagaaacagcagaaaaaaggcgataaccacgatagttccgccacttatgaaatcaaatttcacgagtttgtgctgttcattctcgaagaaaaaatgggtgcgacgcgtcgtacttttctgacagatttagcccgcaagaaagggttccgcgtcgagaatgaactgaccgacgaagttacccacatcgtggcagaaaatctgtcacgctctgaagtattggcttggctgaaagaacacaagatggagaagaccaagcaattcgaactgctggatattagctggcttatcgaaagcatgaaagttggtaaaccggtggacaccaaggggaaataccagttggcggaatcggttgaggtgagtgcgaacccagatccgacagaaggtcgtgtaaacgagctgcctcctactatgaaaaccgtttctccgtatgcgtgtcaacgccgcaccaccctgaacaaccgtaatcaacgttttacggactcgctggaaattctgcgtgaaaattacgagttcaaacgcaacgatgatactgcgctggaatttcgtcgtgctatctccgtgctgaaaagccttccgtttgaggtacgtagcctgaaagacacggaaggattgccctggatcggtgatgaagtcaaagggattatggaagaaatcatcgaggtcggggagtcgcgcgaagtgcaggccgttctcaatgatgagtggtatcaaagcttccaccgctttaagagtgtctttggagtgggggtgaagacagcagacaagtggtaccgtatgggtctgcgcaccctcgaggatgttcgttccagcaagaccctgaagttgaccccgatgcagaaagtaggtctgctgtattatgaagatcttgctcgcggcgttacgcgtgccgaagctgacgcgatttggctgctggttcaggatgcagtcgcaactttcgacccggatgcgatcgtggagattgtcggtggatttcgtcgtgggaaacctcagggtcacgacgttgatctgcttatcagttctccggccgtagagaaagagcaagaagaccagctcctgcagaaagtgatgaatctgtggaagaaacaagggttgttgctgtacggtcgtctggaatggacccagtgggaagatgggggttcgccttccggtaaggctgacgagggtgacgcgggtgcgaaatgctttctgatcctcaaactttatgatcatctggtgcgtaaaagcaaatggaacatgccgacgggttcgaacatgggggagtcgaaaccgtggaaagcaattcgcgtagatctgctgcgttgcccctatggcagttttgcgtttgcgatgttgcagtggaccggaagccgcatgttccgtcgtgatctgcgttggtacgccctggaagagaagaacatgatgctggacaatcattcgctgtatgacctgaccaagggtatcttcctccctgctaaatcggaagaggaaattttcgcacatctggggcttgaatacctggaaccgttcgaacgtaacgca

SEQ ID NO: 3276 - protein, 529 aa, synthetic construct
  REGION 1..529: note = Variant of terminal deoxynucleotidyltransferase
MHHHHHHGGSGSHGIRTIDSDFGKKQQKKGDNHDSSATYEIKFHEFVLFILEEKMGATRRTFLTDLARKKGFRVENELTDEVTHIVAENLSRSEVLAWLKEHKMEKTKQFELLDISWLIESMKVGKPVDTKGKYQLAESVEVSANPDPTEGRVNELPPTMKTVSPYACQRRTTLNNRNQRFTDSLEILRENYEFKRNDDTALEFRRAISVLKSLPFEVRSLKDTEGLPWIGDEVKGIMEEIIEVGESREVQAVLNDEWYQSFHRFKSVFGVGVKTADKWYRMGLRTLEDVRSSKTLKLTPMQKVGLLYYEDLARGVTRAEADAIWLLVQDAVATFDPDAIVEIVGGFRRGKPQGHDVDLLISSPAVEKEQEDQLLQKVMNLWKKQGLLLYGRLEWTQWEDGGSPSGKADEGDAGAKCFLILKLYDHLVRKSKWNMPTGSNMGESKPWKAIRVDLLRCPYGSFAFAMLQWTGSRMFRRDLRWYALEEKNMMLDNHSLYDLTKGIFLPAKSEEEIFAHLGLEYLEPFERNA

SEQ ID NO: 3277 - DNA, 1587 bp, synthetic construct
  misc_feature 1..1587: note = Variant of terminal deoxynucleotidyltransferase
  source 1..1587: mol_type = other DNA
atgcaccatcatcatcatcatggcggtagcggcagccacggcattcgtaccatcgattcggacttcgggaagaaacagcagaaaaaaggcgataaccacgatagttccgccacttatgaaatcaaatttcacgagtttgtgctgttcattctcgaagaaaaaatgggtgcgacgcgtcgtacttttctgacagatttagcccgcaagaaagggttccgcgtcgagaatgaactgaccgacgaagttacccacatcgtggcagaaaatctgtcacgctctgaagtattggcttggctgaaagaacacaagatggagaagaccaagcaattcgaactgctggatattagctggcttatcgaaagcatgaaagttggtaaaccggtggacaccaaggggaaataccagttggcggaatcggttgaggtgagtgcgaacccagatccgacagaaggtcgtgtaaacgagctgcctcctactatgaaaaccgtttctccgtatgcgtgtcaacgccgcaccaccctgaacaaccgtaatcaacgttttacggactcgctggacattctgcgtgaaaattacgagttcaaacgcaacgatgatactgcgctggaatttcgtcgtgctatctccgtgctgaaaagccttccgtttgaggtacgtagcctgaaagacacggaaggattgccctggatcagcgatgaagtcaaagggattatggaagaaatcatcgaggtcggggagtcgaaggaagtgcaggccgttctcaatgatgagtggtatcaaagcttccaccgctttaagagtgtctttggagtgggggtgaagacagcagacaagtggtaccgtatgggtctgcgcaccctcgaggatgttcgttccagcaagaccctgaagttgaccccgatgcagaaagtaggtctgctgtattatgaagatcttgctcgcggcgttacgcgtgccgaagctgacgcgatttggctgctggttcaggatgcagtcgcaactttcgacccggatgcgatcgtggagattgtcggtggatttcgtcgtgggaaacctcagggtcacgacgttgatctgcttatcagttctccgggcgtagagcgtgagcaagaagaccagctcctgcagaaagtgatgaatctgtggaagaaacaagggttgttgctgtacggtcgtctggaatggacccagtgggaagatgggggttcgccttccggtaaggctgacgagggtgacgcgggtgcgaaatgctttctgatcctcaaactttatgatcatctggtgcgtaaaagcaaatggaacatgccgacgggttcgaacgtgggggagcacaaaccgtggaaagcaattcgcgtagatctgctgcgttgcccctatggcagttttgcgtttgcgatgttgcagtggaccggaagccgcatgttccgtcgtgatctgcgttggtacgccacggatgagaagaacatgatgctggacaatcattcgctgtatgacctgaccaagggtatcttcctccctgctaaatcggaagaggaaattttcgcacatctggggcttgaatacctggaaccgttcgaacgtaacgca

SEQ ID NO: 3278 - protein, 529 aa, synthetic construct
  REGION 1..529: note = Variant of terminal deoxynucleotidyltransferase
MHHHHHHGGSGSHGIRTIDSDFGKKQQKKGDNHDSSATYEIKFHEFVLFILEEKMGATRRTFLTDLARKKGFRVENELTDEVTHIVAENLSRSEVLAWLKEHKMEKTKQFELLDISWLIESMKVGKPVDTKGKYQLAESVEVSANPDPTEGRVNELPPTMKTVSPYACQRRTTLNNRNQRFTDSLDILRENYEFKRNDDTALEFRRAISVLKSLPFEVRSLKDTEGLPWISDEVKGIMEEIIEVGESKEVQAVLNDEWYQSFHRFKSVFGVGVKTADKWYRMGLRTLEDVRSSKTLKLTPMQKVGLLYYEDLARGVTRAEADAIWLLVQDAVATFDPDAIVEIVGGFRRGKPQGHDVDLLISSPGVEREQEDQLLQKVMNLWKKQGLLLYGRLEWTQWEDGGSPSGKADEGDAGAKCFLILKLYDHLVRKSKWNMPTGSNVGEHKPWKAIRVDLLRCPYGSFAFAMLQWTGSRMFRRDLRWYATDEKNMMLDNHSLYDLTKGIFLPAKSEEEIFAHLGLEYLEPFERNA

SEQ ID NO: 3279 - DNA, 1587 bp, synthetic construct
  misc_feature 1..1587: note = Variant of terminal deoxynucleotidyltransferase
  source 1..1587: mol_type = other DNA
atgcaccatcatcatcatcatggcggtagcggcagccacggcattcgtaccatcgattcggacttcgggaagaaacagcagaaaaaaggcgataaccacgatagttccgccacttatgaaatcaaatttcacgagtttgtgctgttcattctcgaagaaaaaatgggtgcgacgcgtcgtacttttctgacagatttagcccgcaagaaagggttccgcgtcgagaatgaactgaccgacgaagttacccacatcgtggcagaaaatctgtcacgctctgaagtattggcttggctgaaagaacacaagatggagaagaccaagcaattcgaactgctggatattagctggcttatcgaaagcatgaaagttggtaaaccggtggacaccaaggggaaataccagttggcggaatcggttgaggtgagtgcgaacccagatccgacagaaggtcgtgtaaacgagctgcctcctactatgaaaaccgtttctccgtatgcgtgtcaacgccgcaccaccctgaacaaccgtaatcaacgttttacggactcgctggaaattcttcgtgaaaattacgagttcaaacgcaacgaggatactgcgctggaatttcgtcgtgctatctccgtgctgaaaagccttccgtttgaggtacgtagcctgaaagacacggaaggattgccctggatcggtgatgaagtcaaagggattatggaagaaatcatcgaggtcggggagtcgcgtgaagtgcaggccgtgctcaatgatgagtggtatcaaagcttccaccgttttacgagtgtctttggagtgggggtgaagacagcagacaagtggtaccgtatgggtctgcgcaccctcgaggatgttcgttccagcaagaccctgaagttgaccccgatgcagaaagtaggtctgctgtattatgaagatcttgctcgcggcgttacgcgtgccgaagctgacgcgatttggctgctggttcaggatgcagtcgcaactttcgacccggatgcgatcgtggagattgtcggtggatttcgtcgtgggaaacctcagggtcacgacgttgatctgcttatcagttctccgggagctgagaaagagcaagaagaccaactcctgcagaaagtgatgaatctgtggaagaaacaagggttgttgctgtacggtcgtctggaatggagccagtgggaagatgggggttcgccttccggtaaggctgacgagggtgacgcggaggcgaaatgctttctgatcctcaaactttatgatcatctggtgcgtaaaagtaaagtaaatatgccgactggttcgaacatgggcgagtccaaaccgtggaaagcaattcgcgtagatctgctgcgttgcccctatggcagttttgcgtttgcgatgttgcagtggaccggaagccgcatgttccgtcgtgatctgcgttggtacgccactgacgagaagaacatgatgctggacaatcattcgctgtatgacatgacccgcggcatcttcctccctgctaaatcggaagaggaaattttcgcacatctggggcttgaatacctggaaccgttcgaacgtaacgca

SEQ ID NO: 3280 - protein, 529 aa, synthetic construct
  REGION 1..529: note = Variant of terminal deoxynucleotidyltransferase
MHHHHHHGGSGSHGIRTIDSDFGKKQQKKGDNHDSSATYEIKFHEFVLFILEEKMGATRRTFLTDLARKKGFRVENELTDEVTHIVAENLSRSEVLAWLKEHKMEKTKQFELLDISWLIESMKVGKPVDTKGKYQLAESVEVSANPDPTEGRVNELPPTMKTVSPYACQRRTTLNNRNQRFTDSLEILRENYEFKRNEDTALEFRRAISVLKSLPFEVRSLKDTEGLPWIGDEVKGIMEEIIEVGESREVQAVLNDEWYQSFHRFTSVFGVGVKTADKWYRMGLRTLEDVRSSKTLKLTPMQKVGLLYYEDLARGVTRAEADAIWLLVQDAVATFDPDAIVEIVGGFRRGKPQGHDVDLLISSPGAEKEQEDQLLQKVMNLWKKQGLLLYGRLEWSQWEDGGSPSGKADEGDAEAKCFLILKLYDHLVRKSKVNMPTGSNMGESKPWKAIRVDLLRCPYGSFAFAMLQWTGSRMFRRDLRWYATDEKNMMLDNHSLYDMTRGIFLPAKSEEEIFAHLGLEYLEPFERNA

SEQ ID NO: 3281 - DNA, 1587 bp, synthetic construct
  misc_feature 1..1587: note = Variant of terminal deoxynucleotidyltransferase
  source 1..1587: mol_type = other DNA
atgcaccatcatcatcatcatggcggtagcggcagccacggcattcgtaccatcgattcggacttcgggaagaaacagcagaaaaaaggcgataaccacgatagttccgccacttatgaaatcaaatttcacgagtttgtgctgttcattctcgaagaaaaaatgggtgcgacgcgtcgtacttttctgacagatttagcccgcaagaaagggttccgcgtcgagaatgaactgaccgacgaagttacccacatcgtggcagaaaatctgtcacgctctgaagtattggcttggctgaaagaacacaagatggagaagaccaagcaattcgaactgctggatattagctggcttatcgaaagcatgaaagttggtaaaccggtggacaccaaggggaaataccagttggcggaatcggttgaggtgagtgcgaacccagatccgacagaaggtcgtgtaaacgagctgcctcctactatgaaaaccgtttctccgtatgcgtgtcaacgccgcaccaccctgaacaaccgtaatcaacgttttacggactcgctggaaattatccgtgaaaattacgagttcaaacgcaacgatgatactgcgctggaatttcgtcgtgctatctccgtgctgaaaagccttccgtttgaggtacgtagcctgaaagacacggaaggattgccctggatcagcgatgaagtcaaagggattatggaagaaatcatcgaggtcggggagtcgaaggaagtgcaggccattctcaatgatgagtggtatcaaagcttccaccgctttaagagtgtctttggagtgggggtgaagacagcagacaagtggtaccgtatgggtctgcgcaccctcgaggatgttcgttccagcaagaccctgaagttgaccccgatgcagaaagtaggtctgctgtattatgaagatcttgctcgcggcgttacgcgtgccgaagctgacgcgatttggctgctggttcaggatgcagtcgcaactttcgacccggatgcgatcgtggagattgtcggtggatttcgtcgtgggaaacctcagggtcacgacgttgatctgcttatcagttctccggccgcagagaaagagcaagaagaccagctcctgcagaaagtgatgaatctgtggaagaaacaagggttgttgctgtacggtcgtctggaatggacccagtgggaagatgggggttcgccttccggtaaggctgacgagggtgacgcgggtgcgaaatgctttctgatcctcaaactttatgatcatctggtgcgtaaaagcaaatggaacatgccgacgggttcgaacatgaaggaggcgaacccgtggaaagcaattcgcgtagatctgctgcgttgcccctatggcagttttgcgtttgcgatgttgcagtggaccggaagccgcatgttccgtcgtgatctgcgttggtacgccctggatgagaagaacatgatgctggacaatcattcgctgtatgacctgaccaagggtatcttcctccctgctaaatcggaagaggaaattttcgcacatctggggcttgaatacctggaaccgttcgaacgtaacgca

SEQ ID NO: 3282 - protein, 529 aa, synthetic construct
  REGION 1..529: note = Variant of terminal deoxynucleotidyltransferase
MHHHHHHGGSGSHGIRTIDSDFGKKQQKKGDNHDSSATYEIKFHEFVLFILEEKMGATRRTFLTDLARKKGFRVENELTDEVTHIVAENLSRSEVLAWLKEHKMEKTKQFELLDISWLIESMKVGKPVDTKGKYQLAESVEVSANPDPTEGRVNELPPTMKTVSPYACQRRTTLNNRNQRFTDSLEIIRENYEFKRNDDTALEFRRAISVLKSLPFEVRSLKDTEGLPWISDEVKGIMEEIIEVGESKEVQAILNDEWYQSFHRFKSVFGVGVKTADKWYRMGLRTLEDVRSSKTLKLTPMQKVGLLYYEDLARGVTRAEADAIWLLVQDAVATFDPDAIVEIVGGFRRGKPQGHDVDLLISSPAAEKEQEDQLLQKVMNLWKKQGLLLYGRLEWTQWEDGGSPSGKADEGDAGAKCFLILKLYDHLVRKSKWNMPTGSNMKEANPWKAIRVDLLRCPYGSFAFAMLQWTGSRMFRRDLRWYALDEKNMMLDNHSLYDLTKGIFLPAKSEEEIFAHLGLEYLEPFERNA

SEQ ID NO: 3283 - DNA, 1587 bp, synthetic construct
  misc_feature 1..1587: note = Variant of terminal deoxynucleotidyltransferase
  source 1..1587: mol_type = other DNA
atgcaccatcatcatcatcatggcggtagcggcagccacggcattcgtaccatcgattcggacttcgggaagaaacagcagaaaaaaggcgataaccacgatagttccgccacttatgaaatcaaatttcacgagtttgtgctgttcattctcgaagaaaaaatgggtgcgacgcgtcgtacttttctgacagatttagcccgcaagaaagggttccgcgtcgagaatgaactgaccgacgaagttacccacatcgtggcagaaaatctgtcacgctctgaagtattggcttggctgaaagaacacaagatggagaagaccaagcaattcgaactgctggatattagctggcttatcgaaagcatgaaagttggtaaaccggtggacaccaaggggaaataccagttggcggaatcggttgaggtgagtgcgaacccagatccgacagaaggtcgtgtaaacgagctgcctcctactatgaaaaccgtttctccgtatgcgtgtcaacgccgcaccaccctgaacaaccgtaatcaacgttttacggactcgctggaaattctgcgtgaaaattacgagttcaaacgcaacgatgatactgcgctggaatttcgtcgtgctatctccgtgctgaaaagccttccgtttgaggtacgtagcctgaaagacacggaaggattgccctggatcagcgatgaagtcaaagggattatggaagaaatcatcgaggtcggggagtcgaaggaagtgcaggccgttctcaatgatgagtggtatcaaagcttccaccgctttaagagtgtctttggagtgggggtgaagacagcagacaagtggtaccgtatgggtctgcgcaccctcgaggatgttcgttccagcaagaccctgaagttgaccccgatgcagaaagtaggtctgctgtattatgaagatcttgctcgcggcgttacgcgtgccgaagctgacgcgatttggctgctggttcaggatgcagtcgcaactttcgacccggatgcgatcgtggagattgtcggtggatttcgtcgtgggaaacctcagggtcacgacgttgatctgcttatcagttctccgggcgcagagaaagagcaagaagaccagctcctgcagaaagtgatgaatctgtggaagaaacaagggttgttgctgtacggtcgtctggaatggacccagtgggaagatgggggttcgccttccggtaaggctgacgagggtgacgcgggtgcgaaatgctttctgatcctcaaactttatgatcatctggtgcgtaaaagcaaatggaacatgccgacgggttcgaacatgggggagtcgaaaccgtggaaagcaattcgcgtagatctgctgcgttgcccctatggcagttttgcgtttgcgatgttgcagtggaccggaagccgcatgttccgtcgtgatctgcgttggtacgccctggatgagaagaacatgatgctggacaatcattcgctgtatgacctgaccaagggtatcttcctccctgctaaatcggaagaggaaattttcgcacatctggggcttgaatacctggaaccgttcgaacgtaacgca

SEQ ID NO: 3284 - protein, 529 aa, synthetic construct
  REGION 1..529: note = Variant of terminal deoxynucleotidyltransferase
MHHHHHHGGSGSHGIRTIDSDFGKKQQKKGDNHDSSATYEIKFHEFVLFILEEKMGATRRTFLTDLARKKGFRVENELTDEVTHIVAENLSRSEVLAWLKEHKMEKTKQFELLDISWLIESMKVGKPVDTKGKYQLAESVEVSANPDPTEGRVNELPPTMKTVSPYACQRRTTLNNRNQRFTDSLEILRENYEFKRNDDTALEFRRAISVLKSLPFEVRSLKDTEGLPWISDEVKGIMEEIIEVGESKEVQAVLNDEWYQSFHRFKSVFGVGVKTADKWYRMGLRTLEDVRSSKTLKLTPMQKVGLLYYEDLARGVTRAEADAIWLLVQDAVATFDPDAIVEIVGGFRRGKPQGHDVDLLISSPGAEKEQEDQLLQKVMNLWKKQGLLLYGRLEWTQWEDGGSPSGKADEGDAGAKCFLILKLYDHLVRKSKWNMPTGSNMGESKPWKAIRVDLLRCPYGSFAFAMLQWTGSRMFRRDLRWYALDEKNMMLDNHSLYDLTKGIFLPAKSEEEIFAHLGLEYLEPFERNA

SEQ ID NO: 3285 - DNA, 1587 bp, synthetic construct
  misc_feature 1..1587: note = Variant of terminal deoxynucleotidyltransferase
  source 1..1587: mol_type = other DNA
atgcaccatcatcatcatcatggcggtagcggcagccacggcattcgtaccatcgattcggacttcgggaagaaacagcagaaaaaaggcgataaccacgatagttccgccacttatgaaatcaaatttcacgagtttgtgctgttcattctcgaagaaaaaatgggtgcgacgcgtcgtacttttctgacagatttagcccgcaagaaagggttccgcgtcgagaatgaactgaccgacgaagttacccacatcgtggcagaaaatctgtcacgctctgaagtattggcttggctgaaagaacacaagatggagaagaccaagcaattcgaactgctggatattagctggcttatcgaaagcatgaaagttggtaaaccggtggacaccaaggggaaataccagttggcggaatcggttgaggtgagtgcgaacccagatccgacagaaggtcgtgtaaacgagctgcctcctactatgaaaaccgtttctccgtatgcgtgtcaacgccgcaccaccctgaacaaccgtaatcaacgttttacggactcgctggaaattcttcgtgaaaattacgagttcaaacgcaacgaggatactgcgctggaatttcgtcgtgctatctccgtgctgaaaagccttccgtttgaggtacgtagcctgaaagacacggaaggattgccctggatcggtgatgaagtcaaagggattatggaagaaatcatcgaagtcggggagtcgcgtgaagtgcaggccgtgctcaatgatgagtggtatcaaagcttccaccgttttacgagtgtctttggagtgggggtgaagacagcagacaagtggtaccgtatgggtctgcgcaccctcgaggatgttcgttccagcaagaccctgaagttgaccccgatgcagaaagtaggtctgctgtattatgaagatcttgctcgcggcgttacgcgtgccgaagctgacgcgatttggctgctggttcaggatgcagtcgcaactttcgacccggatgcgatcgtggagattgtcggtggatttcgtcgtgggaaacctcagggtcacgacgttgatctgcttatcagttctccgggagctgagaaagagcaagaagaccaactcctgcagaaagtgatgaatctgtggaagaaacaagggttgttgctgtacggtcgtctggaatggacccagtgggaagatgggggttcgccttccggtaaggctgacgagggtgacgcgggggcgaaatgctttctgatcctcaaactttatgatcatctggtgcgtaaaagtaaatggaatatgccgcgcggttcgaacatgggcgagtccaaaccgtggaaagcaattcgcgtagatctgctgcgttgcccctatggcagttttgcgtttgcgatgttgcagtggaccggaagccgcatgttccgtcgtgatctgcgttggtacgccactgacgagaagaacatgatgctggacaatcattcgctgtatgacatgaccaaaggcatcttcctccctgctaaatcggaagaggaaattttcgcacatctggggcttgaatacctggaaccgttcgaacgtaacgca

SEQ ID NO: 3286 - protein, 529 aa, synthetic construct
  REGION 1..529: note = Variant of terminal deoxynucleotidyltransferase
MHHHHHHGGSGSHGIRTIDSDFGKKQQKKGDNHDSSATYEIKFHEFVLFILEEKMGATRRTFLTDLARKKGFRVENELTDEVTHIVAENLSRSEVLAWLKEHKMEKTKQFELLDISWLIESMKVGKPVDTKGKYQLAESVEVSANPDPTEGRVNELPPTMKTVSPYACQRRTTLNNRNQRFTDSLEILRENYEFKRNEDTALEFRRAISVLKSLPFEVRSLKDTEGLPWIGDEVKGIMEEIIEVGESREVQAVLNDEWYQSFHRFTSVFGVGVKTADKWYRMGLRTLEDVRSSKTLKLTPMQKVGLLYYEDLARGVTRAEADAIWLLVQDAVATFDPDAIVEIVGGFRRGKPQGHDVDLLISSPGAEKEQEDQLLQKVMNLWKKQGLLLYGRLEWTQWEDGGSPSGKADEGDAGAKCFLILKLYDHLVRKSKWNMPRGSNMGESKPWKAIRVDLLRCPYGSFAFAMLQWTGSRMFRRDLRWYATDEKNMMLDNHSLYDMTKGIFLPAKSEEEIFAHLGLEYLEPFERNA

SEQ ID NO: 3287 - DNA, 1587 bp, synthetic construct
  misc_feature 1..1587: note = Variant of terminal deoxynucleotidyltransferase
  source 1..1587: mol_type = other DNA
atgcaccatcatcatcatcatggcggtagcggcagccacggcattcgtaccatcgattcggacttcgggaagaaacagcagaaaaaaggcgataaccacgatagttccgccacttatgaaatcaaatttcacgagtttgtgctgttcattctcgaagaaaaaatgggtgcgacgcgtcgtacttttctgacagatttagcccgcaagaaagggttccgcgtcgagaatgaactgaccgacgaagttacccacatcgtggcagaaaatctgtcacgctctgaagtattggcttggctgaaagaacacaagatggagaagaccaagcaattcgaactgctggatattagctggcttatcgaaagcatgaaagttggtaaaccggtggacaccaaggggaaataccagttggcggaatcggttgaggtgagtgcgaacccagatccgacagaaggtcgtgtaaacgagctgcctcctactatgaaaaccgtttctccgtatgcgtgtcaacgccgcaccaccctgaacaaccgtaatcaacgttttacggactcgctggaaattcttcgtgaaaattacgagttcaaacgcaacgatgatactgcgctggaatttcgtcgtgctatctccgtgctgaaaagccttccgtttgaggtacgtagcctgaaagacacggaaggattgccctggatcggtgatgaagtcaaagggattatggaagaaatcatcgaagtcggggagtcgcgtgaagtgcaggccgtgctcaatgatgagtggtatcaaagcttccacgcatttaagagtgtctttggagtgggggtgaagacagcagacaagtggtaccgtatgggtctgcgcaccctcgaggatgttcgttccagcaagaccctgaagttgaccccgatgcagaaagtaggtctgctgtattatgaagatcttgctcgcggcgttacgcgtgccgaagctgacgcgatttggctgctggttcaggatgcagtcgcaactttcgacccggatgcgatcgtggagattgtcggtggatttcgtcgtgggaaacctcagggtcacgacgttgatctgcttatcagttctccgggagctgagaaagagcaagaagaccaactcctgcagaaagtgatgaatctgtggaagaaacaagggttgttgctgtacggtcgtctggaatggacccagtgggaagatgggggttcgccttccggtaaggctgacgagggtgacgcgggtgcgaaatgctttctgatcctcaaactttatgatcatctggtgcgtaaaagtaaaagcaatatgccgactggttcgaacatgggcgagtccaaaccgtggaaagcaattcgcgtagatctgctgcgttgcccctatggcagttttgcgtttgcgatgttgcagtggaccggaagccgcatgttccgtcgtgatctgcgttggtacgccactgacgagaagaacatgatgctggacaatcattcgctgtatgacctgaccaagggcatcttcctccctgctaaatcggaagaggaaattttcgcacatctggggcttgaatacctggaaccgttcgaacgtaacgca

SEQ ID NO: 3288 - protein, 529 aa, synthetic construct
  REGION 1..529: note = Variant of terminal deoxynucleotidyltransferase
MHHHHHHGGSGSHGIRTIDSDFGKKQQKKGDNHDSSATYEIKFHEFVLFILEEKMGATRRTFLTDLARKKGFRVENELTDEVTHIVAENLSRSEVLAWLKEHKMEKTKQFELLDISWLIESMKVGKPVDTKGKYQLAESVEVSANPDPTEGRVNELPPTMKTVSPYACQRRTTLNNRNQRFTDSLEILRENYEFKRNDDTALEFRRAISVLKSLPFEVRSLKDTEGLPWIGDEVKGIMEEIIEVGESREVQAVLNDEWYQSFHAFKSVFGVGVKTADKWYRMGLRTLEDVRSSKTLKLTPMQKVGLLYYEDLARGVTRAEADAIWLLVQDAVATFDPDAIVEIVGGFRRGKPQGHDVDLLISSPGAEKEQEDQLLQKVMNLWKKQGLLLYGRLEWTQWEDGGSPSGKADEGDAGAKCFLILKLYDHLVRKSKSNMPTGSNMGESKPWKAIRVDLLRCPYGSFAFAMLQWTGSRMFRRDLRWYATDEKNMMLDNHSLYDLTKGIFLPAKSEEEIFAHLGLEYLEPFERNA

SEQ ID NO: 3289 - DNA, 1587 bp, synthetic construct
  misc_feature 1..1587: note = Variant of terminal deoxynucleotidyltransferase
  source 1..1587: mol_type = other DNA
atgcaccatcatcatcatcatggcggtagcggcagccacggcattcgtaccatcgattcggacttcgggaagaaacagcagaaaaaaggcgataaccacgatagttccgccacttatgaaatcaaatttcacgagtttgtgctgttcattctcgaagaaaaaatgggtgcgacgcgtcgtacttttctgacagatttagcccgcaagaaagggttccgcgtcgagaatgaactgaccgacgaagttacccacatcgtggcagaaaatctgtcacgctctgaagtattggcttggctgaaagaacacaagatggagaagaccaagcaattcgaactgctggatattagctggcttatcgaaagcatgaaagttggtaaaccggtggacaccaaggggaaataccagttggcggaatcggttgaggtgagtgcgaacccagatccgacagaaggtcgtgtaaacgagctgcctcctactatgaaaaccgtttctccgtatgcgtgtcaacgccgcaccaccctgaacaaccgtaatcaacgttttacggactcgctggacattatccgtgaaaattacgagttcaaacgcaacgatgatactgcgctggaatttcgtcgtgctatctccgtgctgaaaagccttccgtttgaggtacgtagcctgaaagacacggaaggattgccctggatcggcgatgaagtcaaagggattatggaagaaatcatcgaggtcggggagtcgaaggaagtgcaggccattctcaatgatgagtggtatcaaagcttccaccgctttaagagtgtctttggagtgggggtgaagacagcagacaagtggtaccgtatgggtctgcgcaccctcgaggatgttcgttccagcaagaccctgaagttgaccccgatgcagaaagtaggtctgctgtattatgaagatcttgctcgcggcgttacgcgtgccgaagctgacgcgatttggctgctggttcaggatgcagtcgcaactttcgacccggatgcgatcgtggagattgtcggtggatttcgtcgtgggaaacctcagggtcacgacgttgatctgcttatcagttctccggccgtagagaaagagcaagaagaccagctcctgcagaaagtgatgaatctgtggaagaaacaagggttgttgctgtacggtcgtctggaatggacccagtgggaagatgggggttcgccttccggtaaggctgacgagggtgacgcgggtgcgaaatgctttctgatcctcaaactttatgatcatctggtgcgtaaaagcaaatggaacatgccgacgggttcgaacgtgggggagcacaacccgtggaaagcaattcgcgtagatctgctgcgttgcccctatggcagttttgcgtttgcgatgttgcagtggaccggaagccgcatgttccgtcgtgatctgcgttggtacgccactgacgagaagaacatgatgctggacaatcattcgctgtatgacctgaccaagggtatcttcctccctgctaaatcggaagaggaaattttcgcacatctggggcttgaatacctggaaccgttcgaacgtaacgca

SEQ ID NO: 3290 - protein, 529 aa, synthetic construct
  REGION 1..529: note = Variant of terminal deoxynucleotidyltransferase
MHHHHHHGGSGSHGIRTIDSDFGKKQQKKGDNHDSSATYEIKFHEFVLFILEEKMGATRRTFLTDLARKKGFRVENELTDEVTHIVAENLSRSEVLAWLKEHKMEKTKQFELLDISWLIESMKVGKPVDTKGKYQLAESVEVSANPDPTEGRVNELPPTMKTVSPYACQRRTTLNNRNQRFTDSLDIIRENYEFKRNDDTALEFRRAISVLKSLPFEVRSLKDTEGLPWIGDEVKGIMEEIIEVGESKEVQAILNDEWYQSFHRFKSVFGVGVKTADKWYRMGLRTLEDVRSSKTLKLTPMQKVGLLYYEDLARGVTRAEADAIWLLVQDAVATFDPDAIVEIVGGFRRGKPQGHDVDLLISSPAVEKEQEDQLLQKVMNLWKKQGLLLYGRLEWTQWEDGGSPSGKADEGDAGAKCFLILKLYDHLVRKSKWNMPTGSNVGEHNPWKAIRVDLLRCPYGSFAFAMLQWTGSRMFRRDLRWYATDEKNMMLDNHSLYDLTKGIFLPAKSEEEIFAHLGLEYLEPFERNA

SEQ ID NO: 3291 - DNA, 1587 bp, synthetic construct
  misc_feature 1..1587: note = Variant of terminal deoxynucleotidyltransferase
  source 1..1587: mol_type = other DNA
atgcaccatcatcatcatcatggcggtagcggcagccacggcattcgtaccatcgattcggacttcgggaagaaacagcagaaaaaaggcgataaccacgatagttccgccacttatgaaatcaaatttcacgagtttgtgctgttcattctcgaagaaaaaatgggtgcgacgcgtcgtacttttctgacagatttagcccgcaagaaagggttccgcgtcgagaatgaactgaccgacgaagttacccacatcgtggcagaaaatctgtcacgctctgaagtattggcttggctgaaagaacacaagatggagaagaccaagcaattcgaactgctggatattagctggcttatcgaaagcatgaaagttggtaaaccggtggacaccaaggggaaataccagttggcggaatcggttgaggtgagtgcgaacccagatccgacagaaggtcgtgtaaacgagctgcctcctactatgaaaaccgtttctccgtatgcgtgtcaacgccgcaccaccctgaacaaccgtaatcaacgttttacggactcgctggaaattcttcgtgaaaattacgagttcaaacgcaacgatgatactgcgctggaatttcgtcgtgctatctccgtgctgaaaagccttccgtttgaggtacgtagcctgaaagacacggaaggattgccctggatcggtgatgaagtcaaagggattatggaagaaatcatcgaggtcggggagtcgcgtgaagtgcaggccgtgctcaatgatgagtggtatcaaagcttccaccgctttaagagtgtctttggagtgggggtgaagacagcagacaagtggtaccgtatgggtctgcgcaccctcgaggatgttcgttccagcaagaccctgaagttgaccccgatgcagaaagtaggtctgctgtattatgaagatcttgctcgcggcgttacgcgtgccgaagctgacgcgatttggctgctggttcaggatgcagtcgcaactttcgacccggatgcgatcgtggagattgtcggtggatttcgtcgtgggaaacctcagggtcacgacgttgatctgcttatcagttctccgggagctgagaaagagcaagaagaccaactcctgcagaaagtgatgaatctgtggaagaaacaagggttgttgctgtacggtcgtctgtattggacccagtgggaagatgggggttcgccttccggtaaggctgacgagggtgacgcgggtgcgaaatgctttctgatcctcaaactttatgatcatctggtgcgtaaaagcaaatggaacatgccgacgggttcgaacgtgggcgagtccaaaccgtggaaagcaattcgcgtagatctgctgcgttgcccctatggcagttttgcgtttgcgatgttgcagtggaccggaagccgcatgttccgtcgtgatctgcgttggtacgccactgacgagaagaacatgatgctggacaatcattcgctgtatgacctgaccaagggtatcttcctccctgctaaatcggaagaggaaattttcgcacatctggggcttgaatacctggaaccgttcgaacgtaacgca

SEQ ID NO: 3292 - protein, 529 aa, synthetic construct
  REGION 1..529: note = Variant of terminal deoxynucleotidyltransferase
MHHHHHHGGSGSHGIRTIDSDFGKKQQKKGDNHDSSATYEIKFHEFVLFILEEKMGATRRTFLTDLARKKGFRVENELTDEVTHIVAENLSRSEVLAWLKEHKMEKTKQFELLDISWLIESMKVGKPVDTKGKYQLAESVEVSANPDPTEGRVNELPPTMKTVSPYACQRRTTLNNRNQRFTDSLEILRENYEFKRNDDTALEFRRAISVLKSLPFEVRSLKDTEGLPWIGDEVKGIMEEIIEVGESREVQAVLNDEWYQSFHRFKSVFGVGVKTADKWYRMGLRTLEDVRSSKTLKLTPMQKVGLLYYEDLARGVTRAEADAIWLLVQDAVATFDPDAIVEIVGGFRRGKPQGHDVDLLISSPGAEKEQEDQLLQKVMNLWKKQGLLLYGRLYWTQWEDGGSPSGKADEGDAGAKCFLILKLYDHLVRKSKWNMPTGSNVGESKPWKAIRVDLLRCPYGSFAFAMLQWTGSRMFRRDLRWYATDEKNMMLDNHSLYDLTKGIFLPAKSEEEIFAHLGLEYLEPFERNA

SEQ ID NO: 3293 - DNA, 1587 bp, synthetic construct
  misc_feature 1..1587: note = Variant of terminal deoxynucleotidyltransferase
  source 1..1587: mol_type = other DNA
atgcaccatcatcatcatcatggcggtagcggcagccacggcattcgtaccatcgattcggacttcgggaagaaacagcagaaaaaaggcgataaccacgatagttccgccacttatgaaatcaaatttcacgagtttgtgctgttcattctcgaagaaaaaatgggtgcgacgcgtcgtacttttctgacagatttagcccgcaagaaagggttccgcgtcgagaatgaactgaccgacgaagttacccacatcgtggcagaaaatctgtcacgctctgaagtattggcttggctgaaagaacacaagatggagaagaccaagcaattcgaactgctggatattagctggcttatcgaaagcatgaaagttggtaaaccggtggacaccaaggggaaataccagttggcggaatcggttgaggtgagtgcgaacccagatccgacagaaggtcgtgtaaacgagctgcctcctactatgaaaaccgtttctccgtatgcgtgtcaacgccgcaccaccctgaacaaccgtaatcaacgttttacggactcgctggaaattcttcgtgaaaattacgagttcaaacgcaacgatgatactgcgctggaatttcgtcgtgctatctccgtgctgaaaagccttccgtttgaggtacgtagcctgaaagacacggaaggattgccctggatcggtgatgaagtcaaagggattatggaagaaatcatcgaggtcggggagtcgcgtgaagtgcaggccgtgctcaatgatgagtggtatcaaagcttccaccgctttaagagtgtctttggagtgggggtgaagacagcagacaagtggtaccgtatgggtctgcgcaccctcgaggatgttcgttccagcaagaccctgaagttgaccccgagtcagaaagtaggtctgctgtattatgaagatcttgctcgcggcgttacgcgtgccgaagctgacgcgatttggctgctggttcaggatgcagtcgcaactttcgacccggatgcgatcgtggagattgtcggtggatttcgtcgtgggaaacctcagggtcacgacgttgatctgcttatcagttctccgggagctgagaaagagcaagaagaccaactcctgcagaaagtgatgaatctgtggaagaaacaagggttgttgctgtacggtcgtctggaatggacccagtgggaagatgggggttcgccttccggtaaggctgacgagggtgacgcgggtgcgaaatgctttctgatcctcaaactttatgatcatctggtgcgtaaaagcaaatggaacatgccgacgggttcgaacgtgggcgagtccaaaccgtggaaagcaattcgcgtagatctgctgcgttgcccctatggcagttttgcgtttgcgatgttgcagtggaccggaagccgcatgttccgtcgtgatctgcgttggtacgccactgacgagaagaacatgatgctggacaatcattcgctgtatgacctgaccaagggtatcttcctccctgctaaatcggaagaggaaattttcgcacatctggggcttgaatacctggaaccgttcgaacgtaacgca

SEQ ID NO: 3294 - protein, 529 aa, synthetic construct
  REGION 1..529: note = Variant of terminal deoxynucleotidyltransferase
MHHHHHHGGSGSHGIRTIDSDFGKKQQKKGDNHDSSATYEIKFHEFVLFILEEKMGATRRTFLTDLARKKGFRVENELTDEVTHIVAENLSRSEVLAWLKEHKMEKTKQFELLDISWLIESMKVGKPVDTKGKYQLAESVEVSANPDPTEGRVNELPPTMKTVSPYACQRRTTLNNRNQRFTDSLEILRENYEFKRNDDTALEFRRAISVLKSLPFEVRSLKDTEGLPWIGDEVKGIMEEIIEVGESREVQAVLNDEWYQSFHRFKSVFGVGVKTADKWYRMGLRTLEDVRSSKTLKLTPSQKVGLLYYEDLARGVTRAEADAIWLLVQDAVATFDPDAIVEIVGGFRRGKPQGHDVDLLISSPGAEKEQEDQLLQKVMNLWKKQGLLLYGRLEWTQWEDGGSPSGKADEGDAGAKCFLILKLYDHLVRKSKWNMPTGSNVGESKPWKAIRVDLLRCPYGSFAFAMLQWTGSRMFRRDLRWYATDEKNMMLDNHSLYDLTKGIFLPAKSEEEIFAHLGLEYLEPFERNA

SEQ ID NO: 3295 - DNA, 1587 bp, synthetic construct
  misc_feature 1..1587: note = Variant of terminal deoxynucleotidyltransferase
  source 1..1587: mol_type = other DNA
atgcaccatcatcatcatcatggcggtagcggcagccacggcattcgtaccatcgattcggacttcgggaagaaacagcagaaaaaaggcgataaccacgatagttccgccacttatgaaatcaaatttcacgagtttgtgctgttcattctcgaagaaaaaatgggtgcgacgcgtcgtacttttctgacagatttagcccgcaagaaagggttccgcgtcgagaatgaactgaccgacgaagttacccacatcgtggcagaaaatctgtcacgctctgaagtattggcttggctgaaagaacacaagatggagaagaccaagcaattcgaactgctggatattagctggcttatcgaaagcatgaaagttggtaaaccggtggacaccaaggggaaataccagttggcggaatcggttgaggtgagtgcgaacccagatccgacagaaggtcgtgtaaacgagctgcctcctactatgaaaaccgtttctccgtatgcgtgtcaacgccgcaccaccctgaacaaccgtaatcaacgttttacggactcgctggaaattcttcgtgaaaattacgagttcaaacgcaacgatgatactgcgctggaatttcgtcgtgctatctccgtgctgaaaagccttccgtttgaggtacgtagcctgaaagacacggaaggattgccctggatcggtgatgaagtcaaagggattatggaagaaatcatcgaggtcggggagtcgcgtgaagtgcaggccgtgctcaatgatgagtggtatcaaagcttccaccgctttaagagtgtctttggagtgggggtgaagacagcagacaagtggtaccgtatgggtctgcgcaccctcgaggatgttcgttccagcaagaccctgaagttgaccccgacgcagaaagtaggtctgctgtattatgaagatcttgctcgcggcgttacgcgtgccgaagctgacgcgatttggctgctggttcaggatgcagtcgcaactttcgacccggatgcgatcgtggagattgtcggtggatttcgtcgtgggaaacctcagggtcacgacgttgatctgcttatcagttctccgggagctgagaaagagcaagaagaccaactcctgcagaaagtgatgaatctgtggaagaaacaagggttgttgctgtacggtcgtctggaatggacccagtgggaagatgggggttcgccttccggtaaggctgacgagggtgacgcgggtgcgaaatgctttctgatcctcaaactttatgatcatctggtgcgtaaaagcaaatggaacatgccgacgggttcgaacgtgggcgagtccaaaccgtggaaagcaattcgcgtagatctgctgcgttgcccctatggcagttttgcgtttgcgatgttgcagtggaccggaagccgcatgttccgtcgtgatctgcgttggtacgccactgacgagaagaacatgatgctggacaatcattcgctgtatgacctgaccaagggtatcttcctccctgctaaatcggaagaggaaattttcgcacatctggggcttgaatacctggaaccgttcgaacgtaacgca

SEQ ID NO: 3296 - protein, 529 aa, synthetic construct
  REGION 1..529: note = Variant of terminal deoxynucleotidyltransferase
MHHHHHHGGSGSHGIRTIDSDFGKKQQKKGDNHDSSATYEIKFHEFVLFILEEKMGATRRTFLTDLARKKGFRVENELTDEVTHIVAENLSRSEVLAWLKEHKMEKTKQFELLDISWLIESMKVGKPVDTKGKYQLAESVEVSANPDPTEGRVNELPPTMKTVSPYACQRRTTLNNRNQRFTDSLEILRENYEFKRNDDTALEFRRAISVLKSLPFEVRSLKDTEGLPWIGDEVKGIMEEIIEVGESREVQAVLNDEWYQSFHRFKSVFGVGVKTADKWYRMGLRTLEDVRSSKTLKLTPTQKVGLLYYEDLARGVTRAEADAIWLLVQDAVATFDPDAIVEIVGGFRRGKPQGHDVDLLISSPGAEKEQEDQLLQKVMNLWKKQGLLLYGRLEWTQWEDGGSPSGKADEGDAGAKCFLILKLYDHLVRKSKWNMPTGSNVGESKPWKAIRVDLLRCPYGSFAFAMLQWTGSRMFRRDLRWYATDEKNMMLDNHSLYDLTKGIFLPAKSEEEIFAHLGLEYLEPFERNA

SEQ ID NO: 3297 - DNA, 1587 bp, synthetic construct
  misc_feature 1..1587: note = Variant of terminal deoxynucleotidyltransferase
  source 1..1587: mol_type = other DNA
atgcaccatcatcatcatcatggcggtagcggcagccacggcattcgtaccatcgattcggacttcgggaagaaacagcagaaaaaaggcgataaccacgatagttccgccacttatgaaatcaaatttcacgagtttgtgctgttcattctcgaagaaaaaatgggtgcgacgcgtcgtacttttctgacagatttagcccgcaagaaagggttccgcgtcgagaatgaactgaccgacgaagttacccacatcgtggcagaaaatctgtcacgctctgaagtattggcttggctgaaagaacacaagatggagaagaccaagcaattcgaactgctggatattagctggcttatcgaaagcatgaaagttggtaaaccggtggacaccaaggggaaataccagttggcggaatcggttgaggtgagtgcgaacccagatccgacagaaggtcgtgtaaacgagctgcctcctactatgaaaaccgtttctccgtatgcgtgtcaacgccgcaccaccctgaacaaccgtaatcaacgttttacggactcgctggaaattcttcgtgaaaattacgagttcaaacgcaacgatgatactgcgctggaatttcgtcgtgctatctccgtgctgaaaagccttccgtttgaggtacgtagcctgaaagacacggaaggattgccctggatcggtgatgaagtcaaagggattatggaagaaatcatcgaggtcggggagtcgcgtgaagtgcaggccgtgctcaatgatgagtggtatcaaagcttccaccgctttaagagtgtctttggagtgggggtgaagacagcagacaagtggtaccgtatgggtctgcgcaccctcgaggatgttcgttccagcaagaccctgaagttgaccccggtgcagaaagtaggtctgctgtattatgaagatcttgctcgcggcgttacgcgtgccgaagctgacgcgatttggctgctggttcaggatgcagtcgcaactttcgacccggatgcgatcgtggagattgtcggtggatttcgtcgtgggaaacctcagggtcacgacgttgatctgcttatcagttctccgggagctgagaaagagcaagaagaccaactcctgcagaaagtgatgaatctgtggaagaaacaagggttgttgctgtacggtcgtctggaatggacccagtgggaagatgggggttcgccttccggtaaggctgacgagggtgacgcgggtgcgaaatgctttctgatcctcaaactttatgatcatctggtgcgtaaaagcaaatggaacatgccgacgggttcgaacgtgggcgagtccaaaccgtggaaagcaattcgcgtagatctgctgcgttgcccctatggcagttttgcgtttgcgatgttgcagtggaccggaagccgcatgttccgtcgtgatctgcgttggtacgccactgacgagaagaacatgatgctggacaatcattcgctgtatgacctgaccaagggtatcttcctccctgctaaatcggaagaggaaattttcgcacatctggggcttgaatacctggaaccgttcgaacgtaacgca

SEQ ID NO: 3298 - protein, 529 aa, synthetic construct
  REGION 1..529: note = Variant of terminal deoxynucleotidyltransferase
MHHHHHHGGSGSHGIRTIDSDFGKKQQKKGDNHDSSATYEIKFHEFVLFILEEKMGATRRTFLTDLARKKGFRVENELTDEVTHIVAENLSRSEVLAWLKEHKMEKTKQFELLDISWLIESMKVGKPVDTKGKYQLAESVEVSANPDPTEGRVNELPPTMKTVSPYACQRRTTLNNRNQRFTDSLEILRENYEFKRNDDTALEFRRAISVLKSLPFEVRSLKDTEGLPWIGDEVKGIMEEIIEVGESREVQAVLNDEWYQSFHRFKSVFGVGVKTADKWYRMGLRTLEDVRSSKTLKLTPVQKVGLLYYEDLARGVTRAEADAIWLLVQDAVATFDPDAIVEIVGGFRRGKPQGHDVDLLISSPGAEKEQEDQLLQKVMNLWKKQGLLLYGRLEWTQWEDGGSPSGKADEGDAGAKCFLILKLYDHLVRKSKWNMPTGSNVGESKPWKAIRVDLLRCPYGSFAFAMLQWTGSRMFRRDLRWYATDEKNMMLDNHSLYDLTKGIFLPAKSEEEIFAHLGLEYLEPFERNA

SEQ ID NO: 3299 - DNA, 1587 bp, synthetic construct
  misc_feature 1..1587: note = Variant of terminal deoxynucleotidyltransferase
  source 1..1587: mol_type = other DNA
atgcaccatcatcatcatcatggcggtagcggcagccacggcattcgtaccatcgattcggacttcgggaagaaacagcagaaaaaaggcgataaccacgatagttccgccacttatgaaatcaaatttcacgagtttgtgctgttcattctcgaagaaaaaatgggtgcgacgcgtcgtacttttctgacagatttagcccgcaagaaagggttccgcgtcgagaatgaactgaccgacgaagttacccacatcgtggcagaaaatctgtcacgctctgaagtattggcttggctgaaagaacacaagatggagaagaccaagcaattcgaactgctggatattagctggcttatcgaaagcatgaaagttggtaaaccggtggacaccaaggggaaataccagttggcggaatcggttgaggtgagtgcgaacccagatccgacagaaggtcgtgtaaacgagctgcctcctactatgaaaaccgtttctccgtatgcgtgtcaacgccgcaccaccctgaacaaccgtaatcaacgttttacggactcgctggaaattcttcgtgaaaattacgagttcaaacgcaacgatgatactgcgctggaatttcgtcgtgctatctccgtgctgaaaagccttccgtttgaggtacgtagcctgaaagacacggaaggattgccctggatcggtgatgaagtcaaagggattatggaagaaatcatcgaggtcggggagtcgcgtgaagtgcaggccgtgctcaatgatgagtggtatcaaagcttccaccgctttaagagtgtctttggagtgggggtgaagacagcagacaagtggtaccgtatgggtctgcgcaccctcgaggatgttcgttccagcaagaccctgaagttgaccccgatgcagaaagtaggtctgctgtattatgaagatcttgctcgcggcgttacgcgtgccgaagctgacgcgatttggctgctggttcaggatgcagtcgcaactttcgacccggatgcgatcgtggagattgtcggtggatttcgtcgtgggaaacctcagggtcacgacgttgatctgcttatcagttctccgggagctgagaaagagcaagaagaccaactcctgcagaaagtgatgaatctgtggaagaaacaagggttgttgctgtacggtcgtctgttttggacccagtgggaagatgggggttcgccttccggtaaggctgacgagggtgacgcgggtgcgaaatgctttctgatcctcaaactttatgatcatctggtgcgtaaaagcaaatggaacatgccgacgggttcgaacgtgggcgagtccaaaccgtggaaagcaattcgcgtagatctgctgcgttgcccctatggcagttttgcgtttgcgatgttgcagtggaccggaagccgcatgttccgtcgtgatctgcgttggtacgccactgacgagaagaacatgatgctggacaatcattcgctgtatgacctgaccaagggtatcttcctccctgctaaatcggaagaggaaattttcgcacatctggggcttgaatacctggaaccgttcgaacgtaacgca

SEQ ID NO: 3300 - protein, 529 aa, synthetic construct
  REGION 1..529: note = Variant of terminal deoxynucleotidyltransferase
MHHHHHHGGSGSHGIRTIDSDFGKKQQKKGDNHDSSATYEIKFHEFVLFILEEKMGATRRTFLTDLARKKGFRVENELTDEVTHIVAENLSRSEVLAWLKEHKMEKTKQFELLDISWLIESMKVGKPVDTKGKYQLAESVEVSANPDPTEGRVNELPPTMKTVSPYACQRRTTLNNRNQRFTDSLEILRENYEFKRNDDTALEFRRAISVLKSLPFEVRSLKDTEGLPWIGDEVKGIMEEIIEVGESREVQAVLNDEWYQSFHRFKSVFGVGVKTADKWYRMGLRTLEDVRSSKTLKLTPMQKVGLLYYEDLARGVTRAEADAIWLLVQDAVATFDPDAIVEIVGGFRRGKPQGHDVDLLISSPGAEKEQEDQLLQKVMNLWKKQGLLLYGRLFWTQWEDGGSPSGKADEGDAGAKCFLILKLYDHLVRKSKWNMPTGSNVGESKPWKAIRVDLLRCPYGSFAFAMLQWTGSRMFRRDLRWYATDEKNMMLDNHSLYDLTKGIFLPAKSEEEIFAHLGLEYLEPFERNA

SEQ ID NO: 3301 - DNA, 1587 bp, synthetic construct
  misc_feature 1..1587: note = Variant of terminal deoxynucleotidyltransferase
  source 1..1587: mol_type = other DNA
atgcaccatcatcatcatcatggcggtagcggcagccacggcattcgtaccatcgattcggacttcgggaagaaacagcagaaaaaaggcgataaccacgatagttccgccacttatgaaatcaaatttcacgagtttgtgctgttcattctcgaagaaaaaatgggtgcgacgcgtcgtacttttctgacagatttagcccgcaagaaagggttccgcgtcgagaatgaactgaccgacgaagttacccacatcgtggcagaaaatctgtcacgctctgaagtattggcttggctgaaagaacacaagatggagaagaccaagcaattcgaactgctggatattagctggcttatcgaaagcatgaaagttggtaaaccggtggacaccaaggggaaataccagttggcggaatcggttgaggtgagtgcgaacccagatccgacagaaggtcgtgtaaacgagctgcctcctactatgaaaaccgtttctccgtatgcgtgtcaacgccgcaccaccctgaacaaccgtaatcaacgttttacggactcgctggaaattcttcgtgaaaattacgagttcaaacgcaacgatgatactgcgctggaatttcgtcgtgctatctccgtgctgaaaagccttccgtttgaggtacgtagcctgaaagacacggaaggattgccctggatcggtgatgaagtcaaagggattatggaagaaatcatcgaggtcggggagtcgcgtgaagtgcaggccgtgctcaatgatgagtggtatcaaagcttccaccgctttaagagtgtctttggagtgggggtgaagacagcagacaagtggtaccgtatgggtctgcgcaccctcgaggatgttcgttccagcaagaccctgaagttgaccccgatgcagaaagtaggtctgctgtattatgaagatcttgctcgcggcgttacgcgtgccgaagctgacgcgatttggctgctggttcaggatgcagtcgcaactttcgacccggatgcgatcgtggagattgtcggtggatttcgtcgtgggaaacctcagggtcacgacgttgatctgcttatcagttctccgggagctgagaaagagcaagaagaccaactcctgcagaaagtgatgaatctgtggaagaaacaagggttgttgctgtgtggtcgtctggaatggacccagtgggaagatgggggttcgccttccggtaaggctgacgagggtgacgcgggtgcgaaatgctttctgatcctcaaactttatgatcatctggtgcgtaaaagcaaatggaacatgccgacgggttcgaacgtgggcgagtccaaaccgtggaaagcaattcgcgtagatctgctgcgttgcccctatggcagttttgcgtttgcgatgttgcagtggaccggaagccgcatgttccgtcgtgatctgcgttggtacgccactgacgagaagaacatgatgctggacaatcattcgctgtatgacctgaccaagggtatcttcctccctgctaaatcggaagaggaaattttcgcacatctggggcttgaatacctggaaccgttcgaacgtaacgca

SEQ ID NO: 3302 - protein, 529 aa, synthetic construct
  REGION 1..529: note = Variant of terminal deoxynucleotidyltransferase
MHHHHHHGGSGSHGIRTIDSDFGKKQQKKGDNHDSSATYEIKFHEFVLFILEEKMGATRRTFLTDLARKKGFRVENELTDEVTHIVAENLSRSEVLAWLKEHKMEKTKQFELLDISWLIESMKVGKPVDTKGKYQLAESVEVSANPDPTEGRVNELPPTMKTVSPYACQRRTTLNNRNQRFTDSLEILRENYEFKRNDDTALEFRRAISVLKSLPFEVRSLKDTEGLPWIGDEVKGIMEEIIEVGESREVQAVLNDEWYQSFHRFKSVFGVGVKTADKWYRMGLRTLEDVRSSKTLKLTPMQKVGLLYYEDLARGVTRAEADAIWLLVQDAVATFDPDAIVEIVGGFRRGKPQGHDVDLLISSPGAEKEQEDQLLQKVMNLWKKQGLLLCGRLEWTQWEDGGSPSGKADEGDAGAKCFLILKLYDHLVRKSKWNMPTGSNVGESKPWKAIRVDLLRCPYGSFAFAMLQWTGSRMFRRDLRWYATDEKNMMLDNHSLYDLTKGIFLPAKSEEEIFAHLGLEYLEPFERNA

SEQ ID NO: 3303 - DNA, 1587 bp, synthetic construct
  misc_feature 1..1587: note = Variant of terminal deoxynucleotidyltransferase
  source 1..1587: mol_type = other DNA
atgcaccatcatcatcatcatggcggtagcggcagccacggcattcgtaccatcgattcggacttcgggaagaaacagcagaaaaaaggcgataaccacgatagttccgccacttatgaaatcaaatttcacgagtttgtgctgttcattctcgaagaaaaaatgggtgcgacgcgtcgtacttttctgacagatttagcccgcaagaaagggttccgcgtcgagaatgaactgaccgacgaagttacccacatcgtggcagaaaatctgtcacgctctgaagtattggcttggctgaaagaacacaagatggagaagaccaagcaattcgaactgctggatattagctggcttatcgaaagcatgaaagttggtaaaccggtggacaccaaggggaaataccagttggcggaatcggttgaggtgagtgcgaacccagatccgacagaaggtcgtgtaaacgagctgcctcctactatgaaaaccgtttctccgtatgcgtgtcaacgccgcaccaccctgaacaaccgtaatcaacgttttacggactcgctggaaattcttcgtgaaaattacgagttgaaacgcaacgatgatactgcgctggaatttcgtcgtgctatctccgtgctgaaaagccttccgtttgaggtacgtagcctgaaagacacggaaggattgccctggatcggtgatgaagtcaaagggattatggaagaaatcatcgaggtcggggagtcgcgtgaagtgcaggccgtgctcaatgatgagtggtatcaaagcttccaccgctttaagagtgtctttggagtgggggtgaagacagcagacaagtggtaccgtatgggtctgcgcaccctcgaggatgttcgttccagcaagaccctgaagttgaccccgatgcagaaagtaggtctgctgtattatgaagatcttgctcgcggcgttacgcgtgccgaagctgacgcgatttggctgctggttcaggatgcagtcgcaactttcgacccggatgcgatcgtggagattgtcggtggatttcgtcgtgggaaacctcagggtcacgacgttgatctgcttatcagttctccgggagctgagaaagagcaagaagaccaactcctgcagaaagtgatgaatctgtggaagaaacaagggttgttgctgtacggtcgtctggaatggacccagtgggaagatgggggttcgccttccggtaaggctgacgagggtgacgcgggtgcgaaatgctttctgatcctcaaactttatgatcatctggtgcgtaaaagcaaatggaacatgccgacgggttcgaacgtgggcgagtccaaaccgtggaaagcaattcgcgtagatctgctgcgttgcccctatggcagttttgcgtttgcgatgttgcagtggaccggaagccgcatgttccgtcgtgatctgcgttggtacgccactgacgagaagaacatgatgctggacaatcattcgctgtatgacctgaccaagggtatcttcctccctgctaaatcggaagaggaaattttcgcacatctggggcttgaatacctggaaccgttcgaacgtaacgca

SEQ ID NO: 3304 - protein, 529 aa, synthetic construct
  REGION 1..529: note = Variant of terminal deoxynucleotidyltransferase
MHHHHHHGGSGSHGIRTIDSDFGKKQQKKGDNHDSSATYEIKFHEFVLFILEEKMGATRRTFLTDLARKKGFRVENELTDEVTHIVAENLSRSEVLAWLKEHKMEKTKQFELLDISWLIESMKVGKPVDTKGKYQLAESVEVSANPDPTEGRVNELPPTMKTVSPYACQRRTTLNNRNQRFTDSLEILRENYELKRNDDTALEFRRAISVLKSLPFEVRSLKDTEGLPWIGDEVKGIMEEIIEVGESREVQAVLNDEWYQSFHRFKSVFGVGVKTADKWYRMGLRTLEDVRSSKTLKLTPMQKVGLLYYEDLARGVTRAEADAIWLLVQDAVATFDPDAIVEIVGGFRRGKPQGHDVDLLISSPGAEKEQEDQLLQKVMNLWKKQGLLLYGRLEWTQWEDGGSPSGKADEGDAGAKCFLILKLYDHLVRKSKWNMPTGSNVGESKPWKAIRVDLLRCPYGSFAFAMLQWTGSRMFRRDLRWYATDEKNMMLDNHSLYDLTKGIFLPAKSEEEIFAHLGLEYLEPFERNA

SEQ ID NO: 3305 - DNA, 1587 bp, synthetic construct
  misc_feature 1..1587: note = Variant of terminal deoxynucleotidyltransferase
  source 1..1587: mol_type = other DNA
atgcaccatcatcatcatcatggcggtagcggcagccacggcattcgtaccatcgattcggacttcgggaagaaacagcagaaaaaaggcgataaccacgatagttccgccacttatgaaatcaaatttcacgagtttgtgctgttcattctcgaagaaaaaatgggtgcgacgcgtcgtacttttctgacagatttagcccgcaagaaagggttccgcgtcgagaatgaactgaccgacgaagttacccacatcgtggcagaaaatctgtcacgctctgaagtattggcttggctgaaagaacacaagatggagaagaccaagcaattcgaactgctggatattagctggcttatcgaaagcatgaaagttggtaaaccggtggacaccaaggggaaataccagttggcggaatcggttgaggtgagtgcgaacccagatccgacagaaggtcgtgtaaacgagctgcctcctactatgaaaaccgtttctccgtatgcgtgtcaacgccgcaccaccctgaacaaccgtaatcaacgttttacggactcgctggaaattcttcgtgaaaattacgagttcaaacgcaacgatgatactgcgctggaatttcgtcgtgctatctccgtgctgaaaagccttccgtttgaggtacgtagcctgaaagacacggaaggattgccctggatcggtgatgaagtcaaagggattatggaagaaatcatcgaggtcggggagtcgcgtgaagtgcaggccgtgctcaatgatgagtggtatcaaagcttccaccgctttaagagtgtctttggagtgggggtgaagacagcagacaagtggtaccgtatgggtctgcgcaccctcgaggatgttcgttccagcaagaccctgaagttgaccccgatgcagaaagtaggtctgctgtattatgaagatcttgctcgcggcgttacgcgtgccgaagctgacgcgatttggctgctggttcaggatgcagtcgcaactttcgacccggatgcgatcgtggagattgtcggtggatttcgtcgtgggaaacctcagggtcacgacgttgatctgcttatcagttctccgggagctgagaaagagcaagaagaccaactcctgcagaaagtgatgaatctgtggaagaaacaagggttgttgctgtacggtcgtctggaatggacccagtgggaagatgggggttcgccttccggtaagattgacgagggtgacgcgggtgcgaaatgctttctgatcctcaaactttatgatcatctggtgcgtaaaagcaaatggaacatgccgacgggttcgaacgtgggcgagtccaaaccgtggaaagcaattcgcgtagatctgctgcgttgcccctatggcagttttgcgtttgcgatgttgcagtggaccggaagccgcatgttccgtcgtgatctgcgttggtacgccactgacgagaagaacatgatgctggacaatcattcgctgtatgacctgaccaagggtatcttcctccctgctaaatcggaagaggaaattttcgcacatctggggcttgaatacctggaaccgttcgaacgtaacgca

SEQ ID NO: 3306 - protein, 529 aa, synthetic construct
  REGION 1..529: note = Variant of terminal deoxynucleotidyltransferase
MHHHHHHGGSGSHGIRTIDSDFGKKQQKKGDNHDSSATYEIKFHEFVLFILEEKMGATRRTFLTDLARKKGFRVENELTDEVTHIVAENLSRSEVLAWLKEHKMEKTKQFELLDISWLIESMKVGKPVDTKGKYQLAESVEVSANPDPTEGRVNELPPTMKTVSPYACQRRTTLNNRNQRFTDSLEILRENYEFKRNDDTALEFRRAISVLKSLPFEVRSLKDTEGLPWIGDEVKGIMEEIIEVGESREVQAVLNDEWYQSFHRFKSVFGVGVKTADKWYRMGLRTLEDVRSSKTLKLTPMQKVGLLYYEDLARGVTRAEADAIWLLVQDAVATFDPDAIVEIVGGFRRGKPQGHDVDLLISSPGAEKEQEDQLLQKVMNLWKKQGLLLYGRLEWTQWEDGGSPSGKIDEGDAGAKCFLILKLYDHLVRKSKWNMPTGSNVGESKPWKAIRVDLLRCPYGSFAFAMLQWTGSRMFRRDLRWYATDEKNMMLDNHSLYDLTKGIFLPAKSEEEIFAHLGLEYLEPFERNA

SEQ ID NO: 3307 - DNA, 1587 bp, synthetic construct
  misc_feature 1..1587: note = Variant of terminal deoxynucleotidyltransferase
  source 1..1587: mol_type = other DNA
atgcaccatcatcatcatcatggcggtagcggcagccacggcattcgtaccatcgattcggacttcgggaagaaacagcagaaaaaaggcgataaccacgatagttccgccacttatgaaatcaaatttcacgagtttgtgctgttcattctcgaagaaaaaatgggtgcgacgcgtcgtacttttctgacagatttagcccgcaagaaagggttccgcgtcgagaatgaactgaccgacgaagttacccacatcgtggcagaaaatctgtcacgctctgaagtattggcttggctgaaagaacacaagatggagaagaccaagcaattcgaactgctggatattagctggcttatcgaaagcatgaaagttggtaaaccggtggacaccaaggggaaataccagttggcggaatcggttgaggtgagtgcgaacccagatccgacagaaggtcgtgtaaacgagctgcctcctactatgaaaaccgtttctccgtatgcgtgtcaacgccgcaccaccctgaacaaccgtaatcaacgttttacggactcgctggaaattcttcgtgaaaattacgagttcaaacgcaacgatgatactgcgctggaatttcgtcgtgctatctccgtgctgaaaagccttccgtttgaggtacgtagcctgaaagacacggaaggattgccctggatcggtgatgaagtcaaagggattatggaagaaatcatcgaggtcggggagtcgcgtgaagtgcaggccgtgctcaatgatgagtggtatcaaagcttccaccgctttaagagtgtctttggagtggggtttaagacagcagacaagtggtaccgtatgggtctgcgcaccctcgaggatgttcgttccagcaagaccctgaagttgaccccgatgcagaaagtaggtctgctgtattatgaagatcttgctcgcggcgttacgcgtgccgaagctgacgcgatttggctgctggttcaggatgcagtcgcaactttcgacccggatgcgatcgtggagattgtcggtggatttcgtcgtgggaaacctcagggtcacgacgttgatctgcttatcagttctccgggagctgagaaagagcaagaagaccaactcctgcagaaagtgatgaatctgtggaagaaacaagggttgttgctgtacggtcgtctggaatggacccagtgggaagatgggggttcgccttccggtaaggctgacgagggtgacgcgggtgcgaaatgctttctgatcctcaaactttatgatcatctggtgcgtaaaagcaaatggaacatgccgacgggttcgaacgtgggcgagtccaaaccgtggaaagcaattcgcgtagatctgctgcgttgcccctatggcagttttgcgtttgcgatgttgcagtggaccggaagccgcatgttccgtcgtgatctgcgttggtacgccactgacgagaagaacatgatgctggacaatcattcgctgtatgacctgaccaagggtatcttcctccctgctaaatcggaagaggaaattttcgcacatctggggcttgaatacctggaaccgttcgaacgtaacgca

SEQ ID NO: 3308 - protein, 529 aa, synthetic construct
  REGION 1..529: note = Variant of terminal deoxynucleotidyltransferase
MHHHHHHGGSGSHGIRTIDSDFGKKQQKKGDNHDSSATYEIKFHEFVLFILEEKMGATRRTFLTDLARKKGFRVENELTDEVTHIVAENLSRSEVLAWLKEHKMEKTKQFELLDISWLIESMKVGKPVDTKGKYQLAESVEVSANPDPTEGRVNELPPTMKTVSPYACQRRTTLNNRNQRFTDSLEILRENYEFKRNDDTALEFRRAISVLKSLPFEVRSLKDTEGLPWIGDEVKGIMEEIIEVGESREVQAVLNDEWYQSFHRFKSVFGVGFKTADKWYRMGLRTLEDVRSSKTLKLTPMQKVGLLYYEDLARGVTRAEADAIWLLVQDAVATFDPDAIVEIVGGFRRGKPQGHDVDLLISSPGAEKEQEDQLLQKVMNLWKKQGLLLYGRLEWTQWEDGGSPSGKADEGDAGAKCFLILKLYDHLVRKSKWNMPTGSNVGESKPWKAIRVDLLRCPYGSFAFAMLQWTGSRMFRRDLRWYATDEKNMMLDNHSLYDLTKGIFLPAKSEEEIFAHLGLEYLEPFERNA

SEQ ID NO: 3309 - DNA, 1587 bp, synthetic construct
  misc_feature 1..1587: note = Variant of terminal deoxynucleotidyltransferase
  source 1..1587: mol_type = other DNA
atgcaccatcatcatcatcatggcggtagcggcagccacggcattcgtaccatcgattcggacttcgggaagaaacagcagaaaaaaggcgataaccacgatagttccgccacttatgaaatcaaatttcacgagtttgtgctgttcattctcgaagaaaaaatgggtgcgacgcgtcgtacttttctgacagatttagcccgcaagaaagggttccgcgtcgagaatgaactgaccgacgaagttacccacatcgtggcagaaaatctgtcacgctctgaagtattggcttggctgaaagaacacaagatggagaagaccaagcaattcgaactgctggatattagctggcttatcgaaagcatgaaagttggtaaaccggtggacaccaaggggaaataccagttggcggaatcggttgaggtgagtgcgaacccagatccgacagaaggtcgtgtaaacgagctgcctcctactatgaaaaccgtttctccgtatgcgtgtcaacgccgcaccaccctgaacaaccgtaatcaacgttttacggactcgctggaaattcttcgtgaaaattacgagttcaaacgcaacgatgatactgcgctggaatttcgtcgtgctatctccgtgctgaaaagccttccgtttgaggtacgtagcctgaaagacacggaaggattgccctggatcggtgatgaagtcaaagggattatggaagaaatcatcgaggtcggggagtcgcgtgaagtgcaggccgtgctcaatgatgagtggtatcaaagcttccaccgctttaagagtgtctttggagtggggttgaagacagcagacaagtggtaccgtatgggtctgcgcaccctcgaggatgttcgttccagcaagaccctgaagttgaccccgatgcagaaagtaggtctgctgtattatgaagatcttgctcgcggcgttacgcgtgccgaagctgacgcgatttggctgctggttcaggatgcagtcgcaactttcgacccggatgcgatcgtggagattgtcggtggatttcgtcgtgggaaacctcagggtcacgacgttgatctgcttatcagttctccgggagctgagaaagagcaagaagaccaactcctgcagaaagtgatgaatctgtggaagaaacaagggttgttgctgtacggtcgtctggaatggacccagtgggaagatgggggttcgccttccggtaaggctgacgagggtgacgcgggtgcgaaatgctttctgatcctcaaactttatgatcatctggtgcgtaaaagcaaatggaacatgccgacgggttcgaacgtgggcgagtccaaaccgtggaaagcaattcgcgtagatctgctgcgttgcccctatggcagttttgcgtttgcgatgttgcagtggaccggaagccgcatgttccgtcgtgatctgcgttggtacgccactgacgagaagaacatgatgctggacaatcattcgctgtatgacctgaccaagggtatcttcctccctgctaaatcggaagaggaaattttcgcacatctggggcttgaatacctggaaccgttcgaacgtaacgca

SEQ ID NO: 3310 - protein, 529 aa, synthetic construct
  REGION 1..529: note = Variant of terminal deoxynucleotidyltransferase
MHHHHHHGGSGSHGIRTIDSDFGKKQQKKGDNHDSSATYEIKFHEFVLFILEEKMGATRRTFLTDLARKKGFRVENELTDEVTHIVAENLSRSEVLAWLKEHKMEKTKQFELLDISWLIESMKVGKPVDTKGKYQLAESVEVSANPDPTEGRVNELPPTMKTVSPYACQRRTTLNNRNQRFTDSLEILRENYEFKRNDDTALEFRRAISVLKSLPFEVRSLKDTEGLPWIGDEVKGIMEEIIEVGESREVQAVLNDEWYQSFHRFKSVFGVGLKTADKWYRMGLRTLEDVRSSKTLKLTPMQKVGLLYYEDLARGVTRAEADAIWLLVQDAVATFDPDAIVEIVGGFRRGKPQGHDVDLLISSPGAEKEQEDQLLQKVMNLWKKQGLLLYGRLEWTQWEDGGSPSGKADEGDAGAKCFLILKLYDHLVRKSKWNMPTGSNVGESKPWKAIRVDLLRCPYGSFAFAMLQWTGSRMFRRDLRWYATDEKNMMLDNHSLYDLTKGIFLPAKSEEEIFAHLGLEYLEPFERNA

SEQ ID NO: 3311 - DNA, 1587 bp, synthetic construct
  misc_feature 1..1587: note = Variant of terminal deoxynucleotidyltransferase
  source 1..1587: mol_type = other DNA
atgcaccatcatcatcatcatggcggtagcggcagccacggcattcgtaccatcgattcggacttcgggaagaaacagcagaaaaaaggcgataaccacgatagttccgccacttatgaaatcaaatttcacgagtttgtgctgttcattctcgaagaaaaaatgggtgcgacgcgtcgtacttttctgacagatttagcccgcaagaaagggttccgcgtcgagaatgaactgaccgacgaagttacccacatcgtggcagaaaatctgtcacgctctgaagtattggcttggctgaaagaacacaagatggagaagaccaagcaattcgaactgctggatattagctggcttatcgaaagcatgaaagttggtaaaccggtggacaccaaggggaaataccagttggcggaatcggttgaggtgagtgcgaacccagatccgacagaaggtcgtgtaaacgagctgcctcctactatgaaaaccgtttctccgtatgcgtgtcaacgccgcaccaccctgaacaaccgtaatcaacgttttacggactcgctggaaattcttcgtgaaaattacgagttcaaacgcaacgatgatactgcgctggaatttcgtcgtgctatctccgtgctgaaaagccttccgtttgaggtacgtagcctgaaagacacggaaggattgccctggatcggtgatgaagtcaaagggattatggaagaaatcatcgaggtcggggagtcgcgtgaagtgcaggccgtgctcaatgatgagtggtatcaaagcttccaccgctttaagagtgtctttggagtgggggtgattacagcagacaagtggtaccgtatgggtctgcgcaccctcgaggatgttcgttccagcaagaccctgaagttgaccccgatgcagaaagtaggtctgctgtattatgaagatcttgctcgcggcgttacgcgtgccgaagctgacgcgatttggctgctggttcaggatgcagtcgcaactttcgacccggatgcgatcgtggagattgtcggtggatttcgtcgtgggaaacctcagggtcacgacgttgatctgcttatcagttctccgggagctgagaaagagcaagaagaccaactcctgcagaaagtgatgaatctgtggaagaaacaagggttgttgctgtacggtcgtctggaatggacccagtgggaagatgggggttcgccttccggtaaggctgacgagggtgacgcgggtgcgaaatgctttctgatcctcaaactttatgatcatctggtgcgtaaaagcaaatggaacatgccgacgggttcgaacgtgggcgagtccaaaccgtggaaagcaattcgcgtagatctgctgcgttgcccctatggcagttttgcgtttgcgatgttgcagtggaccggaagccgcatgttccgtcgtgatctgcgttggtacgccactgacgagaagaacatgatgctggacaatcattcgctgtatgacctgaccaagggtatcttcctccctgctaaatcggaagaggaaattttcgcacatctggggcttgaatacctggaaccgttcgaacgtaacgca

SEQ ID NO: 3312 - protein, 529 aa, synthetic construct
  REGION 1..529: note = Variant of terminal deoxynucleotidyltransferase
MHHHHHHGGSGSHGIRTIDSDFGKKQQKKGDNHDSSATYEIKFHEFVLFILEEKMGATRRTFLTDLARKKGFRVENELTDEVTHIVAENLSRSEVLAWLKEHKMEKTKQFELLDISWLIESMKVGKPVDTKGKYQLAESVEVSANPDPTEGRVNELPPTMKTVSPYACQRRTTLNNRNQRFTDSLEILRENYEFKRNDDTALEFRRAISVLKSLPFEVRSLKDTEGLPWIGDEVKGIMEEIIEVGESREVQAVLNDEWYQSFHRFKSVFGVGVITADKWYRMGLRTLEDVRSSKTLKLTPMQKVGLLYYEDLARGVTRAEADAIWLLVQDAVATFDPDAIVEIVGGFRRGKPQGHDVDLLISSPGAEKEQEDQLLQKVMNLWKKQGLLLYGRLEWTQWEDGGSPSGKADEGDAGAKCFLILKLYDHLVRKSKWNMPTGSNVGESKPWKAIRVDLLRCPYGSFAFAMLQWTGSRMFRRDLRWYATDEKNMMLDNHSLYDLTKGIFLPAKSEEEIFAHLGLEYLEPFERNA

SEQ ID NO: 3313 - DNA, 1587 bp, synthetic construct
  misc_feature 1..1587: note = Variant of terminal deoxynucleotidyltransferase
  source 1..1587: mol_type = other DNA
atgcaccatcatcatcatcatggcggtagcggcagccacggcattcgtaccatcgattcggacttcgggaagaaacagcagaaaaaaggcgataaccacgatagttccgccacttatgaaatcaaatttcacgagtttgtgctgttcattctcgaagaaaaaatgggtgcgacgcgtcgtacttttctgacagatttagcccgcaagaaagggttccgcgtcgagaatgaactgaccgacgaagttacccacatcgtggcagaaaatctgtcacgctctgaagtattggcttggctgaaagaacacaagatggagaagaccaagcaattcgaactgctggatattagctggcttatcgaaagcatgaaagttggtaaaccggtggacaccaaggggaaataccagttggcggaatcggttgaggtgagtgcgaacccagatccgacagaaggtcgtgtaaacgagctgcctcctactatgaaaaccgtttctccgtatgcgtgtcaacgccgcaccaccctgaacaaccgtaatcaacgttttacggactcgctggaaattcttcgtgaaaattacgagttcaaacgcaacgatgatactgcgctggaatttcgtcgtgctatctccgtgctgaaaagccttccgtttgaggtacgtagcctgaaagacacggaaggattgccctggatcggtgatgaagtcaaagggattatggaagaaatcatcgaggtcggggagtcgcgtgaagtgcaggccgtgctcaatgatgagtggtatcaaagcttccaccgctttaagagtgtctttggagtgggggataagacagcagacaagtggtaccgtatgggtctgcgcaccctcgaggatgttcgttccagcaagaccctgaagttgaccccgatgcagaaagtaggtctgctgtattatgaagatcttgctcgcggcgttacgcgtgccgaagctgacgcgatttggctgctggttcaggatgcagtcgcaactttcgacccggatgcgatcgtggagattgtcggtggatttcgtcgtgggaaacctcagggtcacgacgttgatctgcttatcagttctccgggagctgagaaagagcaagaagaccaactcctgcagaaagtgatgaatctgtggaagaaacaagggttgttgctgtacggtcgtctggaatggacccagtgggaagatgggggttcgccttccggtaaggctgacgagggtgacgcgggtgcgaaatgctttctgatcctcaaactttatgatcatctggtgcgtaaaagcaaatggaacatgccgacgggttcgaacgtgggcgagtccaaaccgtggaaagcaattcgcgtagatctgctgcgttgcccctatggcagttttgcgtttgcgatgttgcagtggaccggaagccgcatgttccgtcgtgatctgcgttggtacgccactgacgagaagaacatgatgctggacaatcattcgctgtatgacctgaccaagggtatcttcctccctgctaaatcggaagaggaaattttcgcacatctggggcttgaatacctggaaccgttcgaacgtaacgca

SEQ ID NO: 3314 - protein, 529 aa, synthetic construct
  REGION 1..529: note = Variant of terminal deoxynucleotidyltransferase
MHHHHHHGGSGSHGIRTIDSDFGKKQQKKGDNHDSSATYEIKFHEFVLFILEEKMGATRRTFLTDLARKKGFRVENELTDEVTHIVAENLSRSEVLAWLKEHKMEKTKQFELLDISWLIESMKVGKPVDTKGKYQLAESVEVSANPDPTEGRVNELPPTMKTVSPYACQRRTTLNNRNQRFTDSLEILRENYEFKRNDDTALEFRRAISVLKSLPFEVRSLKDTEGLPWIGDEVKGIMEEIIEVGESREVQAVLNDEWYQSFHRFKSVFGVGDKTADKWYRMGLRTLEDVRSSKTLKLTPMQKVGLLYYEDLARGVTRAEADAIWLLVQDAVATFDPDAIVEIVGGFRRGKPQGHDVDLLISSPGAEKEQEDQLLQKVMNLWKKQGLLLYGRLEWTQWEDGGSPSGKADEGDAGAKCFLILKLYDHLVRKSKWNMPTGSNVGESKPWKAIRVDLLRCPYGSFAFAMLQWTGSRMFRRDLRWYATDEKNMMLDNHSLYDLTKGIFLPAKSEEEIFAHLGLEYLEPFERNA

SEQ ID NO: 3315 - DNA, 1587 bp, synthetic construct
  misc_feature 1..1587: note = Variant of terminal deoxynucleotidyltransferase
  source 1..1587: mol_type = other DNA
atgcaccatcatcatcatcatggcggtagcggcagccacggcattcgtaccatcgattcggacttcgggaagaaacagcagaaaaaaggcgataaccacgatagttccgccacttatgaaatcaaatttcacgagtttgtgctgttcattctcgaagaaaaaatgggtgcgacgcgtcgtacttttctgacagatttagcccgcaagaaagggttccgcgtcgagaatgaactgaccgacgaagttacccacatcgtggcagaaaatctgtcacgctctgaagtattggcttggctgaaagaacacaagatggagaagaccaagcaattcgaactgctggatattagctggcttatcgaaagcatgaaagttggtaaaccggtggacaccaaggggaaataccagttggcggaatcggttgaggtgagtgcgaacccagatccgacagaaggtcgtgtaaacgagctgcctcctactatgaaaaccgtttctccgtatgcgtgtcaacgccgcaccaccctgaacaaccgtaatcaacgttttacggactcgctggaaattcttcgtgaaaattacgagttcaaacgcaacgatgatactgcgctggaatttcgtcgtgctatctccgtgctgaaaagccttccgtttgaggtacgtagcctgaaagacacggaaggattgccctggatcggtgatgaagtcaaagggattatggaagaaatcatcgaggtcggggagtcgcgtgaagtgcaggccgtgctcaatgatgagtggtatcaaagcttccaccgctttaagagtgtctttggagtgggggtgaagacagcagacaagtggtaccgtatgggtctgcgcaccctcgaggatgttcgttccagcaagaccctgaagttgaccccgatgcagaaagtaggtctgctgtattatgaagatcttgctcgcggcgttacgcgtgccgaagctgacgcgatttggctgctggttcaggatgcagtcgcaactttcgacccggatgcgatcgtggagattgtcggtggatttcgtcgtgggaaacctcagggtcacgacgttgatctgcttatcagttctccgggagctgagaaagagcaagaagaccaactcctgcagaaagtgatgaatctgtggaagaaacaagggttgttgctgtacggtcgtctggaatggacccagtgggaagatgggggttcgccttccggtaaggctgacgagggtgacgcgggtgcgaaatgctttctgatcctcaaactttatgatcatctggtgcgtaaaagcaaatggaacatgccgacgggttcgaacgtgggcgagtccaaaccgtggaaagcaattcgcgtagatctgctgcgttgcccctatggcagttttgcgtttgcgatgttgcagtggaccggaagcggtatgttccgtcgtgatctgcgttggtacgccactgacgagaagaacatgatgctggacaatcattcgctgtatgacctgaccaagggtatcttcctccctgctaaatcggaagaggaaattttcgcacatctggggcttgaatacctggaaccgttcgaacgtaacgca

SEQ ID NO: 3316 - protein, 529 aa, synthetic construct
  REGION 1..529: note = Variant of terminal deoxynucleotidyltransferase
MHHHHHHGGSGSHGIRTIDSDFGKKQQKKGDNHDSSATYEIKFHEFVLFILEEKMGATRRTFLTDLARKKGFRVENELTDEVTHIVAENLSRSEVLAWLKEHKMEKTKQFELLDISWLIESMKVGKPVDTKGKYQLAESVEVSANPDPTEGRVNELPPTMKTVSPYACQRRTTLNNRNQRFTDSLEILRENYEFKRNDDTALEFRRAISVLKSLPFEVRSLKDTEGLPWIGDEVKGIMEEIIEVGESREVQAVLNDEWYQSFHRFKSVFGVGVKTADKWYRMGLRTLEDVRSSKTLKLTPMQKVGLLYYEDLARGVTRAEADAIWLLVQDAVATFDPDAIVEIVGGFRRGKPQGHDVDLLISSPGAEKEQEDQLLQKVMNLWKKQGLLLYGRLEWTQWEDGGSPSGKADEGDAGAKCFLILKLYDHLVRKSKWNMPTGSNVGESKPWKAIRVDLLRCPYGSFAFAMLQWTGSGMFRRDLRWYATDEKNMMLDNHSLYDLTKGIFLPAKSEEEIFAHLGLEYLEPFERNA

SEQ ID NO: 3317 - DNA, 1587 bp, synthetic construct
  misc_feature 1..1587: note = Variant of terminal deoxynucleotidyltransferase
  source 1..1587: mol_type = other DNA
atgcaccatcatcatcatcatggcggtagcggcagccacggcattcgtaccatcgattcggacttcgggaagaaacagcagaaaaaaggcgataaccacgatagttccgccacttatgaaatcaaatttcacgagtttgtgctgttcattctcgaagaaaaaatgggtgcgacgcgtcgtacttttctgacagatttagcccgcaagaaagggttccgcgtcgagaatgaactgaccgacgaagttacccacatcgtggcagaaaatctgtcacgctctgaagtattggcttggctgaaagaacacaagatggagaagaccaagcaattcgaactgctggatattagctggcttatcgaaagcatgaaagttggtaaaccggtggacaccaaggggaaataccagttggcggaatcggttgaggtgagtgcgaacccagatccgacagaaggtcgtgtaaacgagctgcctcctactatgaaaaccgtttctccgtatgcgtgtcaacgccgcaccaccctgaacaaccgtaatcaacgttttacggactcgctggaaattcttcgtgaaaattacgagttcaaacgcaacgatgatactgcgctggaatttcgtcgtgctatctccgtgctgaaaagccttccgtttgaggtacgtagcctgaaagacacggaaggattgccctggatcggtgatgaagtcaaagggattatggaagaaatcatcgaggtcggggagtcgcgtgaagtgcaggccgtgctcaatgatgagtggtatcaaagcttccaccgctttaagagtgtctttggagtgggggtggggacagcagacaagtggtaccgtatgggtctgcgcaccctcgaggatgttcgttccagcaagaccctgaagttgaccccgatgcagaaagtaggtctgctgtattatgaagatcttgctcgcggcgttacgcgtgccgaagctgacgcgatttggctgctggttcaggatgcagtcgcaactttcgacccggatgcgatcgtggagattgtcggtggatttcgtcgtgggaaacctcagggtcacgacgttgatctgcttatcagttctccgggagctgagaaagagcaagaagaccaactcctgcagaaagtgatgaatctgtggaagaaacaagggttgttgctgtacggtcgtctggaatggacccagtgggaagatgggggttcgccttccggtaaggctgacgagggtgacgcgggtgcgaaatgctttctgatcctcaaactttatgatcatctggtgcgtaaaagcaaatggaacatgccgacgggttcgaacgtgggcgagtccaaaccgtggaaagcaattcgcgtagatctgctgcgttgcccctatggcagttttgcgtttgcgatgttgcagtggaccggaagccgcatgttccgtcgtgatctgcgttggtacgccactgacgagaagaacatgatgctggacaatcattcgctgtatgacctgaccaagggtatcttcctccctgctaaatcggaagaggaaattttcgcacatctggggcttgaatacctggaaccgttcgaacgtaacgca

SEQ ID NO: 3318 - protein, 529 aa, synthetic construct
  REGION 1..529: note = Variant of terminal deoxynucleotidyltransferase
MHHHHHHGGSGSHGIRTIDSDFGKKQQKKGDNHDSSATYEIKFHEFVLFILEEKMGATRRTFLTDLARKKGFRVENELTDEVTHIVAENLSRSEVLAWLKEHKMEKTKQFELLDISWLIESMKVGKPVDTKGKYQLAESVEVSANPDPTEGRVNELPPTMKTVSPYACQRRTTLNNRNQRFTDSLEILRENYEFKRNDDTALEFRRAISVLKSLPFEVRSLKDTEGLPWIGDEVKGIMEEIIEVGESREVQAVLNDEWYQSFHRFKSVFGVGVGTADKWYRMGLRTLEDVRSSKTLKLTPMQKVGLLYYEDLARGVTRAEADAIWLLVQDAVATFDPDAIVEIVGGFRRGKPQGHDVDLLISSPGAEKEQEDQLLQKVMNLWKKQGLLLYGRLEWTQWEDGGSPSGKADEGDAGAKCFLILKLYDHLVRKSKWNMPTGSNVGESKPWKAIRVDLLRCPYGSFAFAMLQWTGSRMFRRDLRWYATDEKNMMLDNHSLYDLTKGIFLPAKSEEEIFAHLGLEYLEPFERNA

SEQ ID NO: 3319 - DNA, 1587 bp, synthetic construct
  misc_feature 1..1587: note = Variant of terminal deoxynucleotidyltransferase
  source 1..1587: mol_type = other DNA
atgcaccatcatcatcatcatggcggtagcggcagccacggcattcgtaccatcgattcggacttcgggaagaaacagcagaaaaaaggcgataaccacgatagttccgccacttatgaaatcaaatttcacgagtttgtgctgttcattctcgaagaaaaaatgggtgcgacgcgtcgtacttttctgacagatttagcccgcaagaaagggttccgcgtcgagaatgaactgaccgacgaagttacccacatcgtggcagaaaatctgtcacgctctgaagtattggcttggctgaaagaacacaagatggagaagaccaagcaattcgaactgctggatattagctggcttatcgaaagcatgaaagttggtaaaccggtggacaccaaggggaaataccagttggcggaatcggttgaggtgagtgcgaacccagatccgacagaaggtcgtgtaaacgagctgcctcctactatgaaaaccgtttctccgtatgcgtgtcaacgccgcaccaccctgaacaaccgtaatcaacgttttacggactcgctggaaattcttcgtgaaaattacgagttcaaacgcaacgatgatactgcgctggaatttcgtcgtgctatctccgtgctgaaaagccttccgtttgaggtacgtagcctgaaagacacggaaggattgccctggatcggtgatgaagtcaaagggattatggaagaaatcatcgaggtcggggagtcgcgtgaagtgcaggccgtgctcaatgatgagtggtatcaaagcttccaccgctttaagagtgtctttggagtggggattaagacagcagacaagtggtaccgtatgggtctgcgcaccctcgaggatgttcgttccagcaagaccctgaagttgaccccgatgcagaaagtaggtctgctgtattatgaagatcttgctcgcggcgttacgcgtgccgaagctgacgcgatttggctgctggttcaggatgcagtcgcaactttcgacccggatgcgatcgtggagattgtcggtggatttcgtcgtgggaaacctcagggtcacgacgttgatctgcttatcagttctccgggagctgagaaagagcaagaagaccaactcctgcagaaagtgatgaatctgtggaagaaacaagggttgttgctgtacggtcgtctggaatggacccagtgggaagatgggggttcgccttccggtaaggctgacgagggtgacgcgggtgcgaaatgctttctgatcctcaaactttatgatcatctggtgcgtaaaagcaaatggaacatgccgacgggttcgaacgtgggcgagtccaaaccgtggaaagcaattcgcgtagatctgctgcgttgcccctatggcagttttgcgtttgcgatgttgcagtggaccggaagccgcatgttccgtcgtgatctgcgttggtacgccactgacgagaagaacatgatgctggacaatcattcgctgtatgacctgaccaagggtatcttcctccctgctaaatcggaagaggaaattttcgcacatctggggcttgaatacctggaaccgttcgaacgtaacgca

SEQ ID NO: 3320 - protein, 529 aa, synthetic construct
  REGION 1..529: note = Variant of terminal deoxynucleotidyltransferase
MHHHHHHGGSGSHGIRTIDSDFGKKQQKKGDNHDSSATYEIKFHEFVLFILEEKMGATRRTFLTDLARKKGFRVENELTDEVTHIVAENLSRSEVLAWLKEHKMEKTKQFELLDISWLIESMKVGKPVDTKGKYQLAESVEVSANPDPTEGRVNELPPTMKTVSPYACQRRTTLNNRNQRFTDSLEILRENYEFKRNDDTALEFRRAISVLKSLPFEVRSLKDTEGLPWIGDEVKGIMEEIIEVGESREVQAVLNDEWYQSFHRFKSVFGVGIKTADKWYRMGLRTLEDVRSSKTLKLTPMQKVGLLYYEDLARGVTRAEADAIWLLVQDAVATFDPDAIVEIVGGFRRGKPQGHDVDLLISSPGAEKEQEDQLLQKVMNLWKKQGLLLYGRLEWTQWEDGGSPSGKADEGDAGAKCFLILKLYDHLVRKSKWNMPTGSNVGESKPWKAIRVDLLRCPYGSFAFAMLQWTGSRMFRRDLRWYATDEKNMMLDNHSLYDLTKGIFLPAKSEEEIFAHLGLEYLEPFERNA

SEQ ID NO: 3321 - DNA, 1587 bp, synthetic construct
  misc_feature 1..1587: note = Variant of terminal deoxynucleotidyltransferase
  source 1..1587: mol_type = other DNA
atgcaccatcatcatcatcatggcggtagcggcagccacggcattcgtaccatcgattcggacttcgggaagaaacagcagaaaaaaggcgataaccacgatagttccgccacttatgaaatcaaatttcacgagtttgtgctgttcattctcgaagaaaaaatgggtgcgacgcgtcgtacttttctgacagatttagcccgcaagaaagggttccgcgtcgagaatgaactgaccgacgaagttacccacatcgtggcagaaaatctgtcacgctctgaagtattggcttggctgaaagaacacaagatggagaagaccaagcaattcgaactgctggatattagctggcttatcgaaagcatgaaagttggtaaaccggtggacaccaaggggaaataccagttggcggaatcggttgaggtgagtgcgaacccagatccgacagaaggtcgtgtaaacgagctgcctcctactatgaaaaccgtttctccgtatgcgtgtcaacgccgcaccaccctgaacaaccgtaatcaacgttttacggactcgctggaaattcttcgtgaaaattacgagttcaaaggtaacgatgatactgcgctggaatttcgtcgtgctatctccgtgctgaaaagccttccgtttgaggtacgtagcctgaaagacacggaaggattgccctggatcggtgatgaagtcaaagggattatggaagaaatcatcgaggtcggggagtcgcgtgaagtgcaggccgtgctcaatgatgagtggtatcaaagcttccaccgctttaagagtgtctttggagtgggggtgaagacagcagacaagtggtaccgtatgggtctgcgcaccctcgaggatgttcgttccagcaagaccctgaagttgaccccgatgcagaaagtaggtctgctgtattatgaagatcttgctcgcggcgttacgcgtgccgaagctgacgcgatttggctgctggttcaggatgcagtcgcaactttcgacccggatgcgatcgtggagattgtcggtggatttcgtcgtgggaaacctcagggtcacgacgttgatctgcttatcagttctccgggagctgagaaagagcaagaagaccaactcctgcagaaagtgatgaatctgtggaagaaacaagggttgttgctgtacggtcgtctggaatggacccagtgggaagatgggggttcgccttccggtaaggctgacgagggtgacgcgggtgcgaaatgctttctgatcctcaaactttatgatcatctggtgcgtaaaagcaaatggaacatgccgacgggttcgaacgtgggcgagtccaaaccgtggaaagcaattcgcgtagatctgctgcgttgcccctatggcagttttgcgtttgcgatgttgcagtggaccggaagccgcatgttccgtcgtgatctgcgttggtacgccactgacgagaagaacatgatgctggacaatcattcgctgtatgacctgaccaagggtatcttcctccctgctaaatcggaagaggaaattttcgcacatctggggcttgaatacctggaaccgttcgaacgtaacgca

SEQ ID NO: 3322 - protein, 529 aa, synthetic construct
  REGION 1..529: note = Variant of terminal deoxynucleotidyltransferase
MHHHHHHGGSGSHGIRTIDSDFGKKQQKKGDNHDSSATYEIKFHEFVLFILEEKMGATRRTFLTDLARKKGFRVENELTDEVTHIVAENLSRSEVLAWLKEHKMEKTKQFELLDISWLIESMKVGKPVDTKGKYQLAESVEVSANPDPTEGRVNELPPTMKTVSPYACQRRTTLNNRNQRFTDSLEILRENYEFKGNDDTALEFRRAISVLKSLPFEVRSLKDTEGLPWIGDEVKGIMEEIIEVGESREVQAVLNDEWYQSFHRFKSVFGVGVKTADKWYRMGLRTLEDVRSSKTLKLTPMQKVGLLYYEDLARGVTRAEADAIWLLVQDAVATFDPDAIVEIVGGFRRGKPQGHDVDLLISSPGAEKEQEDQLLQKVMNLWKKQGLLLYGRLEWTQWEDGGSPSGKADEGDAGAKCFLILKLYDHLVRKSKWNMPTGSNVGESKPWKAIRVDLLRCPYGSFAFAMLQWTGSRMFRRDLRWYATDEKNMMLDNHSLYDLTKGIFLPAKSEEEIFAHLGLEYLEPFERNA

SEQ ID NO: 3323 - DNA, 1587 bp, synthetic construct
  misc_feature 1..1587: note = Variant of terminal deoxynucleotidyltransferase
  source 1..1587: mol_type = other DNA
atgcaccatcatcatcatcatggcggtagcggcagccacggcattcgtaccatcgattcggacttcgggaagaaacagcagaaaaaaggcgataaccacgatagttccgccacttatgaaatcaaatttcacgagtttgtgctgttcattctcgaagaaaaaatgggtgcgacgcgtcgtacttttctgacagatttagcccgcaagaaagggttccgcgtcgagaatgaactgaccgacgaagttacccacatcgtggcagaaaatctgtcacgctctgaagtattggcttggctgaaagaacacaagatggagaagaccaagcaattcgaactgctggatattagctggcttatcgaaagcatgaaagttggtaaaccggtggacaccaaggggaaataccagttggcggaatcggttgaggtgagtgcgaacccagatccgacagaaggtcgtgtaaacgagctgcctcctactatgaaaaccgtttctccgtatgcgtgtcaacgccgcaccaccctgaacaaccgtaatcaacgttttacggactcgctggaaattcttcgtgaaaattacgagttcaaacgcaacgatgatactgcgctggaatttcgtcgtgctatctccgtgctgaaaagccttccgtttgaggtacgtagcctgaaagacacggaaggattgccctggatcggtgatgaagtcaaagggattatggaagaaatcatcgaggtcggggagtcgcgtgaagtgcaggccgtgctcaatgatgagtggtatcaaagcttccaccgctttaagagtgtctttggagtgggggagaagacagcagacaagtggtaccgtatgggtctgcgcaccctcgaggatgttcgttccagcaagaccctgaagttgaccccgatgcagaaagtaggtctgctgtattatgaagatcttgctcgcggcgttacgcgtgccgaagctgacgcgatttggctgctggttcaggatgcagtcgcaactttcgacccggatgcgatcgtggagattgtcggtggatttcgtcgtgggaaacctcagggtcacgacgttgatctgcttatcagttctccgggagctgagaaagagcaagaagaccaactcctgcagaaagtgatgaatctgtggaagaaacaagggttgttgctgtacggtcgtctggaatggacccagtgggaagatgggggttcgccttccggtaaggctgacgagggtgacgcgggtgcgaaatgctttctgatcctcaaactttatgatcatctggtgcgtaaaagcaaatggaacatgccgacgggttcgaacgtgggcgagtccaaaccgtggaaagcaattcgcgtagatctgctgcgttgcccctatggcagttttgcgtttgcgatgttgcagtggaccggaagccgcatgttccgtcgtgatctgcgttggtacgccactgacgagaagaacatgatgctggacaatcattcgctgtatgacctgaccaatggtatcttcctccctgctaaatcggaagaggaaattttcgcacatctggggcttgaatacctggaaccgttcgaacgtaacgca

SEQ ID NO: 3324 - protein, 529 aa, synthetic construct
  REGION 1..529: note = Variant of terminal deoxynucleotidyltransferase
MHHHHHHGGSGSHGIRTIDSDFGKKQQKKGDNHDSSATYEIKFHEFVLFILEEKMGATRRTFLTDLARKKGFRVENELTDEVTHIVAENLSRSEVLAWLKEHKMEKTKQFELLDISWLIESMKVGKPVDTKGKYQLAESVEVSANPDPTEGRVNELPPTMKTVSPYACQRRTTLNNRNQRFTDSLEILRENYEFKRNDDTALEFRRAISVLKSLPFEVRSLKDTEGLPWIGDEVKGIMEEIIEVGESREVQAVLNDEWYQSFHRFKSVFGVGEKTADKWYRMGLRTLEDVRSSKTLKLTPMQKVGLLYYEDLARGVTRAEADAIWLLVQDAVATFDPDAIVEIVGGFRRGKPQGHDVDLLISSPGAEKEQEDQLLQKVMNLWKKQGLLLYGRLEWTQWEDGGSPSGKADEGDAGAKCFLILKLYDHLVRKSKWNMPTGSNVGESKPWKAIRVDLLRCPYGSFAFAMLQWTGSRMFRRDLRWYATDEKNMMLDNHSLYDLTNGIFLPAKSEEEIFAHLGLEYLEPFERNA

SEQ ID NO: 3325 - DNA, 1587 bp, synthetic construct
  misc_feature 1..1587: note = Variant of terminal deoxynucleotidyltransferase
  source 1..1587: mol_type = other DNA
atgcaccatcatcatcatcatggcggtagcggcagccatggcattcgtaccatcgattcggacttcgggaagaaacagcagaaaaaaggcgataaccacgatagttccgccacttatgaaatcaaatttcacgagtttgtgctgttcattctcgaagaaaaaatgggtgcgacgcgtcgtacttttctgacagatttagcccgcaagaaagggttccgcgtcgagaatgaactgaccgacgaagttacccacatcgtggcagaaaatctgtcacgctctgaagtattggcttggctgaaagaacacaagatggagaagaccaagcaattcgaactgctggatattagctggcttatcgaaagcatgaaagttggtaaaccggtggacaccaaggggaaataccagttggcggaatcggttgaggtgagtgcgaacccagatccgacagaaggtcgtgtaaacgagctgcctcctactatgaaaaccgtttctccgtatgcgtgtcaacgccgcaccaccctgaacaaccgtaatcaacgttttacggactcgctggaaattcttcgtgaaaattacgagttcaaacgcaacgatgatactgcgctggaatttcgtcgtgctatctccgtgctgaaaagccttccgtttgaggtacgtagcctgaaagacacggaaggattgccctggatcggtgatgaagtcaaagggattatggaagaaatcatcgaggtcggggagtcgcgtgaagtgcaggccgtgctcaatgatgagtggtatcaaagcttccaccgctttaagagtgtctttggagtggggtataagacagcagacaagtggtaccgtatgggtctgcgcaccctcgaggatgttcgttccagcaagaccctgaagttgaccccgatgcagaaagtaggtctgctgtattatgaagatcttgctcgcggcgttacgcgtgccgaagctgacgcgatttggctgctggttcaggatgcagtcgcaactttcgacccggatgcgatcgtggagattgtcggtggatttcgtcgtgggaaacctcagggtcacgacgttgatctgcttatcagttctccgggagctgagaaagagcaagaagaccaactcctgcagaaagtgatgaatctgtggaagaaacaagggttgttgctgtacggtcgtctggaatggacccagtgggaagatgggggttcgccttccggtaaggctgacgagggtgacgcgggtgcgaaatgctttctgatcctcaaactttatgatcatctggtgcgtaaaagcaaatggaacatgccgacgggttcgaacgtgggcgagtccaaaccgtggaaagcaattcgcgtagatctgctgcgttgcccctatggcagttttgcgtttgcgatgttgcagtggaccggaagccgcatgttccgtcgtgatctgcgttggtacgccactgacgagaagaacatgatgctggacaatcattcgctgtatgacctgaccaagggtatcttcctccctgctaaatcggaagaggaaattttcgcacatctggggcttgaatacctggaaccgttcgaacgtaacgca

SEQ ID NO: 3326 - protein, 529 aa, synthetic construct
  REGION 1..529: note = Variant of terminal deoxynucleotidyltransferase
MHHHHHHGGSGSHGIRTIDSDFGKKQQKKGDNHDSSATYEIKFHEFVLFILEEKMGATRRTFLTDLARKKGFRVENELTDEVTHIVAENLSRSEVLAWLKEHKMEKTKQFELLDISWLIESMKVGKPVDTKGKYQLAESVEVSANPDPTEGRVNELPPTMKTVSPYACQRRTTLNNRNQRFTDSLEILRENYEFKRNDDTALEFRRAISVLKSLPFEVRSLKDTEGLPWIGDEVKGIMEEIIEVGESREVQAVLNDEWYQSFHRFKSVFGVGYKTADKWYRMGLRTLEDVRSSKTLKLTPMQKVGLLYYEDLARGVTRAEADAIWLLVQDAVATFDPDAIVEIVGGFRRGKPQGHDVDLLISSPGAEKEQEDQLLQKVMNLWKKQGLLLYGRLEWTQWEDGGSPSGKADEGDAGAKCFLILKLYDHLVRKSKWNMPTGSNVGESKPWKAIRVDLLRCPYGSFAFAMLQWTGSRMFRRDLRWYATDEKNMMLDNHSLYDLTKGIFLPAKSEEEIFAHLGLEYLEPFERNA

SEQ ID NO: 3327 - DNA, 1587 bp, synthetic construct
  misc_feature 1..1587: note = Variant of terminal deoxynucleotidyltransferase
  source 1..1587: mol_type = other DNA
atgcaccatcatcatcatcatggcggtagcggcagccacggcattcgtaccatcgattcggacttcgggaagaaacagcagaaaaaaggcgataaccacgatagttccgccacttatgaaatcaaatttcacgagtttgtgctgttcattctcgaagaaaaaatgggtgcgacgcgtcgtacttttctgacagatttagcccgcaagaaagggttccgcgtcgagaatgaactgaccgacgaagttacccacatcgtggcagaaaatctgtcacgctctgaagtattggcttggctgaaagaacacaagatggagaagaccaagcaattcgaactgctggatattagctggcttatcgaaagcatgaaagttggtaaaccggtggacaccaaggggaaataccagttggcggaatcggttgaggtgagtgcgaacccagatccgacagaaggtcgtgtaaacgagctgcctcctactatgaaaaccgtttctccgtatgcgtgtcaacgccgcaccaccctgaacaaccgtaatcaacgttttacggactcgctggaaattcttcgtgaaaattacgagttcaaacgcaacgatgatactgcgctggaatttcgtcgtgctatctccgtgctgaaaagccttccgtttgaggtacgtagcctgaaagacacggaaggattgccctggatcggtgatgaagtcaaagggattatggaagaaatcatcgaggtcggggagtcgcgtgaagtgcaggccgtgctcaatgatgagtggtatcaaagcttccaccgctttaagagtgtctttggagtgggggagaagacagcagacaagtggtaccgtatgggtctgcgcaccctcgaggatgttcgttccagcaagaccctgaagttgaccccgatgcagaaagtaggtctgctgtattatgaagatcttgctcgcggcgttacgcgtgccgaagctgacgcgatttggctgctggttcaggatgcagtcgcaactttcgacccggatgcgatcgtggagattgtcggtggatttcgtcgtgggaaacctcagggtcacgacgttgatctgcttatcagttctccgggagctgagaaagagcaagaagaccaactcctgcagaaagtgatgaatctgtggaagaaacaagggttgttgctgtacggtcgtctggaatggacccagtgggaagatgggggttcgccttccggtaaggctgacgagggtgacgcgggtgcgaaatgctttctgatcctcaaactttatgatcatctggtgcgtaaaagcaaatggaacatgccgacgggttcgaacgtgggcgagtccaaaccgtggaaagcaattcgcgtagatctgctgcgttgcccctatggcagttttgcgtttgcgatgttgcagtggaccggaagccgcatgttccgtcgtgatctgcgttggtacgccactgacgagaagaacatgatgctggacaatcattcgctgtatgacctgaccaagggtatcttcctccctgctaaatcggaagaggaaattttcgcacatctggggcttgaatacctggaaccgttcgaacgtaacgca

SEQ ID NO: 3328 - protein, 529 aa, synthetic construct
  REGION 1..529: note = Variant of terminal deoxynucleotidyltransferase
MHHHHHHGGSGSHGIRTIDSDFGKKQQKKGDNHDSSATYEIKFHEFVLFILEEKMGATRRTFLTDLARKKGFRVENELTDEVTHIVAENLSRSEVLAWLKEHKMEKTKQFELLDISWLIESMKVGKPVDTKGKYQLAESVEVSANPDPTEGRVNELPPTMKTVSPYACQRRTTLNNRNQRFTDSLEILRENYEFKRNDDTALEFRRAISVLKSLPFEVRSLKDTEGLPWIGDEVKGIMEEIIEVGESREVQAVLNDEWYQSFHRFKSVFGVGEKTADKWYRMGLRTLEDVRSSKTLKLTPMQKVGLLYYEDLARGVTRAEADAIWLLVQDAVATFDPDAIVEIVGGFRRGKPQGHDVDLLISSPGAEKEQEDQLLQKVMNLWKKQGLLLYGRLEWTQWEDGGSPSGKADEGDAGAKCFLILKLYDHLVRKSKWNMPTGSNVGESKPWKAIRVDLLRCPYGSFAFAMLQWTGSRMFRRDLRWYATDEKNMMLDNHSLYDLTKGIFLPAKSEEEIFAHLGLEYLEPFERNA

SEQ ID NO: 3329 - DNA, 1587 bp, synthetic construct
  misc_feature 1..1587: note = Variant of terminal deoxynucleotidyltransferase
  source 1..1587: mol_type = other DNA
atgcaccatcatcatcatcatggcggtagcggcagccacggcattcgtaccatcgattcggacttcgggaagaaacagcagaaaaaaggcgataaccacgatagttccgccacttatgaaatcaaatttcacgagtttgtgctgttcattctcgaagaaaaaatgggtgcgacgcgtcgtacttttctgacagatttagcccgcaagaaagggttccgcgtcgagaatgaactgaccgacgaagttacccacatcgtggcagaaaatctgtcacgctctgaagtattggcttggctgaaagaacacaagatggagaagaccaagcaattcgaactgctggatattagctggcttatcgaaagcatgaaagttggtaaaccggtggacaccaaggggaaataccagttggcggaatcggttgaggtgagtgcgaacccagatccgacagaaggtcgtgtaaacgagctgcctcctactatgaaaaccgtttctccgtatgcgtgtcaacgccgcaccaccctgaacaaccgtaatcaacgttttacggactcgctggaaattcttcgtgaaaattacgagttcaaacgcaacgatgatactgcgctggaatttcgtcgtgctatctccgtgctgaaaagccttccgtttgaggtacgtagcctgaaagacacggaaggattgccctggatcggtgatgaagtcaaagggattatggaagaaatcatcgaggtcggggagtcgcgtgaagtgcaggccgtgctcaatgatgagtggtatcaaagcttccaccgctttaagagtgtctttggagtgggggtgaagacagcagacttttggtaccgtatgggtctgcgcaccctcgaggatgttcgttccagcaagaccctgaagttgaccccgatgcagaaagtaggtctgctgtattatgaagatcttgctcgcggcgttacgcgtgccgaagctgacgcgatttggctgctggttcaggatgcagtcgcaactttcgacccggatgcgatcgtggagattgtcggtggatttcgtcgtgggaaacctcagggtcacgacgttgatctgcttatcagttctccgggagctgagaaagagcaagaagaccaactcctgcagaaagtgatgaatctgtggaagaaacaagggttgttgctgtacggtcgtctggaatggacccagtgggaagatgggggttcgccttccggtaaggctgacgagggtgacgcgggtgcgaaatgctttctgatcctcaaactttatgatcatctggtgcgtaaaagcaaatggaacatgccgacgggttcgaacgtgggcgagtccaaaccgtggaaagcaattcgcgtagatctgctgcgttgcccctatggcagttttgcgtttgcgatgttgcagtggaccggaagccgcatgttccgtcgtgatctgcgttggtacgccactgacgagaagaacatgatgctggacaatcattcgctgtatgacctgaccaagggtatcttcctccctgctaaatcggaagaggaaattttcgcacatctggggcttgaatacctggaaccgttcgaacgtaacgca

SEQ ID NO: 3330 - protein, 529 aa, synthetic construct
  REGION 1..529: note = Variant of terminal deoxynucleotidyltransferase
MHHHHHHGGSGSHGIRTIDSDFGKKQQKKGDNHDSSATYEIKFHEFVLFILEEKMGATRRTFLTDLARKKGFRVENELTDEVTHIVAENLSRSEVLAWLKEHKMEKTKQFELLDISWLIESMKVGKPVDTKGKYQLAESVEVSANPDPTEGRVNELPPTMKTVSPYACQRRTTLNNRNQRFTDSLEILRENYEFKRNDDTALEFRRAISVLKSLPFEVRSLKDTEGLPWIGDEVKGIMEEIIEVGESREVQAVLNDEWYQSFHRFKSVFGVGVKTADFWYRMGLRTLEDVRSSKTLKLTPMQKVGLLYYEDLARGVTRAEADAIWLLVQDAVATFDPDAIVEIVGGFRRGKPQGHDVDLLISSPGAEKEQEDQLLQKVMNLWKKQGLLLYGRLEWTQWEDGGSPSGKADEGDAGAKCFLILKLYDHLVRKSKWNMPTGSNVGESKPWKAIRVDLLRCPYGSFAFAMLQWTGSRMFRRDLRWYATDEKNMMLDNHSLYDLTKGIFLPAKSEEEIFAHLGLEYLEPFERNA

SEQ ID NO: 3331 - DNA, 1587 bp, synthetic construct
  misc_feature 1..1587: note = Variant of terminal deoxynucleotidyltransferase
  source 1..1587: mol_type = other DNA
atgcaccatcatcatcatcatggcggtagcggcagccacggcattcgtaccatcgattcggacttcgggaagaaacagcagaaaaaaggcgataaccacgatagttccgccacttatgaaatcaaatttcacgagtttgtgctgttcattctcgaagaaaaaatgggtgcgacgcgtcgtacttttctgacagatttagcccgcaagaaagggttccgcgtcgagaatgaactgaccgacgaagttacccacatcgtggcagaaaatctgtcacgctctgaagtattggcttggctgaaagaacacaagatggagaagaccaagcaattcgaactgctggatattagctggcttatcgaaagcatgaaagttggtaaaccggtggacaccaaggggaaataccagttggcggaatcggttgaggtgagtgcgaacccagatccgacagaaggtcgtgtaaacgagctgcctcctactatgaaaaccgtttctccgtatgcgtgtcaacgccgcaccaccctgaacaaccgtaatcaacgttttacggactcgctggaaattcttcgtgaaaattacgagttcaaacgcaacgatgatactgcgctggaatttcgtcgtgctatctccgtgctgaaaagccttccgtttgaggtacgtagcctgaaagacacggaaggattgccctggatcggtgatgaagtcaaagggattatggaagaaatcatcgaggtcggggagtcgcgtgaagtgcaggccgtgctcaatgatgagtggtatcaaagcttccaccgctttaagagtgtctttggagtgggggtgaagacagcagacaagtggtaccgtatgggtctgcgcaccctcgaggatgttcgttccagcaagaccctgaagttgaccccgatgcagaaagtaggtctgctgtattatgaagatcttgctcgcggcgttacgcgtgccgaagctgacgcgatttggctgctggttcaggatgcagtcgcaactttcgacccggatgcgatcgtggagattgtcggtggatttcgtcgttggaaacctcagggtcacgacgttgatctgcttatcagttctccgggagctgagaaagagcaagaagaccaactcctgcagaaagtgatgaatctgtggaagaaacaagggttgttgctgtacggtcgtctggaatggacccagtgggaagatgggggttcgccttccggtaaggctgacgagggtgacgcgggtgcgaaatgctttctgatcctcaaactttatgatcatctggtgcgtaaaagcaaatggaacatgccgacgggttcgaacgtgggcgagtccaaaccgtggaaagcaattcgcgtagatctgctgcgttgcccctatggcagttttgcgtttgcgatgttgcagtggaccggaagccgcatgttccgtcgtgatctgcgttggtacgccactgacgagaagaacatgatgctggacaatcattcgctgtatgacctgaccaagggtatcttcctccctgctaaatcggaagaggaaattttcgcacatctggggcttgaatacctggaaccgttcgaacgtaacgca

SEQ ID NO: 3332 - protein, 529 aa, synthetic construct
  REGION 1..529: note = Variant of terminal deoxynucleotidyltransferase
MHHHHHHGGSGSHGIRTIDSDFGKKQQKKGDNHDSSATYEIKFHEFVLFILEEKMGATRRTFLTDLARKKGFRVENELTDEVTHIVAENLSRSEVLAWLKEHKMEKTKQFELLDISWLIESMKVGKPVDTKGKYQLAESVEVSANPDPTEGRVNELPPTMKTVSPYACQRRTTLNNRNQRFTDSLEILRENYEFKRNDDTALEFRRAISVLKSLPFEVRSLKDTEGLPWIGDEVKGIMEEIIEVGESREVQAVLNDEWYQSFHRFKSVFGVGVKTADKWYRMGLRTLEDVRSSKTLKLTPMQKVGLLYYEDLARGVTRAEADAIWLLVQDAVATFDPDAIVEIVGGFRRWKPQGHDVDLLISSPGAEKEQEDQLLQKVMNLWKKQGLLLYGRLEWTQWEDGGSPSGKADEGDAGAKCFLILKLYDHLVRKSKWNMPTGSNVGESKPWKAIRVDLLRCPYGSFAFAMLQWTGSRMFRRDLRWYATDEKNMMLDNHSLYDLTKGIFLPAKSEEEIFAHLGLEYLEPFERNA

SEQ ID NO: 3333 - DNA, 1587 bp, synthetic construct
  misc_feature 1..1587: note = Variant of terminal deoxynucleotidyltransferase
  source 1..1587: mol_type = other DNA
atgcaccatcatcatcatcatggcggtagcggcagccacggcattcgtaccatcgattcggacttcgggaagaaacagcagaaaaaaggcgataaccacgatagttccgccacttatgaaatcaaatttcacgagtttgtgctgttcattctcgaagaaaaaatgggtgcgacgcgtcgtacttttctgacagatttagcccgcaagaaagggttccgcgtcgagaatgaactgaccgacgaagttacccacatcgtggcagaaaatctgtcacgctctgaagtattggcttggctgaaagaacacaagatggagaagaccaagcaattcgaactgctggatattagctggcttatcgaaagcatgaaagttggtaaaccggtggacaccaaggggaaataccagttggcggaatcggttgaggtgagtgcgaacccagatccgacagaaggtcgtgtaaacgagctgcctcctactatgaaaaccgtttctccgtatgcgtgtcaacgccgcaccaccctgaacaaccgtaatcaacgttttacggactcgctggaaattcttcgtgaaaattacgagttcaaacgcaacgatgatactgcgctggaatttcgtcgtgctatctccgtgctgaaaagccttccgtttgaggtacgtagcctgaaagacacggaaggattgccctggatcggtgatgaagtcaaagggattatggaagaaatcatcgaggtcggggagtcgcgtgaagtgcaggccgtgctcaatgatgagtggtatcaaagcttccaccgcttttatagtgtctttggagtgggggtgaagacagcagacaagtggtaccgtatgggtctgcgcaccctcgaggatgttcgttccagcaagaccctgaagttgaccccgatgcagaaagtaggtctgctgtattatgaagatcttgctcgcggcgttacgcgtgccgaagctgacgcgatttggctgctggttcaggatgcagtcgcaactttcgacccggatgcgatcgtggagattgtcggtggatttcgtcgtgggaaacctcagggtcacgacgttgatctgcttatcagttctccgggagctgagaaagagcaagaagaccaactcctgcagaaagtgatgaatctgtggaagaaacaagggttgttgctgtacggtcgtctggaatggacccagtgggaagatgggggttcgccttccggtaaggctgacgagggtgacgcgggtgcgaaatgctttctgatcctcaaactttatgatcatctggtgcgtaaaagcaaatggaacatgccgacgggttcgaacgtgggcgagtccaaaccgtggaaagcaattcgcgtagatctgctgcgttgcccctatggcagttttgcgtttgcgatgttgcagtggaccggaagccgcatgttccgtcgtgatctgcgttggtacgccactgacgagaagaacatgatgctggacaatcattcgctgtatgacctgaccaagggtatcttcctccctgctaaatcggaagaggaaattttcgcacatctggggcttgaatacctggaaccgttcgaacgtaacgca

SEQ ID NO: 3334 - protein, 529 aa, synthetic construct
  REGION 1..529: note = Variant of terminal deoxynucleotidyltransferase
MHHHHHHGGSGSHGIRTIDSDFGKKQQKKGDNHDSSATYEIKFHEFVLFILEEKMGATRRTFLTDLARKKGFRVENELTDEVTHIVAENLSRSEVLAWLKEHKMEKTKQFELLDISWLIESMKVGKPVDTKGKYQLAESVEVSANPDPTEGRVNELPPTMKTVSPYACQRRTTLNNRNQRFTDSLEILRENYEFKRNDDTALEFRRAISVLKSLPFEVRSLKDTEGLPWIGDEVKGIMEEIIEVGESREVQAVLNDEWYQSFHRFYSVFGVGVKTADKWYRMGLRTLEDVRSSKTLKLTPMQKVGLLYYEDLARGVTRAEADAIWLLVQDAVATFDPDAIVEIVGGFRRGKPQGHDVDLLISSPGAEKEQEDQLLQKVMNLWKKQGLLLYGRLEWTQWEDGGSPSGKADEGDAGAKCFLILKLYDHLVRKSKWNMPTGSNVGESKPWKAIRVDLLRCPYGSFAFAMLQWTGSRMFRRDLRWYATDEKNMMLDNHSLYDLTKGIFLPAKSEEEIFAHLGLEYLEPFERNA

SEQ ID NO: 3335 - DNA, 1587 bp, synthetic construct
  misc_feature 1..1587: note = Variant of terminal deoxynucleotidyltransferase
  source 1..1587: mol_type = other DNA
atgcaccatcatcatcatcatggcggtagcggcagccacggcattcgtaccatcgattcggacttcgggaagaaacagcagaaaaaaggcgataaccacgatagttccgccacttatgaaatcaaatttcacgagtttgtgctgttcattctcgaagaaaaaatgggtgcgacgcgtcgtacttttctgacagatttagcccgcaagaaagggttccgcgtcgagaatgaactgaccgacgaagttacccacatcgtggcagaaaatctgtcacgctctgaagtattggcttggctgaaagaacacaagatggagaagaccaagcaattcgaactgctggatattagctggcttatcgaaagcatgaaagttggtaaaccggtggacaccaaggggaaataccagttggcggaatcggttgaggtgagtgcgaacccagatccgacagaaggtcgtgtaaacgagctgcctcctactatgaaaaccgtttctccgtatgcgtgtcaacgccgcaccaccctgaacaaccgtaatcaacgttttacggactcgctggaaattcttcgtgaaaattacgagttcaaacgcaacgatgatactgcgctggaatttcgtcgtgctatctccgtgctgaaaagccttccgtttgaggtacgtagcctgaaagacacggaaggattgccctggatcggtgatgaagtcaaagggattatggaagaaatcatcgaggtcggggagtcgcgtgaagtgcaggccgtgctcaatgatgagtggtatcaaagcttccaccgctttaagagtgtctttggagtgggggtggctacagcagacaagtggtaccgtatgggtctgcgcaccctcgaggatgttcgttccagcaagaccctgaagttgaccccgatgcagaaagtaggtctgctgtattatgaagatcttgctcgcggcgttacgcgtgccgaagctgacgcgatttggctgctggttcaggatgcagtcgcaactttcgacccggatgcgatcgtggagattgtcggtggatttcgtcgtgggaaacctcagggtcacgacgttgatctgcttatcagttctccgggagctgagaaagagcaagaagaccaactcctgcagaaagtgatgaatctgtggaagaaacaagggttgttgctgtacggtcgtctggaatggacccagtgggaagatgggggttcgccttccggtaaggctgacgagggtgacgcgggtgcgaaatgctttctgatcctcaaactttatgatcatctggtgcgtaaaagcaaatggaacatgccgacgggttcgaacgtgggcgagtccaaaccgtggaaagcaattcgcgtagatctgctgcgttgcccctatggcagttttgcgtttgcgatgttgcagtggaccggaagccgcatgttccgtcgtgatctgcgttggtacgccactgacgagaagaacatgatgctggacaatcattcgctgtatgacctgaccaagggtatcttcctccctgctaaatcggaagaggaaattttcgcacatctggggcttgaatacctggaaccgttcgaacgtaacgca

SEQ ID NO: 3336 - protein, 529 aa, synthetic construct
  REGION 1..529: note = Variant of terminal deoxynucleotidyltransferase
MHHHHHHGGSGSHGIRTIDSDFGKKQQKKGDNHDSSATYEIKFHEFVLFILEEKMGATRRTFLTDLARKKGFRVENELTDEVTHIVAENLSRSEVLAWLKEHKMEKTKQFELLDISWLIESMKVGKPVDTKGKYQLAESVEVSANPDPTEGRVNELPPTMKTVSPYACQRRTTLNNRNQRFTDSLEILRENYEFKRNDDTALEFRRAISVLKSLPFEVRSLKDTEGLPWIGDEVKGIMEEIIEVGESREVQAVLNDEWYQSFHRFKSVFGVGVATADKWYRMGLRTLEDVRSSKTLKLTPMQKVGLLYYEDLARGVTRAEADAIWLLVQDAVATFDPDAIVEIVGGFRRGKPQGHDVDLLISSPGAEKEQEDQLLQKVMNLWKKQGLLLYGRLEWTQWEDGGSPSGKADEGDAGAKCFLILKLYDHLVRKSKWNMPTGSNVGESKPWKAIRVDLLRCPYGSFAFAMLQWTGSRMFRRDLRWYATDEKNMMLDNHSLYDLTKGIFLPAKSEEEIFAHLGLEYLEPFERNA

SEQ ID NO: 3337 - DNA, 1587 bp, synthetic construct
  misc_feature 1..1587: note = Variant of terminal deoxynucleotidyltransferase
  source 1..1587: mol_type = other DNA
atgcaccatcatcatcatcatggcggtagcggcagccacggcattcgtaccatcgattcggacttcgggaagaaacagcagaaaaaaggcgataaccacgatagttccgccacttatgaaatcaaatttcacgagtttgtgctgttcattctcgaagaaaaaatgggtgcgacgcgtcgtacttttctgacagatttagcccgcaagaaagggttccgcgtcgagaatgaactgaccgacgaagttacccacatcgtggcagaaaatctgtcacgctctgaagtattggcttggctgaaagaacacaagatggagaagaccaagcaattcgaactgctggatattagctggcttatcgaaagcatgaaagttggtaaaccggtggacaccaaggggaaataccagttggcggaatcggttgaggtgagtgcgaacccagatccgacagaaggtcgtgtaaacgagctgcctcctactatgaaaaccgtttctccgtatgcgtgtcaacgccgcaccaccctgaacaaccgtaatcaacgttttacggactcgctggaaattcttcgtgaaaattacgagttcaaacgcaacgatgatactgcgctggaatttcgtcgtgctatctccgtgctgaaaagccttccgtttgaggtacgtagcctgaaagacacggaaggattgccctggatcggtgatgaagtcaaagggattatggaagaaatcatcgaggtcggggagtcgcgtgaagtgcaggccgtgctcaatgatgagtggtatcaaagcttccaccgctttaagagtgtctttggagtgggggtgaagacagcagacaagtggtaccgtatgggtctgcgcaccctcgaggatgttcgttccagcaagaccctgaagttgaccccgatgcagaaagtaggtctgctgtattatgaagatcttgctcgcggcgttacgcgtgccgaagctgacgcgatttggctgctggttcaggatgcagtcgcaactttcgacccggatgcgatcgtggagattgtcggtggaattcgtcgtgggaaacctcagggtcacgacgttgatctgcttatcagttctccgggagctgagaaagagcaagaagaccaactcctgcagaaagtgatgaatctgtggaagaaacaagggttgttgctgtacggtcgtctggaatggacccagtgggaagatgggggttcgccttccggtaaggctgacgagggtgacgcgggtgcgaaatgctttctgatcctcaaactttatgatcatctggtgcgtaaaagcaaatggaacatgccgacgggttcgaacgtgggcgagtccaaaccgtggaaagcaattcgcgtagatctgctgcgttgcccctatggcagttttgcgtttgcgatgttgcagtggaccggaagccgcatgttccgtcgtgatctgcgttggtacgccactgacgagaagaacatgatgctggacaatcattcgctgtatgacctgaccaagggtatcttcctccctgctaaatcggaagaggaaattttcgcacatctggggcttgaatacctggaaccgttcgaacgtaacgca

SEQ ID NO: 3338 - protein, 529 aa, synthetic construct
  REGION 1..529: note = Variant of terminal deoxynucleotidyltransferase
MHHHHHHGGSGSHGIRTIDSDFGKKQQKKGDNHDSSATYEIKFHEFVLFILEEKMGATRRTFLTDLARKKGFRVENELTDEVTHIVAENLSRSEVLAWLKEHKMEKTKQFELLDISWLIESMKVGKPVDTKGKYQLAESVEVSANPDPTEGRVNELPPTMKTVSPYACQRRTTLNNRNQRFTDSLEILRENYEFKRNDDTALEFRRAISVLKSLPFEVRSLKDTEGLPWIGDEVKGIMEEIIEVGESREVQAVLNDEWYQSFHRFKSVFGVGVKTADKWYRMGLRTLEDVRSSKTLKLTPMQKVGLLYYEDLARGVTRAEADAIWLLVQDAVATFDPDAIVEIVGGIRRGKPQGHDVDLLISSPGAEKEQEDQLLQKVMNLWKKQGLLLYGRLEWTQWEDGGSPSGKADEGDAGAKCFLILKLYDHLVRKSKWNMPTGSNVGESKPWKAIRVDLLRCPYGSFAFAMLQWTGSRMFRRDLRWYATDEKNMMLDNHSLYDLTKGIFLPAKSEEEIFAHLGLEYLEPFERNA

SEQ ID NO: 3339 - DNA, 1587 bp, synthetic construct
  misc_feature 1..1587: note = Variant of terminal deoxynucleotidyltransferase
  source 1..1587: mol_type = other DNA
atgcaccatcatcatcatcatggcggtagcggcagccacggcattcgtaccatcgattcggacttcgggaagaaacagcagaaaaaaggcgataaccacgatagttccgccacttatgaaatcaaatttcacgagtttgtgctgttcattctcgaagaaaaaatgggtgcgacgcgtcgtacttttctgacagatttagcccgcaagaaagggttccgcgtcgagaatgaactgaccgacgaagttacccacatcgtggcagaaaatctgtcacgctctgaagtattggcttggctgaaagaacacaagatggagaagaccaagcaattcgaactgctggatattagctggcttatcgaaagcatgaaagttggtaaaccggtggacaccaaggggaaataccagttggcggaatcggttgaggtgagtgcgaacccagatccgacagaaggtcgtgtaaacgagctgcctcctactatgaaaaccgtttctccgtatgcgtgtcaacgccgcaccaccctgaacaaccgtaatcaacgttttacggactcgctggaaattcttcgtgaaaattacgagttcaaacgcaacgatgatactgcgctggaatttcgtcgtgctatctccgtgctgaaaagccttccgtttgaggtacgtagcctgaaagacacggaaggattgccctggatcggtgatgaagtcaaagggattatggaagaaatcatcgaggtcggggagtcgcgtgaagtgcaggccgtgctcaatgatgagtggtatcaaagcttccaccgctttaagagtgtctttggagtgggggtgaagacagcagacaagtggtaccgtatgggtctgcgcaccctcgaggatgttcgttccagcaagaccctgaagttgaccccgatgcagaaagtaggtctgctgtattatgaagatatggctcgcggcgttacgcgtgccgaagctgacgcgatttggctgctggttcaggatgcagtcgcaactttcgacccggatgcgatcgtggagattgtcggtggatttcgtcgtgggaaacctcagggtcacgacgttgatctgcttatcagttctccgggagctgagaaagagcaagaagaccaactcctgcagaaagtgatgaatctgtggaagaaacaagggttgttgctgtacggtcgtctggaatggacccagtgggaagatgggggttcgccttccggtaaggctgacgagggtgacgcgggtgcgaaatgctttctgatcctcaaactttatgatcatctggtgcgtaaaagcaaatggaacatgccgacgggttcgaacgtgggcgagtccaaaccgtggaaagcaattcgcgtagatctgctgcgttgcccctatggcagttttgcgtttgcgatgttgcagtggaccggaagccgcatgttccgtcgtgatctgcgttggtacgccactgacgagaagaacatgatgctggacaatcattcgctgtatgacctgaccaagggtatcttcctccctgctaaatcggaagaggaaattttcgcacatctggggcttgaatacctggaaccgttcgaacgtaacgca

SEQ ID NO: 3340 - protein, 529 aa, synthetic construct
  REGION 1..529: note = Variant of terminal deoxynucleotidyltransferase
MHHHHHHGGSGSHGIRTIDSDFGKKQQKKGDNHDSSATYEIKFHEFVLFILEEKMGATRRTFLTDLARKKGFRVENELTDEVTHIVAENLSRSEVLAWLKEHKMEKTKQFELLDISWLIESMKVGKPVDTKGKYQLAESVEVSANPDPTEGRVNELPPTMKTVSPYACQRRTTLNNRNQRFTDSLEILRENYEFKRNDDTALEFRRAISVLKSLPFEVRSLKDTEGLPWIGDEVKGIMEEIIEVGESREVQAVLNDEWYQSFHRFKSVFGVGVKTADKWYRMGLRTLEDVRSSKTLKLTPMQKVGLLYYEDMARGVTRAEADAIWLLVQDAVATFDPDAIVEIVGGFRRGKPQGHDVDLLISSPGAEKEQEDQLLQKVMNLWKKQGLLLYGRLEWTQWEDGGSPSGKADEGDAGAKCFLILKLYDHLVRKSKWNMPTGSNVGESKPWKAIRVDLLRCPYGSFAFAMLQWTGSRMFRRDLRWYATDEKNMMLDNHSLYDLTKGIFLPAKSEEEIFAHLGLEYLEPFERNA

SEQ ID NO: 3341 - DNA, 1587 bp, synthetic construct
  misc_feature 1..1587: note = Variant of terminal deoxynucleotidyltransferase
  source 1..1587: mol_type = other DNA
atgcaccatcatcatcatcatggcggtagcggcagccacggcattcgtaccatcgattcggacttcgggaagaaacagcagaaaaaaggcgataaccacgatagttccgccacttatgaaatcaaatttcacgagtttgtgctgttcattctcgaagaaaaaatgggtgcgacgcgtcgtacttttctgacagatttagcccgcaagaaagggttccgcgtcgagaatgaactgaccgacgaagttacccacatcgtggcagaaaatctgtcacgctctgaagtattggcttggctgaaagaacacaagatggagaagaccaagcaattcgaactgctggatattagctggcttatcgaaagcatgaaagttggtaaaccggtggacaccaaggggaaataccagttggcggaatcggttgaggtgagtgcgaacccagatccgacagaaggtcgtgtaaacgagctgcctcctactatgaaaaccgtttctccgtatgcgtgtcaacgccgcaccaccctgaacaaccgtaatcaacgttttacggactcgctggaaattcttcgtgaaaattacgagttcaaacgcaacgatgatactgcgctggaatttcgtcgtgctatctccgtgctgaaaagccttccgtttgaggtacgtagcctgaaagacacggaaggattgccctggatcggtgatgaagtcaaagggattatggaagaaatcatcgaggtcggggagtcgcgtgaagtgcaggccgtgctcaatgatgagtggtatcaaagcttccaccgctttaagagtgtctttggagtgggggtgaagacagcagacaagtggtaccgtatgggtctgcgcaccctcgaggatgttcgttccagcaagaccctgaagttgaccccgatgcagaaaatgggtctgctgtattatgaagatcttgctcgcggcgttacgcgtgccgaagctgacgcgatttggctgctggttcaggatgcagtcgcaactttcgacccggatgcgatcgtggagattgtcggtggatttcgtcgtgggaaacctcagggtcacgacgttgatctgcttatcagttctccgggagctgagaaagagcaagaagaccaactcctgcagaaagtgatgaatctgtggaagaaacaagggttgttgctgtacggtcgtctggaatggacccagtgggaagatgggggttcgccttccggtaaggctgacgagggtgacgcgggtgcgaaatgctttctgatcctcaaactttatgatcatctggtgcgtaaaagcaaatggaacatgccgacgggttcgaacgtgggcgagtccaaaccgtggaaagcaattcgcgtagatctgctgcgttgcccctatggcagttttgcgtttgcgatgttgcagtggaccggaagccgcatgttccgtcgtgatctgcgttggtacgccactgacgagaagaacatgatgctggacaatcattcgctgtatgacctgaccaagggtatcttcctccctgctaaatcggaagaggaaattttcgcacatctggggcttgaatacctggaaccgttcgaacgtaacgca

SEQ ID NO: 3342 - protein, 529 aa, synthetic construct
  REGION 1..529: note = Variant of terminal deoxynucleotidyltransferase
MHHHHHHGGSGSHGIRTIDSDFGKKQQKKGDNHDSSATYEIKFHEFVLFILEEKMGATRRTFLTDLARKKGFRVENELTDEVTHIVAENLSRSEVLAWLKEHKMEKTKQFELLDISWLIESMKVGKPVDTKGKYQLAESVEVSANPDPTEGRVNELPPTMKTVSPYACQRRTTLNNRNQRFTDSLEILRENYEFKRNDDTALEFRRAISVLKSLPFEVRSLKDTEGLPWIGDEVKGIMEEIIEVGESREVQAVLNDEWYQSFHRFKSVFGVGVKTADKWYRMGLRTLEDVRSSKTLKLTPMQKMGLLYYEDLARGVTRAEADAIWLLVQDAVATFDPDAIVEIVGGFRRGKPQGHDVDLLISSPGAEKEQEDQLLQKVMNLWKKQGLLLYGRLEWTQWEDGGSPSGKADEGDAGAKCFLILKLYDHLVRKSKWNMPTGSNVGESKPWKAIRVDLLRCPYGSFAFAMLQWTGSRMFRRDLRWYATDEKNMMLDNHSLYDLTKGIFLPAKSEEEIFAHLGLEYLEPFERNA

SEQ ID NO: 3343 - DNA, 1587 bp, synthetic construct
  misc_feature 1..1587: note = Variant of terminal deoxynucleotidyltransferase
  source 1..1587: mol_type = other DNA
atgcaccatcatcatcatcatggcggtagcggcagccacggcattcgtaccatcgattcggacttcgggaagaaacagcagaaaaaaggcgataaccacgatagttccgccacttatgaaatcaaatttcacgagtttgtgctgttcattctcgaagaaaaaatgggtgcgacgcgtcgtacttttctgacagatttagcccgcaagaaagggttccgcgtcgagaatgaactgaccgacgaagttacccacatcgtggcagaaaatctgtcacgctctgaagtattggcttggctgaaagaacacaagatggagaagaccaagcaattcgaactgctggatattagctggcttatcgaaagcatgaaagttggtaaaccggtggacaccaaggggaaataccagttggcggaatcggttgaggtgagtgcgaacccagatccgacagaaggtcgtgtaaacgagctgcctcctactatgaaaaccgtttctccgtatgcgtgtcaacgccgcaccaccctgaacaaccgtaatcaacgttttacggactcgctggaaattcttcgtgaaaattacgagttcaaacgcaacgatgatactgcgctggaatttcgtcgtgctatctccgtgctgaaaagccttccgtttgaggtacgtagcctgaaagacacggaaggattgccctggatcggtgatgaagtcaaagggattatggaagaaatcatcgaggtcggggagtcgcgtgaagtgcaggccgtgctcaatgatgagtggtatcaaagcttccaccgctttaagagtgtctttggagtgggggtggtgacagcagacaagtggtaccgtatgggtctgcgcaccctcgaggatgttcgttccagcaagaccctgaagttgaccccgatgcagaaagtaggtctgctgtattatgaagatcttgctcgcggcgttacgcgtgccgaagctgacgcgatttggctgctggttcaggatgcagtcgcaactttcgacccggatgcgatcgtggagattgtcggtggatttcgtcgtgggaaacctcagggtcacgacgttgatctgcttatcagttctccgggagctgagaaagagcaagaagaccaactcctgcagaaagtgatgaatctgtggaagaaacaagggttgttgctgtacggtcgtctggaatggacccagtgggaagatgggggttcgccttccggtaaggctgacgagggtgacgcgggtgcgaaatgctttctgatcctcaaactttatgatcatctggtgcgtaaaagcaaatggaacatgccgacgggttcgaacgtgggcgagtccaaaccgtggaaagcaattcgcgtagatctgctgcgttgcccctatggcagttttgcgtttgcgatgttgcagtggaccggaagccgcatgttccgtcgtgatctgcgttggtacgccactgacgagaagaacatgatgctggacaatcattcgctgtatgacctgaccaagggtatcttcctccctgctaaatcggaagaggaaattttcgcacatctggggcttgaatacctggaaccgttcgaacgtaacgca

SEQ ID NO: 3344 - protein, 529 aa, synthetic construct
  REGION 1..529: note = Variant of terminal deoxynucleotidyltransferase
MHHHHHHGGSGSHGIRTIDSDFGKKQQKKGDNHDSSATYEIKFHEFVLFILEEKMGATRRTFLTDLARKKGFRVENELTDEVTHIVAENLSRSEVLAWLKEHKMEKTKQFELLDISWLIESMKVGKPVDTKGKYQLAESVEVSANPDPTEGRVNELPPTMKTVSPYACQRRTTLNNRNQRFTDSLEILRENYEFKRNDDTALEFRRAISVLKSLPFEVRSLKDTEGLPWIGDEVKGIMEEIIEVGESREVQAVLNDEWYQSFHRFKSVFGVGVVTADKWYRMGLRTLEDVRSSKTLKLTPMQKVGLLYYEDLARGVTRAEADAIWLLVQDAVATFDPDAIVEIVGGFRRGKPQGHDVDLLISSPGAEKEQEDQLLQKVMNLWKKQGLLLYGRLEWTQWEDGGSPSGKADEGDAGAKCFLILKLYDHLVRKSKWNMPTGSNVGESKPWKAIRVDLLRCPYGSFAFAMLQWTGSRMFRRDLRWYATDEKNMMLDNHSLYDLTKGIFLPAKSEEEIFAHLGLEYLEPFERNA

SEQ ID NO: 3345 - DNA, 1587 bp, synthetic construct
  misc_feature 1..1587: note = Variant of terminal deoxynucleotidyltransferase
  source 1..1587: mol_type = other DNA
atgcaccatcatcatcatcatggcggtagcggcagccacggcattcgtaccatcgattcggacttcgggaagaaacagcagaaaaaaggcgataaccacgatagttccgccacttatgaaatcaaatttcacgagtttgtgctgttcattctcgaagaaaaaatgggtgcgacgcgtcgtacttttctgacagatttagcccgcaagaaagggttccgcgtcgagaatgaactgaccgacgaagttacccacatcgtggcagaaaatctgtcacgctctgaagtattggcttggctgaaagaacacaagatggagaagaccaagcaattcgaactgctggatattagctggcttatcgaaagcatgaaagttggtaaaccggtggacaccaaggggaaataccagttggcggaatcggttgaggtgagtgcgaacccagatccgacagaaggtcgtgtaaacgagctgcctcctactatgaaaaccgtttctccgtatgcgtgtcaacgccgcaccaccctgaacaaccgtaatcaacgttttacggactcgctggaaattcttcgtgaaaattacgagttcaaacgcaacgatgatactgcgctggaatttcgtcgtgctatctccgtgctgaaaagccttccgtttgaggtacgtagcctgaaagacacggaaggattgccctggatcggtgatgaagtcaaagggattatggaagaaatcatcgaggtcggggagtcgcgtgaagtgcaggccgtgctcaatgatgagtggtatcaaagcttccaccgctttaagagtgtctttggagtgggggggaagacagcagacaagtggtaccgtatgggtctgcgcaccctcgaggatgttcgttccagcaagaccctgaagttgaccccgatgcagaaagtaggtctgctgtattatgaagatcttgctcgcggcgttacgcgtgccgaagctgacgcgatttggctgctggttcaggatgcagtcgcaactttcgacccggatgcgatcgtggagattgtcggtggatttcgtcgtgggaaacctcagggtcacgacgttgatctgcttatcagttctccgggagctgagaaagagcaagaagaccaactcctgcagaaagtgatgaatctgtggaagaaacaagggttgttgctgtacggtcgtctggaatggacccagtgggaagatgggggttcgccttccggtaaggctgacgagggtgacgcgggtgcgaaatgctttctgatcctcaaactttatgatcatctggtgcgtaaaagcaaatggaacatgccgacgggttcgaacgtgggcgagtccaaaccgtggaaagcaattcgcgtagatctgctgcgttgcccctatggcagttttgcgtttgcgatgttgcagtggaccggaagccgcatgttccgtcgtgatctgcgttggtacgccactgacgagaagaacatgatgctggacaatcattcgctgtatgacctgaccaagggtatcttcctccctgctaaatcggaagaggaaattttcgcacatctggggcttgaatacctggaaccgttcgaacgtaacgca

SEQ ID NO: 3346 - protein, 529 aa, synthetic construct
  REGION 1..529: note = Variant of terminal deoxynucleotidyltransferase
MHHHHHHGGSGSHGIRTIDSDFGKKQQKKGDNHDSSATYEIKFHEFVLFILEEKMGATRRTFLTDLARKKGFRVENELTDEVTHIVAENLSRSEVLAWLKEHKMEKTKQFELLDISWLIESMKVGKPVDTKGKYQLAESVEVSANPDPTEGRVNELPPTMKTVSPYACQRRTTLNNRNQRFTDSLEILRENYEFKRNDDTALEFRRAISVLKSLPFEVRSLKDTEGLPWIGDEVKGIMEEIIEVGESREVQAVLNDEWYQSFHRFKSVFGVGGKTADKWYRMGLRTLEDVRSSKTLKLTPMQKVGLLYYEDLARGVTRAEADAIWLLVQDAVATFDPDAIVEIVGGFRRGKPQGHDVDLLISSPGAEKEQEDQLLQKVMNLWKKQGLLLYGRLEWTQWEDGGSPSGKADEGDAGAKCFLILKLYDHLVRKSKWNMPTGSNVGESKPWKAIRVDLLRCPYGSFAFAMLQWTGSRMFRRDLRWYATDEKNMMLDNHSLYDLTKGIFLPAKSEEEIFAHLGLEYLEPFERNA

SEQ ID NO: 3347 - DNA, 1587 bp, synthetic construct
  misc_feature 1..1587: note = Variant of terminal deoxynucleotidyltransferase
  source 1..1587: mol_type = other DNA
atgcaccatcatcatcatcatggcggtagcggcagccacggcattcgtaccatcgattcggacttcgggaagaaacagcagaaaaaaggcgataaccacgatagttccgccacttatgaaatcaaatttcacgagtttgtgctgttcattctcgaagaaaaaatgggtgcgacgcgtcgtacttttctgacagatttagcccgcaagaaagggttccgcgtcgagaatgaactgaccgacgaagttacccacatcgtggcagaaaatctgtcacgctctgaagtattggcttggctgaaagaacacaagatggagaagaccaagcaattcgaactgctggatattagctggcttatcgaaagcatgaaagttggtaaaccggtggacaccaaggggaaataccagttggcggaatcggttgaggtgagtgcgaacccagatccgacagaaggtcgtgtaaacgagctgcctcctactatgaaaaccgtttctccgtatgcgtgtcaacgccgcaccaccctgaacaaccgtaatcaacgttttacggactcgctggaaattcttcgtgaaaattacgagttcaaacgcaacgatgatactgcgctggaatttcgtcgtgctatctccgtgctgaaaagccttccgtttgaggtacgtagcctgaaagacacggaaggattgccctggatcggtgatgaagtcaaagggattatggaagaaatcatcgaggtcggggagtcgcgtgaagtgcaggccgtgctcaatgatgagtggtatcaaagcttccaccgctttaagagtgtctggggagtgggggtgaagacagcagacaagtggtaccgtatgggtctgcgcaccctcgaggatgttcgttccagcaagaccctgaagttgaccccgatgcagaaagtaggtctgctgtattatgaagatcttgctcgcggcgttacgcgtgccgaagctgacgcgatttggctgctggttcaggatgcagtcgcaactttcgacccggatgcgatcgtggagattgtcggtggatttcgtcgtgggaaacctcagggtcacgacgttgatctgcttatcagttctccgggagctgagaaagagcaagaagaccaactcctgcagaaagtgatgaatctgtggaagaaacaagggttgttgctgtacggtcgtctggaatggacccagtgggaagatgggggttcgccttccggtaaggctgacgagggtgacgcgggtgcgaaatgctttctgatcctcaaactttatgatcatctggtgcgtaaaagcaaatggaacatgccgacgggttcgaacgtgggcgagtccaaaccgtggaaagcaattcgcgtagatctgctgcgttgcccctatggcagttttgcgtttgcgatgttgcagtggaccggaagccgcatgttccgtcgtgatctgcgttggtacgccactgacgagaagaacatgatgctggacaatcattcgctgtatgacctgaccaagggtatcttcctccctgctaaatcggaagaggaaattttcgcacatctggggcttgaatacctggaaccgttcgaacgtaacgca

SEQ ID NO: 3348 - protein, 529 aa, synthetic construct
  REGION 1..529: note = Variant of terminal deoxynucleotidyltransferase
MHHHHHHGGSGSHGIRTIDSDFGKKQQKKGDNHDSSATYEIKFHEFVLFILEEKMGATRRTFLTDLARKKGFRVENELTDEVTHIVAENLSRSEVLAWLKEHKMEKTKQFELLDISWLIESMKVGKPVDTKGKYQLAESVEVSANPDPTEGRVNELPPTMKTVSPYACQRRTTLNNRNQRFTDSLEILRENYEFKRNDDTALEFRRAISVLKSLPFEVRSLKDTEGLPWIGDEVKGIMEEIIEVGESREVQAVLNDEWYQSFHRFKSVWGVGVKTADKWYRMGLRTLEDVRSSKTLKLTPMQKVGLLYYEDLARGVTRAEADAIWLLVQDAVATFDPDAIVEIVGGFRRGKPQGHDVDLLISSPGAEKEQEDQLLQKVMNLWKKQGLLLYGRLEWTQWEDGGSPSGKADEGDAGAKCFLILKLYDHLVRKSKWNMPTGSNVGESKPWKAIRVDLLRCPYGSFAFAMLQWTGSRMFRRDLRWYATDEKNMMLDNHSLYDLTKGIFLPAKSEEEIFAHLGLEYLEPFERNA

SEQ ID NO: 3349 - DNA, 1587 bp, synthetic construct
  misc_feature 1..1587: note = Variant of terminal deoxynucleotidyltransferase
  source 1..1587: mol_type = other DNA
atgcaccatcatcatcatcatggcggtagcggcagccacggcattcgtaccatcgattcggacttcgggaagaaacagcagaaaaaaggcgataaccacgatagttccgccacttatgaaatcaaatttcacgagtttgtgctgttcattctcgaagaaaaaatgggtgcgacgcgtcgtacttttctgacagatttagcccgcaagaaagggttccgcgtcgagaatgaactgaccgacgaagttacccacatcgtggcagaaaatctgtcacgctctgaagtattggcttggctgaaagaacacaagatggagaagaccaagcaattcgaactgctggatattagctggcttatcgaaagcatgaaagttggtaaaccggtggacaccaaggggaaataccagttggcggaatcggttgaggtgagtgcgaacccagatccgacagaaggtcgtgtaaacgagctgcctcctactatgaaaaccgtttctccgtatgcgtgtcaacgccgcaccaccctgaacaaccgtaatcaacgttttacggactcgctggaaattcttcgtgaaaattacgagtggaaacgcaacgatgatactgcgctggaatttcgtcgtgctatctccgtgctgaaaagccttccgtttgaggtacgtagcctgaaagacacggaaggattgccctggatcggtgatgaagtcaaagggattatggaagaaatcatcgaggtcggggagtcgcgtgaagtgcaggccgtgctcaatgatgagtggtatcaaagcttccaccgctttaagagtgtctttggagtgggggtgaagacagcagacaagtggtaccgtatgggtctgcgcaccctcgaggatgttcgttccagcaagaccctgaagttgaccccgatgcagaaagtaggtctgctgtattatgaagatcttgctcgcggcgttacgcgtgccgaagctgacgcgatttggctgctggttcaggatgcagtcgcaactttcgacccggatgcgatcgtggagattgtcggtggatttcgtcgtgggaaacctcagggtcacgacgttgatctgcttatcagttctccgggagctgagaaagagcaagaagaccaactcctgcagaaagtgatgaatctgtggaagaaacaagggttgttgctgtacggtcgtctggaatggacccagtgggaagatgggggttcgccttccggtaaggccgacgagggtgacgcgggtgcgaaatgctttctgatcctcaaactttatgatcatctggtgcgtaaaagcaaatggaacatgccgacgggttcgaacgtgggcgagtccaaaccgtggaaagcaattcgcgtagatctgctgcgttgcccctatggcagttttgcgtttgcgatgttgcagtggaccggaagccgcatgttccgtcgtgatctgcgttggtacgccactgacgagaagaacatgatgctggacaatcattcgctgtatgacctgaccaagggtatcttcctccctgctaaatcggaagaggaaattttcgcacatctggggcttgaatacctggaaccgttcgaacgtaacgca

SEQ ID NO: 3350 - protein, 529 aa, synthetic construct
  REGION 1..529: note = Variant of terminal deoxynucleotidyltransferase
MHHHHHHGGSGSHGIRTIDSDFGKKQQKKGDNHDSSATYEIKFHEFVLFILEEKMGATRRTFLTDLARKKGFRVENELTDEVTHIVAENLSRSEVLAWLKEHKMEKTKQFELLDISWLIESMKVGKPVDTKGKYQLAESVEVSANPDPTEGRVNELPPTMKTVSPYACQRRTTLNNRNQRFTDSLEILRENYEWKRNDDTALEFRRAISVLKSLPFEVRSLKDTEGLPWIGDEVKGIMEEIIEVGESREVQAVLNDEWYQSFHRFKSVFGVGVKTADKWYRMGLRTLEDVRSSKTLKLTPMQKVGLLYYEDLARGVTRAEADAIWLLVQDAVATFDPDAIVEIVGGFRRGKPQGHDVDLLISSPGAEKEQEDQLLQKVMNLWKKQGLLLYGRLEWTQWEDGGSPSGKADEGDAGAKCFLILKLYDHLVRKSKWNMPTGSNVGESKPWKAIRVDLLRCPYGSFAFAMLQWTGSRMFRRDLRWYATDEKNMMLDNHSLYDLTKGIFLPAKSEEEIFAHLGLEYLEPFERNA

SEQ ID NO: 3351 - DNA, 1587 bp, synthetic construct
  misc_feature 1..1587: note = Variant of terminal deoxynucleotidyltransferase
  source 1..1587: mol_type = other DNA
atgcaccatcatcatcatcatggcggtagcggcagccacggcattcgtaccatcgattcggacttcgggaagaaacagcagaaaaaaggcgataaccacgatagttccgccacttatgaaatcaaatttcacgagtttgtgctgttcattctcgaagaaaaaatgggtgcgacgcgtcgtacttttctgacagatttagcccgcaagaaagggttccgcgtcgagaatgaactgaccgacgaagttacccacatcgtggcagaaaatctgtcacgctctgaagtattggcttggctgaaagaacacaagatggagaagaccaagcaattcgaactgctggatattagctggcttatcgaaagcatgaaagttggtaaaccggtggacaccaaggggaaataccagttggcggaatcggttgaggtgagtgcgaacccagatccgacagaaggtcgtgtaaacgagctgcctcctactatgaaaaccgtttctccgtatgcgtgtcaacgccgcaccaccctgaacaaccgtaatcaacgttttacggactcgctggaaattcttcgtgaaaattacgagttcaaacgcaacgatgatactgcgctggaatttcgtcgtgctatctccgtgctgaaaagccttccgtttgaggtacgtagcctgaaagacacggaaggattgccctggatcggtgatgaagtcaaagggattatggaagaaatcatcgaggtcggggagtcgcgtgaagtgcaggccgtgctcaatgatgagtggtatcaaagcttccaccgctttattagtgtctttggagtgggggtgaagacagcagacaagtggtaccgtatgggtctgcgcaccctcgaggatgttcgttccagcaagaccctgaagttgaccccgatgcagaaagtaggtctgctgtattatgaagatcttgctcgcggcgttacgcgtgccgaagctgacgcgatttggctgctggttcaggatgcagtcgcaactttcgacccggatgcgatcgtggagattgtcggtggatttcgtcgtgggaaacctcagggtcacgacgttgatctgcttatcagttctccgggagctgagaaagagcaagaagaccaactcctgcagaaagtgatgaatctgtggaagaaacaagggttgttgctgtacggtcgtctggaatggacccagtgggaagatgggggttcgccttccggtaaggctgacgagggtgacgcgggtgcgaaatgctttctgatcctcaaactttatgatcatctggtgcgtaaaagcaaatggaacatgccgacgggttcgaacgtgggcgagtccaaaccgtggaaagcaattcgcgtagatctgctgcgttgcccctatggcagttttgcgtttgcgatgttgcagtggaccggaagccgcatgttccgtcgtgatctgcgttggtacgccactgacgagaagaacatgatgctggacaatcattcgctgtatgacctgaccaagggtatcttcctccctgctaaatcggaagaggaaattttcgcacatctggggcttgaatacctggaaccgttcgaacgtaacgca

SEQ ID NO: 3352 - protein, 529 aa, synthetic construct
  REGION 1..529: note = Variant of terminal deoxynucleotidyltransferase
MHHHHHHGGSGSHGIRTIDSDFGKKQQKKGDNHDSSATYEIKFHEFVLFILEEKMGATRRTFLTDLARKKGFRVENELTDEVTHIVAENLSRSEVLAWLKEHKMEKTKQFELLDISWLIESMKVGKPVDTKGKYQLAESVEVSANPDPTEGRVNELPPTMKTVSPYACQRRTTLNNRNQRFTDSLEILRENYEFKRNDDTALEFRRAISVLKSLPFEVRSLKDTEGLPWIGDEVKGIMEEIIEVGESREVQAVLNDEWYQSFHRFISVFGVGVKTADKWYRMGLRTLEDVRSSKTLKLTPMQKVGLLYYEDLARGVTRAEADAIWLLVQDAVATFDPDAIVEIVGGFRRGKPQGHDVDLLISSPGAEKEQEDQLLQKVMNLWKKQGLLLYGRLEWTQWEDGGSPSGKADEGDAGAKCFLILKLYDHLVRKSKWNMPTGSNVGESKPWKAIRVDLLRCPYGSFAFAMLQWTGSRMFRRDLRWYATDEKNMMLDNHSLYDLTKGIFLPAKSEEEIFAHLGLEYLEPFERNA

SEQ ID NO: 3353 - DNA, 1587 bp, synthetic construct
  misc_feature 1..1587: note = Variant of terminal deoxynucleotidyltransferase
  source 1..1587: mol_type = other DNA
atgcaccatcatcatcatcatggcggtagcggcagccacggcattcgtaccatcgattcggacttcgggaagaaacagcagaaaaaaggcgataaccacgatagttccgccacttatgaaatcaaatttcacgagtttgtgctgttcattctcgaagaaaaaatgggtgcgacgcgtcgtacttttctgacagatttagcccgcaagaaagggttccgcgtcgagaatgaactgaccgacgaagttacccacatcgtggcagaaaatctgtcacgctctgaagtattggcttggctgaaagaacacaagatggagaagaccaagcaattcgaactgctggatattagctggcttatcgaaagcatgaaagttggtaaaccggtggacaccaaggggaaataccagttggcggaatcggttgaggtgagtgcgaacccagatccgacagaaggtcgtgtaaacgagctgcctcctactatgaaaaccgtttctccgtatgcgtgtcaacgccgcaccaccctgaacaaccgtaatcaacgttttacggactcgctggaaattcttcgtgaaaattacgagttcaaacgcaacgatgatactgcgctggaatttcgtcgtgctatctccgtgctgaaaagccttccgtttgaggtacgtagcctgaaagacacggaaggattgccctggatcggtgatgaagtcaaagggattatggaagaaatcatcgaggtcggggagtcgcgtgaagtgcaggccgtgctcaatgatgagtggtatcaaagcttccaccgctttaagagtgtctttggagtgggggtgaagacagcagacaagtggtaccgtatgggtctgcgcaccctcgaggatgttcgttccagcaagaccctgtgtttgaccccgatgcagaaagtaggtctgctgtattatgaagatcttgctcgcggcgttacgcgtgccgaagctgacgcgatttggctgctggttcaggatgcagtcgcaactttcgacccggatgcgatcgtggagattgtcggtggatttcgtcgtgggaaacctcagggtcacgacgttgatctgcttatcagttctccgggagctgagaaagagcaagaagaccaactcctgcagaaagtgatgaatctgtggaagaaacaagggttgttgctgtacggtcgtctggaatggacccagtgggaagatgggggttcgccttccggtaaggctgacgagggtgacgcgggtgcgaaatgctttctgatcctcaaactttatgatcatctggtgcgtaaaagcaaatggaacatgccgacgggttcgaacgtgggcgagtccaaaccgtggaaagcaattcgcgtagatctgctgcgttgcccctatggcagttttgcgtttgcgatgttgcagtggaccggaagccgcatgttccgtcgtgatctgcgttggtacgccactgacgagaagaacatgatgctggacaatcattcgctgtatgacctgaccaagggtatcttcctccctgctaaatcggaagaggaaattttcgcacatctggggcttgaatacctggaaccgttcgaacgtaacgca

SEQ ID NO: 3354 - protein, 529 aa, synthetic construct
  REGION 1..529: note = Variant of terminal deoxynucleotidyltransferase
MHHHHHHGGSGSHGIRTIDSDFGKKQQKKGDNHDSSATYEIKFHEFVLFILEEKMGATRRTFLTDLARKKGFRVENELTDEVTHIVAENLSRSEVLAWLKEHKMEKTKQFELLDISWLIESMKVGKPVDTKGKYQLAESVEVSANPDPTEGRVNELPPTMKTVSPYACQRRTTLNNRNQRFTDSLEILRENYEFKRNDDTALEFRRAISVLKSLPFEVRSLKDTEGLPWIGDEVKGIMEEIIEVGESREVQAVLNDEWYQSFHRFKSVFGVGVKTADKWYRMGLRTLEDVRSSKTLCLTPMQKVGLLYYEDLARGVTRAEADAIWLLVQDAVATFDPDAIVEIVGGFRRGKPQGHDVDLLISSPGAEKEQEDQLLQKVMNLWKKQGLLLYGRLEWTQWEDGGSPSGKADEGDAGAKCFLILKLYDHLVRKSKWNMPTGSNVGESKPWKAIRVDLLRCPYGSFAFAMLQWTGSRMFRRDLRWYATDEKNMMLDNHSLYDLTKGIFLPAKSEEEIFAHLGLEYLEPFERNA

SEQ ID NO: 3355 - DNA, 1587 bp, synthetic construct
  misc_feature 1..1587: note = Variant of terminal deoxynucleotidyltransferase
  source 1..1587: mol_type = other DNA
atgcaccatcatcatcatcatggcggtagcggcagccacggcattcgtaccatcgattcggacttcgggaagaaacagcagaaaaaaggcgataaccacgatagttccgccacttatgaaatcaaatttcacgagtttgtgctgttcattctcgaagaaaaaatgggtgcgacgcgtcgtacttttctgacagatttagcccgcaagaaagggttccgcgtcgagaatgaactgaccgacgaagttacccacatcgtggcagaaaatctgtcacgctctgaagtattggcttggctgaaagaacacaagatggagaagaccaagcaattcgaactgctggatattagctggcttatcgaaagcatgaaagttggtaaaccggtggacaccaaggggaaataccagttggcggaatcggttgaggtgagtgcgaacccagatccgacagaaggtcgtgtaaacgagctgcctcctactatgaaaaccgtttctccgtatgcgtgtcaacgccgcaccaccctgaacaaccgtaatcaacgttttacggactcgctggaaattcttcgtgaaaattacgagttcaaacgcaacgatgatactgcgctggaatttcgtcgtgctatctccgtgctgaaaagccttccgtttgaggtacgtagcctgaaagacacggaaggattgccctggatcggtgatgaagtcaaagggattatggaagaaatcatcgaggtcggggagtcgcgtgaagtgcaggccgtgctcaatgatgagtggtatcaaagcttccaccgctttaagagtgtctttggagtgggggtgaagacagcagacaagtggtaccgtatgggtctgcgcaccctcgaggatgttcgttccagcaagaccctgaagttgaccccgatgcagaaagtaggtctgctgtattttgaagatcttgctcgcggcgttacgcgtgccgaagctgacgcgatttggctgctggttcaggatgcagtcgcaactttcgacccggatgcgatcgtggagattgtcggtggatttcgtcgtgggaaacctcagggtcacgacgttgatctgcttatcagttctccgggagctgagaaagagcaagaagaccaactcctgcagaaagtgatgaatctgtggaagaaacaagggttgttgctgtacggtcgtctggaatggacccagtgggaagatgggggttcgccttccggtaaggctgacgagggtgacgcgggtgcgaaatgctttctgatcctcaaactttatgatcatctggtgcgtaaaagcaaatggaacatgccgacgggttcgaacgtgggcgagtccaaaccgtggaaagcaattcgcgtagatctgctgcgttgcccctatggcagttttgcgtttgcgatgttgcagtggaccggaagccgcatgttccgtcgtgatctgcgttggtacgccactgacgagaagaacatgatgctggacaatcattcgctgtatgacctgaccaagggtatcttcctccctgctaaatcggaagaggaaattttcgcacatctggggcttgaatacctggaaccgttcgaacgtaacgca

SEQ ID NO: 3356 - protein, 529 aa, synthetic construct
  REGION 1..529: note = Variant of terminal deoxynucleotidyltransferase
MHHHHHHGGSGSHGIRTIDSDFGKKQQKKGDNHDSSATYEIKFHEFVLFILEEKMGATRRTFLTDLARKKGFRVENELTDEVTHIVAENLSRSEVLAWLKEHKMEKTKQFELLDISWLIESMKVGKPVDTKGKYQLAESVEVSANPDPTEGRVNELPPTMKTVSPYACQRRTTLNNRNQRFTDSLEILRENYEFKRNDDTALEFRRAISVLKSLPFEVRSLKDTEGLPWIGDEVKGIMEEIIEVGESREVQAVLNDEWYQSFHRFKSVFGVGVKTADKWYRMGLRTLEDVRSSKTLKLTPMQKVGLLYFEDLARGVTRAEADAIWLLVQDAVATFDPDAIVEIVGGFRRGKPQGHDVDLLISSPGAEKEQEDQLLQKVMNLWKKQGLLLYGRLEWTQWEDGGSPSGKADEGDAGAKCFLILKLYDHLVRKSKWNMPTGSNVGESKPWKAIRVDLLRCPYGSFAFAMLQWTGSRMFRRDLRWYATDEKNMMLDNHSLYDLTKGIFLPAKSEEEIFAHLGLEYLEPFERNA

SEQ ID NO: 3357 - DNA, 1587 bp, synthetic construct
  misc_feature 1..1587: note = Variant of terminal deoxynucleotidyltransferase
  source 1..1587: mol_type = other DNA
atgcaccatcatcatcatcatggcggtagcggcagccacggcattcgtaccatcgattcggacttcgggaagaaacagcagaaaaaaggcgataaccacgatagttccgccacttatgaaatcaaatttcacgagtttgtgctgttcattctcgaagaaaaaatgggtgcgacgcgtcgtacttttctgacagatttagcccgcaagaaagggttccgcgtcgagaatgaactgaccgacgaagttacccacatcgtggcagaaaatctgtcacgctctgaagtattggcttggctgaaagaacacaagatggagaagaccaagcaattcgaactgctggatattagctggcttatcgaaagcatgaaagttggtaaaccggtggacaccaaggggaaataccagttggcggaatcggttgaggtgagtgcgaacccagatccgacagaaggtcgtgtaaacgagctgcctcctactatgaaaaccgtttctccgtatgcgtgtcaacgccgcaccaccctgaacaaccgtaatcaacgttttacggactcgctggaaattcttcgtgaaaattacgagttcaaacgcaacgatgatactgcgctggaatttcgtcgtgctatctccgtgctgaaaagccttccgtttgaggtacgtagcctgaaagacacggaaggattgccctggatcggtgatgaagtcaaagggattatggaagaaatcatcgaggtcggggagtcgcgtgaagtgcaggccgtgctcaatgatgagtggtatcaaagcttccaccgctttaagagtgtctttggagtgggggtgaagacagcagacaagtggtaccgtatgggtctgcgcaccctcgaggatgttcgttccagcaagaccctgaagttgaccccgatgcagaaagtaggtctgctgtattatgaagatcttgctcgcggcgttacgcgtgccgaagctgacgcgatttggctgctggttcaggatgcagtcgcaactttcgacccggatgcgatcgtggagattgtcggtggatttcgtcgtgggaaacctcagggtcacgacgttgatctgcttatcagttctccgggagctgagaaagagcaagaagaccaactcctgcagaaagtgatgaatctgtggaagaaacaagggttgttgctgtacggtcgtctggaatggacccagtgggaagatgggggttcgccttccggtaaggctgacgagggtgacgcggctgcgaaatgctttctgatcctcaaactttatgatcatctggtgcgtaaaagcaaatggaacatgccgacgggttcgaacgtgggcgagtccaaaccgtggaaagcaattcgcgtagatctgctgcgttgcccctatggcagttttgcgtttgcgatgttgcagtggaccggaagccgcatgttccgtcgtgatctgcgttggtacgccactgacgagaagaacatgatgctggacaatcattcgctgtatgacctgaccaagggtatcttcctccctgctaaatcggaagaggaaattttcgcacatctggggcttgaatacctggaaccgttcgaacgtaacgca

SEQ ID NO: 3358 - protein, 529 aa, synthetic construct
  REGION 1..529: note = Variant of terminal deoxynucleotidyltransferase
MHHHHHHGGSGSHGIRTIDSDFGKKQQKKGDNHDSSATYEIKFHEFVLFILEEKMGATRRTFLTDLARKKGFRVENELTDEVTHIVAENLSRSEVLAWLKEHKMEKTKQFELLDISWLIESMKVGKPVDTKGKYQLAESVEVSANPDPTEGRVNELPPTMKTVSPYACQRRTTLNNRNQRFTDSLEILRENYEFKRNDDTALEFRRAISVLKSLPFEVRSLKDTEGLPWIGDEVKGIMEEIIEVGESREVQAVLNDEWYQSFHRFKSVFGVGVKTADKWYRMGLRTLEDVRSSKTLKLTPMQKVGLLYYEDLARGVTRAEADAIWLLVQDAVATFDPDAIVEIVGGFRRGKPQGHDVDLLISSPGAEKEQEDQLLQKVMNLWKKQGLLLYGRLEWTQWEDGGSPSGKADEGDAAAKCFLILKLYDHLVRKSKWNMPTGSNVGESKPWKAIRVDLLRCPYGSFAFAMLQWTGSRMFRRDLRWYATDEKNMMLDNHSLYDLTKGIFLPAKSEEEIFAHLGLEYLEPFERNA

SEQ ID NO: 3359 - DNA, 1587 bp, synthetic construct
  misc_feature 1..1587: note = Variant of terminal deoxynucleotidyltransferase
  source 1..1587: mol_type = other DNA
atgcaccatcatcatcatcatggcggtagcggcagccacggcattcgtaccatcgattcggacttcgggaagaaacagcagaaaaaaggcgataaccacgatagttccgccacttatgaaatcaaatttcacgagtttgtgctgttcattctcgaagaaaaaatgggtgcgacgcgtcgtacttttctgacagatttagcccgcaagaaagggttccgcgtcgagaatgaactgaccgacgaagttacccacatcgtggcagaaaatctgtcacgctctgaagtattggcttggctgaaagaacacaagatggagaagaccaagcaattcgaactgctggatattagctggcttatcgaaagcatgaaagttggtaaaccggtggacaccaaggggaaataccagttggcggaatcggttgaggtgagtgcgaacccagatccgacagaaggtcgtgtaaacgagctgcctcctactatgaaaaccgtttctccgtatgcgtgtcaacgccgcaccaccctgaacaaccgtaatcaacgttttacggactcgctggaaattcttcgtgaaaattacgagttcaaacgcaacgatgatactgcgctggaatttcgtcgtgctatctccgtgctgaaaagccttccgtttgaggtacgtagcctgaaagacacggaaggattgccctggatcggtgatgaagtcaaagggattatggaagaaatcatcgaggtcggggagtcgcgtgaagtgcaggccgtgctcaatgatgagtggtatcaaagcttccaccgctttaagagtgtctttggagtgggggtgaagacagcagacaagtggtaccgtatgggtctgcgcaccctcgaggatgttcgttccagcaagaccctgaagttgaccccgatgcagaaagtaggtctgctgtattatgaagatcttgctcgcggcgttacgcgtgccgaagctgacgcgatttggctgctggttcaggatgcagtcgcaactttcgacccggatgcgatcgtggagattgtcggtggatttcgtcgtgggaaacctcagggtcacgacgttgatctgcttatcagttctccgggagctgagaaagagcaagaagaccaactcctgcagaaagtgatgaatctgtggaagaaacaagggttgttgctgtacggtcgtctggtgtggacccagtgggaagatgggggttcgccttccggtaaggctgacgagggtgacgcgggtgcgaaatgctttctgatcctcaaactttatgatcatctggtgcgtaaaagcaaatggaacatgccgacgggttcgaacgtgggcgagtccaaaccgtggaaagcaattcgcgtagatctgctgcgttgcccctatggcagttttgcgtttgcgatgttgcagtggaccggaagccgcatgttccgtcgtgatctgcgttggtacgccactgacgagaagaacatgatgctggacaatcattcgctgtatgacctgaccaagggtatcttcctccctgctaaatcggaagaggaaattttcgcacatctggggcttgaatacctggaaccgttcgaacgtaacgca

SEQ ID NO: 3360 - protein, 529 aa, synthetic construct
  REGION 1..529: note = Variant of terminal deoxynucleotidyltransferase
MHHHHHHGGSGSHGIRTIDSDFGKKQQKKGDNHDSSATYEIKFHEFVLFILEEKMGATRRTFLTDLARKKGFRVENELTDEVTHIVAENLSRSEVLAWLKEHKMEKTKQFELLDISWLIESMKVGKPVDTKGKYQLAESVEVSANPDPTEGRVNELPPTMKTVSPYACQRRTTLNNRNQRFTDSLEILRENYEFKRNDDTALEFRRAISVLKSLPFEVRSLKDTEGLPWIGDEVKGIMEEIIEVGESREVQAVLNDEWYQSFHRFKSVFGVGVKTADKWYRMGLRTLEDVRSSKTLKLTPMQKVGLLYYEDLARGVTRAEADAIWLLVQDAVATFDPDAIVEIVGGFRRGKPQGHDVDLLISSPGAEKEQEDQLLQKVMNLWKKQGLLLYGRLVWTQWEDGGSPSGKADEGDAGAKCFLILKLYDHLVRKSKWNMPTGSNVGESKPWKAIRVDLLRCPYGSFAFAMLQWTGSRMFRRDLRWYATDEKNMMLDNHSLYDLTKGIFLPAKSEEEIFAHLGLEYLEPFERNA

SEQ ID NO: 3361 - DNA, 1587 bp, synthetic construct
  misc_feature 1..1587: note = Variant of terminal deoxynucleotidyltransferase
  source 1..1587: mol_type = other DNA
atgcaccatcatcatcatcatggcggtagcggcagccacggcattcgtaccatcgattcggacttcgggaagaaacagcagaaaaaaggcgataaccacgatagttccgccacttatgaaatcaaatttcacgagtttgtgctgttcattctcgaagaaaaaatgggtgcgacgcgtcgtacttttctgacagatttagcccgcaagaaagggttccgcgtcgagaatgaactgaccgacgaagttacccacatcgtggcagaaaatctgtcacgctctgaagtattggcttggctgaaagaacacaagatggagaagaccaagcaattcgaactgctggatattagctggcttatcgaaagcatgaaagttggtaaaccggtggacaccaaggggaaataccagttggcggaatcggttgaggtgagtgcgaacccagatccgacagaaggtcgtgtaaacgagctgcctcctactatgaaaaccgtttctccgtatgcgtgtcaacgccgcaccaccctgaacaaccgtaatcaacgttttacggactcgctggaaattcttcgtgaaaattacgagttcaaaaataacgatgatactgcgctggaatttcgtcgtgctatctccgtgctgaaaagccttccgtttgaggtacgtagcctgaaagacacggaaggattgccctggatcggtgatgaagtcaaagggattatggaagaaatcatcgaggtcggggagtcgcgtgaagtgcaggccgtgctcaatgatgagtggtatcaaagcttccaccgctttaagagtgtctttggagtgggggtgaagacagcagacaagtggtaccgtatgggtctgcgcaccctcgaggatgttcgttccagcaagaccctgaagttgaccccgatgcagaaagtaggtctgctgtattatgaagatcttgctcgcggcgttacgcgtgccgaagctgacgcgatttggctgctggttcaggatgcagtcgcaactttcgacccggatgcgatcgtggagattgtcggtggatttcgtcgtgggaaacctcagggtcacgacgttgatctgcttatcagttctccgggagctgagaaagagcaagaagaccaactcctgcagaaagtgatgaatctgtggaagaaacaagggttgttgctgtacggtcgtctggaatggacccagtgggaagatgggggttcgccttccggtaaggctgacgagggtgacgcgggtgcgaaatgctttctgatcctcaaactttatgatcatctggtgcgtaaaagcaaatggaacatgccgacgggttcgaacgtgggcgagtccaaaccgtggaaagcaattcgcgtagatctgctgcgttgcccctatggcagttttgcgtttgcgatgttgcagtggaccggaagccgcatgttccgtcgtgatctgcgttggtacgccactgacgagaagaacatgatgctggacaatcattcgctgtatgacctgaccaagggtatcttcctccctgctaaatcggaagaggaaattttcgcacatctggggcttgaatacctggaaccgttcgaacgtaacgca

SEQ ID NO: 3362 - protein, 529 aa, synthetic construct
  REGION 1..529: note = Variant of terminal deoxynucleotidyltransferase
MHHHHHHGGSGSHGIRTIDSDFGKKQQKKGDNHDSSATYEIKFHEFVLFILEEKMGATRRTFLTDLARKKGFRVENELTDEVTHIVAENLSRSEVLAWLKEHKMEKTKQFELLDISWLIESMKVGKPVDTKGKYQLAESVEVSANPDPTEGRVNELPPTMKTVSPYACQRRTTLNNRNQRFTDSLEILRENYEFKNNDDTALEFRRAISVLKSLPFEVRSLKDTEGLPWIGDEVKGIMEEIIEVGESREVQAVLNDEWYQSFHRFKSVFGVGVKTADKWYRMGLRTLEDVRSSKTLKLTPMQKVGLLYYEDLARGVTRAEADAIWLLVQDAVATFDPDAIVEIVGGFRRGKPQGHDVDLLISSPGAEKEQEDQLLQKVMNLWKKQGLLLYGRLEWTQWEDGGSPSGKADEGDAGAKCFLILKLYDHLVRKSKWNMPTGSNVGESKPWKAIRVDLLRCPYGSFAFAMLQWTGSRMFRRDLRWYATDEKNMMLDNHSLYDLTKGIFLPAKSEEEIFAHLGLEYLEPFERNA

SEQ ID NO: 3363 - DNA, 1587 bp, synthetic construct
  misc_feature 1..1587: note = Variant of terminal deoxynucleotidyltransferase
  source 1..1587: mol_type = other DNA
atgcaccatcatcatcatcatggcggtagcggcagccacggcattcgtaccatcgattcggacttcgggaagaaacagcagaaaaaaggcgataaccacgatagttccgccacttatgaaatcaaatttcacgagtttgtgctgttcattctcgaagaaaaaatgggtgcgacgcgtcgtacttttctgacagatttagcccgcaagaaagggttccgcgtcgagaatgaactgaccgacgaagttacccacatcgtggcagaaaatctgtcacgctctgaagtattggcttggctgaaagaacacaagatggagaagaccaagcaattcgaactgctggatattagctggcttatcgaaagcatgaaagttggtaaaccggtggacaccaaggggaaataccagttggcggaatcggttgaggtgagtgcgaacccagatccgacagaaggtcgtgtaaacgagctgcctcctactatgaaaaccgtttctccgtatgcgtgtcaacgccgcaccaccctgaacaaccgtaatcaacgttttacggactcgctggaaattcttcgtgaaaattacgagttcaaacgcaacgatgatactgcgctggaatttcgtcgtgctatctccgtgctgaaaagccttccgtttgaggtacgtagcctgaaagacacggaaggattgccctggatcggtgatgaagtcaaagggattatggaagaaatcatcgaggtcggggagtcgcgtgaagtgcaggccgtgctcaatgatgagtggtatcaaagcttccaccgctttaagagtgtctttggagtgggggtgaagacagcagacaagtggtaccgtatgggtctgcgcaccctcgaggatgttcgttccagcaagaccctgaagttgaccccgatgcagaaagtaggtctgctgtattatgaagatcttgctcgcggcgttacgcgtgccgaagctgacgcgatttggctgctggttcaggatgcagtcgcaactttcgacccggatgcgatcgtggagattgtcggtggatttcgtcgtgggaaacctcagggtcacgacgttgatctgcttatcagttctccgggagctgagaaagagcaagaagaccaactcctgcagaaagtgatgaatctgtggaagaaacaagggttgttgctgtacggtcgtctggcttggacccagtgggaagatgggggttcgccttccggtaaggctgacgagggtgacgcgggtgcgaaatgctttctgatcctcaaactttatgatcatctggtgcgtaaaagcaaatggaacatgccgacgggttcgaacgtgggcgagtccaaaccgtggaaagcaattcgcgtagatctgctgcgttgcccctatggcagttttgcgtttgcgatgttgcagtggaccggaagccgcatgttccgtcgtgatctgcgttggtacgccactgacgagaagaacatgatgctggacaatcattcgctgtatgacctgaccaagggtatcttcctccctgctaaatcggaagaggaaattttcgcacatctggggcttgaatacctggaaccgttcgaacgtaacgca

SEQ ID NO: 3364 - protein, 529 aa, synthetic construct
  REGION 1..529: note = Variant of terminal deoxynucleotidyltransferase
MHHHHHHGGSGSHGIRTIDSDFGKKQQKKGDNHDSSATYEIKFHEFVLFILEEKMGATRRTFLTDLARKKGFRVENELTDEVTHIVAENLSRSEVLAWLKEHKMEKTKQFELLDISWLIESMKVGKPVDTKGKYQLAESVEVSANPDPTEGRVNELPPTMKTVSPYACQRRTTLNNRNQRFTDSLEILRENYEFKRNDDTALEFRRAISVLKSLPFEVRSLKDTEGLPWIGDEVKGIMEEIIEVGESREVQAVLNDEWYQSFHRFKSVFGVGVKTADKWYRMGLRTLEDVRSSKTLKLTPMQKVGLLYYEDLARGVTRAEADAIWLLVQDAVATFDPDAIVEIVGGFRRGKPQGHDVDLLISSPGAEKEQEDQLLQKVMNLWKKQGLLLYGRLAWTQWEDGGSPSGKADEGDAGAKCFLILKLYDHLVRKSKWNMPTGSNVGESKPWKAIRVDLLRCPYGSFAFAMLQWTGSRMFRRDLRWYATDEKNMMLDNHSLYDLTKGIFLPAKSEEEIFAHLGLEYLEPFERNA

SEQ ID NO: 3365 - DNA, 1587 bp, synthetic construct
  misc_feature 1..1587: note = Variant of terminal deoxynucleotidyltransferase
  source 1..1587: mol_type = other DNA
atgcaccatcatcatcatcatggcggtagcggcagccacggcattcgtaccatcgattcggacttcgggaagaaacagcagaaaaaaggcgataaccacgatagttccgccacttatgaaatcaaatttcacgagtttgtgctgttcattctcgaagaaaaaatgggtgcgacgcgtcgtacttttctgacagatttagcccgcaagaaagggttccgcgtcgagaatgaactgaccgacgaagttacccacatcgtggcagaaaatctgtcacgctctgaagtattggcttggctgaaagaacacaagatggagaagaccaagcaattcgaactgctggatattagctggcttatcgaaagcatgaaagttggtaaaccggtggacaccaaggggaaataccagttggcggaatcggttgaggtgagtgcgaacccagatccgacagaaggtcgtgtaaacgagctgcctcctactatgaaaaccgtttctccgtatgcgtgtcaacgccgcaccaccctgaacaaccgtaatcaacgttttacggactcgctggaaattcttcgtgaaaattacgagttcaaacgcaacgatgatactgcgctggaatttcgtcgtgctatctccgtgctgaaaagccttccgtttgaggtacgtagcctgaaagacacggaaggattgccctggatcggtgatgaagtcaaagggattatggaagaaatcatcgaggtcggggagtcgcgtgaagtgcaggccgtgctcaatgatgagtggtatcaaagcttccaccgctttaagagtgtctttggagtgggggtgaagacagcagacaagtggtaccgtatgggtctgcgcaccctcgaggatgttcgttccagcaagaccctgaagttgaccccgatgcagaaagtaggtctgctgtattatgaagatcttgctcgcggcgttacgcgtgccgaagctgacgcgatttggctgctggttcaggatgcagtcgcaactttcgacccggatgcgatcgtggagattgtcggtggatttcgtcgtgggaaacctcagggtcacgacgttgatctgcttatcagttctccgggagctgagaaagagcaagaagaccaactcctgcagaaagtgatgaatctgtggaagaaacaagggttgttgctgtacggtcgtctggaatggacccagtgggaagatgggggttcgccttccggtaaggctgacgagggtgacgcgggtgcgaaatgctttctgatcctcaaactttatgatcatctggtgcgtaaaagcaaatggaacatgccgacgggttcgaacgtgggcgagtccaaaccgtggaaagcaattcgcgtagatctgctgcgttgcccctatggcagttttgcgtttgcgatgttgcagtggaccggaagccgcatgttccgtcgtgatctgcgttggtacgccactgacgagaagaacatgatgctggacgtgcattcgctgtatgacctgaccaagggtatcttcctccctgctaaatcggaagaggaaattttcgcacatctggggcttgaatacctggaaccgttcgaacgtaacgca

SEQ ID NO: 3366 - protein, 529 aa, synthetic construct
  REGION 1..529: note = Variant of terminal deoxynucleotidyltransferase
MHHHHHHGGSGSHGIRTIDSDFGKKQQKKGDNHDSSATYEIKFHEFVLFILEEKMGATRRTFLTDLARKKGFRVENELTDEVTHIVAENLSRSEVLAWLKEHKMEKTKQFELLDISWLIESMKVGKPVDTKGKYQLAESVEVSANPDPTEGRVNELPPTMKTVSPYACQRRTTLNNRNQRFTDSLEILRENYEFKRNDDTALEFRRAISVLKSLPFEVRSLKDTEGLPWIGDEVKGIMEEIIEVGESREVQAVLNDEWYQSFHRFKSVFGVGVKTADKWYRMGLRTLEDVRSSKTLKLTPMQKVGLLYYEDLARGVTRAEADAIWLLVQDAVATFDPDAIVEIVGGFRRGKPQGHDVDLLISSPGAEKEQEDQLLQKVMNLWKKQGLLLYGRLEWTQWEDGGSPSGKADEGDAGAKCFLILKLYDHLVRKSKWNMPTGSNVGESKPWKAIRVDLLRCPYGSFAFAMLQWTGSRMFRRDLRWYATDEKNMMLDVHSLYDLTKGIFLPAKSEEEIFAHLGLEYLEPFERNA

SEQ ID NO: 3367 - DNA, 1587 bp, synthetic construct
  misc_feature 1..1587: note = Variant of terminal deoxynucleotidyltransferase
  source 1..1587: mol_type = other DNA
atgcaccatcatcatcatcatggcggtagcggcagccacggcattcgtaccatcgattcggacttcgggaagaaacagcagaaaaaaggcgataaccacgatagttccgccacttatgaaatcaaatttcacgagtttgtgctgttcattctcgaagaaaaaatgggtgcgacgcgtcgtacttttctgacagatttagcccgcaagaaagggttccgcgtcgagaatgaactgaccgacgaagttacccacatcgtggcagaaaatctgtcacgctctgaagtattggcttggctgaaagaacacaagatggagaagaccaagcaattcgaactgctggatattagctggcttatcgaaagcatgaaagttggtaaaccggtggacaccaaggggaaataccagttggcggaatcggttgaggtgagtgcgaacccagatccgacagaaggtcgtgtaaacgagctgcctcctactatgaaaaccgtttctccgtatgcgtgtcaacgccgcaccaccctgaacaaccgtaatcaacgttttacggactcgctggaaattcttcgtgaaaattacgagttcaaacgcaacgatgatactgcgctggaatttcgtcgtgctatctccgtgctgaaaagccttccgtttgaggtacgtagcctgaaagacacggaaggattgccctggatcggtgatgaagtcaaagggattatggaagaaatcatcgaggtcggggagtcgcgtgaagtgcaggccgtgctcaatgatgagtggtatcaaagcttccaccgctttaagagtgtctttggagtgggggtgaagacagcagacaagtggtaccgtatgggtctgcgcaccctcgaggatgttcgttccagcaagaccctgaagttgaccccgatgcagaaagtaggtctgctgtattatgaagatcttgctcgcggcgttacgcgtgccgaagctgacgcgatttggctgctggttcaggatgcagtcgcaactttcgacccggatgcgatcgtggagattgtcggtggatttcgtcgtgggaaacctcagggtcacgacgttgatctgcttatcagttctccgggagctgagaaagagcaagaagaccaactcctgcagaaagtgatgaatctgtggaagaaacaagggttgttgctgtacggtcgtctggaatggacccagtgggaagatgggggttcgccttccggtaaggctgacgagggtgactcgggtgcgaaatgctttctgatcctcaaactttatgatcatctggtgcgtaaaagcaaatggaacatgccgacgggttcgaacgtgggcgagtccaaaccgtggaaagcaattcgcgtagatctgctgcgttgcccctatggcagttttgcgtttgcgatgttgcagtggaccggaagccgcatgttccgtcgtgatctgcgttggtacgccactgacgagaagaacatgatgctggacaatcattcgctgtatgacctgaccaagggtatcttcctccctgctaaatcggaagaggaaattttcgcacatctggggcttgaatacctggaaccgttcgaacgtaacgca

SEQ ID NO: 3368 - protein, 529 aa, synthetic construct
  REGION 1..529: note = Variant of terminal deoxynucleotidyltransferase
MHHHHHHGGSGSHGIRTIDSDFGKKQQKKGDNHDSSATYEIKFHEFVLFILEEKMGATRRTFLTDLARKKGFRVENELTDEVTHIVAENLSRSEVLAWLKEHKMEKTKQFELLDISWLIESMKVGKPVDTKGKYQLAESVEVSANPDPTEGRVNELPPTMKTVSPYACQRRTTLNNRNQRFTDSLEILRENYEFKRNDDTALEFRRAISVLKSLPFEVRSLKDTEGLPWIGDEVKGIMEEIIEVGESREVQAVLNDEWYQSFHRFKSVFGVGVKTADKWYRMGLRTLEDVRSSKTLKLTPMQKVGLLYYEDLARGVTRAEADAIWLLVQDAVATFDPDAIVEIVGGFRRGKPQGHDVDLLISSPGAEKEQEDQLLQKVMNLWKKQGLLLYGRLEWTQWEDGGSPSGKADEGDSGAKCFLILKLYDHLVRKSKWNMPTGSNVGESKPWKAIRVDLLRCPYGSFAFAMLQWTGSRMFRRDLRWYATDEKNMMLDNHSLYDLTKGIFLPAKSEEEIFAHLGLEYLEPFERNA

SEQ ID NO: 3369 - DNA, 1587 bp, synthetic construct
  misc_feature 1..1587: note = Variant of terminal deoxynucleotidyltransferase
  source 1..1587: mol_type = other DNA
atgcaccatcatcatcatcatggcggtagcggcagccacggcattcgtaccatcgattcggacttcgggaagaaacagcagaaaaaaggcgataaccacgatagttccgccacttatgaaatcaaatttcacgagtttgtgctgttcattctcgaagaaaaaatgggtgcgacgcgtcgtacttttctgacagatttagcccgcaagaaagggttccgcgtcgagaatgaactgaccgacgaagttacccacatcgtggcagaaaatctgtcacgctctgaagtattggcttggctgaaagaacacaagatggagaagaccaagcaattcgaactgctggatattagctggcttatcgaaagcatgaaagttggtaaaccggtggacaccaaggggaaataccagttggcggaatcggttgaggtgagtgcgaacccagatccgacagaaggtcgtgtaaacgagctgcctcctactatgaaaaccgtttctccgtatgcgtgtcaacgccgcaccaccctgaacaaccgtaatcaacgttttacggactcgctggaaattcttcgtgaaaattacgagttcaaacgcaacgatgatactgcgctggaatttcgtcgtgctatctccgtgctgaaaagccttccgtttgaggtacgtagcctgaaagacacggaaggattgccctggatcggtgatgaagtcaaagggattatggaagaaatcatcgaggtcggggagtcgcgtgaagtgcaggccgtgctcaatgatgagtggtatcaaagcttccaccgctttaagagtgtctttggagtgggggtgaagacagcagacaagtggtaccgtatgggtctgcgcaccctcgaggatgttcgttccagcaagaccctgaagttgaccccgatgtcgaaagtaggtctgctgtattatgaagatcttgctcgcggcgttacgcgtgccgaagctgacgcgatttggctgctggttcaggatgcagtcgcaactttcgacccggatgcgatcgtggagattgtcggtggatttcgtcgtgggaaacctcagggtcacgacgttgatctgcttatcagttctccgggagctgagaaagagcaagaagaccaactcctgcagaaagtgatgaatctgtggaagaaacaagggttgttgctgtacggtcgtctggaatggacccagtgggaagatgggggttcgccttccggtaaggctgacgagggtgacgcgggtgcgaaatgctttctgatcctcaaactttatgatcatctggtgcgtaaaagcaaatggaacatgccgacgggttcgaacgtgggcgagtccaaaccgtggaaagcaattcgcgtagatctgctgcgttgcccctatggcagttttgcgtttgcgatgttgcagtggaccggaagccgcatgttccgtcgtgatctgcgttggtacgccactgacgagaagaacatgatgctggacaatcattcgctgtatgacctgaccaagggtatcttcctccctgctaaatcggaagaggaaattttcgcacatctggggcttgaatacctggaaccgttcgaacgtaacgca

SEQ ID NO: 3370 - protein, 529 aa, synthetic construct
  REGION 1..529: note = Variant of terminal deoxynucleotidyltransferase
MHHHHHHGGSGSHGIRTIDSDFGKKQQKKGDNHDSSATYEIKFHEFVLFILEEKMGATRRTFLTDLARKKGFRVENELTDEVTHIVAENLSRSEVLAWLKEHKMEKTKQFELLDISWLIESMKVGKPVDTKGKYQLAESVEVSANPDPTEGRVNELPPTMKTVSPYACQRRTTLNNRNQRFTDSLEILRENYEFKRNDDTALEFRRAISVLKSLPFEVRSLKDTEGLPWIGDEVKGIMEEIIEVGESREVQAVLNDEWYQSFHRFKSVFGVGVKTADKWYRMGLRTLEDVRSSKTLKLTPMSKVGLLYYEDLARGVTRAEADAIWLLVQDAVATFDPDAIVEIVGGFRRGKPQGHDVDLLISSPGAEKEQEDQLLQKVMNLWKKQGLLLYGRLEWTQWEDGGSPSGKADEGDAGAKCFLILKLYDHLVRKSKWNMPTGSNVGESKPWKAIRVDLLRCPYGSFAFAMLQWTGSRMFRRDLRWYATDEKNMMLDNHSLYDLTKGIFLPAKSEEEIFAHLGLEYLEPFERNA

SEQ ID NO: 3371 - DNA, 1587 bp, synthetic construct
  misc_feature 1..1587: note = Variant of terminal deoxynucleotidyltransferase
  source 1..1587: mol_type = other DNA
atgcaccatcatcatcatcatggcggtagcggcagccacggcattcgtaccatcgattcggacttcgggaagaaacagcagaaaaaaggcgataaccacgatagttccgccacttatgaaatcaaatttcacgagtttgtgctgttcattctcgaagaaaaaatgggtgcgacgcgtcgtacttttctgacagatttagcccgcaagaaagggttccgcgtcgagaatgaactgaccgacgaagttacccacatcgtggcagaaaatctgtcacgctctgaagtattggcttggctgaaagaacacaagatggagaagaccaagcaattcgaactgctggatattagctggcttatcgaaagcatgaaagttggtaaaccggtggacaccaaggggaaataccagttggcggaatcggttgaggtgagtgcgaacccagatccgacagaaggtcgtgtaaacgagctgcctcctactatgaaaaccgtttctccgtatgcgtgtcaacgccgcaccaccctgaacaaccgtaatcaacgttttacggactcgctggaaattcttcgtgaaaattacgagttcaaacgcaacgatgatactgcgctggaatttcgtcgtgctatctccgtgctgaaaagccttccgtttgaggtacgtagcctgaaagacacggaaggattgccctggatcggtgatgaagtcaaagggattatggaagaaatcatcgaggtcggggagtcgcgtgaagtgcaggccgtgctcaatgatgagtggtatcaaagcttccaccgctttaagagtgtctttggagtgggggtgaagacagcagacaagtggtaccgtatgggtctgcgcaccctcgaggatgttcgttccagcaagaccctgaagttgaccccgatgcagaaagtaggtctgctgtattatgaagatcttgctcgcggcgttacgcgtgccgaagctgacgcgatttggctgctggttcaggatgcagtcgcaactttcgacccggatgcgatcgtggagattgtcggtggatttcgtcgtgggaaacctcagggtcacgacgttgatctgcttatcagttctccgggagctgagaaagagcaagaagaccaactcctgcagaaagtgatgaatctgtggaagaaacaagggttgttgctgtacggtcgtctgatgtggacccagtgggaagatgggggttcgccttccggtaaggctgacgagggtgacgcgggtgcgaaatgctttctgatcctcaaactttatgatcatctggtgcgtaaaagcaaatggaacatgccgacgggttcgaacgtgggcgagtccaaaccgtggaaagcaattcgcgtagatctgctgcgttgcccctatggcagttttgcgtttgcgatgttgcagtggaccggaagccgcatgttccgtcgtgatctgcgttggtacgccactgacgagaagaacatgatgctggacaatcattcgctgtatgacctgaccaagggtatcttcctccctgctaaatcggaagaggaaattttcgcacatctggggcttgaatacctggaaccgttcgaacgtaacgca

SEQ ID NO: 3372 - protein, 529 aa, synthetic construct
  REGION 1..529: note = Variant of terminal deoxynucleotidyltransferase
MHHHHHHGGSGSHGIRTIDSDFGKKQQKKGDNHDSSATYEIKFHEFVLFILEEKMGATRRTFLTDLARKKGFRVENELTDEVTHIVAENLSRSEVLAWLKEHKMEKTKQFELLDISWLIESMKVGKPVDTKGKYQLAESVEVSANPDPTEGRVNELPPTMKTVSPYACQRRTTLNNRNQRFTDSLEILRENYEFKRNDDTALEFRRAISVLKSLPFEVRSLKDTEGLPWIGDEVKGIMEEIIEVGESREVQAVLNDEWYQSFHRFKSVFGVGVKTADKWYRMGLRTLEDVRSSKTLKLTPMQKVGLLYYEDLARGVTRAEADAIWLLVQDAVATFDPDAIVEIVGGFRRGKPQGHDVDLLISSPGAEKEQEDQLLQKVMNLWKKQGLLLYGRLMWTQWEDGGSPSGKADEGDAGAKCFLILKLYDHLVRKSKWNMPTGSNVGESKPWKAIRVDLLRCPYGSFAFAMLQWTGSRMFRRDLRWYATDEKNMMLDNHSLYDLTKGIFLPAKSEEEIFAHLGLEYLEPFERNA

SEQ ID NO: 3373 - DNA, 1587 bp, synthetic construct
  misc_feature 1..1587: note = Variant of terminal deoxynucleotidyltransferase
  source 1..1587: mol_type = other DNA
atgcaccatcatcatcatcatggcggtagcggcagccacggcattcgtaccatcgattcggacttcgggaagaaacagcagaaaaaaggcgataaccacgatagttccgccacttatgaaatcaaatttcacgagtttgtgctgttcattctcgaagaaaaaatgggtgcgacgcgtcgtacttttctgacagatttagcccgcaagaaagggttccgcgtcgagaatgaactgaccgacgaagttacccacatcgtggcagaaaatctgtcacgctctgaagtattggcttggctgaaagaacacaagatggagaagaccaagcaattcgaactgctggatattagctggcttatcgaaagcatgaaagttggtaaaccggtggacaccaaggggaaataccagttggcggaatcggttgaggtgagtgcgaacccagatccgacagaaggtcgtgtaaacgagctgcctcctactatgaaaaccgtttctccgtatgcgtgtcaacgccgcaccaccctgaacaaccgtaatcaacgttttacggactcgctggaaattcttcgtgaaaattacgagttcaaacgcaacgatgatactgcgctggaatttcgtcgtgctatctccgtgctgaaaagccttccgtttgaggtacgtagcctgaaagacacggaaggattgccctggatcggtgatgaagtcaaagggattatggaagaaatcatcgaggtcggggagtcgcgtgaagtgcaggccgtgctcaatgatgagtggtatcaaagcttccaccgctttaagagtgtctttggagtgggggtgaagacagcagacaagtggtaccgtatgggtctgcgcaccctcgaggatgttcgttccagcaagaccctgaagttgaccccgatgcagaaagtaggtctgctgtattatgaagatcttgctcgcggcgttacgcgtgccgaagctgacgcgatttggctgctggttcaggatgcagtcgcaactttcgacccggatgcgatcgtggagattgtcggtggatttcgtcgtgggaaacctcagggtcacgacgttgatctgcttatcagttctccgggagctgagaaagagcaagaagaccaactcctgcagaaagtgatgaatctgtggaagaaacaagggttgttgctgtacggtcgtctggaatggacccagtgggaagatgggggttcgccttccggtaaggctgacgagggtgacgcgggtgcggggtgctttctgatcctcaaactttatgatcatctggtgcgtaaaagcaaatggaacatgccgacgggttcgaacgtgggcgagtccaaaccgtggaaagcaattcgcgtagatctgctgcgttgcccctatggcagttttgcgtttgcgatgttgcagtggaccggaagccgcatgttccgtcgtgatctgcgttggtacgccactgacgagaagaacatgatgctggacaatcattcgctgtatgacctgaccaagggtatcttcctccctgctaaatcggaagaggaaattttcgcacatctggggcttgaatacctggaaccgttcgaacgtaacgca

SEQ ID NO: 3374 - protein, 529 aa, synthetic construct
  REGION 1..529: note = Variant of terminal deoxynucleotidyltransferase
MHHHHHHGGSGSHGIRTIDSDFGKKQQKKGDNHDSSATYEIKFHEFVLFILEEKMGATRRTFLTDLARKKGFRVENELTDEVTHIVAENLSRSEVLAWLKEHKMEKTKQFELLDISWLIESMKVGKPVDTKGKYQLAESVEVSANPDPTEGRVNELPPTMKTVSPYACQRRTTLNNRNQRFTDSLEILRENYEFKRNDDTALEFRRAISVLKSLPFEVRSLKDTEGLPWIGDEVKGIMEEIIEVGESREVQAVLNDEWYQSFHRFKSVFGVGVKTADKWYRMGLRTLEDVRSSKTLKLTPMQKVGLLYYEDLARGVTRAEADAIWLLVQDAVATFDPDAIVEIVGGFRRGKPQGHDVDLLISSPGAEKEQEDQLLQKVMNLWKKQGLLLYGRLEWTQWEDGGSPSGKADEGDAGAGCFLILKLYDHLVRKSKWNMPTGSNVGESKPWKAIRVDLLRCPYGSFAFAMLQWTGSRMFRRDLRWYATDEKNMMLDNHSLYDLTKGIFLPAKSEEEIFAHLGLEYLEPFERNA

SEQ ID NO: 3375 - DNA, 1587 bp, synthetic construct
  misc_feature 1..1587: note = Variant of terminal deoxynucleotidyltransferase
  source 1..1587: mol_type = other DNA
atgcaccatcatcatcatcatggcggtagcggcagccacggcattcgtaccatcgattcggacttcgggaagaaacagcagaaaaaaggcgataaccacgatagttccgccacttatgaaatcaaatttcacgagtttgtgctgttcattctcgaagaaaaaatgggtgcgacgcgtcgtacttttctgacagatttagcccgcaagaaagggttccgcgtcgagaatgaactgaccgacgaagttacccacatcgtggcagaaaatctgtcacgctctgaagtattggcttggctgaaagaacacaagatggagaagaccaagcaattcgaactgctggatattagctggcttatcgaaagcatgaaagttggtaaaccggtggacaccaaggggaaataccagttggcggaatcggttgaggtgagtgcgaacccagatccgacagaaggtcgtgtaaacgagctgcctcctactatgaaaaccgtttctccgtatgcgtgtcaacgccgcaccaccctgaacaaccgtaatcaacgttttacggactcgctggaaattcttcgtgaaaattacgagttcaaacgcaacgatgatactgcgctggaatttcgtcgtgctatctccgtgctgaaaagccttccgtttgaggtacgtagcctgaaagacacggaaggattgccctggatcggtgatgaagtcaaagggattatggaagaaatcatcgaggtcggggagtcgcgtgaagtgcaggccgtgctcaatgatgagtggtatcaaagcttccaccgctttgtgagtgtctttggagtgggggtgaagacagcagacaagtggtaccgtatgggtctgcgcaccctcgaggatgttcgttccagcaagaccctgaagttgaccccgatgcagaaagtaggtctgctgtattatgaagatcttgctcgcggcgttacgcgtgccgaagctgacgcgatttggctgctggttcaggatgcagtcgcaactttcgacccggatgcgatcgtggagattgtcggtggatttcgtcgtgggaaacctcagggtcacgacgttgatctgcttatcagttctccgggagctgagaaagagcaagaagaccaactcctgcagaaagtgatgaatctgtggaagaaacaagggttgttgctgtacggtcgtctggaatggacccagtgggaagatgggggttcgccttccggtaaggctgacgagggtgacgcgggtgcgaaatgctttctgatcctcaaactttatgatcatctggtgcgtaaaagcaaatggaacatgccgacgggttcgaacgtgggcgagtccaaaccgtggaaagcaattcgcgtagatctgctgcgttgcccctatggcagttttgcgtttgcgatgttgcagtggaccggaagccgcatgttccgtcgtgatctgcgttggtacgccactgacgagaagaacatgatgctggacaatcattcgctgtatgacctgaccaagggtatcttcctccctgctaaatcggaagaggaaattttcgcacatctggggcttgaatacctggaaccgttcgaacgtaacgca

SEQ ID NO: 3376 - protein, 529 aa, synthetic construct
  REGION 1..529: note = Variant of terminal deoxynucleotidyltransferase
MHHHHHHGGSGSHGIRTIDSDFGKKQQKKGDNHDSSATYEIKFHEFVLFILEEKMGATRRTFLTDLARKKGFRVENELTDEVTHIVAENLSRSEVLAWLKEHKMEKTKQFELLDISWLIESMKVGKPVDTKGKYQLAESVEVSANPDPTEGRVNELPPTMKTVSPYACQRRTTLNNRNQRFTDSLEILRENYEFKRNDDTALEFRRAISVLKSLPFEVRSLKDTEGLPWIGDEVKGIMEEIIEVGESREVQAVLNDEWYQSFHRFVSVFGVGVKTADKWYRMGLRTLEDVRSSKTLKLTPMQKVGLLYYEDLARGVTRAEADAIWLLVQDAVATFDPDAIVEIVGGFRRGKPQGHDVDLLISSPGAEKEQEDQLLQKVMNLWKKQGLLLYGRLEWTQWEDGGSPSGKADEGDAGAKCFLILKLYDHLVRKSKWNMPTGSNVGESKPWKAIRVDLLRCPYGSFAFAMLQWTGSRMFRRDLRWYATDEKNMMLDNHSLYDLTKGIFLPAKSEEEIFAHLGLEYLEPFERNA

SEQ ID NO: 3377 - DNA, 1587 bp, synthetic construct
  misc_feature 1..1587: note = Variant of terminal deoxynucleotidyltransferase
  source 1..1587: mol_type = other DNA
atgcaccatcatcatcatcatggcggtagcggcagccacggcattcgtaccatcgattcggacttcgggaagaaacagcagaaaaaaggcgataaccacgatagttccgccacttatgaaatcaaatttcacgagtttgtgctgttcattctcgaagaaaaaatgggtgcgacgcgtcgtacttttctgacagatttagcccgcaagaaagggttccgcgtcgagaatgaactgaccgacgaagttacccacatcgtggcagaaaatctgtcacgctctgaagtattggcttggctgaaagaacacaagatggagaagaccaagcaattcgaactgctggatattagctggcttatcgaaagcatgaaagttggtaaaccggtggacaccaaggggaaataccagttggcggaatcggttgaggtgagtgcgaacccagatccgacagaaggtcgtgtaaacgagctgcctcctactatgaaaaccgtttctccgtatgcgtgtcaacgccgcaccaccctgaacaaccgtaatcaacgttttacggactcgctggaaattcttcgtgaaaattacgagttcaaacgcaacgatgatactgcgctggaatttcgtcgtgctatctccgtgctgaaaagccttccgtttgaggtacgtagcctgaaagacacggaaggattgccctggatcggtgatgaagtcaaagggattatggaagaaatcatcgaggtcggggagtcgcgtgaagtgcaggccgtgctcaatgatgagtggtatcaaagcttccaccgctttaagagtgtctttggagtgggggtgaagacagcagacaagtggtaccgtatgggtctgcgcaccctcgaggatgttcgttccagcaagaccctgaagttgaccccgatgcagaaagtaggtctgctgtattatgaagatcttgctcgcggcgttacgcgtgccgaagctgacgcgatttggctgctggttcaggatgcagtcgcaactttcgacccggatgcgatcgtggagattgtcggtggatttcgtcgtgggaaacctcagggtcacgacgttgatctgcttatcagttctccgggagctgagaaagagcaagaagaccaactcctgcagaaagtgatgaatctgtggaagaaacaagggttgttgctgtacggtcgtctggggtggacccagtgggaagatgggggttcgccttccggtaaggctgacgagggtgacgcgggtgcgaaatgctttctgatcctcaaactttatgatcatctggtgcgtaaaagcaaatggaacatgccgacgggttcgaacgtgggcgagtccaaaccgtggaaagcaattcgcgtagatctgctgcgttgcccctatggcagttttgcgtttgcgatgttgcagtggaccggaagccgcatgttccgtcgtgatctgcgttggtacgccactgacgagaagaacatgatgctggacaatcattcgctgtatgacctgaccaagggtatcttcctccctgctaaatcggaagaggaaattttcgcacatctggggcttgaatacctggaaccgttcgaacgtaacgca

SEQ ID NO: 3378 - protein, 529 aa, synthetic construct
  REGION 1..529: note = Variant of terminal deoxynucleotidyltransferase
MHHHHHHGGSGSHGIRTIDSDFGKKQQKKGDNHDSSATYEIKFHEFVLFILEEKMGATRRTFLTDLARKKGFRVENELTDEVTHIVAENLSRSEVLAWLKEHKMEKTKQFELLDISWLIESMKVGKPVDTKGKYQLAESVEVSANPDPTEGRVNELPPTMKTVSPYACQRRTTLNNRNQRFTDSLEILRENYEFKRNDDTALEFRRAISVLKSLPFEVRSLKDTEGLPWIGDEVKGIMEEIIEVGESREVQAVLNDEWYQSFHRFKSVFGVGVKTADKWYRMGLRTLEDVRSSKTLKLTPMQKVGLLYYEDLARGVTRAEADAIWLLVQDAVATFDPDAIVEIVGGFRRGKPQGHDVDLLISSPGAEKEQEDQLLQKVMNLWKKQGLLLYGRLGWTQWEDGGSPSGKADEGDAGAKCFLILKLYDHLVRKSKWNMPTGSNVGESKPWKAIRVDLLRCPYGSFAFAMLQWTGSRMFRRDLRWYATDEKNMMLDNHSLYDLTKGIFLPAKSEEEIFAHLGLEYLEPFERNA

SEQ ID NO: 3379 - DNA, 1587 bp, synthetic construct
  misc_feature 1..1587: note = Variant of terminal deoxynucleotidyltransferase
  source 1..1587: mol_type = other DNA
atgcaccatcatcatcatcatggcggtagcggcagccacggcattcgtaccatcgattcggacttcgggaagaaacagcagaaaaaaggcgataaccacgatagttccgccacttatgaaatcaaatttcacgagtttgtgctgttcattctcgaagaaaaaatgggtgcgacgcgtcgtacttttctgacagatttagcccgcaagaaagggttccgcgtcgagaatgaactgaccgacgaagttacccacatcgtggcagaaaatctgtcacgctctgaagtattggcttggctgaaagaacacaagatggagaagaccaagcaattcgaactgctggatattagctggcttatcgaaagcatgaaagttggtaaaccggtggacaccaaggggaaataccagttggcggaatcggttgaggtgagtgcgaacccagatccgacagaaggtcgtgtaaacgagctgcctcctactatgaaaaccgtttctccgtatgcgtgtcaacgccgcaccaccctgaacaaccgtaatcaacgttttacggactcgctggaaattcttcgtgaaaattacgagttcaaacgcaacgatgatactgcgctggaatttcgtcgtgctatctccgtgctgaaaagccttccgtttgaggtacgtagcctgaaagacacggaaggattgccctggatcggtgatgaagtcaaagggattatggaagaaatcatcgaggtcggggagtcgcgtgaagtgcaggccgtgctcaatgatgagtggtatcaaagcttccaccgctttaagagttgttttggagtgggggtgaagacagcagacaagtggtaccgtatgggtctgcgcaccctcgaggatgttcgttccagcaagaccctgaagttgaccccgatgcagaaagtaggtctgctgtattatgaagatcttgctcgcggcgttacgcgtgccgaagctgacgcgatttggctgctggttcaggatgcagtcgcaactttcgacccggatgcgatcgtggagattgtcggtggatttcgtcgtgggaaacctcagggtcacgacgttgatctgcttatcagttctccgggagctgagaaagagcaagaagaccaactcctgcagaaagtgatgaatctgtggaagaaacaagggttgttgctgtacggtcgtctggaatggacccagtgggaagatgggggttcgccttccggtaaggctgacgagggtgacgcgggtgcgaaatgctttctgatcctcaaactttatgatcatctggtgcgtaaaagcaaatggaacatgccgacgggttcgaacgtgggcgagtccaaaccgtggaaagcaattcgcgtagatctgctgcgttgcccctatggcagttttgcgtttgcgatgttgcagtggaccggaagccgcatgttccgtcgtgatctgcgttggtacgccactgacgagaagaacatgatgctggacaatcattcgctgtatgacctgaccaagggtatcttcctccctgctaaatcggaagaggaaattttcgcacatctggggcttgaatacctggaaccgttcgaacgtaacgca

SEQ ID NO: 3380 - protein, 529 aa, synthetic construct
  REGION 1..529: note = Variant of terminal deoxynucleotidyltransferase
MHHHHHHGGSGSHGIRTIDSDFGKKQQKKGDNHDSSATYEIKFHEFVLFILEEKMGATRRTFLTDLARKKGFRVENELTDEVTHIVAENLSRSEVLAWLKEHKMEKTKQFELLDISWLIESMKVGKPVDTKGKYQLAESVEVSANPDPTEGRVNELPPTMKTVSPYACQRRTTLNNRNQRFTDSLEILRENYEFKRNDDTALEFRRAISVLKSLPFEVRSLKDTEGLPWIGDEVKGIMEEIIEVGESREVQAVLNDEWYQSFHRFKSCFGVGVKTADKWYRMGLRTLEDVRSSKTLKLTPMQKVGLLYYEDLARGVTRAEADAIWLLVQDAVATFDPDAIVEIVGGFRRGKPQGHDVDLLISSPGAEKEQEDQLLQKVMNLWKKQGLLLYGRLEWTQWEDGGSPSGKADEGDAGAKCFLILKLYDHLVRKSKWNMPTGSNVGESKPWKAIRVDLLRCPYGSFAFAMLQWTGSRMFRRDLRWYATDEKNMMLDNHSLYDLTKGIFLPAKSEEEIFAHLGLEYLEPFERNA

SEQ ID NO: 3381 - DNA, 1587 bp, synthetic construct
  misc_feature 1..1587: note = Variant of terminal deoxynucleotidyltransferase
  source 1..1587: mol_type = other DNA
atgcaccatcatcatcatcatggcggtagcggcagccacggcattcgtaccatcgattcggacttcgggaagaaacagcagaaaaaaggcgataaccacgatagttccgccacttatgaaatcaaatttcacgagtttgtgctgttcattctcgaagaaaaaatgggtgcgacgcgtcgtacttttctgacagatttagcccgcaagaaagggttccgcgtcgagaatgaactgaccgacgaagttacccacatcgtggcagaaaatctgtcacgctctgaagtattggcttggctgaaagaacacaagatggagaagaccaagcaattcgaactgctggatattagctggcttatcgaaagcatgaaagttggtaaaccggtggacaccaaggggaaataccagttggcggaatcggttgaggtgagtgcgaacccagatccgacagaaggtcgtgtaaacgagctgcctcctactatgaaaaccgtttctccgtatgcgtgtcaacgccgcaccaccctgaacaaccgtaatcaacgttttacggactcgctggaaattcttcgtgaaaattacgagttcaaacgcaacgatgatactgcgctggaatttcgtcgtgctatctccgtgctgaaaagccttccgtttgaggtacgtagcctgaaagacacggaaggattgccctggatcggtgatgaagtcaaagggattatggaagaaatcatcgaggtcggggagtcgcgtgaagtgcaggccgtgctcaatgatgagtggtatcaaagcttccaccgctttaagagtgtctttggagtgggggtgaagacagcagacaagtggtaccgtatgggtctgcgcaccctcgaggatgttcgttccagcaagaccctgaagttgcttccgatgcagaaagtaggtctgctgtattatgaagatcttgctcgcggcgttacgcgtgccgaagctgacgcgatttggctgctggttcaggatgcagtcgcaactttcgacccggatgcgatcgtggagattgtcggtggatttcgtcgtgggaaacctcagggtcacgacgttgatctgcttatcagttctccgggagctgagaaagagcaagaagaccaactcctgcagaaagtgatgaatctgtggaagaaacaagggttgttgctgtacggtcgtctggaatggacccagtgggaagatgggggttcgccttccggtaaggctgacgagggtgacgcgggtgcgaaatgctttctgatcctcaaactttatgatcatctggtgcgtaaaagcaaatggaacatgccgacgggttcgaacgtgggcgagtccaaaccgtggaaagcaattcgcgtagatctgctgcgttgcccctatggcagttttgcgtttgcgatgttgcagtggaccggaagccgcatgttccgtcgtgatctgcgttggtacgccactgacgagaagaacatgatgctggacaatcattcgctgtatgacctgaccaagggtatcttcctccctgctaaatcggaagaggaaattttcgcacatctggggcttgaatacctggaaccgttcgaacgtaacgca

SEQ ID NO: 3382 - protein, 529 aa, synthetic construct
  REGION 1..529: note = Variant of terminal deoxynucleotidyltransferase
MHHHHHHGGSGSHGIRTIDSDFGKKQQKKGDNHDSSATYEIKFHEFVLFILEEKMGATRRTFLTDLARKKGFRVENELTDEVTHIVAENLSRSEVLAWLKEHKMEKTKQFELLDISWLIESMKVGKPVDTKGKYQLAESVEVSANPDPTEGRVNELPPTMKTVSPYACQRRTTLNNRNQRFTDSLEILRENYEFKRNDDTALEFRRAISVLKSLPFEVRSLKDTEGLPWIGDEVKGIMEEIIEVGESREVQAVLNDEWYQSFHRFKSVFGVGVKTADKWYRMGLRTLEDVRSSKTLKLLPMQKVGLLYYEDLARGVTRAEADAIWLLVQDAVATFDPDAIVEIVGGFRRGKPQGHDVDLLISSPGAEKEQEDQLLQKVMNLWKKQGLLLYGRLEWTQWEDGGSPSGKADEGDAGAKCFLILKLYDHLVRKSKWNMPTGSNVGESKPWKAIRVDLLRCPYGSFAFAMLQWTGSRMFRRDLRWYATDEKNMMLDNHSLYDLTKGIFLPAKSEEEIFAHLGLEYLEPFERNA

SEQ ID NO: 3383 - DNA, 1587 bp, synthetic construct
  misc_feature 1..1587: note = Variant of terminal deoxynucleotidyltransferase
  source 1..1587: mol_type = other DNA
atgcaccatcatcatcatcatggcggtagcggcagccacggcattcgtaccatcgattcggacttcgggaagaaacagcagaaaaaaggcgataaccacgatagttccgccacttatgaaatcaaatttcacgagtttgtgctgttcattctcgaagaaaaaatgggtgcgacgcgtcgtacttttctgacagatttagcccgcaagaaagggttccgcgtcgagaatgaactgaccgacgaagttacccacatcgtggcagaaaatctgtcacgctctgaagtattggcttggctgaaagaacacaagatggagaagaccaagcaattcgaactgctggatattagctggcttatcgaaagcatgaaagttggtaaaccggtggacaccaaggggaaataccagttggcggaatcggttgaggtgagtgcgaacccagatccgacagaaggtcgtgtaaacgagctgcctcctactatgaaaaccgtttctccgtatgcgtgtcaacgccgcaccaccctgaacaaccgtaatcaacgttttacggactcgctggaaattcttcgtgaaaattacgagttcaaacgcaacgatgatactgcgctggaatttcgtcgtgctatctccgtgctgaaaagccttccgtttgaggtacgtagcctgaaagacacggaaggattgccctggatcggtgatgaagtcaaagggattatggaagaaatcatcgaggtcggggagtcgcgtgaagtgcaggccgtgctcaatgatgagtggtatcaaagcttccaccgctttaagagtgtctttggagtgggggtgaagacagcagacaagtggtaccgtatgggtctgcgcaccctcgaggatgttcgttccagcaagaccctgaagttgatgccgatgcagaaagtaggtctgctgtattatgaagatcttgctcgcggcgttacgcgtgccgaagctgacgcgatttggctgctggttcaggatgcagtcgcaactttcgacccggatgcgatcgtggagattgtcggtggatttcgtcgtgggaaacctcagggtcacgacgttgatctgcttatcagttctccgggagctgagaaagagcaagaagaccaactcctgcagaaagtgatgaatctgtggaagaaacaagggttgttgctgtacggtcgtctggaatggacccagtgggaagatgggggttcgccttccggtaaggctgacgagggtgacgcgggtgcgaaatgctttctgatcctcaaactttatgatcatctggtgcgtaaaagcaaatggaacatgccgacgggttcgaacgtgggcgagtccaaaccgtggaaagcaattcgcgtagatctgctgcgttgcccctatggcagttttgcgtttgcgatgttgcagtggaccggaagccgcatgttccgtcgtgatctgcgttggtacgccactgacgagaagaacatgatgctggacaatcattcgctgtatgacctgaccaagggtatcttcctccctgctaaatcggaagaggaaattttcgcacatctggggcttgaatacctggaaccgttcgaacgtaacgca

SEQ ID NO: 3384 - protein, 529 aa, synthetic construct
  REGION 1..529: note = Variant of terminal deoxynucleotidyltransferase
MHHHHHHGGSGSHGIRTIDSDFGKKQQKKGDNHDSSATYEIKFHEFVLFILEEKMGATRRTFLTDLARKKGFRVENELTDEVTHIVAENLSRSEVLAWLKEHKMEKTKQFELLDISWLIESMKVGKPVDTKGKYQLAESVEVSANPDPTEGRVNELPPTMKTVSPYACQRRTTLNNRNQRFTDSLEILRENYEFKRNDDTALEFRRAISVLKSLPFEVRSLKDTEGLPWIGDEVKGIMEEIIEVGESREVQAVLNDEWYQSFHRFKSVFGVGVKTADKWYRMGLRTLEDVRSSKTLKLMPMQKVGLLYYEDLARGVTRAEADAIWLLVQDAVATFDPDAIVEIVGGFRRGKPQGHDVDLLISSPGAEKEQEDQLLQKVMNLWKKQGLLLYGRLEWTQWEDGGSPSGKADEGDAGAKCFLILKLYDHLVRKSKWNMPTGSNVGESKPWKAIRVDLLRCPYGSFAFAMLQWTGSRMFRRDLRWYATDEKNMMLDNHSLYDLTKGIFLPAKSEEEIFAHLGLEYLEPFERNA

SEQ ID NO: 3385 - DNA, 1587 bp, synthetic construct
  misc_feature 1..1587: note = Variant of terminal deoxynucleotidyltransferase
  source 1..1587: mol_type = other DNA
atgcaccatcatcatcatcatggcggtagcggcagccacggcattcgtaccatcgattcggacttcgggaagaaacagcagaaaaaaggcgataaccacgatagttccgccacttatgaaatcaaatttcacgagtttgtgctgttcattctcgaagaaaaaatgggtgcgacgcgtcgtacttttctgacagatttagcccgcaagaaagggttccgcgtcgagaatgaactgaccgacgaagttacccacatcgtggcagaaaatctgtcacgctctgaagtattggcttggctgaaagaacacaagatggagaagaccaagcaattcgaactgctggatattagctggcttatcgaaagcatgaaagttggtaaaccggtggacaccaaggggaaataccagttggcggaatcggttgaggtgagtgcgaacccagatccgacagaaggtcgtgtaaacgagctgcctcctactatgaaaaccgtttctccgtatgcgtgtcaacgccgcaccaccctgaacaaccgtaatcaacgttttacggactcgctggaaattcttcgtgaaaattacgagttcaaacgcaacgatgatactgcgctggaatttcgtcgtgctatctccgtgctgaaaagccttccgtttgaggtacgtagcctgaaagacacggaaggattgccctggatcggtgatgaagtcaaagggattatggaagaaatcatcgaggtcggggagtcgcgtgaagtgcaggccgtgctcaatgatgagtggtatcaaagcttccaccgctttactagtgtctttggagtgggggtgaagacagcagacaagtggtaccgtatgggtctgcgcaccctcgaggatgttcgttccagcaagaccctgaagttgaccccgatgcagaaagtaggtctgctgtattatgaagatcttgctcgcggcgttacgcgtgccgaagctgacgcgatttggctgctggttcaggatgcagtcgcaactttcgacccggatgcgatcgtggagattgtcggtggatttcgtcgtgggaaacctcagggtcacgacgttgatctgcttatcagttctccgggagctgagaaagagcaagaagaccaactcctgcagaaagtgatgaatctgtggaagaaacaagggttgttgctgtacggtcgtctggaatggacccagtgggaagatgggggttcgccttccggtaaggctgacgagggtgacgcgggtgcgaaatgctttctgatcctcaaactttatgatcatctggtgcgtaaaagcaaatggaacatgccgacgggttcgaacgtgggcgagtccaaaccgtggaaagcaattcgcgtagatctgctgcgttgcccctatggcagttttgcgtttgcgatgttgcagtggaccggaagccgcatgttccgtcgtgatctgcgttggtacgccactgacgagaagaacatgatgctggacaatcattcgctgtatgacctgaccaagggtatcttcctccctgctaaatcggaagaggaaattttcgcacatctggggcttgaatacctggaaccgttcgaacgtaacgca

SEQ ID NO: 3386 - protein, 529 aa, synthetic construct
  REGION 1..529: note = Variant of terminal deoxynucleotidyltransferase
MHHHHHHGGSGSHGIRTIDSDFGKKQQKKGDNHDSSATYEIKFHEFVLFILEEKMGATRRTFLTDLARKKGFRVENELTDEVTHIVAENLSRSEVLAWLKEHKMEKTKQFELLDISWLIESMKVGKPVDTKGKYQLAESVEVSANPDPTEGRVNELPPTMKTVSPYACQRRTTLNNRNQRFTDSLEILRENYEFKRNDDTALEFRRAISVLKSLPFEVRSLKDTEGLPWIGDEVKGIMEEIIEVGESREVQAVLNDEWYQSFHRFTSVFGVGVKTADKWYRMGLRTLEDVRSSKTLKLTPMQKVGLLYYEDLARGVTRAEADAIWLLVQDAVATFDPDAIVEIVGGFRRGKPQGHDVDLLISSPGAEKEQEDQLLQKVMNLWKKQGLLLYGRLEWTQWEDGGSPSGKADEGDAGAKCFLILKLYDHLVRKSKWNMPTGSNVGESKPWKAIRVDLLRCPYGSFAFAMLQWTGSRMFRRDLRWYATDEKNMMLDNHSLYDLTKGIFLPAKSEEEIFAHLGLEYLEPFERNA

SEQ ID NO: 3387 - DNA, 1587 bp, synthetic construct
  misc_feature 1..1587: note = Variant of terminal deoxynucleotidyltransferase
  source 1..1587: mol_type = other DNA
atgcaccatcatcatcatcatggcggtagcggcagccacggcattcgtaccatcgattcggacttcgggaagaaacagcagaaaaaaggcgataaccacgatagttccgccacttatgaaatcaaatttcacgagtttgtgctgttcattctcgaagaaaaaatgggtgcgacgcgtcgtacttttctgacagatttagcccgcaagaaagggttccgcgtcgagaatgaactgaccgacgaagttacccacatcgtggcagaaaatctgtcacgctctgaagtattggcttggctgaaagaacacaagatggagaagaccaagcaattcgaactgctggatattagctggcttatcgaaagcatgaaagttggtaaaccggtggacaccaaggggaaataccagttggcggaatcggttgaggtgagtgcgaacccagatccgacagaaggtcgtgtaaacgagctgcctcctactatgaaaaccgtttctccgtatgcgtgtcaacgccgcaccaccctgaacaaccgtaatcaacgttttacggactcgctggaaattcttcgtgaaaattacgagttcaaacgcaacgatgatactgcgctggaatttcgtcgtgctatctccgtgctgaaaagccttccgtttgaggtacgtagcctgaaagacacggaaggattgccctggatcggtgatgaagtcaaagggattatggaagaaatcatcgaggtcggggagtcgcgtgaagtgcaggccgtgctcaatgatgagtggtatcaaagcttccaccgctttaagagtgtctttggagtgggggtgaagacagcagacaagtggtaccgtatgggtctgcgcaccctcgaggatgttcgttccagcaagaccctgaagttgaccccgatgcagaaagtaggtctgctgtattatgaagatcttgctcgcggcgttacgcgtgccgaagctgacgcgatttggctgctggttcaggatgcagtcgcaactttcgacccggatgcgatcgtggagattgtcggtggatttcgtcgtgggaaacctcagggtcacgacgttgatctgcttatcagttctccgggagctgagaaagagcaagaagaccaactcctgcagaaagtgatgaatctgtggaagaaacaagggttgttgctgtacggtcgtctggaatggacccagtgggaagatgggggttcgccttccggtaaggctgacgagggtgacgcgggtgcgaaatgctttctgatcctcaaactttatgatcatctggtgcgtaaaagcaaatggaacatgccgacgggttcgaacgtgggcgagtccaaaccgtggaaagcaattcgcgtagattttctgcgttgcccctatggcagttttgcgtttgcgatgttgcagtggaccggaagccgcatgttccgtcgtgatctgcgttggtacgccactgacgagaagaacatgatgctggacaatcattcgctgtatgacctgaccaagggtatcttcctccctgctaaatcggaagaggaaattttcgcacatctggggcttgaatacctggaaccgttcgaacgtaacgca

SEQ ID NO: 3388 - protein, 529 aa, synthetic construct
  REGION 1..529: note = Variant of terminal deoxynucleotidyltransferase
MHHHHHHGGSGSHGIRTIDSDFGKKQQKKGDNHDSSATYEIKFHEFVLFILEEKMGATRRTFLTDLARKKGFRVENELTDEVTHIVAENLSRSEVLAWLKEHKMEKTKQFELLDISWLIESMKVGKPVDTKGKYQLAESVEVSANPDPTEGRVNELPPTMKTVSPYACQRRTTLNNRNQRFTDSLEILRENYEFKRNDDTALEFRRAISVLKSLPFEVRSLKDTEGLPWIGDEVKGIMEEIIEVGESREVQAVLNDEWYQSFHRFKSVFGVGVKTADKWYRMGLRTLEDVRSSKTLKLTPMQKVGLLYYEDLARGVTRAEADAIWLLVQDAVATFDPDAIVEIVGGFRRGKPQGHDVDLLISSPGAEKEQEDQLLQKVMNLWKKQGLLLYGRLEWTQWEDGGSPSGKADEGDAGAKCFLILKLYDHLVRKSKWNMPTGSNVGESKPWKAIRVDFLRCPYGSFAFAMLQWTGSRMFRRDLRWYATDEKNMMLDNHSLYDLTKGIFLPAKSEEEIFAHLGLEYLEPFERNA

SEQ ID NO: 3389 - DNA, 1587 bp, synthetic construct
  misc_feature 1..1587: note = Variant of terminal deoxynucleotidyltransferase
  source 1..1587: mol_type = other DNA
atgcaccatcatcatcatcatggcggtagcggcagccacggcattcgtaccatcgattcggacttcgggaagaaacagcagaaaaaaggcgataaccacgatagttccgccacttatgaaatcaaatttcacgagtttgtgctgttcattctcgaagaaaaaatgggtgcgacgcgtcgtacttttctgacagatttagcccgcaagaaagggttccgcgtcgagaatgaactgaccgacgaagttacccacatcgtggcagaaaatctgtcacgctctgaagtattggcttggctgaaagaacacaagatggagaagaccaagcaattcgaactgctggatattagctggcttatcgaaagcatgaaagttggtaaaccggtggacaccaaggggaaataccagttggcggaatcggttgaggtgagtgcgaacccagatccgacagaaggtcgtgtaaacgagctgcctcctactatgaaaaccgtttctccgtatgcgtgtcaacgccgcaccaccctgaacaaccgtaatcaacgttttacggactcgctggaaattcttcgtgaaaattacgagttcaaactgaacgatgatactgcgctggaatttcgtcgtgctatctccgtgctgaaaagccttccgtttgaggtacgtagcctgaaagacacggaaggattgccctggatcggtgatgaagtcaaagggattatggaagaaatcatcgaggtcggggagtcgcgtgaagtgcaggccgtgctcaatgatgagtggtatcaaagcttccaccgctttaagagtgtctttggagtgggggtgaagacagcagacaagtggtaccgtatgggtctgcgcaccctcgaggatgttcgttccagcaagaccctgaagttgaccccgatgcagaaagtaggtctgctgtattatgaagatcttgctcgcggcgttacgcgtgccgaagctgacgcgatttggctgctggttcaggatgcagtcgcaactttcgacccggatgcgatcgtggagattgtcggtggatttcgtcgtgggaaacctcagggtcacgacgttgatctgcttatcagttctccgggagctgagaaagagcaagaagaccaactcctgcagaaagtgatgaatctgtggaagaaacaagggttgttgctgtacggtcgtctggaatggacccagtgggaagatgggggttcgccttccggtaaggctgacgagggtgacgcgggtgcgaaatgctttctgatcctcaaactttatgatcatctggtgcgtaaaagcaaatggaacatgccgacgggttcgaacgtgggcgagtccaaaccgtggaaagcaattcgcgtagatctgctgcgttgcccctatggcagttttgcgtttgcgatgttgcagtggaccggaagccgcatgttccgtcgtgatctgcgttggtacgccactgacgagaagaacatgatgctggacaatcattcgctgtatgacctgaccaagggtatcttcctccctgctaaatcggaagaggaaattttcgcacatctggggcttgaatacctggaaccgttcgaacgtaacgca

SEQ ID NO: 3390 - protein, 529 aa, synthetic construct
  REGION 1..529: note = Variant of terminal deoxynucleotidyltransferase
MHHHHHHGGSGSHGIRTIDSDFGKKQQKKGDNHDSSATYEIKFHEFVLFILEEKMGATRRTFLTDLARKKGFRVENELTDEVTHIVAENLSRSEVLAWLKEHKMEKTKQFELLDISWLIESMKVGKPVDTKGKYQLAESVEVSANPDPTEGRVNELPPTMKTVSPYACQRRTTLNNRNQRFTDSLEILRENYEFKLNDDTALEFRRAISVLKSLPFEVRSLKDTEGLPWIGDEVKGIMEEIIEVGESREVQAVLNDEWYQSFHRFKSVFGVGVKTADKWYRMGLRTLEDVRSSKTLKLTPMQKVGLLYYEDLARGVTRAEADAIWLLVQDAVATFDPDAIVEIVGGFRRGKPQGHDVDLLISSPGAEKEQEDQLLQKVMNLWKKQGLLLYGRLEWTQWEDGGSPSGKADEGDAGAKCFLILKLYDHLVRKSKWNMPTGSNVGESKPWKAIRVDLLRCPYGSFAFAMLQWTGSRMFRRDLRWYATDEKNMMLDNHSLYDLTKGIFLPAKSEEEIFAHLGLEYLEPFERNA

SEQ ID NO: 3391 - DNA, 1587 bp, synthetic construct
  misc_feature 1..1587: note = Variant of terminal deoxynucleotidyltransferase
  source 1..1587: mol_type = other DNA
atgcaccatcatcatcatcatggcggtagcggcagccacggcattcgtaccatcgattcggacttcgggaagaaacagcagaaaaaaggcgataaccacgatagttccgccacttatgaaatcaaatttcacgagtttgtgctgttcattctcgaagaaaaaatgggtgcgacgcgtcgtacttttctgacagatttagcccgcaagaaagggttccgcgtcgagaatgaactgaccgacgaagttacccacatcgtggcagaaaatctgtcacgctctgaagtattggcttggctgaaagaacacaagatggagaagaccaagcaattcgaactgctggatattagctggcttatcgaaagcatgaaagttggtaaaccggtggacaccaaggggaaataccagttggcggaatcggttgaggtgagtgcgaacccagatccgacagaaggtcgtgtaaacgagctgcctcctactatgaaaaccgtttctccgtatgcgtgtcaacgccgcaccaccctgaacaaccgtaatcaacgttttacggactcgctggaaattcttcgtgaaaattacgagttcaaacgcaacgatgatactgcgctggaatttcgtcgtgctatctccgtgctgaaaagccttccgtttgaggtacgtagcctgaaagacacggaaggattgccctggatcggtgatgaagtcaaagggattatggaagaaatcatcgaggtcggggagtcgcgtgaagtgcaggccgtgctcaatgatgagtggtatcaaagcttccaccgctttaagagtgtctttggagtgggggtgaagacagcagacaagtggtaccgtatgggtctgcgcaccctcgaggatgttcgttccagcaagaccctgaagttgaccccgatgcagaaagtaggtctgctgtattgggaagatcttgctcgcggcgttacgcgtgccgaagctgacgcgatttggctgctggttcaggatgcagtcgcaactttcgacccggatgcgatcgtggagattgtcggtggatttcgtcgtgggaaacctcagggtcacgacgttgatctgcttatcagttctccgggagctgagaaagagcaagaagaccaactcctgcagaaagtgatgaatctgtggaagaaacaagggttgttgctgtacggtcgtctggaatggacccagtgggaagatgggggttcgccttccggtaaggctgacgagggtgacgcgggtgcgaaatgctttctgatcctcaaactttatgatcatctggtgcgtaaaagcaaatggaacatgccgacgggttcgaacgtgggcgagtccaaaccgtggaaagcaattcgcgtagatctgctgcgttgcccctatggcagttttgcgtttgcgatgttgcagtggaccggaagccgcatgttccgtcgtgatctgcgttggtacgccactgacgagaagaacatgatgctggacaatcattcgctgtatgacctgaccaagggtatcttcctccctgctaaatcggaagaggaaattttcgcacatctggggcttgaatacctggaaccgttcgaacgtaacgca

SEQ ID NO: 3392 - protein, 529 aa, synthetic construct
  REGION 1..529: note = Variant of terminal deoxynucleotidyltransferase
MHHHHHHGGSGSHGIRTIDSDFGKKQQKKGDNHDSSATYEIKFHEFVLFILEEKMGATRRTFLTDLARKKGFRVENELTDEVTHIVAENLSRSEVLAWLKEHKMEKTKQFELLDISWLIESMKVGKPVDTKGKYQLAESVEVSANPDPTEGRVNELPPTMKTVSPYACQRRTTLNNRNQRFTDSLEILRENYEFKRNDDTALEFRRAISVLKSLPFEVRSLKDTEGLPWIGDEVKGIMEEIIEVGESREVQAVLNDEWYQSFHRFKSVFGVGVKTADKWYRMGLRTLEDVRSSKTLKLTPMQKVGLLYWEDLARGVTRAEADAIWLLVQDAVATFDPDAIVEIVGGFRRGKPQGHDVDLLISSPGAEKEQEDQLLQKVMNLWKKQGLLLYGRLEWTQWEDGGSPSGKADEGDAGAKCFLILKLYDHLVRKSKWNMPTGSNVGESKPWKAIRVDLLRCPYGSFAFAMLQWTGSRMFRRDLRWYATDEKNMMLDNHSLYDLTKGIFLPAKSEEEIFAHLGLEYLEPFERNA

SEQ ID NO: 3393 - DNA, 1587 bp, synthetic construct
  misc_feature 1..1587: note = Variant of terminal deoxynucleotidyltransferase
  source 1..1587: mol_type = other DNA
atgcaccatcatcatcatcatggcggtagcggcagccacggcattcgtaccatcgattcggacttcgggaagaaacagcagaaaaaaggcgataaccacgatagttccgccacttatgaaatcaaatttcacgagtttgtgctgttcattctcgaagaaaaaatgggtgcgacgcgtcgtacttttctgacagatttagcccgcaagaaagggttccgcgtcgagaatgaactgaccgacgaagttacccacatcgtggcagaaaatctgtcacgctctgaagtattggcttggctgaaagaacacaagatggagaagaccaagcaattcgaactgctggatattagctggcttatcgaaagcatgaaagttggtaaaccggtggacaccaaggggaaataccagttggcggaatcggttgaggtgagtgcgaacccagatccgacagaaggtcgtgtaaacgagctgcctcctactatgaaaaccgtttctccgtatgcgtgtcaacgccgcaccaccctgaacaaccgtaatcaacgttttacggactcgctggaaattcttcgtgaaaattacgagttcaaacgcaacgatgatactgcgctggaatttcgtcgtgctatctccgtgctgaaaagccttccgtttgaggtacgtagcctgaaagacacggaaggattgccctggatcggtgatgaagtcaaagggattatggaagaaatcatcgaggtcggggagtcgcgtgaagtgcaggccgtgctcaatgatgagtggtatcaaagcttccaccgctttaagagtgtctttggagtgggggtgaagacagcagacaagtggtaccgtatgggtctgcgcaccctcgaggatgttcgttccagcaagaccctgaagttgaccccgatgcagaaagtaggtctgctgtattatgaagatcttgctcgcggcgttacgcgtgccgaagctgacgcgatttggctgctggttcaggatgcagtcgcaactttcgacccggatgcgatcgtggagattgtcggtggatttcgtcgtgggaaacctcagggtcacgacgttgatctgcttatcagttctccgggagctgagaaagagcaagaagaccaactcctgcagaaagtgatgaatctgtggaagaaacaagggttgttgctgtacggtcgtctggaatggacccagtgggaagatgggggttcgccttccggtaaggctgacgagggtgacgcgggtgcgaaatgctttctgatcctcaaactttatgatcatctggtgcgtaaaagcaaatggaacatgccgacgggttcgaacgtgggcgagtccaaaccgtggaaagcaattcgcgtagatctgctgcgttgcccctatggcagttttgcgtttgcgatgttgcagtggaccggaagccgcatgttccgtggggatctgcgttggtacgccactgacgagaagaacatgatgctggacaatcattcgctgtatgacctgaccaagggtatcttcctccctgctaaatcggaagaggaaattttcgcacatctggggcttgaatacctggaaccgttcgaacgtaacgca

SEQ ID NO: 3394 - protein, 529 aa, synthetic construct
  REGION 1..529: note = Variant of terminal deoxynucleotidyltransferase
MHHHHHHGGSGSHGIRTIDSDFGKKQQKKGDNHDSSATYEIKFHEFVLFILEEKMGATRRTFLTDLARKKGFRVENELTDEVTHIVAENLSRSEVLAWLKEHKMEKTKQFELLDISWLIESMKVGKPVDTKGKYQLAESVEVSANPDPTEGRVNELPPTMKTVSPYACQRRTTLNNRNQRFTDSLEILRENYEFKRNDDTALEFRRAISVLKSLPFEVRSLKDTEGLPWIGDEVKGIMEEIIEVGESREVQAVLNDEWYQSFHRFKSVFGVGVKTADKWYRMGLRTLEDVRSSKTLKLTPMQKVGLLYYEDLARGVTRAEADAIWLLVQDAVATFDPDAIVEIVGGFRRGKPQGHDVDLLISSPGAEKEQEDQLLQKVMNLWKKQGLLLYGRLEWTQWEDGGSPSGKADEGDAGAKCFLILKLYDHLVRKSKWNMPTGSNVGESKPWKAIRVDLLRCPYGSFAFAMLQWTGSRMFRGDLRWYATDEKNMMLDNHSLYDLTKGIFLPAKSEEEIFAHLGLEYLEPFERNA

SEQ ID NO: 3395 - DNA, 1587 bp, synthetic construct
  misc_feature 1..1587: note = Variant of terminal deoxynucleotidyltransferase
  source 1..1587: mol_type = other DNA
atgcaccatcatcatcatcatggcggtagcggcagccacggcattcgtaccatcgattcggacttcgggaagaaacagcagaaaaaaggcgataaccacgatagttccgccacttatgaaatcaaatttcacgagtttgtgctgttcattctcgaagaaaaaatgggtgcgacgcgtcgtacttttctgacagatttagcccgcaagaaagggttccgcgtcgagaatgaactgaccgacgaagttacccacatcgtggcagaaaatctgtcacgctctgaagtattggcttggctgaaagaacacaagatggagaagaccaagcaattcgaactgctggatattagctggcttatcgaaagcatgaaagttggtaaaccggtggacaccaaggggaaataccagttggcggaatcggttgaggtgagtgcgaacccagatccgacagaaggtcgtgtaaacgagctgcctcctactatgaaaaccgtttctccgtatgcgtgtcaacgccgcaccaccctgaacaaccgtaatcaacgttttacggactcgctggaaattcttcgtgaaaattacgagttcaaacgcaacgatgatactgcgctggaatttcgtcgtgctatctccgtgctgaaaagccttccgtttgaggtacgtagcctgaaagacacggaaggattgccctggatcggtgatgaagtcaaagggattatggaagaaatcatcgaggtcggggagtcgcgtgaagtgcaggccgtgctcaatgatgagtggtatcaaagcttccaccgctttaagagtgtctttggagtgggggtgaagacagcagacaagtggtaccgtatgggtctgcgcaccctcgaggatgttcgttccagcaagaccctgaagattaccccgatgcagaaagtaggtctgctgtattatgaagatcttgctcgcggcgttacgcgtgccgaagctgacgcgatttggctgctggttcaggatgcagtcgcaactttcgacccggatgcgatcgtggagattgtcggtggatttcgtcgtgggaaacctcagggtcacgacgttgatctgcttatcagttctccgggagctgagaaagagcaagaagaccaactcctgcagaaagtgatgaatctgtggaagaaacaagggttgttgctgtacggtcgtctggaatggacccagtgggaagatgggggttcgccttccggtaaggctgacgagggtgacgcgggtgcgaaatgctttctgatcctcaaactttatgatcatctggtgcgtaaaagcaaatggaacatgccgacgggttcgaacgtgggcgagtccaaaccgtggaaagcaattcgcgtagatctgctgcgttgcccctatggcagttttgcgtttgcgatgttgcagtggaccggaagccgcatgttccgtcgtgatctgcgttggtacgccactgacgagaagaacatgatgctggacaatcattcgctgtatgacctgaccaagggtatcttcctccctgctaaatcggaagaggaaattttcgcacatctggggcttgaatacctggaaccgttcgaacgtaacgca

SEQ ID NO: 3396 - protein, 529 aa, synthetic construct
  REGION 1..529: note = Variant of terminal deoxynucleotidyltransferase
MHHHHHHGGSGSHGIRTIDSDFGKKQQKKGDNHDSSATYEIKFHEFVLFILEEKMGATRRTFLTDLARKKGFRVENELTDEVTHIVAENLSRSEVLAWLKEHKMEKTKQFELLDISWLIESMKVGKPVDTKGKYQLAESVEVSANPDPTEGRVNELPPTMKTVSPYACQRRTTLNNRNQRFTDSLEILRENYEFKRNDDTALEFRRAISVLKSLPFEVRSLKDTEGLPWIGDEVKGIMEEIIEVGESREVQAVLNDEWYQSFHRFKSVFGVGVKTADKWYRMGLRTLEDVRSSKTLKITPMQKVGLLYYEDLARGVTRAEADAIWLLVQDAVATFDPDAIVEIVGGFRRGKPQGHDVDLLISSPGAEKEQEDQLLQKVMNLWKKQGLLLYGRLEWTQWEDGGSPSGKADEGDAGAKCFLILKLYDHLVRKSKWNMPTGSNVGESKPWKAIRVDLLRCPYGSFAFAMLQWTGSRMFRRDLRWYATDEKNMMLDNHSLYDLTKGIFLPAKSEEEIFAHLGLEYLEPFERNA

SEQ ID NO: 3397 - DNA, 1587 bp, synthetic construct
  misc_feature 1..1587: note = Variant of terminal deoxynucleotidyltransferase
  source 1..1587: mol_type = other DNA
atgcaccatcatcatcatcatggcggtagcggcagccacggcattcgtaccatcgattcggacttcgggaagaaacagcagaaaaaaggcgataaccacgatagttccgccacttatgaaatcaaatttcacgagtttgtgctgttcattctcgaagaaaaaatgggtgcgacgcgtcgtacttttctgacagatttagcccgcaagaaagggttccgcgtcgagaatgaactgaccgacgaagttacccacatcgtggcagaaaatctgtcacgctctgaagtattggcttggctgaaagaacacaagatggagaagaccaagcaattcgaactgctggatattagctggcttatcgaaagcatgaaagttggtaaaccggtggacaccaaggggaaataccagttggcggaatcggttgaggtgagtgcgaacccagatccgacagaaggtcgtgtaaacgagctgcctcctactatgaaaaccgtttctccgtatgcgtgtcaacgccgcaccaccctgaacaaccgtaatcaacgttttacggactcgctggaaattcttcgtgaaaattacgagttcaaacgcaacgatgatactgcgctggaatttcgtcgtgctatctccgtgctgaaaagccttccgtttgaggtacgtagcctgaaagacacggaaggattgccctggatcggtgatgaagtcaaagggattatggaagaaatcatcgaggtcggggagtcgcgtgaagtgcaggccgtgctcaatgatgagtggtatcaaagcttccaccgctttaagagtgtctttggagtgggggtgaagacagcagacaagtggtaccgtatgggtctgcgcaccctcgaggatgttcgttccagcaagaccctgaagttgaccccgatgcagaaagtaggtctgctgtatgtggaagatcttgctcgcggcgttacgcgtgccgaagctgacgcgatttggctgctggttcaggatgcagtcgcaactttcgacccggatgcgatcgtggagattgtcggtggatttcgtcgtgggaaacctcagggtcacgacgttgatctgcttatcagttctccgggagctgagaaagagcaagaagaccaactcctgcagaaagtgatgaatctgtggaagaaacaagggttgttgctgtacggtcgtctggaatggacccagtgggaagatgggggttcgccttccggtaaggctgacgagggtgacgcgggtgcgaaatgctttctgatcctcaaactttatgatcatctggtgcgtaaaagcaaatggaacatgccgacgggttcgaacgtgggcgagtccaaaccgtggaaagcaattcgcgtagatctgctgcgttgcccctatggcagttttgcgtttgcgatgttgcagtggaccggaagccgcatgttccgtcgtgatctgcgttggtacgccactgacgagaagaacatgatgctggacaatcattcgctgtatgacctgaccaagggtatcttcctccctgctaaatcggaagaggaaattttcgcacatctggggcttgaatacctggaaccgttcgaacgtaacgca

SEQ ID NO: 3398 - protein, 529 aa, synthetic construct
  REGION 1..529: note = Variant of terminal deoxynucleotidyltransferase
MHHHHHHGGSGSHGIRTIDSDFGKKQQKKGDNHDSSATYEIKFHEFVLFILEEKMGATRRTFLTDLARKKGFRVENELTDEVTHIVAENLSRSEVLAWLKEHKMEKTKQFELLDISWLIESMKVGKPVDTKGKYQLAESVEVSANPDPTEGRVNELPPTMKTVSPYACQRRTTLNNRNQRFTDSLEILRENYEFKRNDDTALEFRRAISVLKSLPFEVRSLKDTEGLPWIGDEVKGIMEEIIEVGESREVQAVLNDEWYQSFHRFKSVFGVGVKTADKWYRMGLRTLEDVRSSKTLKLTPMQKVGLLYVEDLARGVTRAEADAIWLLVQDAVATFDPDAIVEIVGGFRRGKPQGHDVDLLISSPGAEKEQEDQLLQKVMNLWKKQGLLLYGRLEWTQWEDGGSPSGKADEGDAGAKCFLILKLYDHLVRKSKWNMPTGSNVGESKPWKAIRVDLLRCPYGSFAFAMLQWTGSRMFRRDLRWYATDEKNMMLDNHSLYDLTKGIFLPAKSEEEIFAHLGLEYLEPFERNA

SEQ ID NO: 3399 - DNA, 1587 bp, synthetic construct
  misc_feature 1..1587: note = Variant of terminal deoxynucleotidyltransferase
  source 1..1587: mol_type = other DNA
atgcaccatcatcatcatcatggcggtagcggcagccacggcattcgtaccatcgattcggacttcgggaagaaacagcagaaaaaaggcgataaccacgatagttccgccacttatgaaatcaaatttcacgagtttgtgctgttcattctcgaagaaaaaatgggtgcgacgcgtcgtacttttctgacagatttagcccgcaagaaagggttccgcgtcgagaatgaactgaccgacgaagttacccacatcgtggcagaaaatctgtcacgctctgaagtattggcttggctgaaagaacacaagatggagaagaccaagcaattcgaactgctggatattagctggcttatcgaaagcatgaaagttggtaaaccggtggacaccaaggggaaataccagttggcggaatcggttgaggtgagtgcgaacccagatccgacagaaggtcgtgtaaacgagctgcctcctactatgaaaaccgtttctccgtatgcgtgtcaacgccgcaccaccctgaacaaccgtaatcaacgttttacggactcgctggaaattcttcgtgaaaattacgagttcaaacgcaacgatgatactgcgctggaatttcgtcgtgctatctccgtgctgaaaagccttccgtttgaggtacgtagcctgaaagacacggaaggattgccctggatcggtgatgaagtcaaagggattatggaagaaatcatcgaggtcggggagtcgcgtgaagtgcaggccgtgctcaatgatgagtggtatcaaagcttccaccgctttaagagtgtctttggagtgggggtgaagacagcagacaagtggtaccgtatgggtctgcgcaccctcgaggatgttcgttccagcaagaccctgaagttgaccccgatgcagaaagtaggtctgctgtattatgaagatcttgctcgcggcgttacgcgtgccgaagctgacgcgatttggctgctggttcaggatgcagtcgcaactttcgacccggatgcgatcgtggagattgtcggtggatttcgtcgtgggaaacctcagggtcacgacgttgatctgcttatcagttctccgggagctgagaaagagcaagaagaccaactcctgcagaaagtgatgaatctgtggaagaaacaagggttgttgctgtacggtcgtctggaatggacccagtgggaagatgggggttcgccttccggtctggctgacgagggtgacgcgggtgcgaaatgctttctgatcctcaaactttatgatcatctggtgcgtaaaagcaaatggaacatgccgacgggttcgaacgtgggcgagtccaaaccgtggaaagcaattcgcgtagatctgctgcgttgcccctatggcagttttgcgtttgcgatgttgcagtggaccggaagccgcatgttccgtcgtgatctgcgttggtacgccactgacgagaagaacatgatgctggacaatcattcgctgtatgacctgaccaagggtatcttcctccctgctaaatcggaagaggaaattttcgcacatctggggcttgaatacctggaaccgttcgaacgtaacgca

SEQ ID NO: 3400 - protein, 529 aa, synthetic construct
  REGION 1..529: note = Variant of terminal deoxynucleotidyltransferase
MHHHHHHGGSGSHGIRTIDSDFGKKQQKKGDNHDSSATYEIKFHEFVLFILEEKMGATRRTFLTDLARKKGFRVENELTDEVTHIVAENLSRSEVLAWLKEHKMEKTKQFELLDISWLIESMKVGKPVDTKGKYQLAESVEVSANPDPTEGRVNELPPTMKTVSPYACQRRTTLNNRNQRFTDSLEILRENYEFKRNDDTALEFRRAISVLKSLPFEVRSLKDTEGLPWIGDEVKGIMEEIIEVGESREVQAVLNDEWYQSFHRFKSVFGVGVKTADKWYRMGLRTLEDVRSSKTLKLTPMQKVGLLYYEDLARGVTRAEADAIWLLVQDAVATFDPDAIVEIVGGFRRGKPQGHDVDLLISSPGAEKEQEDQLLQKVMNLWKKQGLLLYGRLEWTQWEDGGSPSGLADEGDAGAKCFLILKLYDHLVRKSKWNMPTGSNVGESKPWKAIRVDLLRCPYGSFAFAMLQWTGSRMFRRDLRWYATDEKNMMLDNHSLYDLTKGIFLPAKSEEEIFAHLGLEYLEPFERNA

SEQ ID NO: 3401 - DNA, 1587 bp, synthetic construct
  misc_feature 1..1587: note = Variant of terminal deoxynucleotidyltransferase
  source 1..1587: mol_type = other DNA
atgcaccatcatcatcatcatggcggtagcggcagccacggcattcgtaccatcgattcggacttcgggaagaaacagcagaaaaaaggcgataaccacgatagttccgccacttatgaaatcaaatttcacgagtttgtgctgttcattctcgaagaaaaaatgggtgcgacgcgtcgtacttttctgacagatttagcccgcaagaaagggttccgcgtcgagaatgaactgaccgacgaagttacccacatcgtggcagaaaatctgtcacgctctgaagtattggcttggctgaaagaacacaagatggagaagaccaagcaattcgaactgctggatattagctggcttatcgaaagcatgaaagttggtaaaccggtggacaccaaggggaaataccagttggcggaatcggttgaggtgagtgcgaacccagatccgacagaaggtcgtgtaaacgagctgcctcctactatgaaaaccgtttctccgtatgcgtgtcaacgccgcaccaccctgaacaaccgtaatcaacgttttacggactcgctggaaattcttcgtgaaaattacgagttcaaacgcaacgatgatactgcgctggaatttcgtcgtgctatctccgtgctgaaaagccttccgtttgaggtacgtagcctgaaagacacggaaggattgccctggatcggtgatgaagtcaaagggattatggaagaaatcatcgaggtcggggagtcgcgtgaagtgcaggccgtgctcaatgatgagtggtatcaaagcttccaccgctttaagagtgtctttggagtgggggtgaagacagcagacaggtggtaccgtatgggtctgcgcaccctcgaggatgttcgttccagcaagaccctgaagttgaccccgatgcagaaagtaggtctgctgtattatgaagatcttgctcgcggcgttacgcgtgccgaagctgacgcgatttggctgctggttcaggatgcagtcgcaactttcgacccggatgcgatcgtggagattgtcggtggatttcgtcgtgggaaacctcagggtcacgacgttgatctgcttatcagttctccgggagctgagaaagagcaagaagaccaactcctgcagaaagtgatgaatctgtggaagaaacaagggttgttgctgtacggtcgtctggaatggacccagtgggaagatgggggttcgccttccggtaaggctgacgagggtgacgcgggtgcgaaatgctttctgatcctcaaactttatgatcatctggtgcgtaaaagcaaatggaacatgccgacgggttcgaacgtgggcgagtccaaaccgtggaaagcaattcgcgtagatctgctgcgttgcccctatggcagttttgcgtttgcgatgttgcagtggaccggaagccgcatgttccgtcgtgatctgcgttggtacgccactgacgagaagaacatgatgctggacaatcattcgctgtatgacctgaccaagggtatcttcctccctgctaaatcggaagaggaaattttcgcacatctggggcttgaatacctggaaccgttcgaacgtaacgca

SEQ ID NO: 3402 - protein, 529 aa, synthetic construct
  REGION 1..529: note = Variant of terminal deoxynucleotidyltransferase
MHHHHHHGGSGSHGIRTIDSDFGKKQQKKGDNHDSSATYEIKFHEFVLFILEEKMGATRRTFLTDLARKKGFRVENELTDEVTHIVAENLSRSEVLAWLKEHKMEKTKQFELLDISWLIESMKVGKPVDTKGKYQLAESVEVSANPDPTEGRVNELPPTMKTVSPYACQRRTTLNNRNQRFTDSLEILRENYEFKRNDDTALEFRRAISVLKSLPFEVRSLKDTEGLPWIGDEVKGIMEEIIEVGESREVQAVLNDEWYQSFHRFKSVFGVGVKTADRWYRMGLRTLEDVRSSKTLKLTPMQKVGLLYYEDLARGVTRAEADAIWLLVQDAVATFDPDAIVEIVGGFRRGKPQGHDVDLLISSPGAEKEQEDQLLQKVMNLWKKQGLLLYGRLEWTQWEDGGSPSGKADEGDAGAKCFLILKLYDHLVRKSKWNMPTGSNVGESKPWKAIRVDLLRCPYGSFAFAMLQWTGSRMFRRDLRWYATDEKNMMLDNHSLYDLTKGIFLPAKSEEEIFAHLGLEYLEPFERNA

SEQ ID NO: 3403 - DNA, 1587 bp, synthetic construct
  misc_feature 1..1587: note = Variant of terminal deoxynucleotidyltransferase
  source 1..1587: mol_type = other DNA
atgcaccatcatcatcatcatggcggtagcggcagccacggcattcgtaccatcgattcggacttcgggaagaaacagcagaaaaaaggcgataaccacgatagttccgccacttatgaaatcaaatttcacgagtttgtgctgttcattctcgaagaaaaaatgggtgcgacgcgtcgtacttttctgacagatttagcccgcaagaaagggttccgcgtcgagaatgaactgaccgacgaagttacccacatcgtggcagaaaatctgtcacgctctgaagtattggcttggctgaaagaacacaagatggagaagaccaagcaattcgaactgctggatattagctggcttatcgaaagcatgaaagttggtaaaccggtggacaccaaggggaaataccagttggcggaatcggttgaggtgagtgcgaacccagatccgacagaaggtcgtgtaaacgagctgcctcctactatgaaaaccgtttctccgtatgcgtgtcaacgccgcaccaccctgaacaaccgtaatcaacgttttacggactcgctggaaattcttcgtgaaaattacgagttcaaacgcaacgatgatactgcgctggaatttcgtcgtgctatctccgtgctgaaaagccttccgtttgaggtacgtagcctgaaagacacggaaggattgccctggatcggtgatgaagtcaaagggattatggaagaaatcatcgaggtcggggagtcgcgtgaagtgcaggccgtgctcaatgatgagtggtatcaaagcttccaccgctttaagagtgtctttggagtgggggtgaagacagcagacaagtggtaccgtatgggtctgcgcaccctcgaggatgttcgttccagcaagaccctgaagttgaccccgatgcagaaagtaggtctgctgtattatgaagatcttgctcgcggcgttacgcgtgccgaagctgacgcgatttggctgctggttcaggatgcagtcgcaactttcgacccggatgcgatcgtggagattgtcggtggatttcgtcgtgggaaacctcagggtcacgacgttgatctgcttatcagttctccgggagctgagaaagagcaagaagaccaactcctgcagaaagtgatgaatctgtggaagaaacaagggttgttgctgtacggtcgtctggaatggacccagtgggaagatgggggttcgccttccggtaaggctgacgagggtgacgcgggtgcgaaatgctttctgatcctcaaactttatgatcatctggtgcgtaaaagcaaatggaacatgccgacgggttcgaacgtgggcgagtccaaaccgtggaaagcaattcgcgtagatatgctgcgttgcccctatggcagttttgcgtttgcgatgttgcagtggaccggaagccgcatgttccgtcgtgatctgcgttggtacgccactgacgagaagaacatgatgctggacaatcattcgctgtatgacctgaccaagggtatcttcctccctgctaaatcggaagaggaaattttcgcacatctggggcttgaatacctggaaccgttcgaacgtaacgca

SEQ ID NO: 3404 - protein, 529 aa, synthetic construct
  REGION 1..529: note = Variant of terminal deoxynucleotidyltransferase
MHHHHHHGGSGSHGIRTIDSDFGKKQQKKGDNHDSSATYEIKFHEFVLFILEEKMGATRRTFLTDLARKKGFRVENELTDEVTHIVAENLSRSEVLAWLKEHKMEKTKQFELLDISWLIESMKVGKPVDTKGKYQLAESVEVSANPDPTEGRVNELPPTMKTVSPYACQRRTTLNNRNQRFTDSLEILRENYEFKRNDDTALEFRRAISVLKSLPFEVRSLKDTEGLPWIGDEVKGIMEEIIEVGESREVQAVLNDEWYQSFHRFKSVFGVGVKTADKWYRMGLRTLEDVRSSKTLKLTPMQKVGLLYYEDLARGVTRAEADAIWLLVQDAVATFDPDAIVEIVGGFRRGKPQGHDVDLLISSPGAEKEQEDQLLQKVMNLWKKQGLLLYGRLEWTQWEDGGSPSGKADEGDAGAKCFLILKLYDHLVRKSKWNMPTGSNVGESKPWKAIRVDMLRCPYGSFAFAMLQWTGSRMFRRDLRWYATDEKNMMLDNHSLYDLTKGIFLPAKSEEEIFAHLGLEYLEPFERNA

SEQ ID NO: 3405 - DNA, 1587 bp, synthetic construct
  misc_feature 1..1587: note = Variant of terminal deoxynucleotidyltransferase
  source 1..1587: mol_type = other DNA
atgcaccatcatcatcatcatggcggtagcggcagccacggcattcgtaccatcgattcggacttcgggaagaaacagcagaaaaaaggcgataaccacgatagttccgccacttatgaaatcaaatttcacgagtttgtgctgttcattctcgaagaaaaaatgggtgcgacgcgtcgtacttttctgacagatttagcccgcaagaaagggttccgcgtcgagaatgaactgaccgacgaagttacccacatcgtggcagaaaatctgtcacgctctgaagtattggcttggctgaaagaacacaagatggagaagaccaagcaattcgaactgctggatattagctggcttatcgaaagcatgaaagttggtaaaccggtggacaccaaggggaaataccagttggcggaatcggttgaggtgagtgcgaacccagatccgacagaaggtcgtgtaaacgagctgcctcctactatgaaaaccgtttctccgtatgcgtgtcaacgccgcaccaccctgaacaaccgtaatcaacgttttacggactcgctggaaattcttcgtgaaaattacgagttcaaacgcaacgatgatactgcgctggaatttcgtcgtgctatctccgtgctgaaaagccttccgtttgaggtacgtagcctgaaagacacggaaggattgccctggatcggtgatgaagtcaaagggattatggaagaaatcatcgaggtcggggagtcgcgtgaagtgcaggccgtgctcaatgatgagtggtatcaaagcttccaccgctttaagagtgtctttggagtgggggtgaagacagcagacaagtggtaccgtatgggtctgcgcaccctcgaggatgttcgttccagcaagaccctgaagttgaccccgatgcagaaagtaggtctgctgtattatgaagatcttgctcgcggcgttacgcgtgccgaagctgacgcgatttggctgctggttcaggatgcagtcgcaactttcgacccggatgcgatcgtggagattgtcggtggatttcgtcgtgggaaacctcagggtcacgacgttgatctgcttatcagttctccgggagctgagaaagagcaagaagaccaactcctgcagaaagtgatgaatctgtggaagaaacaagggttgttgctgtacggtcgtctggaatggacccagtgggaagatgggggttcgccttccggtaagggtgacgagggtgacgcgggtgcgaaatgctttctgatcctcaaactttatgatcatctggtgcgtaaaagcaaatggaacatgccgacgggttcgaacgtgggcgagtccaaaccgtggaaagcaattcgcgtagatctgctgcgttgcccctatggcagttttgcgtttgcgatgttgcagtggaccggaagccgcatgttccgtcgtgatctgcgttggtacgccactgacgagaagaacatgatgctggacaatcattcgctgtatgacctgaccaagggtatcttcctccctgctaaatcggaagaggaaattttcgcacatctggggcttgaatacctggaaccgttcgaacgtaacgca

SEQ ID NO: 3406 - protein, 529 aa, synthetic construct
  REGION 1..529: note = Variant of terminal deoxynucleotidyltransferase
MHHHHHHGGSGSHGIRTIDSDFGKKQQKKGDNHDSSATYEIKFHEFVLFILEEKMGATRRTFLTDLARKKGFRVENELTDEVTHIVAENLSRSEVLAWLKEHKMEKTKQFELLDISWLIESMKVGKPVDTKGKYQLAESVEVSANPDPTEGRVNELPPTMKTVSPYACQRRTTLNNRNQRFTDSLEILRENYEFKRNDDTALEFRRAISVLKSLPFEVRSLKDTEGLPWIGDEVKGIMEEIIEVGESREVQAVLNDEWYQSFHRFKSVFGVGVKTADKWYRMGLRTLEDVRSSKTLKLTPMQKVGLLYYEDLARGVTRAEADAIWLLVQDAVATFDPDAIVEIVGGFRRGKPQGHDVDLLISSPGAEKEQEDQLLQKVMNLWKKQGLLLYGRLEWTQWEDGGSPSGKGDEGDAGAKCFLILKLYDHLVRKSKWNMPTGSNVGESKPWKAIRVDLLRCPYGSFAFAMLQWTGSRMFRRDLRWYATDEKNMMLDNHSLYDLTKGIFLPAKSEEEIFAHLGLEYLEPFERNA

SEQ ID NO: 3407 - DNA, 1587 bp, synthetic construct
  misc_feature 1..1587: note = Variant of terminal deoxynucleotidyltransferase
  source 1..1587: mol_type = other DNA
atgcaccatcatcatcatcatggcggtagcggcagccacggcattcgtaccatcgattcggacttcgggaagaaacagcagaaaaaaggcgataaccacgatagttccgccacttatgaaatcaaatttcacgagtttgtgctgttcattctcgaagaaaaaatgggtgcgacgcgtcgtacttttctgacagatttagcccgcaagaaagggttccgcgtcgagaatgaactgaccgacgaagttacccacatcgtggcagaaaatctgtcacgctctgaagtattggcttggctgaaagaacacaagatggagaagaccaagcaattcgaactgctggatattagctggcttatcgaaagcatgaaagttggtaaaccggtggacaccaaggggaaataccagttggcggaatcggttgaggtgagtgcgaacccagatccgacagaaggtcgtgtaaacgagctgcctcctactatgaaaaccgtttctccgtatgcgtgtcaacgccgcaccaccctgaacaaccgtaatcaacgttttacggactcgctggaaattcttcgtgaaaattacgagttcaaacgcaacgatgatactgcgctggaatttcgtcgtgctatctccgtgctgaaaagccttccgtttgaggtacgtagcctgaaagacacggaaggattgccctggatcggtgatgaagtcaaagggattatggaagaaatcatcgaggtcggggagtcgcgtgaagtgcaggccgtgctcaatgatgagtggtatcaaagcttccaccgctttaagagtgtctttggagtgggggtgaagacagcagacaagtggtaccgtatgggtctgcgcaccctcgaggatgttcgttccagcaagaccctgaagttgaccccgatgcagaaagtaggtctgctgtattatgaagatcttgctcgcggcgttacgcgtgccgaagctgacgcgatttggctgctggttcaggatgcagtcgcaactttcgacccggatgcgatcgtggagattgtcggtggatttcgtcgtgggaaacctcagggtcacgacgttgatctgcttatcagttctccgggagctgagaaagagcaagaagaccaactcctgcagaaagtgatgaatctgtggaagaaacaagggttgttgctgtacggtcgtctggaatggacccagtgggaagatgggggttcgccttccggtaatgctgacgagggtgacgcgggtgcgaaatgctttctgatcctcaaactttatgatcatctggtgcgtaaaagcaaatggaacatgccgacgggttcgaacgtgggcgagtccaaaccgtggaaagcaattcgcgtagatctgctgcgttgcccctatggcagttttgcgtttgcgatgttgcagtggaccggaagccgcatgttccgtcgtgatctgcgttggtacgccactgacgagaagaacatgatgctggacaatcattcgctgtatgacctgaccaagggtatcttcctccctgctaaatcggaagaggaaattttcgcacatctggggcttgaatacctggaaccgttcgaacgtaacgca

SEQ ID NO: 3408 - protein, 529 aa, synthetic construct
  REGION 1..529: note = Variant of terminal deoxynucleotidyltransferase
MHHHHHHGGSGSHGIRTIDSDFGKKQQKKGDNHDSSATYEIKFHEFVLFILEEKMGATRRTFLTDLARKKGFRVENELTDEVTHIVAENLSRSEVLAWLKEHKMEKTKQFELLDISWLIESMKVGKPVDTKGKYQLAESVEVSANPDPTEGRVNELPPTMKTVSPYACQRRTTLNNRNQRFTDSLEILRENYEFKRNDDTALEFRRAISVLKSLPFEVRSLKDTEGLPWIGDEVKGIMEEIIEVGESREVQAVLNDEWYQSFHRFKSVFGVGVKTADKWYRMGLRTLEDVRSSKTLKLTPMQKVGLLYYEDLARGVTRAEADAIWLLVQDAVATFDPDAIVEIVGGFRRGKPQGHDVDLLISSPGAEKEQEDQLLQKVMNLWKKQGLLLYGRLEWTQWEDGGSPSGNADEGDAGAKCFLILKLYDHLVRKSKWNMPTGSNVGESKPWKAIRVDLLRCPYGSFAFAMLQWTGSRMFRRDLRWYATDEKNMMLDNHSLYDLTKGIFLPAKSEEEIFAHLGLEYLEPFERNA

SEQ ID NO: 3409 - DNA, 1587 bp, synthetic construct
  misc_feature 1..1587: note = Variant of terminal deoxynucleotidyltransferase
  source 1..1587: mol_type = other DNA
atgcaccatcatcatcatcatggcggtagcggcagccacggcattcgtaccatcgattcggacttcgggaagaaacagcagaaaaaaggcgataaccacgatagttccgccacttatgaaatcaaatttcacgagtttgtgctgttcattctcgaagaaaaaatgggtgcgacgcgtcgtacttttctgacagatttagcccgcaagaaagggttccgcgtcgagaatgaactgaccgacgaagttacccacatcgtggcagaaaatctgtcacgctctgaagtattggcttggctgaaagaacacaagatggagaagaccaagcaattcgaactgctggatattagctggcttatcgaaagcatgaaagttggtaaaccggtggacaccaaggggaaataccagttggcggaatcggttgaggtgagtgcgaacccagatccgacagaaggtcgtgtaaacgagctgcctcctactatgaaaaccgtttctccgtatgcgtgtcaacgccgcaccaccctgaacaaccgtaatcaacgttttacggactcgctggaaattcttcgtgaaaattacgagttcaaacgcaacgatgatactgcgctggaatttcgtcgtgctatctccgtgctgaaaagccttccgtttgaggtacgtagcctgaaagacacggaaggattgccctggatcggtgatgaagtcaaagggattatggaagaaatcatcgaggtcggggagtcgcgtgaagtgcaggccgtgctcaatgatgagtggtatcaaagcttccaccgctttaagagtgtctttggagtgggggtgaagacagcagacaagtggtaccgtatgggtctgcgcaccctcgaggatgttcgttccagcaagaccctgaagttgaccccgatgcagaaagtaggtctgctgtattatgaagatcttgctcgcggcgttacgcgtgccgaagctgacgcgatttggctgctggttcaggatgcagtcgcaactttcgacccggatgcgatcgtggagattgtcggtggatttcgtcgtgggaaacctcagggtcacgacgttgatctgcttatcagttctccgggagctgagaaagagcaagaagaccaactcctgcagaaagtgatgaatctgtggaagaaacaagggttgttgctgtacggtcgtctggaatggacccagtgggaagatgggggttcgccttccggtagggctgacgagggtgacgcgggtgcgaaatgctttctgatcctcaaactttatgatcatctggtgcgtaaaagcaaatggaacatgccgacgggttcgaacgtgggcgagtccaaaccgtggaaagcaattcgcgtagatctgctgcgttgcccctatggcagttttgcgtttgcgatgttgcagtggaccggaagccgcatgttccgtcgtgatctgcgttggtacgccactgacgagaagaacatgatgctggacaatcattcgctgtatgacctgaccaagggtatcttcctccctgctaaatcggaagaggaaattttcgcacatctggggcttgaatacctggaaccgttcgaacgtaacgca

SEQ ID NO: 3410 - protein, 529 aa, synthetic construct
  REGION 1..529: note = Variant of terminal deoxynucleotidyltransferase
MHHHHHHGGSGSHGIRTIDSDFGKKQQKKGDNHDSSATYEIKFHEFVLFILEEKMGATRRTFLTDLARKKGFRVENELTDEVTHIVAENLSRSEVLAWLKEHKMEKTKQFELLDISWLIESMKVGKPVDTKGKYQLAESVEVSANPDPTEGRVNELPPTMKTVSPYACQRRTTLNNRNQRFTDSLEILRENYEFKRNDDTALEFRRAISVLKSLPFEVRSLKDTEGLPWIGDEVKGIMEEIIEVGESREVQAVLNDEWYQSFHRFKSVFGVGVKTADKWYRMGLRTLEDVRSSKTLKLTPMQKVGLLYYEDLARGVTRAEADAIWLLVQDAVATFDPDAIVEIVGGFRRGKPQGHDVDLLISSPGAEKEQEDQLLQKVMNLWKKQGLLLYGRLEWTQWEDGGSPSGRADEGDAGAKCFLILKLYDHLVRKSKWNMPTGSNVGESKPWKAIRVDLLRCPYGSFAFAMLQWTGSRMFRRDLRWYATDEKNMMLDNHSLYDLTKGIFLPAKSEEEIFAHLGLEYLEPFERNA

SEQ ID NO: 3411 - DNA, 1587 bp, synthetic construct
  misc_feature 1..1587: note = Variant of terminal deoxynucleotidyltransferase
  source 1..1587: mol_type = other DNA
atgcaccatcatcatcatcatggcggtagcggcagccacggcattcgtaccatcgattcggacttcgggaagaaacagcagaaaaaaggcgataaccacgatagttccgccacttatgaaatcaaatttcacgagtttgtgctgttcattctcgaagaaaaaatgggtgcgacgcgtcgtacttttctgacagatttagcccgcaagaaagggttccgcgtcgagaatgaactgaccgacgaagttacccacatcgtggcagaaaatctgtcacgctctgaagtattggcttggctgaaagaacacaagatggagaagaccaagcaattcgaactgctggatattagctggcttatcgaaagcatgaaagttggtaaaccggtggacaccaaggggaaataccagttggcggaatcggttgaggtgagtgcgaacccagatccgacagaaggtcgtgtaaacgagctgcctcctactatgaaaaccgtttctccgtatgcgtgtcaacgccgcaccaccctgaacaaccgtaatcaacgttttacggactcgctggaaattcttcgtgaaaattacgagttcaaacgcaacgatgatactgcgctggaatttcgtcgtgctatctccgtgctgaaaagccttccgtttgaggtacgtagcctgaaagacacggaaggattgccctggatcggtgatgaagtcaaagggattatggaagaaatcatcgaggtcggggagtcgcgtgaagtgcaggccgtgctcaatgatgagtggtatcaaagcttccaccgctttaagagtatttttggagtgggggtgaagacagcagacaagtggtaccgtatgggtctgcgcaccctcgaggatgttcgttccagcaagaccctgaagttgaccccgatgcagaaagtaggtctgctgtattatgaagatcttgctcgcggcgttacgcgtgccgaagctgacgcgatttggctgctggttcaggatgcagtcgcaactttcgacccggatgcgatcgtggagattgtcggtggatttcgtcgtgggaaacctcagggtcacgacgttgatctgcttatcagttctccgggagctgagaaagagcaagaagaccaactcctgcagaaagtgatgaatctgtggaagaaacaagggttgttgctgtacggtcgtctggaatggacccagtgggaagatgggggttcgccttccggtaaggctgacgagggtgacgcgggtgcgaaatgctttctgatcctcaaactttatgatcatctggtgcgtaaaagcaaatggaacatgccgacgggttcgaacgtgggcgagtccaaaccgtggaaagcaattcgcgtagatctgctgcgttgcccctatggcagttttgcgtttgcgatgttgcagtggaccggaagccgcatgttccgtcgtgatctgcgttggtacgccactgacgagaagaacatgatgctggacaatcattcgctgtatgacctgaccaagggtatcttcctccctgctaaatcggaagaggaaattttcgcacatctggggcttgaatacctggaaccgttcgaacgtaacgca

SEQ ID NO: 3412 - protein, 529 aa, synthetic construct
  REGION 1..529: note = Variant of terminal deoxynucleotidyltransferase
MHHHHHHGGSGSHGIRTIDSDFGKKQQKKGDNHDSSATYEIKFHEFVLFILEEKMGATRRTFLTDLARKKGFRVENELTDEVTHIVAENLSRSEVLAWLKEHKMEKTKQFELLDISWLIESMKVGKPVDTKGKYQLAESVEVSANPDPTEGRVNELPPTMKTVSPYACQRRTTLNNRNQRFTDSLEILRENYEFKRNDDTALEFRRAISVLKSLPFEVRSLKDTEGLPWIGDEVKGIMEEIIEVGESREVQAVLNDEWYQSFHRFKSIFGVGVKTADKWYRMGLRTLEDVRSSKTLKLTPMQKVGLLYYEDLARGVTRAEADAIWLLVQDAVATFDPDAIVEIVGGFRRGKPQGHDVDLLISSPGAEKEQEDQLLQKVMNLWKKQGLLLYGRLEWTQWEDGGSPSGKADEGDAGAKCFLILKLYDHLVRKSKWNMPTGSNVGESKPWKAIRVDLLRCPYGSFAFAMLQWTGSRMFRRDLRWYATDEKNMMLDNHSLYDLTKGIFLPAKSEEEIFAHLGLEYLEPFERNA

SEQ ID NO: 3413 - DNA, 1587 bp, synthetic construct
  misc_feature 1..1587: note = Variant of terminal deoxynucleotidyltransferase
  source 1..1587: mol_type = other DNA
atgcaccatcatcatcatcatggcggtagcggcagccacggcattcgtaccatcgattcggacttcgggaagaaacagcagaaaaaaggcgataaccacgatagttccgccacttatgaaatcaaatttcacgagtttgtgctgttcattctcgaagaaaaaatgggtgcgacgcgtcgtacttttctgacagatttagcccgcaagaaagggttccgcgtcgagaatgaactgaccgacgaagttacccacatcgtggcagaaaatctgtcacgctctgaagtattggcttggctgaaagaacacaagatggagaagaccaagcaattcgaactgctggatattagctggcttatcgaaagcatgaaagttggtaaaccggtggacaccaaggggaaataccagttggcggaatcggttgaggtgagtgcgaacccagatccgacagaaggtcgtgtaaacgagctgcctcctactatgaaaaccgtttctccgtatgcgtgtcaacgccgcaccaccctgaacaaccgtaatcaacgttttacggactcgctggaaattcttcgtgaaaattacgagttcaaacgcaacgatgatactgcgctggaatttcgtcgtgctatctccgtgctgaaaagccttccgtttgaggtacgtagcctgaaagacacggaaggattgccctggatcggtgatgaagtcaaagggattatggaagaaatcatcgaggtcggggagtcgcgtgaagtgcaggccgtgctcaatgatgagtggtatcaaagcttccaccgctttaagagtgtctttggagtgggggtgaagacagcagacaagtggtaccgtatgggtctgcgcaccctcgaggatgttcgttccagcaagaccctgaagttgaccccgatgcagaaagtaggtctgctgtattatgaagatcttgctcgcggcgttacgcgtgccgaagctgacgcgatttggctgctggttcaggatgcagtcgcaactttcgacccggatgcgatcgtggagattgtcggtggatttcgtcgtgggaaacctcagggtcacgacgttgatctgcttatcagttctccgggagctgagaaagagcaagaagaccaactcctgcagaaagtgatgaatctgtggaagaaacaagggttgttgctggttggtcgtctggaatggacccagtgggaagatgggggttcgccttccggtaaggctgacgagggtgacgcgggtgcgaaatgctttctgatcctcaaactttatgatcatctggtgcgtaaaagcaaatggaacatgccgacgggttcgaacgtgggcgagtccaaaccgtggaaagcaattcgcgtagatctgctgcgttgcccctatggcagttttgcgtttgcgatgttgcagtggaccggaagccgcatgttccgtcgtgatctgcgttggtacgccactgacgagaagaacatgatgctggacaatcattcgctgtatgacctgaccaagggtatcttcctccctgctaaatcggaagaggaaattttcgcacatctggggcttgaatacctggaaccgttcgaacgtaacgca

SEQ ID NO: 3414 - protein, 529 aa, synthetic construct
  REGION 1..529: note = Variant of terminal deoxynucleotidyltransferase
MHHHHHHGGSGSHGIRTIDSDFGKKQQKKGDNHDSSATYEIKFHEFVLFILEEKMGATRRTFLTDLARKKGFRVENELTDEVTHIVAENLSRSEVLAWLKEHKMEKTKQFELLDISWLIESMKVGKPVDTKGKYQLAESVEVSANPDPTEGRVNELPPTMKTVSPYACQRRTTLNNRNQRFTDSLEILRENYEFKRNDDTALEFRRAISVLKSLPFEVRSLKDTEGLPWIGDEVKGIMEEIIEVGESREVQAVLNDEWYQSFHRFKSVFGVGVKTADKWYRMGLRTLEDVRSSKTLKLTPMQKVGLLYYEDLARGVTRAEADAIWLLVQDAVATFDPDAIVEIVGGFRRGKPQGHDVDLLISSPGAEKEQEDQLLQKVMNLWKKQGLLLVGRLEWTQWEDGGSPSGKADEGDAGAKCFLILKLYDHLVRKSKWNMPTGSNVGESKPWKAIRVDLLRCPYGSFAFAMLQWTGSRMFRRDLRWYATDEKNMMLDNHSLYDLTKGIFLPAKSEEEIFAHLGLEYLEPFERNA

SEQ ID NO: 3415 - DNA, 1587 bp, synthetic construct
  misc_feature 1..1587: note = Variant of terminal deoxynucleotidyltransferase
  source 1..1587: mol_type = other DNA
atgcaccatcatcatcatcatggcggtagcggcagccacggcattcgtaccatcgattcggacttcgggaagaaacagcagaaaaaaggcgataaccacgatagttccgccacttatgaaatcaaatttcacgagtttgtgctgttcattctcgaagaaaaaatgggtgcgacgcgtcgtacttttctgacagatttagcccgcaagaaagggttccgcgtcgagaatgaactgaccgacgaagttacccacatcgtggcagaaaatctgtcacgctctgaagtattggcttggctgaaagaacacaagatggagaagaccaagcaattcgaactgctggatattagctggcttatcgaaagcatgaaagttggtaaaccggtggacaccaaggggaaataccagttggcggaatcggttgaggtgagtgcgaacccagatccgacagaaggtcgtgtaaacgagctgcctcctactatgaaaaccgtttctccgtatgcgtgtcaacgccgcaccaccctgaacaaccgtaatcaacgttttacggactcgctggaaattcttcgtgaaaattacgagttcaaacgcaacgatgatactgcgctggaatttcgtcgtgctatctccgtgctgaaaagccttccgtttgaggtacgtagcctgaaagacacggaaggattgccctggatcggtgatgaagtcaaagggattatggaagaaatcatcgaggtcggggagtcgcgtgaagtgcaggccgtgctcaatgatgagtggtatcaaagcttccaccgctttaagagtgtctttggagtgggggtgaagacagcagacaagtggtaccgtatgggtctgcgcaccctcgaggatgttcgttccagcaagaccctgaagttgaccccgatgcagaaagtaggtctgctgtatttggaagatcttgctcgcggcgttacgcgtgccgaagctgacgcgatttggctgctggttcaggatgcagtcgcaactttcgacccggatgcgatcgtggagattgtcggtggatttcgtcgtgggaaacctcagggtcacgacgttgatctgcttatcagttctccgggagctgagaaagagcaagaagaccaactcctgcagaaagtgatgaatctgtggaagaaacaagggttgttgctgtacggtcgtctggaatggacccagtgggaagatgggggttcgccttccggtaaggctgacgagggtgacgcgggtgcgaaatgctttctgatcctcaaactttatgatcatctggtgcgtaaaagcaaatggaacatgccgacgggttcgaacgtgggcgagtccaaaccgtggaaagcaattcgcgtagatctgctgcgttgcccctatggcagttttgcgtttgcgatgttgcagtggaccggaagccgcatgttccgtcgtgatctgcgttggtacgccactgacgagaagaacatgatgctggacaatcattcgctgtatgacctgaccaagggtatcttcctccctgctaaatcggaagaggaaattttcgcacatctggggcttgaatacctggaaccgttcgaacgtaacgca

SEQ ID NO: 3416 - protein, 529 aa, synthetic construct
  REGION 1..529: note = Variant of terminal deoxynucleotidyltransferase
MHHHHHHGGSGSHGIRTIDSDFGKKQQKKGDNHDSSATYEIKFHEFVLFILEEKMGATRRTFLTDLARKKGFRVENELTDEVTHIVAENLSRSEVLAWLKEHKMEKTKQFELLDISWLIESMKVGKPVDTKGKYQLAESVEVSANPDPTEGRVNELPPTMKTVSPYACQRRTTLNNRNQRFTDSLEILRENYEFKRNDDTALEFRRAISVLKSLPFEVRSLKDTEGLPWIGDEVKGIMEEIIEVGESREVQAVLNDEWYQSFHRFKSVFGVGVKTADKWYRMGLRTLEDVRSSKTLKLTPMQKVGLLYLEDLARGVTRAEADAIWLLVQDAVATFDPDAIVEIVGGFRRGKPQGHDVDLLISSPGAEKEQEDQLLQKVMNLWKKQGLLLYGRLEWTQWEDGGSPSGKADEGDAGAKCFLILKLYDHLVRKSKWNMPTGSNVGESKPWKAIRVDLLRCPYGSFAFAMLQWTGSRMFRRDLRWYATDEKNMMLDNHSLYDLTKGIFLPAKSEEEIFAHLGLEYLEPFERNA

SEQ ID NO: 3417 - DNA, 1587 bp, synthetic construct
  misc_feature 1..1587: note = Variant of terminal deoxynucleotidyltransferase
  source 1..1587: mol_type = other DNA
atgcaccatcatcatcatcatggcggtagcggcagccacggcattcgtaccatcgattcggacttcgggaagaaacagcagaaaaaaggcgataaccacgatagttccgccacttatgaaatcaaatttcacgagtttgtgctgttcattctcgaagaaaaaatgggtgcgacgcgtcgtacttttctgacagatttagcccgcaagaaagggttccgcgtcgagaatgaactgaccgacgaagttacccacatcgtggcagaaaatctgtcacgctctgaagtattggcttggctgaaagaacacaagatggagaagaccaagcaattcgaactgctggatattagctggcttatcgaaagcatgaaagttggtaaaccggtggacaccaaggggaaataccagttggcggaatcggttgaggtgagtgcgaacccagatccgacagaaggtcgtgtaaacgagctgcctcctactatgaaaaccgtttctccgtatgcgtgtcaacgccgcaccaccctgaacaaccgtaatcaacgttttacggactcgctggaaattcttcgtgaaaattacgagttcaaacgcaacgatgatactgcgctggaatttcgtcgtgctatctccgtgctgaaaagccttccgtttgaggtacgtagcctgaaagacacggaaggattgccctggatcggtgatgaagtcaaagggattatggaagaaatcatcgaggtcggggagtcgcgtgaagtgcaggccgtgctcaatgatgagtggtatcaaagcttccaccgctttaagagtgtctttggagtgggggtgaagacagcagacaagtggtaccgtatgggtctgcgcaccctcgaggatgttcgttccagcaagaccctgaagttgaccccgatgcagaaagtaggtctgctgtattatgaagatcttgctcgcggcgttacgcgtgccgaagctgacgcgatttggctgctggttcaggatgcagtcgcaactttcgacccggatgcgatcgtggagattgtcggtggatttcgtcgtgggaaacctcagggtcacgacgttgatctgcttatcagttctccgggagctgagaaagagcaagaagaccaactcctgcagaaagtgatgaatctgtggaagaaacaagggttgttgctgtacggtcgtctggaatggacccagtgggaagatgggggttcgccttccggtatggctgacgagggtgacgcgggtgcgaaatgctttctgatcctcaaactttatgatcatctggtgcgtaaaagcaaatggaacatgccgacgggttcgaacgtgggcgagtccaaaccgtggaaagcaattcgcgtagatctgctgcgttgcccctatggcagttttgcgtttgcgatgttgcagtggaccggaagccgcatgttccgtcgtgatctgcgttggtacgccactgacgagaagaacatgatgctggacaatcattcgctgtatgacctgaccaagggtatcttcctccctgctaaatcggaagaggaaattttcgcacatctggggcttgaatacctggaaccgttcgaacgtaacgca

SEQ ID NO: 3418 - protein, 529 aa, synthetic construct
  REGION 1..529: note = Variant of terminal deoxynucleotidyltransferase
MHHHHHHGGSGSHGIRTIDSDFGKKQQKKGDNHDSSATYEIKFHEFVLFILEEKMGATRRTFLTDLARKKGFRVENELTDEVTHIVAENLSRSEVLAWLKEHKMEKTKQFELLDISWLIESMKVGKPVDTKGKYQLAESVEVSANPDPTEGRVNELPPTMKTVSPYACQRRTTLNNRNQRFTDSLEILRENYEFKRNDDTALEFRRAISVLKSLPFEVRSLKDTEGLPWIGDEVKGIMEEIIEVGESREVQAVLNDEWYQSFHRFKSVFGVGVKTADKWYRMGLRTLEDVRSSKTLKLTPMQKVGLLYYEDLARGVTRAEADAIWLLVQDAVATFDPDAIVEIVGGFRRGKPQGHDVDLLISSPGAEKEQEDQLLQKVMNLWKKQGLLLYGRLEWTQWEDGGSPSGMADEGDAGAKCFLILKLYDHLVRKSKWNMPTGSNVGESKPWKAIRVDLLRCPYGSFAFAMLQWTGSRMFRRDLRWYATDEKNMMLDNHSLYDLTKGIFLPAKSEEEIFAHLGLEYLEPFERNA

SEQ ID NO: 3419 - DNA, 1587 bp, synthetic construct
  misc_feature 1..1587: note = Variant of terminal deoxynucleotidyltransferase
  source 1..1587: mol_type = other DNA
atgcaccatcatcatcatcatggcggtagcggcagccacggcattcgtaccatcgattcggacttcgggaagaaacagcagaaaaaaggcgataaccacgatagttccgccacttatgaaatcaaatttcacgagtttgtgctgttcattctcgaagaaaaaatgggtgcgacgcgtcgtacttttctgacagatttagcccgcaagaaagggttccgcgtcgagaatgaactgaccgacgaagttacccacatcgtggcagaaaatctgtcacgctctgaagtattggcttggctgaaagaacacaagatggagaagaccaagcaattcgaactgctggatattagctggcttatcgaaagcatgaaagttggtaaaccggtggacaccaaggggaaataccagttggcggaatcggttgaggtgagtgcgaacccagatccgacagaaggtcgtgtaaacgagctgcctcctactatgaaaaccgtttctccgtatgcgtgtcaacgccgcaccaccctgaacaaccgtaatcaacgttttacggactcgctggaaattcttcgtgaaaattacgagttcaaacgcaacgatgatactgcgctggaatttcgtcgtgctatctccgtgctgaaaagccttccgtttgaggtacgtagcctgaaagacacggaaggattgccctggatcggtgatgaagtcaaagggattatggaagaaatcatcgaggtcggggagtcgcgtgaagtgcaggccgtgctcaatgatgagtggtatcaaagcttccaccgctttaagagtgtctttggagtgggggtgaagacagcagacaagtggtaccgtatgggtctgcgcaccctcgaggatgttcgttccagcaagaccctgaagttgaccccgatgcagaaagtaggtctgctgtattatgaagatcttgctcgcggcgttacgcgtgccgaagctgacgcgatttggctgctggttcaggatgcagtcgcaactttcgacccggatgcgatcgtggagattgtcggtggatttcgtcgtgggaaacctgctggtcacgacgttgatctgcttatcagttctccgggagctgagaaagagcaagaagaccaactcctgcagaaagtgatgaatctgtggaagaaacaagggttgttgctgtacggtcgtctggaatggacccagtgggaagatgggggttcgccttccggtaaggctgacgagggtgacgcgggtgcgaaatgctttctgatcctcaaactttatgatcatctggtgcgtaaaagcaaatggaacatgccgacgggttcgaacgtgggcgagtccaaaccgtggaaagcaattcgcgtagatctgctgcgttgcccctatggcagttttgcgtttgcgatgttgcagtggaccggaagccgcatgttccgtcgtgatctgcgttggtacgccactgacgagaagaacatgatgctggacaatcattcgctgtatgacctgaccaagggtatcttcctccctgctaaatcggaagaggaaattttcgcacatctggggcttgaatacctggaaccgttcgaacgtaacgca

SEQ ID NO: 3420 - protein, 529 aa, synthetic construct
  REGION 1..529: note = Variant of terminal deoxynucleotidyltransferase
MHHHHHHGGSGSHGIRTIDSDFGKKQQKKGDNHDSSATYEIKFHEFVLFILEEKMGATRRTFLTDLARKKGFRVENELTDEVTHIVAENLSRSEVLAWLKEHKMEKTKQFELLDISWLIESMKVGKPVDTKGKYQLAESVEVSANPDPTEGRVNELPPTMKTVSPYACQRRTTLNNRNQRFTDSLEILRENYEFKRNDDTALEFRRAISVLKSLPFEVRSLKDTEGLPWIGDEVKGIMEEIIEVGESREVQAVLNDEWYQSFHRFKSVFGVGVKTADKWYRMGLRTLEDVRSSKTLKLTPMQKVGLLYYEDLARGVTRAEADAIWLLVQDAVATFDPDAIVEIVGGFRRGKPAGHDVDLLISSPGAEKEQEDQLLQKVMNLWKKQGLLLYGRLEWTQWEDGGSPSGKADEGDAGAKCFLILKLYDHLVRKSKWNMPTGSNVGESKPWKAIRVDLLRCPYGSFAFAMLQWTGSRMFRRDLRWYATDEKNMMLDNHSLYDLTKGIFLPAKSEEEIFAHLGLEYLEPFERNA

SEQ ID NO: 3421 - DNA, 1587 bp, synthetic construct
  misc_feature 1..1587: note = Variant of terminal deoxynucleotidyltransferase
  source 1..1587: mol_type = other DNA
atgcaccatcatcatcatcatggcggtagcggcagccacggcattcgtaccatcgattcggacttcgggaagaaacagcagaaaaaaggcgataaccacgatagttccgccacttatgaaatcaaatttcacgagtttgtgctgttcattctcgaagaaaaaatgggtgcgacgcgtcgtacttttctgacagatttagcccgcaagaaagggttccgcgtcgagaatgaactgaccgacgaagttacccacatcgtggcagaaaatctgtcacgctctgaagtattggcttggctgaaagaacacaagatggagaagaccaagcaattcgaactgctggatattagctggcttatcgaaagcatgaaagttggtaaaccggtggacaccaaggggaaataccagttggcggaatcggttgaggtgagtgcgaacccagatccgacagaaggtcgtgtaaacgagctgcctcctactatgaaaaccgtttctccgtatgcgtgtcaacgccgcaccaccctgaacaaccgtaatcaacgttttacggactcgctggaaattcttcgtgaaaattacgagttcaaacgcaacgatgatactgcgctggaatttcgtcgtgctatctccgtgctgaaaagccttccgtttgaggtacgtagcctgaaagacacggaaggattgccctggatcggtgatgaagtcaaagggattatggaagaaatcatcgaggtcggggagtcgcgtgaagtgcaggccgtgctcaatgatgagtggtatcaaagcttccaccgctttaagagtgtctttggagtgggggtgaagacagcagacaagtggtaccgtatgggtctgcgcaccctcgaggatgttcgttccagcaagaccctgaagttgaccccgatgcagaaagtaggtctgctgtatggggaagatcttgctcgcggcgttacgcgtgccgaagctgacgcgatttggctgctggttcaggatgcagtcgcaactttcgacccggatgcgatcgtggagattgtcggtggatttcgtcgtgggaaacctcagggtcacgacgttgatctgcttatcagttctccgggagctgagaaagagcaagaagaccaactcctgcagaaagtgatgaatctgtggaagaaacaagggttgttgctgtacggtcgtctggaatggacccagtgggaagatgggggttcgccttccggtaaggctgacgagggtgacgcgggtgcgaaatgctttctgatcctcaaactttatgatcatctggtgcgtaaaagcaaatggaacatgccgacgggttcgaacgtgggcgagtccaaaccgtggaaagcaattcgcgtagatctgctgcgttgcccctatggcagttttgcgtttgcgatgttgcagtggaccggaagccgcatgttccgtcgtgatctgcgttggtacgccactgacgagaagaacatgatgctggacaatcattcgctgtatgacctgaccaagggtatcttcctccctgctaaatcggaagaggaaattttcgcacatctggggcttgaatacctggaaccgttcgaacgtaacgca

SEQ ID NO: 3422 - protein, 529 aa, synthetic construct
  REGION 1..529: note = Variant of terminal deoxynucleotidyltransferase
MHHHHHHGGSGSHGIRTIDSDFGKKQQKKGDNHDSSATYEIKFHEFVLFILEEKMGATRRTFLTDLARKKGFRVENELTDEVTHIVAENLSRSEVLAWLKEHKMEKTKQFELLDISWLIESMKVGKPVDTKGKYQLAESVEVSANPDPTEGRVNELPPTMKTVSPYACQRRTTLNNRNQRFTDSLEILRENYEFKRNDDTALEFRRAISVLKSLPFEVRSLKDTEGLPWIGDEVKGIMEEIIEVGESREVQAVLNDEWYQSFHRFKSVFGVGVKTADKWYRMGLRTLEDVRSSKTLKLTPMQKVGLLYGEDLARGVTRAEADAIWLLVQDAVATFDPDAIVEIVGGFRRGKPQGHDVDLLISSPGAEKEQEDQLLQKVMNLWKKQGLLLYGRLEWTQWEDGGSPSGKADEGDAGAKCFLILKLYDHLVRKSKWNMPTGSNVGESKPWKAIRVDLLRCPYGSFAFAMLQWTGSRMFRRDLRWYATDEKNMMLDNHSLYDLTKGIFLPAKSEEEIFAHLGLEYLEPFERNA

SEQ ID NO: 3423 - DNA, 1587 bp, synthetic construct
  misc_feature 1..1587: note = Variant of terminal deoxynucleotidyltransferase
  source 1..1587: mol_type = other DNA
atgcaccatcatcatcatcatggcggtagcggcagccacggcattcgtaccatcgattcggacttcgggaagaaacagcagaaaaaaggcgataaccacgatagttccgccacttatgaaatcaaatttcacgagtttgtgctgttcattctcgaagaaaaaatgggtgcgacgcgtcgtacttttctgacagatttagcccgcaagaaagggttccgcgtcgagaatgaactgaccgacgaagttacccacatcgtggcagaaaatctgtcacgctctgaagtattggcttggctgaaagaacacaagatggagaagaccaagcaattcgaactgctggatattagctggcttatcgaaagcatgaaagttggtaaaccggtggacaccaaggggaaataccagttggcggaatcggttgaggtgagtgcgaacccagatccgacagaaggtcgtgtaaacgagctgcctcctactatgaaaaccgtttctccgtatgcgtgtcaacgccgcaccaccctgaacaaccgtaatcaacgttttacggactcgctggaaattcttcgtgaaaattacgagttcaaacgcaacgatgatactgcgctggaatttcgtcgtgctatctccgtgctgaaaagccttccgtttgaggtacgtagcctgaaagacacggaaggattgccctggatcggtgatgaagtcaaagggattatggaagaaatcatcgaggtcggggagtcgcgtgaagtgcaggccgtgctcaatgatgagtggtatcaaagcttccaccgctttaagagtgtctttggagtgggggtgaagacagcagacaagtggtaccgtatgggtctgcgcaccctcgaggatgttcgttccagcaagaccctgaagttgaccccgatgaataaagtaggtctgctgtattatgaagatcttgctcgcggcgttacgcgtgccgaagctgacgcgatttggctgctggttcaggatgcagtcgcaactttcgacccggatgcgatcgtggagattgtcggtggatttcgtcgtgggaaacctcagggtcacgacgttgatctgcttatcagttctccgggagctgagaaagagcaagaagaccaactcctgcagaaagtgatgaatctgtggaagaaacaagggttgttgctgtacggtcgtctggaatggacccagtgggaagatgggggttcgccttccggtaaggctgacgagggtgacgcgggtgcgaaatgctttctgatcctcaaactttatgatcatctggtgcgtaaaagcaaatggaacatgccgacgggttcgaacgtgggcgagtccaaaccgtggaaagcaattcgcgtagatctgctgcgttgcccctatggcagttttgcgtttgcgatgttgcagtggaccggaagccgcatgttccgtcgtgatctgcgttggtacgccactgacgagaagaacatgatgctggacaatcattcgctgtatgacctgaccaagggtatcttcctccctgctaaatcggaagaggaaattttcgcacatctggggcttgaatacctggaaccgttcgaacgtaacgca

SEQ ID NO: 3424 - protein, 529 aa, synthetic construct
  REGION 1..529: note = Variant of terminal deoxynucleotidyltransferase
MHHHHHHGGSGSHGIRTIDSDFGKKQQKKGDNHDSSATYEIKFHEFVLFILEEKMGATRRTFLTDLARKKGFRVENELTDEVTHIVAENLSRSEVLAWLKEHKMEKTKQFELLDISWLIESMKVGKPVDTKGKYQLAESVEVSANPDPTEGRVNELPPTMKTVSPYACQRRTTLNNRNQRFTDSLEILRENYEFKRNDDTALEFRRAISVLKSLPFEVRSLKDTEGLPWIGDEVKGIMEEIIEVGESREVQAVLNDEWYQSFHRFKSVFGVGVKTADKWYRMGLRTLEDVRSSKTLKLTPMNKVGLLYYEDLARGVTRAEADAIWLLVQDAVATFDPDAIVEIVGGFRRGKPQGHDVDLLISSPGAEKEQEDQLLQKVMNLWKKQGLLLYGRLEWTQWEDGGSPSGKADEGDAGAKCFLILKLYDHLVRKSKWNMPTGSNVGESKPWKAIRVDLLRCPYGSFAFAMLQWTGSRMFRRDLRWYATDEKNMMLDNHSLYDLTKGIFLPAKSEEEIFAHLGLEYLEPFERNA

SEQ ID NO: 3425 - DNA, 1587 bp, synthetic construct
  misc_feature 1..1587: note = Variant of terminal deoxynucleotidyltransferase
  source 1..1587: mol_type = other DNA
atgcaccatcatcatcatcatggcggtagcggcagccacggcattcgtaccatcgattcggacttcgggaagaaacagcagaaaaaaggcgataaccacgatagttccgccacttatgaaatcaaatttcacgagtttgtgctgttcattctcgaagaaaaaatgggtgcgacgcgtcgtacttttctgacagatttagcccgcaagaaagggttccgcgtcgagaatgaactgaccgacgaagttacccacatcgtggcagaaaatctgtcacgctctgaagtattggcttggctgaaagaacacaagatggagaagaccaagcaattcgaactgctggatattagctggcttatcgaaagcatgaaagttggtaaaccggtggacaccaaggggaaataccagttggcggaatcggttgaggtgagtgcgaacccagatccgacagaaggtcgtgtaaacgagctgcctcctactatgaaaaccgtttctccgtatgcgtgtcaacgccgcaccaccctgaacaaccgtaatcaacgttttacggactcgctggaaattcttcgtgaaaattacgagttcaaacgcaacgatgatactgcgctggaatttcgtcgtgctatctccgtgctgaaaagccttccgtttgaggtacgtagcctgaaagacacggaaggattgccctggatcggtgatgaagtcaaagggattatggaagaaatcatcgaggtcggggagtcgcgtgaagtgcaggccgtgctcaatgatgagtggtatcaaagcttccaccgctttaagagtgtctttggagtgggggtgaagacagcagacaagtggtaccgtatgggtctgcgcaccctcgaggatgttcgttccagcaagaccctgaagttgaccccgatgcagaaagtaggtctgctgtattatgaagatgttgctcgcggcgttacgcgtgccgaagctgacgcgatttggctgctggttcaggatgcagtcgcaactttcgacccggatgcgatcgtggagattgtcggtggatttcgtcgtgggaaacctcagggtcacgacgttgatctgcttatcagttctccgggagctgagaaagagcaagaagaccaactcctgcagaaagtgatgaatctgtggaagaaacaagggttgttgctgtacggtcgtctggaatggacccagtgggaagatgggggttcgccttccggtaaggctgacgagggtgacgcgggtgcgaaatgctttctgatcctcaaactttatgatcatctggtgcgtaaaagcaaatggaacatgccgacgggttcgaacgtgggcgagtccaaaccgtggaaagcaattcgcgtagatctgctgcgttgcccctatggcagttttgcgtttgcgatgttgcagtggaccggaagccgcatgttccgtcgtgatctgcgttggtacgccactgacgagaagaacatgatgctggacaatcattcgctgtatgacctgaccaagggtatcttcctccctgctaaatcggaagaggaaattttcgcacatctggggcttgaatacctggaaccgttcgaacgtaacgca

SEQ ID NO: 3426 - protein, 529 aa, synthetic construct
  REGION 1..529: note = Variant of terminal deoxynucleotidyltransferase
MHHHHHHGGSGSHGIRTIDSDFGKKQQKKGDNHDSSATYEIKFHEFVLFILEEKMGATRRTFLTDLARKKGFRVENELTDEVTHIVAENLSRSEVLAWLKEHKMEKTKQFELLDISWLIESMKVGKPVDTKGKYQLAESVEVSANPDPTEGRVNELPPTMKTVSPYACQRRTTLNNRNQRFTDSLEILRENYEFKRNDDTALEFRRAISVLKSLPFEVRSLKDTEGLPWIGDEVKGIMEEIIEVGESREVQAVLNDEWYQSFHRFKSVFGVGVKTADKWYRMGLRTLEDVRSSKTLKLTPMQKVGLLYYEDVARGVTRAEADAIWLLVQDAVATFDPDAIVEIVGGFRRGKPQGHDVDLLISSPGAEKEQEDQLLQKVMNLWKKQGLLLYGRLEWTQWEDGGSPSGKADEGDAGAKCFLILKLYDHLVRKSKWNMPTGSNVGESKPWKAIRVDLLRCPYGSFAFAMLQWTGSRMFRRDLRWYATDEKNMMLDNHSLYDLTKGIFLPAKSEEEIFAHLGLEYLEPFERNA

SEQ ID NO: 3427 - DNA, 1587 bp, synthetic construct
  misc_feature 1..1587: note = Variant of terminal deoxynucleotidyltransferase
  source 1..1587: mol_type = other DNA
atgcaccatcatcatcatcatggcggtagcggcagccacggcattcgtaccatcgattcggacttcgggaagaaacagcagaaaaaaggcgataaccacgatagttccgccacttatgaaatcaaatttcacgagtttgtgctgttcattctcgaagaaaaaatgggtgcgacgcgtcgtacttttctgacagatttagcccgcaagaaagggttccgcgtcgagaatgaactgaccgacgaagttacccacatcgtggcagaaaatctgtcacgctctgaagtattggcttggctgaaagaacacaagatggagaagaccaagcaattcgaactgctggatattagctggcttatcgaaagcatgaaagttggtaaaccggtggacaccaaggggaaataccagttggcggaatcggttgaggtgagtgcgaacccagatccgacagaaggtcgtgtaaacgagctgcctcctactatgaaaaccgtttctccgtatgcgtgtcaacgccgcaccaccctgaacaaccgtaatcaacgttttacggactcgctggaaattcttcgtgaaaattacgagttcaaaactaacgatgatactgcgctggaatttcgtcgtgctatctccgtgctgaaaagccttccgtttgaggtacgtagcctgaaagacacggaaggattgccctggatcggtgatgaagtcaaagggattatggaagaaatcatcgaggtcggggagtcgcgtgaagtgcaggccgtgctcaatgatgagtggtatcaaagcttccaccgctttaagagtgtctttggagtgggggtgaagacagcagacaagtggtaccgtatgggtctgcgcaccctcgaggatgttcgttccagcaagaccctgaagttgaccccgatgcagaaagtaggtctgctgtattatgaagatcttgctcgcggcgttacgcgtgccgaagctgacgcgatttggctgctggttcaggatgcagtcgcaactttcgacccggatgcgatcgtggagattgtcggtggatttcgtcgtgggaaacctcagggtcacgacgttgatctgcttatcagttctccgggagctgagaaagagcaagaagaccaactcctgcagaaagtgatgaatctgtggaagaaacaagggttgttgctgtacggtcgtctggaatggacccagtgggaagatgggggttcgccttccggtaaggctgacgagggtgacgcgggtgcgaaatgctttctgatcctcaaactttatgatcatctggtgcgtaaaagcaaatggaacatgccgacgggttcgaacgtgggcgagtccaaaccgtggaaagcaattcgcgtagatctgctgcgttgcccctatggcagttttgcgtttgcgatgttgcagtggaccggaagccgcatgttccgtcgtgatctgcgttggtacgccactgacgagaagaacatgatgctggacaatcattcgctgtatgacctgaccaagggtatcttcctccctgctaaatcggaagaggaaattttcgcacatctggggcttgaatacctggaaccgttcgaacgtaacgca

SEQ ID NO: 3428 - protein, 529 aa, synthetic construct
  REGION 1..529: note = Variant of terminal deoxynucleotidyltransferase
MHHHHHHGGSGSHGIRTIDSDFGKKQQKKGDNHDSSATYEIKFHEFVLFILEEKMGATRRTFLTDLARKKGFRVENELTDEVTHIVAENLSRSEVLAWLKEHKMEKTKQFELLDISWLIESMKVGKPVDTKGKYQLAESVEVSANPDPTEGRVNELPPTMKTVSPYACQRRTTLNNRNQRFTDSLEILRENYEFKTNDDTALEFRRAISVLKSLPFEVRSLKDTEGLPWIGDEVKGIMEEIIEVGESREVQAVLNDEWYQSFHRFKSVFGVGVKTADKWYRMGLRTLEDVRSSKTLKLTPMQKVGLLYYEDLARGVTRAEADAIWLLVQDAVATFDPDAIVEIVGGFRRGKPQGHDVDLLISSPGAEKEQEDQLLQKVMNLWKKQGLLLYGRLEWTQWEDGGSPSGKADEGDAGAKCFLILKLYDHLVRKSKWNMPTGSNVGESKPWKAIRVDLLRCPYGSFAFAMLQWTGSRMFRRDLRWYATDEKNMMLDNHSLYDLTKGIFLPAKSEEEIFAHLGLEYLEPFERNA

SEQ ID NO: 3429 - DNA, 1587 bp, synthetic construct
  misc_feature 1..1587: note = Variant of terminal deoxynucleotidyltransferase
  source 1..1587: mol_type = other DNA
atgcaccatcatcatcatcatggcggtagcggcagccacggcattcgtaccatcgattcggacttcgggaagaaacagcagaaaaaaggcgataaccacgatagttccgccacttatgaaatcaaatttcacgagtttgtgctgttcattctcgaagaaaaaatgggtgcgacgcgtcgtacttttctgacagatttagcccgcaagaaagggttccgcgtcgagaatgaactgaccgacgaagttacccacatcgtggcagaaaatctgtcacgctctgaagtattggcttggctgaaagaacacaagatggagaagaccaagcaattcgaactgctggatattagctggcttatcgaaagcatgaaagttggtaaaccggtggacaccaaggggaaataccagttggcggaatcggttgaggtgagtgcgaacccagatccgacagaaggtcgtgtaaacgagctgcctcctactatgaaaaccgtttctccgtatgcgtgtcaacgccgcaccaccctgaacaaccgtaatcaacgttttacggactcgctggaaattcttcgtgaaaattacgagttcaaacgcaacgatgatactgcgctggaatttcgtcgtgctatctccgtgctgaaaagccttccgtttgaggtacgtagcctgaaagacacggaaggattgccctggatcggtgatgaagtcaaagggattatggaagaaatcatcgaggtcggggagtcgcgtgaagtgcaggccgtgctcaatgatgagtggtatcaaagcttccaccgctttaagagtgtctttggagtgggggtgaagacagcagacaagtggtaccgtatgggtctgcgcaccctcgaggatgttcgttccagcaagaccctgaagttgaccccgatgcagaaagtaggtctgctgtattatgaagatcttgctcgcggcgttacgcgtgccgaagctgacgcgatttggctgctggttcaggatgcagtcgcaactttcgacccggatgcgatcgtggagattgtcggtggatttcgtcgtgggaaacctcagggtcacgacgttgatctgcttatcagttctccgggagctgagaaagagcaagaagaccaactcctgcagaaagtgatgaatctgtggaagaaacaagggttgttgctgtacggtcgtctggaatggacccagtgggaagatgggggttcgccttccggtaaggctgacgagggtgacgcgggtgcgaaatgctttctgatcctcaaactttatgatcatctggtgcgtaaaagcaaatggaacatgccgacgggttcgaacgtgggcgagtccaaaccgtggaaagcaattcgcgtagatctgctgcgttgcccctatggcagttttgcgtttgcgatgttgcagtggaccggaagccgcatgttccgtcgtgatctgcattggtacgccactgacgagaagaacatgatgctggacaatcattcgctgtatgacctgaccaagggtatcttcctccctgctaaatcggaagaggaaattttcgcacatctggggcttgaatacctggaaccgttcgaacgtaacgca

SEQ ID NO: 3430 - protein, 529 aa, synthetic construct
  REGION 1..529: note = Variant of terminal deoxynucleotidyltransferase
MHHHHHHGGSGSHGIRTIDSDFGKKQQKKGDNHDSSATYEIKFHEFVLFILEEKMGATRRTFLTDLARKKGFRVENELTDEVTHIVAENLSRSEVLAWLKEHKMEKTKQFELLDISWLIESMKVGKPVDTKGKYQLAESVEVSANPDPTEGRVNELPPTMKTVSPYACQRRTTLNNRNQRFTDSLEILRENYEFKRNDDTALEFRRAISVLKSLPFEVRSLKDTEGLPWIGDEVKGIMEEIIEVGESREVQAVLNDEWYQSFHRFKSVFGVGVKTADKWYRMGLRTLEDVRSSKTLKLTPMQKVGLLYYEDLARGVTRAEADAIWLLVQDAVATFDPDAIVEIVGGFRRGKPQGHDVDLLISSPGAEKEQEDQLLQKVMNLWKKQGLLLYGRLEWTQWEDGGSPSGKADEGDAGAKCFLILKLYDHLVRKSKWNMPTGSNVGESKPWKAIRVDLLRCPYGSFAFAMLQWTGSRMFRRDLHWYATDEKNMMLDNHSLYDLTKGIFLPAKSEEEIFAHLGLEYLEPFERNA

SEQ ID NO: 3431 - DNA, 1587 bp, synthetic construct
  misc_feature 1..1587: note = Variant of terminal deoxynucleotidyltransferase
  source 1..1587: mol_type = other DNA
atgcaccatcatcatcatcatggcggtagcggcagccacggcattcgtaccatcgattcggacttcgggaagaaacagcagaaaaaaggcgataaccacgatagttccgccacttatgaaatcaaatttcacgagtttgtgctgttcattctcgaagaaaaaatgggtgcgacgcgtcgtacttttctgacagatttagcccgcaagaaagggttccgcgtcgagaatgaactgaccgacgaagttacccacatcgtggcagaaaatctgtcacgctctgaagtattggcttggctgaaagaacacaagatggagaagaccaagcaattcgaactgctggatattagctggcttatcgaaagcatgaaagttggtaaaccggtggacaccaaggggaaataccagttggcggaatcggttgaggtgagtgcgaacccagatccgacagaaggtcgtgtaaacgagctgcctcctactatgaaaaccgtttctccgtatgcgtgtcaacgccgcaccaccctgaacaaccgtaatcaacgttttacggactcgctggaaattcttcgtgaaaattacgagttcaaacgcaacgatgatactgcgctggaatttcgtcgtgctatctccgtgctgaaaagccttccgtttgaggtacgtagcctgaaagacacggaaggattgccctggatcggtgatgaagtcaaagggattatggaagaaatcatcgaggtcggggagtcgcgtgaagtgcaggccgtgctcaatgatgagtggtatcaaagcttccaccgctttaagagtgtctttggagtgggggtgaagacagcagacaagtggtaccgtatgggtctgcgcaccctcgaggatgttcgttccagcaagaccctgaagttgaccccgatgcagaaagtaggtctgctgtatatggaagatcttgctcgcggcgttacgcgtgccgaagctgacgcgatttggctgctggttcaggatgcagtcgcaactttcgacccggatgcgatcgtggagattgtcggtggatttcgtcgtgggaaacctcagggtcacgacgttgatctgcttatcagttctccgggagctgagaaagagcaagaagaccaactcctgcagaaagtgatgaatctgtggaagaaacaagggttgttgctgtacggtcgtctggaatggacccagtgggaagatgggggttcgccttccggtaaggctgacgagggtgacgcgggtgcgaaatgctttctgatcctcaaactttatgatcatctggtgcgtaaaagcaaatggaacatgccgacgggttcgaacgtgggcgagtccaaaccgtggaaagcaattcgcgtagatctgctgcgttgcccctatggcagttttgcgtttgcgatgttgcagtggaccggaagccgcatgttccgtcgtgatctgcgttggtacgccactgacgagaagaacatgatgctggacaatcattcgctgtatgacctgaccaagggtatcttcctccctgctaaatcggaagaggaaattttcgcacatctggggcttgaatacctggaaccgttcgaacgtaacgca

SEQ ID NO: 3432 - protein, 529 aa, synthetic construct
  REGION 1..529: note = Variant of terminal deoxynucleotidyltransferase
MHHHHHHGGSGSHGIRTIDSDFGKKQQKKGDNHDSSATYEIKFHEFVLFILEEKMGATRRTFLTDLARKKGFRVENELTDEVTHIVAENLSRSEVLAWLKEHKMEKTKQFELLDISWLIESMKVGKPVDTKGKYQLAESVEVSANPDPTEGRVNELPPTMKTVSPYACQRRTTLNNRNQRFTDSLEILRENYEFKRNDDTALEFRRAISVLKSLPFEVRSLKDTEGLPWIGDEVKGIMEEIIEVGESREVQAVLNDEWYQSFHRFKSVFGVGVKTADKWYRMGLRTLEDVRSSKTLKLTPMQKVGLLYMEDLARGVTRAEADAIWLLVQDAVATFDPDAIVEIVGGFRRGKPQGHDVDLLISSPGAEKEQEDQLLQKVMNLWKKQGLLLYGRLEWTQWEDGGSPSGKADEGDAGAKCFLILKLYDHLVRKSKWNMPTGSNVGESKPWKAIRVDLLRCPYGSFAFAMLQWTGSRMFRRDLRWYATDEKNMMLDNHSLYDLTKGIFLPAKSEEEIFAHLGLEYLEPFERNA

SEQ ID NO: 3433 - DNA, 1587 bp, synthetic construct
  misc_feature 1..1587: note = Variant of terminal deoxynucleotidyltransferase
  source 1..1587: mol_type = other DNA
atgcaccatcatcatcatcatggcggtagcggcagccacggcattcgtaccatcgattcggacttcgggaagaaacagcagaaaaaaggcgataaccacgatagttccgccacttatgaaatcaaatttcacgagtttgtgctgttcattctcgaagaaaaaatgggtgcgacgcgtcgtacttttctgacagatttagcccgcaagaaagggttccgcgtcgagaatgaactgaccgacgaagttacccacatcgtggcagaaaatctgtcacgctctgaagtattggcttggctgaaagaacacaagatggagaagaccaagcaattcgaactgctggatattagctggcttatcgaaagcatgaaagttggtaaaccggtggacaccaaggggaaataccagttggcggaatcggttgaggtgagtgcgaacccagatccgacagaaggtcgtgtaaacgagctgcctcctactatgaaaaccgtttctccgtatgcgtgtcaacgccgcaccaccctgaacaaccgtaatcaacgttttacggactcgctggaaattcttcgtgaaaattacgagttcaaacgcaacgatgatactgcgctggaatttcgtcgtgctatctccgtgctgaaaagccttccgtttgaggtacgtagcctgaaagacacggaaggattgccctggatcggtgatgaagtcaaagggattatggaagaaatcatcgaggtcggggagtcgcgtgaagtgcaggccgtgctcaatgatgagtggtatcaaagcttccaccgctttaaggcggtctttggagtgggggtgaagacagcagacaagtggtaccgtatgggtctgcgcaccctcgaggatgttcgttccagcaagaccctgaagttgaccccgatgcagaaagtaggtctgctgtattatgaagatcttgctcgcggcgttacgcgtgccgaagctgacgcgatttggctgctggttcaggatgcagtcgcaactttcgacccggatgcgatcgtggagattgtcggtggatttcgtcgtgggaaacctcagggtcacgacgttgatctgcttatcagttctccgggagctgagaaagagcaagaagaccaactcctgcagaaagtgatgaatctgtggaagaaacaagggttgttgctgtacggtcgtctggaatggacccagtgggaagatgggggttcgccttccggtaaggctgacgagggtgacgcgggtgcgaaatgctttctgatcctcaaactttatgatcatctggtgcgtaaaagcaaatggaacatgccgacgggttcgaacgtgggcgagtccaaaccgtggaaagcaattcgcgtagatctgctgcgttgcccctatggcagttttgcgtttgcgatgttgcagtggaccggaagccgcatgttccgtcgtgatctgcgttggtacgccactgacgagaagaacatgatgctggacaatcattcgctgtatgacctgaccaagggtatcttcctccctgctaaatcggaagaggaaattttcgcacatctggggcttgaatacctggaaccgttcgaacgtaacgca

SEQ ID NO: 3434 - protein, 529 aa, synthetic construct
  REGION 1..529: note = Variant of terminal deoxynucleotidyltransferase
MHHHHHHGGSGSHGIRTIDSDFGKKQQKKGDNHDSSATYEIKFHEFVLFILEEKMGATRRTFLTDLARKKGFRVENELTDEVTHIVAENLSRSEVLAWLKEHKMEKTKQFELLDISWLIESMKVGKPVDTKGKYQLAESVEVSANPDPTEGRVNELPPTMKTVSPYACQRRTTLNNRNQRFTDSLEILRENYEFKRNDDTALEFRRAISVLKSLPFEVRSLKDTEGLPWIGDEVKGIMEEIIEVGESREVQAVLNDEWYQSFHRFKAVFGVGVKTADKWYRMGLRTLEDVRSSKTLKLTPMQKVGLLYYEDLARGVTRAEADAIWLLVQDAVATFDPDAIVEIVGGFRRGKPQGHDVDLLISSPGAEKEQEDQLLQKVMNLWKKQGLLLYGRLEWTQWEDGGSPSGKADEGDAGAKCFLILKLYDHLVRKSKWNMPTGSNVGESKPWKAIRVDLLRCPYGSFAFAMLQWTGSRMFRRDLRWYATDEKNMMLDNHSLYDLTKGIFLPAKSEEEIFAHLGLEYLEPFERNA

SEQ ID NO: 3435 - DNA, 1587 bp, synthetic construct
  misc_feature 1..1587: note = Variant of terminal deoxynucleotidyltransferase
  source 1..1587: mol_type = other DNA
atgcaccatcatcatcatcatggcggtagcggcagccacggcattcgtaccatcgattcggacttcgggaagaaacagcagaaaaaaggcgataaccacgatagttccgccacttatgaaatcaaatttcacgagtttgtgctgttcattctcgaagaaaaaatgggtgcgacgcgtcgtacttttctgacagatttagcccgcaagaaagggttccgcgtcgagaatgaactgaccgacgaagttacccacatcgtggcagaaaatctgtcacgctctgaagtattggcttggctgaaagaacacaagatggagaagaccaagcaattcgaactgctggatattagctggcttatcgaaagcatgaaagttggtaaaccggtggacaccaaggggaaataccagttggcggaatcggttgaggtgagtgcgaacccagatccgacagaaggtcgtgtaaacgagctgcctcctactatgaaaaccgtttctccgtatgcgtgtcaacgccgcaccaccctgaacaaccgtaatcaacgttttacggactcgctggaaattcttcgtgaaaattacgagttcaaacgcaacgatgatactgcgctggaatttcgtcgtgctatctccgtgctgaaaagccttccgtttgaggtacgtagcctgaaagacacggaaggattgccctggatcggtgatgaagtcaaagggattatggaagaaatcatcgaggtcggggagtcgcgtgaagtgcaggccgtgctcaatgatgagtggtatcaaagcttccaccgctttaagagtgtctttggagtgggggtgaagacagcagacaagtggtaccgtatgggtctgcgcaccctcgaggatgttcgttccagcaagaccctgaagttgaccccgatgcagaaagtaggtctgctgtattatgaagatcttgctcgcggcgttacgcgtgccgaagctgacgcgatttggctgctggttcaggatgcagtcgcaactttcgacccggatgcgatcgtggagattgtcggtggatttcgtcgtgggaaacctcagggtcacgacgttgatctgcttatcagttctccgggagctgagaaagagcaagaagaccaactcctgcagaaagtgatgaatctgtggaagaaacaagggttgttgctgtacggtcgtctggaatggacccagtgggaagatgggggttcgccttccggtaaggctgacgagggtgacgcgggtgcgaaatgctttctgatcctcaaactttatgatcatctggtgcgtaaaagcaaatggaacatgccgacgggttcgaacgtgggcgagtccaaaccgtggaaagcaattcgcgtagatctgctgcgttgcccctatggcagttttgcgtttgcgatgttgatgtggaccggaagccgcatgttccgtcgtgatctgcgttggtacgccactgacgagaagaacatgatgctggacaatcattcgctgtatgacctgaccaagggtatcttcctccctgctaaatcggaagaggaaattttcgcacatctggggcttgaatacctggaaccgttcgaacgtaacgca

SEQ ID NO: 3436 - protein, 529 aa, synthetic construct
  REGION 1..529: note = Variant of terminal deoxynucleotidyltransferase
MHHHHHHGGSGSHGIRTIDSDFGKKQQKKGDNHDSSATYEIKFHEFVLFILEEKMGATRRTFLTDLARKKGFRVENELTDEVTHIVAENLSRSEVLAWLKEHKMEKTKQFELLDISWLIESMKVGKPVDTKGKYQLAESVEVSANPDPTEGRVNELPPTMKTVSPYACQRRTTLNNRNQRFTDSLEILRENYEFKRNDDTALEFRRAISVLKSLPFEVRSLKDTEGLPWIGDEVKGIMEEIIEVGESREVQAVLNDEWYQSFHRFKSVFGVGVKTADKWYRMGLRTLEDVRSSKTLKLTPMQKVGLLYYEDLARGVTRAEADAIWLLVQDAVATFDPDAIVEIVGGFRRGKPQGHDVDLLISSPGAEKEQEDQLLQKVMNLWKKQGLLLYGRLEWTQWEDGGSPSGKADEGDAGAKCFLILKLYDHLVRKSKWNMPTGSNVGESKPWKAIRVDLLRCPYGSFAFAMLMWTGSRMFRRDLRWYATDEKNMMLDNHSLYDLTKGIFLPAKSEEEIFAHLGLEYLEPFERNA

SEQ ID NO: 3437 - DNA, 1587 bp, synthetic construct
  misc_feature 1..1587: note = Variant of terminal deoxynucleotidyltransferase
  source 1..1587: mol_type = other DNA
atgcaccatcatcatcatcatggcggtagcggcagccacggcattcgtaccatcgattcggacttcgggaagaaacagcagaaaaaaggcgataaccacgatagttccgccacttatgaaatcaaatttcacgagtttgtgctgttcattctcgaagaaaaaatgggtgcgacgcgtcgtacttttctgacagatttagcccgcaagaaagggttccgcgtcgagaatgaactgaccgacgaagttacccacatcgtggcagaaaatctgtcacgctctgaagtattggcttggctgaaagaacacaagatggagaagaccaagcaattcgaactgctggatattagctggcttatcgaaagcatgaaagttggtaaaccggtggacaccaaggggaaataccagttggcggaatcggttgaggtgagtgcgaacccagatccgacagaaggtcgtgtaaacgagctgcctcctactatgaaaaccgtttctccgtatgcgtgtcaacgccgcaccaccctgaacaaccgtaatcaacgttttacggactcgctggaaattcttcgtgaaaattacgagttcaaacgcaacgatgatactgcgctggaatttcgtcgtgctatctccgtgctgaaaagccttccgtttgaggtacgtagcctgaaagacacggaaggattgccctggatcggtgatgaagtcaaagggattatggaagaaatcatcgaggtcggggagtcgcgtgaagtgcaggccgtgctcaatgatgagtggtatcaaagcttccaccgctttaagagtgtctttggagtgggggtgaagacagcagacaagtggtaccgtatgggtctgcgcaccctcgaggatgttcgttccagcaagaccctgaagttgaccccgatgcagaaagtaggtctgctgtattatgaagatcttgctcgcggcgttacgcgtgccgaagctgacgcgatttggctgctggttcaggatgcagtcgcaactttcgacccggatgcgatcgtggagattgtcggtggatttcgtcgtgggaaacctcagggtcacgacgttgatctgcttatcagttctccgggagctgagaaagagcaagaagaccaactcctgcagaaagtgatgaatctgtggaagaaacaagggttgttgctgtacggtcgtctggaatggacccagtgggaagatgggggttcgccttccggtaaggctgacgagaatgacgcgggtgcgaaatgctttctgatcctcaaactttatgatcatctggtgcgtaaaagcaaatggaacatgccgacgggttcgaacgtgggcgagtccaaaccgtggaaagcaattcgcgtagatctgctgcgttgcccctatggcagttttgcgtttgcgatgttgcagtggaccggaagccgcatgttccgtcgtgatctgcgttggtacgccactgacgagaagaacatgatgctggacaatcattcgctgtatgacctgaccaagggtatcttcctccctgctaaatcggaagaggaaattttcgcacatctggggcttgaatacctggaaccgttcgaacgtaacgca

SEQ ID NO: 3438 - protein, 529 aa, synthetic construct
  REGION 1..529: note = Variant of terminal deoxynucleotidyltransferase
MHHHHHHGGSGSHGIRTIDSDFGKKQQKKGDNHDSSATYEIKFHEFVLFILEEKMGATRRTFLTDLARKKGFRVENELTDEVTHIVAENLSRSEVLAWLKEHKMEKTKQFELLDISWLIESMKVGKPVDTKGKYQLAESVEVSANPDPTEGRVNELPPTMKTVSPYACQRRTTLNNRNQRFTDSLEILRENYEFKRNDDTALEFRRAISVLKSLPFEVRSLKDTEGLPWIGDEVKGIMEEIIEVGESREVQAVLNDEWYQSFHRFKSVFGVGVKTADKWYRMGLRTLEDVRSSKTLKLTPMQKVGLLYYEDLARGVTRAEADAIWLLVQDAVATFDPDAIVEIVGGFRRGKPQGHDVDLLISSPGAEKEQEDQLLQKVMNLWKKQGLLLYGRLEWTQWEDGGSPSGKADENDAGAKCFLILKLYDHLVRKSKWNMPTGSNVGESKPWKAIRVDLLRCPYGSFAFAMLQWTGSRMFRRDLRWYATDEKNMMLDNHSLYDLTKGIFLPAKSEEEIFAHLGLEYLEPFERNA

SEQ ID NO: 3439 - DNA, 1587 bp, synthetic construct
  misc_feature 1..1587: note = Variant of terminal deoxynucleotidyltransferase
  source 1..1587: mol_type = other DNA
atgcaccatcatcatcatcatggcggtagcggcagccacggcattcgtaccatcgattcggacttcgggaagaaacagcagaaaaaaggcgataaccacgatagttccgccacttatgaaatcaaatttcacgagtttgtgctgttcattctcgaagaaaaaatgggtgcgacgcgtcgtacttttctgacagatttagcccgcaagaaagggttccgcgtcgagaatgaactgaccgacgaagttacccacatcgtggcagaaaatctgtcacgctctgaagtattggcttggctgaaagaacacaagatggagaagaccaagcaattcgaactgctggatattagctggcttatcgaaagcatgaaagttggtaaaccggtggacaccaaggggaaataccagttggcggaatcggttgaggtgagtgcgaacccagatccgacagaaggtcgtgtaaacgagctgcctcctactatgaaaaccgtttctccgtatgcgtgtcaacgccgcaccaccctgaacaaccgtaatcaacgttttacggactcgctggaaattcttcgtgaaaattacgagttcaaacgcaacgatgatactgcgctggaatttcgtcgtgctatctccgtgctgaaaagccttccgtttgaggtacgtagcctgaaagacacggaaggattgccctggatcggtgatgaagtcaaagggattatggaagaaatcatcgaggtcggggagtcgcgtgaagtgcaggccgtgctcaatgatgagtggtatcaaagcttccaccgctttaagagtgtctttggagtgggggtgaagacagcagacgtttggtaccgtatgggtctgcgcaccctcgaggatgttcgttccagcaagaccctgaagttgaccccgatgcagaaagtaggtctgctgtattatgaagatcttgctcgcggcgttacgcgtgccgaagctgacgcgatttggctgctggttcaggatgcagtcgcaactttcgacccggatgcgatcgtggagattgtcggtggatttcgtcgtgggaaacctcagggtcacgacgttgatctgcttatcagttctccgggagctgagaaagagcaagaagaccaactcctgcagaaagtgatgaatctgtggaagaaacaagggttgttgctgtacggtcgtctggaatggacccagtgggaagatgggggttcgccttccggtaaggctgacgagggtgacgcgggtgcgaaatgctttctgatcctcaaactttatgatcatctggtgcgtaaaagcaaatggaacatgccgacgggttcgaacgtgggcgagtccaaaccgtggaaagcaattcgcgtagatctgctgcgttgcccctatggcagttttgcgtttgcgatgttgcagtggaccggaagccgcatgttccgtcgtgatctgcgttggtacgccactgacgagaagaacatgatgctggacaatcattcgctgtatgacctgaccaagggtatcttcctccctgctaaatcggaagaggaaattttcgcacatctggggcttgaatacctggaaccgttcgaacgtaacgca

SEQ ID NO: 3440 - protein, 529 aa, synthetic construct
  REGION 1..529: note = Variant of terminal deoxynucleotidyltransferase
MHHHHHHGGSGSHGIRTIDSDFGKKQQKKGDNHDSSATYEIKFHEFVLFILEEKMGATRRTFLTDLARKKGFRVENELTDEVTHIVAENLSRSEVLAWLKEHKMEKTKQFELLDISWLIESMKVGKPVDTKGKYQLAESVEVSANPDPTEGRVNELPPTMKTVSPYACQRRTTLNNRNQRFTDSLEILRENYEFKRNDDTALEFRRAISVLKSLPFEVRSLKDTEGLPWIGDEVKGIMEEIIEVGESREVQAVLNDEWYQSFHRFKSVFGVGVKTADVWYRMGLRTLEDVRSSKTLKLTPMQKVGLLYYEDLARGVTRAEADAIWLLVQDAVATFDPDAIVEIVGGFRRGKPQGHDVDLLISSPGAEKEQEDQLLQKVMNLWKKQGLLLYGRLEWTQWEDGGSPSGKADEGDAGAKCFLILKLYDHLVRKSKWNMPTGSNVGESKPWKAIRVDLLRCPYGSFAFAMLQWTGSRMFRRDLRWYATDEKNMMLDNHSLYDLTKGIFLPAKSEEEIFAHLGLEYLEPFERNA

SEQ ID NO: 3441 - DNA, 1587 bp, synthetic construct
  misc_feature 1..1587: note = Variant of terminal deoxynucleotidyltransferase
  source 1..1587: mol_type = other DNA
atgcaccatcatcatcatcatggcggtagcggcagccacggcattcgtaccatcgattcggacttcgggaagaaacagcagaaaaaaggcgataaccacgatagttccgccacttatgaaatcaaatttcacgagtttgtgctgttcattctcgaagaaaaaatgggtgcgacgcgtcgtacttttctgacagatttagcccgcaagaaagggttccgcgtcgagaatgaactgaccgacgaagttacccacatcgtggcagaaaatctgtcacgctctgaagtattggcttggctgaaagaacacaagatggagaagaccaagcaattcgaactgctggatattagctggcttatcgaaagcatgaaagttggtaaaccggtggacaccaaggggaaataccagttggcggaatcggttgaggtgagtgcgaacccagatccgacagaaggtcgtgtaaacgagctgcctcctactatgaaaaccgtttctccgtatgcgtgtcaacgccgcaccaccctgaacaaccgtaatcaacgttttacggactcgctggaaattcttcgtgaaaattacgagttcaaacgcaacgatgatactgcgctggaatttcgtcgtgctatctccgtgctgaaaagccttccgtttgaggtacgtagcctgaaagacacggaaggattgccctggatcggtgatgaagtcaaagggattatggaagaaatcatcgaggtcggggagtcgcgtgaagtgcaggccgtgctcaatgatgagtggtatcaaagcttccaccgctttaagagtttgtttggagtgggggtgaagacagcagacaagtggtaccgtatgggtctgcgcaccctcgaggatgttcgttccagcaagaccctgaagttgaccccgatgcagaaagtaggtctgctgtattatgaagatcttgctcgcggcgttacgcgtgccgaagctgacgcgatttggctgctggttcaggatgcagtcgcaactttcgacccggatgcgatcgtggagattgtcggtggatttcgtcgtgggaaacctcagggtcacgacgttgatctgcttatcagttctccgggagctgagaaagagcaagaagaccaactcctgcagaaagtgatgaatctgtggaagaaacaagggttgttgctgtacggtcgtctggaatggacccagtgggaagatgggggttcgccttccggtaaggctgacgagggtgacgcgggtgcgaaatgctttctgatcctcaaactttatgatcatctggtgcgtaaaagcaaatggaacatgccgacgggttcgaacgtgggcgagtccaaaccgtggaaagcaattcgcgtagatctgctgcgttgcccctatggcagttttgcgtttgcgatgttgcagtggaccggaagccgcatgttccgtcgtgatctgcgttggtacgccactgacgagaagaacatgatgctggacaatcattcgctgtatgacctgaccaagggtatcttcctccctgctaaatcggaagaggaaattttcgcacatctggggcttgaatacctggaaccgttcgaacgtaacgca

SEQ ID NO: 3442 - protein, 529 aa, synthetic construct
  REGION 1..529: note = Variant of terminal deoxynucleotidyltransferase
MHHHHHHGGSGSHGIRTIDSDFGKKQQKKGDNHDSSATYEIKFHEFVLFILEEKMGATRRTFLTDLARKKGFRVENELTDEVTHIVAENLSRSEVLAWLKEHKMEKTKQFELLDISWLIESMKVGKPVDTKGKYQLAESVEVSANPDPTEGRVNELPPTMKTVSPYACQRRTTLNNRNQRFTDSLEILRENYEFKRNDDTALEFRRAISVLKSLPFEVRSLKDTEGLPWIGDEVKGIMEEIIEVGESREVQAVLNDEWYQSFHRFKSLFGVGVKTADKWYRMGLRTLEDVRSSKTLKLTPMQKVGLLYYEDLARGVTRAEADAIWLLVQDAVATFDPDAIVEIVGGFRRGKPQGHDVDLLISSPGAEKEQEDQLLQKVMNLWKKQGLLLYGRLEWTQWEDGGSPSGKADEGDAGAKCFLILKLYDHLVRKSKWNMPTGSNVGESKPWKAIRVDLLRCPYGSFAFAMLQWTGSRMFRRDLRWYATDEKNMMLDNHSLYDLTKGIFLPAKSEEEIFAHLGLEYLEPFERNA

SEQ ID NO: 3443 - DNA, 1587 bp, synthetic construct
  misc_feature 1..1587: note = Variant of terminal deoxynucleotidyltransferase
  source 1..1587: mol_type = other DNA
atgcaccatcatcatcatcatggcggtagcggcagccacggcattcgtaccatcgattcggacttcgggaagaaacagcagaaaaaaggcgataaccacgatagttccgccacttatgaaatcaaatttcacgagtttgtgctgttcattctcgaagaaaaaatgggtgcgacgcgtcgtacttttctgacagatttagcccgcaagaaagggttccgcgtcgagaatgaactgaccgacgaagttacccacatcgtggcagaaaatctgtcacgctctgaagtattggcttggctgaaagaacacaagatggagaagaccaagcaattcgaactgctggatattagctggcttatcgaaagcatgaaagttggtaaaccggtggacaccaaggggaaataccagttggcggaatcggttgaggtgagtgcgaacccagatccgacagaaggtcgtgtaaacgagctgcctcctactatgaaaaccgtttctccgtatgcgtgtcaacgccgcaccaccctgaacaaccgtaatcaacgttttacggactcgctggaaattcttcgtgaaaattacgagttcaaacgcaacgatgatactgcgctggaatttcgtcgtgctatctccgtgctgaaaagccttccgtttgaggtacgtagcctgaaagacacggaaggattgccctggatcggtgatgaagtcaaagggattatggaagaaatcatcgaggtcggggagtcgcgtgaagtgcaggccgtgctcaatgatgagtggtatcaaagcttccaccgctttaagagtgtctttggagtgggggtgaagacagcagacaagtggtaccgtatgggtctgcgcaccctcgaggatgttcgttccagcaagaccctgaagttgaccccgatgcagaaagatggtctgctgtattatgaagatcttgctcgcggcgttacgcgtgccgaagctgacgcgatttggctgctggttcaggatgcagtcgcaactttcgacccggatgcgatcgtggagattgtcggtggatttcgtcgtgggaaacctcagggtcacgacgttgatctgcttatcagttctccgggagctgagaaagagcaagaagaccaactcctgcagaaagtgatgaatctgtggaagaaacaagggttgttgctgtacggtcgtctggaatggacccagtgggaagatgggggttcgccttccggtaaggctgacgagggtgacgcgggtgcgaaatgctttctgatcctcaaactttatgatcatctggtgcgtaaaagcaaatggaacatgccgacgggttcgaacgtgggcgagtccaaaccgtggaaagcaattcgcgtagatctgctgcgttgcccctatggcagttttgcgtttgcgatgttgcagtggaccggaagccgcatgttccgtcgtgatctgcgttggtacgccactgacgagaagaacatgatgctggacaatcattcgctgtatgacctgaccaagggtatcttcctccctgctaaatcggaagaggaaattttcgcacatctggggcttgaatacctggaaccgttcgaacgtaacgca

SEQ ID NO: 3444 - protein, 529 aa, synthetic construct
  REGION 1..529: note = Variant of terminal deoxynucleotidyltransferase
MHHHHHHGGSGSHGIRTIDSDFGKKQQKKGDNHDSSATYEIKFHEFVLFILEEKMGATRRTFLTDLARKKGFRVENELTDEVTHIVAENLSRSEVLAWLKEHKMEKTKQFELLDISWLIESMKVGKPVDTKGKYQLAESVEVSANPDPTEGRVNELPPTMKTVSPYACQRRTTLNNRNQRFTDSLEILRENYEFKRNDDTALEFRRAISVLKSLPFEVRSLKDTEGLPWIGDEVKGIMEEIIEVGESREVQAVLNDEWYQSFHRFKSVFGVGVKTADKWYRMGLRTLEDVRSSKTLKLTPMQKDGLLYYEDLARGVTRAEADAIWLLVQDAVATFDPDAIVEIVGGFRRGKPQGHDVDLLISSPGAEKEQEDQLLQKVMNLWKKQGLLLYGRLEWTQWEDGGSPSGKADEGDAGAKCFLILKLYDHLVRKSKWNMPTGSNVGESKPWKAIRVDLLRCPYGSFAFAMLQWTGSRMFRRDLRWYATDEKNMMLDNHSLYDLTKGIFLPAKSEEEIFAHLGLEYLEPFERNA

SEQ ID NO: 3445 - DNA, 1587 bp, synthetic construct
  misc_feature 1..1587: note = Variant of terminal deoxynucleotidyltransferase
  source 1..1587: mol_type = other DNA
atgcaccatcatcatcatcatggcggtagcggcagccacggcattcgtaccatcgattcggacttcgggaagaaacagcagaaaaaaggcgataaccacgatagttccgccacttatgaaatcaaatttcacgagtttgtgctgttcattctcgaagaaaaaatgggtgcgacgcgtcgtacttttctgacagatttagcccgcaagaaagggttccgcgtcgagaatgaactgaccgacgaagttacccacatcgtggcagaaaatctgtcacgctctgaagtattggcttggctgaaagaacacaagatggagaagaccaagcaattcgaactgctggatattagctggcttatcgaaagcatgaaagttggtaaaccggtggacaccaaggggaaataccagttggcggaatcggttgaggtgagtgcgaacccagatccgacagaaggtcgtgtaaacgagctgcctcctactatgaaaaccgtttctccgtatgcgtgtcaacgccgcaccaccctgaacaaccgtaatcaacgttttacggactcgctggaaattcttcgtgaaaattacgagttcaaacgcaacgatgatactgcgctggaatttcgtcgtgctatctccgtgctgaaaagccttccgtttgaggtacgtagcctgaaagacacggaaggattgccctggatcggtgatgaagtcaaagggattatggaagaaatcatcgaggtcggggagtcgcgtgaagtgcaggccgtgctcaatgatgagtggtatcaaagcttccaccgctttaagagtgtctttggagtggggtgtaagacagcagacaagtggtaccgtatgggtctgcgcaccctcgaggatgttcgttccagcaagaccctgaagttgaccccgatgcagaaagtaggtctgctgtattatgaagatcttgctcgcggcgttacgcgtgccgaagctgacgcgatttggctgctggttcaggatgcagtcgcaactttcgacccggatgcgatcgtggagattgtcggtggatttcgtcgtgggaaacctcagggtcacgacgttgatctgcttatcagttctccgggagctgagaaagagcaagaagaccaactcctgcagaaagtgatgaatctgtggaagaaacaagggttgttgctgtacggtcgtctggaatggacccagtgggaagatgggggttcgccttccggtaaggctgacgagggtgacgcgggtgcgaaatgctttctgatcctcaaactttatgatcatctggtgcgtaaaagcaaatggaacatgccgacgggttcgaacgtgggcgagtccaaaccgtggaaagcaattcgcgtagatctgctgcgttgcccctatggcagttttgcgtttgcgatgttgcagtggaccggaagccgcatgttccgtcgtgatctgcgttggtacgccactgacgagaagaacatgatgctggacaatcattcgctgtatgacctgaccaagggtatcttcctccctgctaaatcggaagaggaaattttcgcacatctggggcttgaatacctggaaccgttcgaacgtaacgca

SEQ ID NO: 3446 - protein, 529 aa, synthetic construct
  REGION 1..529: note = Variant of terminal deoxynucleotidyltransferase
MHHHHHHGGSGSHGIRTIDSDFGKKQQKKGDNHDSSATYEIKFHEFVLFILEEKMGATRRTFLTDLARKKGFRVENELTDEVTHIVAENLSRSEVLAWLKEHKMEKTKQFELLDISWLIESMKVGKPVDTKGKYQLAESVEVSANPDPTEGRVNELPPTMKTVSPYACQRRTTLNNRNQRFTDSLEILRENYEFKRNDDTALEFRRAISVLKSLPFEVRSLKDTEGLPWIGDEVKGIMEEIIEVGESREVQAVLNDEWYQSFHRFKSVFGVGCKTADKWYRMGLRTLEDVRSSKTLKLTPMQKVGLLYYEDLARGVTRAEADAIWLLVQDAVATFDPDAIVEIVGGFRRGKPQGHDVDLLISSPGAEKEQEDQLLQKVMNLWKKQGLLLYGRLEWTQWEDGGSPSGKADEGDAGAKCFLILKLYDHLVRKSKWNMPTGSNVGESKPWKAIRVDLLRCPYGSFAFAMLQWTGSRMFRRDLRWYATDEKNMMLDNHSLYDLTKGIFLPAKSEEEIFAHLGLEYLEPFERNA

SEQ ID NO: 3447 - DNA, 1587 bp, synthetic construct
  misc_feature 1..1587: note = Variant of terminal deoxynucleotidyltransferase
  source 1..1587: mol_type = other DNA
atgcaccatcatcatcatcatggcggtagcggcagccacggcattcgtaccatcgattcggacttcgggaagaaacagcagaaaaaaggcgataaccacgatagttccgccacttatgaaatcaaatttcacgagtttgtgctgttcattctcgaagaaaaaatgggtgcgacgcgtcgtacttttctgacagatttagcccgcaagaaagggttccgcgtcgagaatgaactgaccgacgaagttacccacatcgtggcagaaaatctgtcacgctctgaagtattggcttggctgaaagaacacaagatggagaagaccaagcaattcgaactgctggatattagctggcttatcgaaagcatgaaagttggtaaaccggtggacaccaaggggaaataccagttggcggaatcggttgaggtgagtgcgaacccagatccgacagaaggtcgtgtaaacgagctgcctcctactatgaaaaccgtttctccgtatgcgtgtcaacgccgcaccaccctgaacaaccgtaatcaacgttttacggactcgctggaaattcttcgtgaaaattacgagttcaaacgcaacgatgatactgcgctggaatttcgtcgtgctatctccgtgctgaaaagccttccgtttgaggtacgtagcctgaaagacacggaaggattgccctggatcggtgatgaagtcaaagggattatggaagaaatcatcgaggtcggggagtcgcgtgaagtgcaggccgtgctcaatgatgagtggtatcaaagcttccaccgcttttttagtgtctttggagtgggggtgaagacagcagacaagtggtaccgtatgggtctgcgcaccctcgaggatgttcgttccagcaagaccctgaagttgaccccgatgcagaaagtaggtctgctgtattatgaagatcttgctcgcggcgttacgcgtgccgaagctgacgcgatttggctgctggttcaggatgcagtcgcaactttcgacccggatgcgatcgtggagattgtcggtggatttcgtcgtgggaaacctcagggtcacgacgttgatctgcttatcagttctccgggagctgagaaagagcaagaagaccaactcctgcagaaagtgatgaatctgtggaagaaacaagggttgttgctgtacggtcgtctggaatggacccagtgggaagatgggggttcgccttccggtaaggctgacgagggtgacgcgggtgcgaaatgctttctgatcctcaaactttatgatcatctggtgcgtaaaagcaaatggaacatgccgacgggttcgaacgtgggcgagtccaaaccgtggaaagcaattcgcgtagatctgctgcgttgcccctatggcagttttgcgtttgcgatgttgcagtggaccggaagccgcatgttccgtcgtgatctgcgttggtacgccactgacgagaagaacatgatgctggacaatcattcgctgtatgacctgaccaagggtatcttcctccctgctaaatcggaagaggaaattttcgcacatctggggcttgaatacctggaaccgttcgaacgtaacgca

SEQ ID NO: 3448 - protein, 529 aa, synthetic construct
  REGION 1..529: note = Variant of terminal deoxynucleotidyltransferase
MHHHHHHGGSGSHGIRTIDSDFGKKQQKKGDNHDSSATYEIKFHEFVLFILEEKMGATRRTFLTDLARKKGFRVENELTDEVTHIVAENLSRSEVLAWLKEHKMEKTKQFELLDISWLIESMKVGKPVDTKGKYQLAESVEVSANPDPTEGRVNELPPTMKTVSPYACQRRTTLNNRNQRFTDSLEILRENYEFKRNDDTALEFRRAISVLKSLPFEVRSLKDTEGLPWIGDEVKGIMEEIIEVGESREVQAVLNDEWYQSFHRFFSVFGVGVKTADKWYRMGLRTLEDVRSSKTLKLTPMQKVGLLYYEDLARGVTRAEADAIWLLVQDAVATFDPDAIVEIVGGFRRGKPQGHDVDLLISSPGAEKEQEDQLLQKVMNLWKKQGLLLYGRLEWTQWEDGGSPSGKADEGDAGAKCFLILKLYDHLVRKSKWNMPTGSNVGESKPWKAIRVDLLRCPYGSFAFAMLQWTGSRMFRRDLRWYATDEKNMMLDNHSLYDLTKGIFLPAKSEEEIFAHLGLEYLEPFERNA

SEQ ID NO: 3449 - DNA, 1587 bp, synthetic construct
  misc_feature 1..1587: note = Variant of terminal deoxynucleotidyltransferase
  source 1..1587: mol_type = other DNA
atgcaccatcatcatcatcatggcggtagcggcagccacggcattcgtaccatcgattcggacttcgggaagaaacagcagaaaaaaggcgataaccacgatagttccgccacttatgaaatcaaatttcacgagtttgtgctgttcattctcgaagaaaaaatgggtgcgacgcgtcgtacttttctgacagatttagcccgcaagaaagggttccgcgtcgagaatgaactgaccgacgaagttacccacatcgtggcagaaaatctgtcacgctctgaagtattggcttggctgaaagaacacaagatggagaagaccaagcaattcgaactgctggatattagctggcttatcgaaagcatgaaagttggtaaaccggtggacaccaaggggaaataccagttggcggaatcggttgaggtgagtgcgaacccagatccgacagaaggtcgtgtaaacgagctgcctcctactatgaaaaccgtttctccgtatgcgtgtcaacgccgcaccaccctgaacaaccgtaatcaacgttttacggactcgctggaaattcttcgtgaaaattacgagttcaaacgcaacgatgatactgcgctggaatttcgtcgtgctatctccgtgctgaaaagccttccgtttgaggtacgtagcctgaaagacacggaaggattgccctggatcggtgatgaagtcaaagggattatggaagaaatcatcgaggtcggggagtcgcgtgaagtgcaggccgtgctcaatgatgagtggtatcaaagcttccaccgctttaagcatgtctttggagtgggggtgaagacagcagacaagtggtaccgtatgggtctgcgcaccctcgaggatgttcgttccagcaagaccctgaagttgaccccgatgcagaaagtaggtctgctgtattatgaagatcttgctcgcggcgttacgcgtgccgaagctgacgcgatttggctgctggttcaggatgcagtcgcaactttcgacccggatgcgatcgtggagattgtcggtggatttcgtcgtgggaaacctcagggtcacgacgttgatctgcttatcagttctccgggagctgagaaagagcaagaagaccaactcctgcagaaagtgatgaatctgtggaagaaacaagggttgttgctgtacggtcgtctggaatggacccagtgggaagatgggggttcgccttccggtaaggctgacgagggtgacgcgggtgcgaaatgctttctgatcctcaaactttatgatcatctggtgcgtaaaagcaaatggaacatgccgacgggttcgaacgtgggcgagtccaaaccgtggaaagcaattcgcgtagatctgctgcgttgcccctatggcagttttgcgtttgcgatgttgcagtggaccggaagccgcatgttccgtcgtgatctgcgttggtacgccactgacgagaagaacatgatgctggacaatcattcgctgtatgacctgaccaagggtatcttcctccctgctaaatcggaagaggaaattttcgcacatctggggcttgaatacctggaaccgttcgaacgtaacgca

SEQ ID NO: 3450 - protein, 529 aa, synthetic construct
  REGION 1..529: note = Variant of terminal deoxynucleotidyltransferase
MHHHHHHGGSGSHGIRTIDSDFGKKQQKKGDNHDSSATYEIKFHEFVLFILEEKMGATRRTFLTDLARKKGFRVENELTDEVTHIVAENLSRSEVLAWLKEHKMEKTKQFELLDISWLIESMKVGKPVDTKGKYQLAESVEVSANPDPTEGRVNELPPTMKTVSPYACQRRTTLNNRNQRFTDSLEILRENYEFKRNDDTALEFRRAISVLKSLPFEVRSLKDTEGLPWIGDEVKGIMEEIIEVGESREVQAVLNDEWYQSFHRFKHVFGVGVKTADKWYRMGLRTLEDVRSSKTLKLTPMQKVGLLYYEDLARGVTRAEADAIWLLVQDAVATFDPDAIVEIVGGFRRGKPQGHDVDLLISSPGAEKEQEDQLLQKVMNLWKKQGLLLYGRLEWTQWEDGGSPSGKADEGDAGAKCFLILKLYDHLVRKSKWNMPTGSNVGESKPWKAIRVDLLRCPYGSFAFAMLQWTGSRMFRRDLRWYATDEKNMMLDNHSLYDLTKGIFLPAKSEEEIFAHLGLEYLEPFERNA

SEQ ID NO: 3451 - DNA, 1587 bp, synthetic construct
  misc_feature 1..1587: note = Variant of terminal deoxynucleotidyltransferase
  source 1..1587: mol_type = other DNA
atgcaccatcatcatcatcatggcggtagcggcagccacggcattcgtaccatcgattcggacttcgggaagaaacagcagaaaaaaggcgataaccacgatagttccgccacttatgaaatcaaatttcacgagtttgtgctgttcattctcgaagaaaaaatgggtgcgacgcgtcgtacttttctgacagatttagcccgcaagaaagggttccgcgtcgagaatgaactgaccgacgaagttacccacatcgtggcagaaaatctgtcacgctctgaagtattggcttggctgaaagaacacaagatggagaagaccaagcaattcgaactgctggatattagctggcttatcgaaagcatgaaagttggtaaaccggtggacaccaaggggaaataccagttggcggaatcggttgaggtgagtgcgaacccagatccgacagaaggtcgtgtaaacgagctgcctcctactatgaaaaccgtttctccgtatgcgtgtcaacgccgcaccaccctgaacaaccgtaatcaacgttttacggactcgctggaaattcttcgtttgaattacgagttcaaacgcaacgatgatactgcgctggaatttcgtcgtgctatctccgtgctgaaaagccttccgtttgaggtacgtagcctgaaagacacggaaggattgccctggatcggtgatgaagtcaaagggattatggaagaaatcatcgaggtcggggagtcgcgtgaagtgcaggccgtgctcaatgatgagtggtatcaaagcttccaccgctttaagagtgtctttggagtgggggtgaagacagcagacaagtggtaccgtatgggtctgcgcaccctcgaggatgttcgttccagcaagaccctgaagttgaccccgatgcagaaagtaggtctgctgtattatgaagatcttgctcgcggcgttacgcgtgccgaagctgacgcgatttggctgctggttcaggatgcagtcgcaactttcgacccggatgcgatcgtggagattgtcggtggatttcgtcgtgggaaacctcagggtcacgacgttgatctgcttatcagttctccgggagctgagaaagagcaagaagaccaactcctgcagaaagtgatgaatctgtggaagaaacaagggttgttgctgtacggtcgtctggaatggacccagtgggaagatgggggttcgccttccggtaaggctgacgagggtgacgcgggtgcgaaatgctttctgatcctcaaactttatgatcatctggtgcgtaaaagcaaatggaacatgccgacgggttcgaacgtgggcgagtccaaaccgtggaaagcaattcgcgtagatctgctgcgttgcccctatggcagttttgcgtttgcgatgttgcagtggaccggaagccgcatgttccgtcgtgatctgcgttggtacgccactgacgagaagaacatgatgctggacaatcattcgctgtatgacctgaccaagggtatcttcctccctgctaaatcggaagaggaaattttcgcacatctggggcttgaatacctggaaccgttcgaacgtaacgca

SEQ ID NO: 3452 - protein, 529 aa, synthetic construct
  REGION 1..529: note = Variant of terminal deoxynucleotidyltransferase
MHHHHHHGGSGSHGIRTIDSDFGKKQQKKGDNHDSSATYEIKFHEFVLFILEEKMGATRRTFLTDLARKKGFRVENELTDEVTHIVAENLSRSEVLAWLKEHKMEKTKQFELLDISWLIESMKVGKPVDTKGKYQLAESVEVSANPDPTEGRVNELPPTMKTVSPYACQRRTTLNNRNQRFTDSLEILRLNYEFKRNDDTALEFRRAISVLKSLPFEVRSLKDTEGLPWIGDEVKGIMEEIIEVGESREVQAVLNDEWYQSFHRFKSVFGVGVKTADKWYRMGLRTLEDVRSSKTLKLTPMQKVGLLYYEDLARGVTRAEADAIWLLVQDAVATFDPDAIVEIVGGFRRGKPQGHDVDLLISSPGAEKEQEDQLLQKVMNLWKKQGLLLYGRLEWTQWEDGGSPSGKADEGDAGAKCFLILKLYDHLVRKSKWNMPTGSNVGESKPWKAIRVDLLRCPYGSFAFAMLQWTGSRMFRRDLRWYATDEKNMMLDNHSLYDLTKGIFLPAKSEEEIFAHLGLEYLEPFERNA

SEQ ID NO: 3453 - DNA, 1587 bp, synthetic construct
  misc_feature 1..1587: note = Variant of terminal deoxynucleotidyltransferase
  source 1..1587: mol_type = other DNA
atgcaccatcatcatcatcatggcggtagcggcagccacggcattcgtaccatcgattcggacttcgggaagaaacagcagaaaaaaggcgataaccacgatagttccgccacttatgaaatcaaatttcacgagtttgtgctgttcattctcgaagaaaaaatgggtgcgacgcgtcgtacttttctgacagatttagcccgcaagaaagggttccgcgtcgagaatgaactgaccgacgaagttacccacatcgtggcagaaaatctgtcacgctctgaagtattggcttggctgaaagaacacaagatggagaagaccaagcaattcgaactgctggatattagctggcttatcgaaagcatgaaagttggtaaaccggtggacaccaaggggaaataccagttggcggaatcggttgaggtgagtgcgaacccagatccgacagaaggtcgtgtaaacgagctgcctcctactatgaaaaccgtttctccgtatgcgtgtcaacgccgcaccaccctgaacaaccgtaatcaacgttttacggactcgctggaaattcttcgtgaaaattacgagttcaaacgcaacgatgatactgcgctggaatttcgtcgtgctatctccgtgctgaaaagccttccgtttgaggtacgtagcctgaaagacacggaaggattgccctggatcggtgatgaagtcaaagggattatggaagaaatcatcgaggtcggggagtcgcgtgaagtgcaggccgtgctcaatgatgagtggtatcaaagcttccaccgctttaagagtgtctttggagtgggggtgaagacagcagacaagtggtaccgtatgggtctgcgcaccctcgaggatgttcgttccagcaagaccctgaagttgaccccgatgcagaaagtaggtctgctgtattatgaagatcttgctcgcggcgttacgcgtgccgaagctgacgcgatttggctgctggttcaggatgcagtcgcaactttcgacccggatgcgatcgtggagattgtcggtggatttcgtcgtgggaaacctcagggtcacgacgttgatggtcttatcagttctccgggagctgagaaagagcaagaagaccaactcctgcagaaagtgatgaatctgtggaagaaacaagggttgttgctgtacggtcgtctggaatggacccagtgggaagatgggggttcgccttccggtaaggctgacgagggtgacgcgggtgcgaaatgctttctgatcctcaaactttatgatcatctggtgcgtaaaagcaaatggaacatgccgacgggttcgaacgtgggcgagtccaaaccgtggaaagcaattcgcgtagatctgctgcgttgcccctatggcagttttgcgtttgcgatgttgcagtggaccggaagccgcatgttccgtcgtgatctgcgttggtacgccactgacgagaagaacatgatgctggacaatcattcgctgtatgacctgaccaagggtatcttcctccctgctaaatcggaagaggaaattttcgcacatctggggcttgaatacctggaaccgttcgaacgtaacgca

SEQ ID NO: 3454 - protein, 529 aa, synthetic construct
  REGION 1..529: note = Variant of terminal deoxynucleotidyltransferase
MHHHHHHGGSGSHGIRTIDSDFGKKQQKKGDNHDSSATYEIKFHEFVLFILEEKMGATRRTFLTDLARKKGFRVENELTDEVTHIVAENLSRSEVLAWLKEHKMEKTKQFELLDISWLIESMKVGKPVDTKGKYQLAESVEVSANPDPTEGRVNELPPTMKTVSPYACQRRTTLNNRNQRFTDSLEILRENYEFKRNDDTALEFRRAISVLKSLPFEVRSLKDTEGLPWIGDEVKGIMEEIIEVGESREVQAVLNDEWYQSFHRFKSVFGVGVKTADKWYRMGLRTLEDVRSSKTLKLTPMQKVGLLYYEDLARGVTRAEADAIWLLVQDAVATFDPDAIVEIVGGFRRGKPQGHDVDGLISSPGAEKEQEDQLLQKVMNLWKKQGLLLYGRLEWTQWEDGGSPSGKADEGDAGAKCFLILKLYDHLVRKSKWNMPTGSNVGESKPWKAIRVDLLRCPYGSFAFAMLQWTGSRMFRRDLRWYATDEKNMMLDNHSLYDLTKGIFLPAKSEEEIFAHLGLEYLEPFERNA

SEQ ID NO: 3455 - DNA, 1587 bp, synthetic construct
  misc_feature 1..1587: note = Variant of terminal deoxynucleotidyltransferase
  source 1..1587: mol_type = other DNA
atgcaccatcatcatcatcatggcggtagcggcagccacggcattcgtaccatcgattcggacttcgggaagaaacagcagaaaaaaggcgataaccacgatagttccgccacttatgaaatcaaatttcacgagtttgtgctgttcattctcgaagaaaaaatgggtgcgacgcgtcgtacttttctgacagatttagcccgcaagaaagggttccgcgtcgagaatgaactgaccgacgaagttacccacatcgtggcagaaaatctgtcacgctctgaagtattggcttggctgaaagaacacaagatggagaagaccaagcaattcgaactgctggatattagctggcttatcgaaagcatgaaagttggtaaaccggtggacaccaaggggaaataccagttggcggaatcggttgaggtgagtgcgaacccagatccgacagaaggtcgtgtaaacgagctgcctcctactatgaaaaccgtttctccgtatgcgtgtcaacgccgcaccaccctgaacaaccgtaatcaacgttttacggactcgctggaaattcttcgtgaaaattacgagttcaaacgcaacgatgatactgcgctggaatttcgtcgtgctatctccgtgctgaaaagccttccgtttgaggtacgtagcctgaaagacacggaaggattgccctggatcggtgatgaagtcaaagggattatggaagaaatcatcgaggtcggggagtcgcgtgaagtgcaggccgtgctcaatgatgagtggtatcaaagcttcatgcgctttaagagtgtctttggagtgggggtgaagacagcagacaagtggtaccgtatgggtctgcgcaccctcgaggatgttcgttccagcaagaccctgaagttgaccccgatgcagaaagtaggtctgctgtattatgaagatcttgctcgcggcgttacgcgtgccgaagctgacgcgatttggctgctggttcaggatgcagtcgcaactttcgacccggatgcgatcgtggagattgtcggtggatttcgtcgtgggaaacctcagggtcacgacgttgatctgcttatcagttctccgggagctgagaaagagcaagaagaccaactcctgcagaaagtgatgaatctgtggaagaaacaagggttgttgctgtacggtcgtctggaatggacccagtgggaagatgggggttcgccttccggtaaggctgacgagggtgacgcgggtgcgaaatgctttctgatcctcaaactttatgatcatctggtgcgtaaaagcaaatggaacatgccgacgggttcgaacgtgggcgagtccaaaccgtggaaagcaattcgcgtagatctgctgcgttgcccctatggcagttttgcgtttgcgatgttgcagtggaccggaagccgcatgttccgtcgtgatctgcgttggtacgccactgacgagaagaacatgatgctggacaatcattcgctgtatgacctgaccaagggtatcttcctccctgctaaatcggaagaggaaattttcgcacatctggggcttgaatacctggaaccgttcgaacgtaacgca

SEQ ID NO: 3456 - protein, 529 aa, synthetic construct
  REGION 1..529: note = Variant of terminal deoxynucleotidyltransferase
MHHHHHHGGSGSHGIRTIDSDFGKKQQKKGDNHDSSATYEIKFHEFVLFILEEKMGATRRTFLTDLARKKGFRVENELTDEVTHIVAENLSRSEVLAWLKEHKMEKTKQFELLDISWLIESMKVGKPVDTKGKYQLAESVEVSANPDPTEGRVNELPPTMKTVSPYACQRRTTLNNRNQRFTDSLEILRENYEFKRNDDTALEFRRAISVLKSLPFEVRSLKDTEGLPWIGDEVKGIMEEIIEVGESREVQAVLNDEWYQSFMRFKSVFGVGVKTADKWYRMGLRTLEDVRSSKTLKLTPMQKVGLLYYEDLARGVTRAEADAIWLLVQDAVATFDPDAIVEIVGGFRRGKPQGHDVDLLISSPGAEKEQEDQLLQKVMNLWKKQGLLLYGRLEWTQWEDGGSPSGKADEGDAGAKCFLILKLYDHLVRKSKWNMPTGSNVGESKPWKAIRVDLLRCPYGSFAFAMLQWTGSRMFRRDLRWYATDEKNMMLDNHSLYDLTKGIFLPAKSEEEIFAHLGLEYLEPFERNA

SEQ ID NO: 3457 - DNA, 1587 bp, synthetic construct
  misc_feature 1..1587: note = Variant of terminal deoxynucleotidyltransferase
  source 1..1587: mol_type = other DNA
atgcaccatcatcatcatcatggcggtagcggcagccacggcattcgtaccatcgattcggacttcgggaagaaacagcagaaaaaaggcgataaccacgatagttccgccacttatgaaatcaaatttcacgagtttgtgctgttcattctcgaagaaaaaatgggtgcgacgcgtcgtacttttctgacagatttagcccgcaagaaagggttccgcgtcgagaatgaactgaccgacgaagttacccacatcgtggcagaaaatctgtcacgctctgaagtattggcttggctgaaagaacacaagatggagaagaccaagcaattcgaactgctggatattagctggcttatcgaaagcatgaaagttggtaaaccggtggacaccaaggggaaataccagttggcggaatcggttgaggtgagtgcgaacccagatccgacagaaggtcgtgtaaacgagctgcctcctactatgaaaaccgtttctccgtatgcgtgtcaacgccgcaccaccctgaacaaccgtaatcaacgttttacggactcgctggaaattcttcgtgaaaattacgagttcaaaatgaacgatgatactgcgctggaatttcgtcgtgctatctccgtgctgaaaagccttccgtttgaggtacgtagcctgaaagacacggaaggattgccctggatcggtgatgaagtcaaagggattatggaagaaatcatcgaggtcggggagtcgcgtgaagtgcaggccgtgctcaatgatgagtggtatcaaagcttccaccgctttaagagtgtctttggagtgggggtgaagacagcagacaagtggtaccgtatgggtctgcgcaccctcgaggatgttcgttccagcaagaccctgaagttgaccccgatgcagaaagtaggtctgctgtattatgaagatcttgctcgcggcgttacgcgtgccgaagctgacgcgatttggctgctggttcaggatgcagtcgcaactttcgacccggatgcgatcgtggagattgtcggtggatttcgtcgtgggaaacctcagggtcacgacgttgatctgcttatcagttctccgggagctgagaaagagcaagaagaccaactcctgcagaaagtgatgaatctgtggaagaaacaagggttgttgctgtacggtcgtctggaatggacccagtgggaagatgggggttcgccttccggtaaggctgacgagggtgacgcgggtgcgaaatgctttctgatcctcaaactttatgatcatctggtgcgtaaaagcaaatggaacatgccgacgggttcgaacgtgggcgagtccaaaccgtggaaagcaattcgcgtagatctgctgcgttgcccctatggcagttttgcgtttgcgatgttgcagtggaccggaagccgcatgttccgtcgtgatctgcgttggtacgccactgacgagaagaacatgatgctggacaatcattcgctgtatgacctgaccaagggtatcttcctccctgctaaatcggaagaggaaattttcgcacatctggggcttgaatacctggaaccgttcgaacgtaacgca

SEQ ID NO: 3458 - protein, 529 aa, synthetic construct
  REGION 1..529: note = Variant of terminal deoxynucleotidyltransferase
MHHHHHHGGSGSHGIRTIDSDFGKKQQKKGDNHDSSATYEIKFHEFVLFILEEKMGATRRTFLTDLARKKGFRVENELTDEVTHIVAENLSRSEVLAWLKEHKMEKTKQFELLDISWLIESMKVGKPVDTKGKYQLAESVEVSANPDPTEGRVNELPPTMKTVSPYACQRRTTLNNRNQRFTDSLEILRENYEFKMNDDTALEFRRAISVLKSLPFEVRSLKDTEGLPWIGDEVKGIMEEIIEVGESREVQAVLNDEWYQSFHRFKSVFGVGVKTADKWYRMGLRTLEDVRSSKTLKLTPMQKVGLLYYEDLARGVTRAEADAIWLLVQDAVATFDPDAIVEIVGGFRRGKPQGHDVDLLISSPGAEKEQEDQLLQKVMNLWKKQGLLLYGRLEWTQWEDGGSPSGKADEGDAGAKCFLILKLYDHLVRKSKWNMPTGSNVGESKPWKAIRVDLLRCPYGSFAFAMLQWTGSRMFRRDLRWYATDEKNMMLDNHSLYDLTKGIFLPAKSEEEIFAHLGLEYLEPFERNA

SEQ ID NO: 3459 - DNA, 1587 bp, synthetic construct
  misc_feature 1..1587: note = Variant of terminal deoxynucleotidyltransferase
  source 1..1587: mol_type = other DNA
atgcaccatcatcatcatcatggcggtagcggcagccacggcattcgtaccatcgattcggacttcgggaagaaacagcagaaaaaaggcgataaccacgatagttccgccacttatgaaatcaaatttcacgagtttgtgctgttcattctcgaagaaaaaatgggtgcgacgcgtcgtacttttctgacagatttagcccgcaagaaagggttccgcgtcgagaatgaactgaccgacgaagttacccacatcgtggcagaaaatctgtcacgctctgaagtattggcttggctgaaagaacacaagatggagaagaccaagcaattcgaactgctggatattagctggcttatcgaaagcatgaaagttggtaaaccggtggacaccaaggggaaataccagttggcggaatcggttgaggtgagtgcgaacccagatccgacagaaggtcgtgtaaacgagctgcctcctactatgaaaaccgtttctccgtatgcgtgtcaacgccgcaccaccctgaacaaccgtaatcaacgttttacggactcgctggaaattcttcgtgaaaattacgagttcaaacgcaacgatgatactgcgctggaatttcgtcgtgctatctccgtgctgaaaagccttccgtttgaggtacgtagcctgaaagacacggaaggattgccctggatcggtgatgaagtcaaagggattatggaagaaatcatcgaggtcggggagtcgcgtgaagtgcaggccgtgctcaatgatgagtggtatcaaagcttccaccgctttaagagtgtctttggagtgggggtgaagacagcagacaagtggtaccgtatgggtctgcgcaccctcgaggatgttcgttccagcaagaccctgaagttgaccccgatgcagaaagtaggtctgctgtattatgaagatcttgctcgcggcgttacgcgtgccgaagctgacgcgatttggctgctggttcaggatgcagtcgcaactttcgacccggatgcgatcgtggagattgtcggtggatttcgtcgtgggaaacctcagggtcacgacgttgatctgcttatcagttctccgggagctgagaaagagcaagaagaccaactcctgcagaaagtgatgaatctgtggaagaaacaagggttgttgctgtacggtcgtctggaatggacccagtgggaagatgggggttcgccttccggtaaggctgacgagggtgacgcgggtgcgaaatgctttctgatcctcaaactttatgatcatctggtgcgtaaaagcaaatggaacatgccgacgggttcgaacgtgggcgagtccaaaccgtggaaagcaattcgcgtagatctgctgcgttgcccctatggcagttttgcgtttgcgatgttgcattggaccggaagccgcatgttccgtcgtgatctgcgttggtacgccactgacgagaagaacatgatgctggacaatcattcgctgtatgacctgaccaagggtatcttcctccctgctaaatcggaagaggaaattttcgcacatctggggcttgaatacctggaaccgttcgaacgtaacgca

SEQ ID NO: 3460 - protein, 529 aa, synthetic construct
  REGION 1..529: note = Variant of terminal deoxynucleotidyltransferase
MHHHHHHGGSGSHGIRTIDSDFGKKQQKKGDNHDSSATYEIKFHEFVLFILEEKMGATRRTFLTDLARKKGFRVENELTDEVTHIVAENLSRSEVLAWLKEHKMEKTKQFELLDISWLIESMKVGKPVDTKGKYQLAESVEVSANPDPTEGRVNELPPTMKTVSPYACQRRTTLNNRNQRFTDSLEILRENYEFKRNDDTALEFRRAISVLKSLPFEVRSLKDTEGLPWIGDEVKGIMEEIIEVGESREVQAVLNDEWYQSFHRFKSVFGVGVKTADKWYRMGLRTLEDVRSSKTLKLTPMQKVGLLYYEDLARGVTRAEADAIWLLVQDAVATFDPDAIVEIVGGFRRGKPQGHDVDLLISSPGAEKEQEDQLLQKVMNLWKKQGLLLYGRLEWTQWEDGGSPSGKADEGDAGAKCFLILKLYDHLVRKSKWNMPTGSNVGESKPWKAIRVDLLRCPYGSFAFAMLHWTGSRMFRRDLRWYATDEKNMMLDNHSLYDLTKGIFLPAKSEEEIFAHLGLEYLEPFERNA

SEQ ID NO: 3461 - DNA, 1587 bp, synthetic construct
  misc_feature 1..1587: note = Variant of terminal deoxynucleotidyltransferase
  source 1..1587: mol_type = other DNA
atgcaccatcatcatcatcatggcggtagcggcagccacggcattcgtaccatcgattcggacttcgggaagaaacagcagaaaaaaggcgataaccacgatagttccgccacttatgaaatcaaatttcacgagtttgtgctgttcattctcgaagaaaaaatgggtgcgacgcgtcgtacttttctgacagatttagcccgcaagaaagggttccgcgtcgagaatgaactgaccgacgaagttacccacatcgtggcagaaaatctgtcacgctctgaagtattggcttggctgaaagaacacaagatggagaagaccaagcaattcgaactgctggatattagctggcttatcgaaagcatgaaagttggtaaaccggtggacaccaaggggaaataccagttggcggaatcggttgaggtgagtgcgaacccagatccgacagaaggtcgtgtaaacgagctgcctcctactatgaaaaccgtttctccgtatgcgtgtcaacgccgcaccaccctgaacaaccgtaatcaacgttttacggactcgctggaaattcttcgtgaaaattacgagttcaaacgcaacgatgatactgcgctggaatttcgtcgtgctatctccgtgctgaaaagccttccgtttgaggtacgtagcctgaaagacacggaaggattgccctggatcggtgatgaagtcaaagggattatggaagaaatcatcgaggtcggggagtcgcgtgaagtgcaggccgtgctcaatgatgagtggtatcaaagcttccaccgctttaagagtgtctttggagtgggggtgaagacagcagacaagtggtaccgtatgggtctgcgcaccctcgaggatgttcgttccagcaagaccctgaagttgaccccgatgcagaaagtaggtctgctgtattatgaagatcttgctcgcggcgttacgcgtgccgaagccgacgcgatttggctgctggttcaggatgcagtcgcaactttcgacccggatgcgatcgtggagattgtcggtggatttcgtcgtgggaaacctcagggtcacgacgttgatctgcttatcagttctccgggagctgagaaagagcaagaagaccaactcctgcagaaagtgatgaatctgtggaagaaacaagggttgttgctgtacggtcgtctggaatggacccagtgggaagatgggggttcgccttccggtaaggctgacgagggtgacttgggtgcgaaatgctttctgatcctcaaactttatgatcatctggtgcgtaaaagcaaatggaacatgccgacgggttcgaacgtgggcgagtccaaaccgtggaaagcaattcgcgtagatctgctgcgttgcccctatggcagttttgcgtttgcgatgttgcagtggaccggaagccgcatgttccgtcgtgatctgcgttggtacgccactgacgagaagaacatgatgctggacaatcattcgctgtatgacctgaccaagggtatcttcctccctgctaaatcggaagaggaaattttcgcacatctggggcttgaatacctggaaccgttcgaacgtaacgca

SEQ ID NO: 3462 - protein, 529 aa, synthetic construct
  REGION 1..529: note = Variant of terminal deoxynucleotidyltransferase
MHHHHHHGGSGSHGIRTIDSDFGKKQQKKGDNHDSSATYEIKFHEFVLFILEEKMGATRRTFLTDLARKKGFRVENELTDEVTHIVAENLSRSEVLAWLKEHKMEKTKQFELLDISWLIESMKVGKPVDTKGKYQLAESVEVSANPDPTEGRVNELPPTMKTVSPYACQRRTTLNNRNQRFTDSLEILRENYEFKRNDDTALEFRRAISVLKSLPFEVRSLKDTEGLPWIGDEVKGIMEEIIEVGESREVQAVLNDEWYQSFHRFKSVFGVGVKTADKWYRMGLRTLEDVRSSKTLKLTPMQKVGLLYYEDLARGVTRAEADAIWLLVQDAVATFDPDAIVEIVGGFRRGKPQGHDVDLLISSPGAEKEQEDQLLQKVMNLWKKQGLLLYGRLEWTQWEDGGSPSGKADEGDLGAKCFLILKLYDHLVRKSKWNMPTGSNVGESKPWKAIRVDLLRCPYGSFAFAMLQWTGSRMFRRDLRWYATDEKNMMLDNHSLYDLTKGIFLPAKSEEEIFAHLGLEYLEPFERNA

SEQ ID NO: 3463 - DNA, 1587 bp, synthetic construct
  misc_feature 1..1587: note = Variant of terminal deoxynucleotidyltransferase
  source 1..1587: mol_type = other DNA
atgcaccatcatcatcatcatggcggtagcggcagccacggcattcgtaccatcgattcggacttcgggaagaaacagcagaaaaaaggcgataaccacgatagttccgccacttatgaaatcaaatttcacgagtttgtgctgttcattctcgaagaaaaaatgggtgcgacgcgtcgtacttttctgacagatttagcccgcaagaaagggttccgcgtcgagaatgaactgaccgacgaagttacccacatcgtggcagaaaatctgtcacgctctgaagtattggcttggctgaaagaacacaagatggagaagaccaagcaattcgaactgctggatattagctggcttatcgaaagcatgaaagttggtaaaccggtggacaccaaggggaaataccagttggcggaatcggttgaggtgagtgcgaacccagatccgacagaaggtcgtgtaaacgagctgcctcctactatgaaaaccgtttctccgtatgcgtgtcaacgccgcaccaccctgaacaaccgtaatcaacgttttacggactcgctggaaattcttcgtgaaaattacgagttcaaacgcaacgatgatactgcgctggaatttcgtcgtgctatctccgtgctgaaaagccttccgtttgaggtacgtagcctgaaagacacggaaggattgccctggatcggtgatgaagtcaaagggattatggaagaaatcatcgaggtcggggagtcgcgtgaagtgcaggccgtgctcaatgatgagtggtatcaaagcttccaccgctttaagagtgtctttggagtgggggtgaagacagcagacaagtggtaccgtatgggtctgcgcaccctcgaggatgttcgttccagcaagaccctgaagttgaccccgatgcagaaagtaggtctgctgtattatgaagatcttgctcgcggcgttacgcgtgccgaagctgacgcgatttggctgctggttcaggatgcagtcgcaactttcgacccggatgcgatcgtggagattgtcggtggatttcgtcgtgggaaacctcagggtcacgacgttgatctgcttatcagttctccgggagctgagaaagagcaagaagaccaactcctgcagaaagtgatgaatctgtggaagaaacaagggttgttgctgtacggtcgtctggaatggacccagtgggaagatgggggttcgccttccggtaaggctgacgagggtgaccctggtgcgaaatgctttctgatcctcaaactttatgatcatctggtgcgtaaaagcaaatggaacatgccgacgggttcgaacgtgggcgagtccaaaccgtggaaagcaattcgcgtagatctgctgcgttgcccctatggcagttttgcgtttgcgatgttgcagtggaccggaagccgcatgttccgtcgtgatctgcgttggtacgccactgacgagaagaacatgatgctggacaatcattcgctgtatgacctgaccaagggtatcttcctccctgctaaatcggaagaggaaattttcgcacatctggggcttgaatacctggaaccgttcgaacgtaacgca

SEQ ID NO: 3464 - protein, 529 aa, synthetic construct
  REGION 1..529: note = Variant of terminal deoxynucleotidyltransferase
MHHHHHHGGSGSHGIRTIDSDFGKKQQKKGDNHDSSATYEIKFHEFVLFILEEKMGATRRTFLTDLARKKGFRVENELTDEVTHIVAENLSRSEVLAWLKEHKMEKTKQFELLDISWLIESMKVGKPVDTKGKYQLAESVEVSANPDPTEGRVNELPPTMKTVSPYACQRRTTLNNRNQRFTDSLEILRENYEFKRNDDTALEFRRAISVLKSLPFEVRSLKDTEGLPWIGDEVKGIMEEIIEVGESREVQAVLNDEWYQSFHRFKSVFGVGVKTADKWYRMGLRTLEDVRSSKTLKLTPMQKVGLLYYEDLARGVTRAEADAIWLLVQDAVATFDPDAIVEIVGGFRRGKPQGHDVDLLISSPGAEKEQEDQLLQKVMNLWKKQGLLLYGRLEWTQWEDGGSPSGKADEGDPGAKCFLILKLYDHLVRKSKWNMPTGSNVGESKPWKAIRVDLLRCPYGSFAFAMLQWTGSRMFRRDLRWYATDEKNMMLDNHSLYDLTKGIFLPAKSEEEIFAHLGLEYLEPFERNA

SEQ ID NO: 3465 - DNA, 1587 bp, synthetic construct
  misc_feature 1..1587: note = Variant of terminal deoxynucleotidyltransferase
  source 1..1587: mol_type = other DNA
atgcaccatcatcatcatcatggcggtagcggcagccacggcattcgtaccatcgattcggacttcgggaagaaacagcagaaaaaaggcgataaccacgatagttccgccacttatgaaatcaaatttcacgagtttgtgctgttcattctcgaagaaaaaatgggtgcgacgcgtcgtacttttctgacagatttagcccgcaagaaagggttccgcgtcgagaatgaactgaccgacgaagttacccacatcgtggcagaaaatctgtcacgctctgaagtattggcttggctgaaagaacacaagatggagaagaccaagcaattcgaactgctggatattagctggcttatcgaaagcatgaaagttggtaaaccggtggacaccaaggggaaataccagttggcggaatcggttgaggtgagtgcgaacccagatccgacagaaggtcgtgtaaacgagctgcctcctactatgaaaaccgtttctccgtatgcgtgtcaacgccgcaccaccctgaacaaccgtaatcaacgttttacggactcgctggaaattcttcgtgaaaattacgagttcaaacgcaacgatgatactgcgctggaatttcgtcgtgctatctccgtgctgaaaagccttccgtttgaggtacgtagcctgaaagacacggaaggattgccctggatcggtgatgaagtcaaagggattatggaagaaatcatcgaggtcggggagtcgcgtgaagtgcaggccgtgctcaatgatgagtggtatcaaagcttccaccgctttaagagtgtctttggagtgggggtgaagacagcagacaagtggtaccgtatgggtctgcgcaccctcgaggatgttcgttccagcaagaccctgaagttgaccccgatgcagaaagtaggtctgctgtattatgaagatcttgctcgcggcgttacgcgtgccgaagctgacgcgatttggctgctggttcaggatgcagtcgcaactttcgacccggatgcgatcgtggagattgtcggtggatttcgtcgtgggaaacctcagggtcacgacgttgatctgcttatcagttctccgggagctgagaaagagcaagaagaccaactcctgcagaaagtgatgaatctgtggaagaaacaagggttgttgctgtacggtcgtctggaatggacccagtgggaagatgggggttcgccttccggtaaggctgacgaggaggacgcgggtgcgaaatgctttctgatcctcaaactttatgatcatctggtgcgtaaaagcaaatggaacatgccgacgggttcgaacgtgggcgagtccaaaccgtggaaagcaattcgcgtagatctgctgcgttgcccctatggcagttttgcgtttgcgatgttgcagtggaccggaagccgcatgttccgtcgtgatctgcgttggtacgccactgacgagaagaacatgatgctggacaatcattcgctgtatgacctgaccaagggtatcttcctccctgctaaatcggaagaggaaattttcgcacatctggggcttgaatacctggaaccgttcgaacgtaacgca

SEQ ID NO: 3466 - protein, 529 aa, synthetic construct
  REGION 1..529: note = Variant of terminal deoxynucleotidyltransferase
MHHHHHHGGSGSHGIRTIDSDFGKKQQKKGDNHDSSATYEIKFHEFVLFILEEKMGATRRTFLTDLARKKGFRVENELTDEVTHIVAENLSRSEVLAWLKEHKMEKTKQFELLDISWLIESMKVGKPVDTKGKYQLAESVEVSANPDPTEGRVNELPPTMKTVSPYACQRRTTLNNRNQRFTDSLEILRENYEFKRNDDTALEFRRAISVLKSLPFEVRSLKDTEGLPWIGDEVKGIMEEIIEVGESREVQAVLNDEWYQSFHRFKSVFGVGVKTADKWYRMGLRTLEDVRSSKTLKLTPMQKVGLLYYEDLARGVTRAEADAIWLLVQDAVATFDPDAIVEIVGGFRRGKPQGHDVDLLISSPGAEKEQEDQLLQKVMNLWKKQGLLLYGRLEWTQWEDGGSPSGKADEEDAGAKCFLILKLYDHLVRKSKWNMPTGSNVGESKPWKAIRVDLLRCPYGSFAFAMLQWTGSRMFRRDLRWYATDEKNMMLDNHSLYDLTKGIFLPAKSEEEIFAHLGLEYLEPFERNA

SEQ ID NO: 3467 - DNA, 1587 bp, synthetic construct
  misc_feature 1..1587: note = Variant of terminal deoxynucleotidyltransferase
  source 1..1587: mol_type = other DNA
atgcaccatcatcatcatcatggcggtagcggcagccacggcattcgtaccatcgattcggacttcgggaagaaacagcagaaaaaaggcgataaccacgatagttccgccacttatgaaatcaaatttcacgagtttgtgctgttcattctcgaagaaaaaatgggtgcgacgcgtcgtacttttctgacagatttagcccgcaagaaagggttccgcgtcgagaatgaactgaccgacgaagttacccacatcgtggcagaaaatctgtcacgctctgaagtattggcttggctgaaagaacacaagatggagaagaccaagcaattcgaactgctggatattagctggcttatcgaaagcatgaaagttggtaaaccggtggacaccaaggggaaataccagttggcggaatcggttgaggtgagtgcgaacccagatccgacagaaggtcgtgtaaacgagctgcctcctactatgaaaaccgtttctccgtatgcgtgtcaacgccgcaccaccctgaacaaccgtaatcaacgttttacggactcgctggaaattcttcgtgaaaattacgagttcaaacgcaacgatgatactgcgctggaatttcgtcgtgctatctccgtgctgaaaagccttccgtttgaggtacgtagcctgaaagacacggaaggattgccctggatcggtgatgaagtcaaagggattatggaagaaatcatcgaggtcggggagtcgcgtgaagtgcaggccgtgctcaatgatgagtggtatcaaagcttccaccgctttaagagtgtctttggagtgggggtgaagacagcagacaagtggtaccgtatgggtctgcgcaccctcgaggatgttcgttccagcaagaccctgaagttgaccccgatgcagaaagtaggtctgctgtattatgaagatcttgctcgcggcgttacgcgtgccgaagctgacgcgatttggctgctggttcaggatgcagtcgcaactttcgacccggatgcgatcgtggagattgtcggtggatttcgtcgtgggaaacctcagggtcacgacgttgatctgcttatcagttctccgggagctgagaaagagcaagaagaccaactcctgcagaaagtgatgaatctgtggaagaaacaagggttgttgctgattggtcgtctggaatggacccagtgggaagatgggggttcgccttccggtaaggctgacgagggtgacgcgggtgcgaaatgctttctgatcctcaaactttatgatcatctggtgcgtaaaagcaaatggaacatgccgacgggttcgaacgtgggcgagtccaaaccgtggaaagcaattcgcgtagatctgctgcgttgcccctatggcagttttgcgtttgcgatgttgcagtggaccggaagccgcatgttccgtcgtgatctgcgttggtacgccactgacgagaagaacatgatgctggacaatcattcgctgtatgacctgaccaagggtatcttcctccctgctaaatcggaagaggaaattttcgcacatctggggcttgaatacctggaaccgttcgaacgtaacgca

SEQ ID NO: 3468 - protein, 529 aa, synthetic construct
  REGION 1..529: note = Variant of terminal deoxynucleotidyltransferase
MHHHHHHGGSGSHGIRTIDSDFGKKQQKKGDNHDSSATYEIKFHEFVLFILEEKMGATRRTFLTDLARKKGFRVENELTDEVTHIVAENLSRSEVLAWLKEHKMEKTKQFELLDISWLIESMKVGKPVDTKGKYQLAESVEVSANPDPTEGRVNELPPTMKTVSPYACQRRTTLNNRNQRFTDSLEILRENYEFKRNDDTALEFRRAISVLKSLPFEVRSLKDTEGLPWIGDEVKGIMEEIIEVGESREVQAVLNDEWYQSFHRFKSVFGVGVKTADKWYRMGLRTLEDVRSSKTLKLTPMQKVGLLYYEDLARGVTRAEADAIWLLVQDAVATFDPDAIVEIVGGFRRGKPQGHDVDLLISSPGAEKEQEDQLLQKVMNLWKKQGLLLIGRLEWTQWEDGGSPSGKADEGDAGAKCFLILKLYDHLVRKSKWNMPTGSNVGESKPWKAIRVDLLRCPYGSFAFAMLQWTGSRMFRRDLRWYATDEKNMMLDNHSLYDLTKGIFLPAKSEEEIFAHLGLEYLEPFERNA

SEQ ID NO: 3469 - DNA, 1587 bp, synthetic construct
  misc_feature 1..1587: note = Variant of terminal deoxynucleotidyltransferase
  source 1..1587: mol_type = other DNA
atgcaccatcatcatcatcatggcggtagcggcagccacggcattcgtaccatcgattcggacttcgggaagaaacagcagaaaaaaggcgataaccacgatagttccgccacttatgaaatcaaatttcacgagtttgtgctgttcattctcgaagaaaaaatgggtgcgacgcgtcgtacttttctgacagatttagcccgcaagaaagggttccgcgtcgagaatgaactgaccgacgaagttacccacatcgtggcagaaaatctgtcacgctctgaagtattggcttggctgaaagaacacaagatggagaagaccaagcaattcgaactgctggatattagctggcttatcgaaagcatgaaagttggtaaaccggtggacaccaaggggaaataccagttggcggaatcggttgaggtgagtgcgaacccagatccgacagaaggtcgtgtaaacgagctgcctcctactatgaaaaccgtttctccgtatgcgtgtcaacgccgcaccaccctgaacaaccgtaatcaacgttttacggactcgctggaaattcttcgtgaaaattacgagttcaaacgcaacgatgatactgcgctggaatttcgtcgtgctatctccgtgctgaaaagccttccgtttgaggtacgtagcctgaaagacacggaaggattgccctggatcggtgatgaagtcaaagggattatggaagaaatcatcgaggtcggggagtcgcgtgaagtgcaggccgtgctcaatgatgagtggtatcaaagcttccaccgctttaagagtgtctttggagtgggggtgaagacagcagacaagtggtaccgtatgggtctgcgcaccctcgaggatgttcgttccagcaagaccctgaagttgaccccgatgcagaaagtaggtctgctgtattatgaagatcttgctcgcggcgttacgcgtgccgaagctgacgcgatttggctgctggttcaggatgcagtcgcaactttcgacccggatgcgatcgtggagattgtcggtggatttcgtcgtgggaaacctcagggtcacgacgttgatctgcttatcagttctccgggagctgagaaagagcaagaagaccaactcctgcagaaagtgatgaatctgtggaagaaacaagggttgttgctgtacggtcgtctggaatggacccagtgggaagatgggggttcgccttccggtaaggctgacgagggtgacgcgggtgcgaaatgctttctgatcctcaaactttatgatcatctggtgcgtaaaagcaaatggaacatgccgacgggttcgaacgtgggcgagtccaaaccgtggaaagcaattcgcgtagatctgctgcgttgcccctatggcagttttgcgtttgcgatgttgcagtggaccggaagccgcatgttccgtcgtgatctgcgttggtacgccactgacgagaagaacatgatgctggactatcattcgctgtatgacctgaccaagggtatcttcctccctgctaaatcggaagaggaaattttcgcacatctggggcttgaatacctggaaccgttcgaacgtaacgca

SEQ ID NO: 3470 - protein, 529 aa, synthetic construct
  REGION 1..529: note = Variant of terminal deoxynucleotidyltransferase
MHHHHHHGGSGSHGIRTIDSDFGKKQQKKGDNHDSSATYEIKFHEFVLFILEEKMGATRRTFLTDLARKKGFRVENELTDEVTHIVAENLSRSEVLAWLKEHKMEKTKQFELLDISWLIESMKVGKPVDTKGKYQLAESVEVSANPDPTEGRVNELPPTMKTVSPYACQRRTTLNNRNQRFTDSLEILRENYEFKRNDDTALEFRRAISVLKSLPFEVRSLKDTEGLPWIGDEVKGIMEEIIEVGESREVQAVLNDEWYQSFHRFKSVFGVGVKTADKWYRMGLRTLEDVRSSKTLKLTPMQKVGLLYYEDLARGVTRAEADAIWLLVQDAVATFDPDAIVEIVGGFRRGKPQGHDVDLLISSPGAEKEQEDQLLQKVMNLWKKQGLLLYGRLEWTQWEDGGSPSGKADEGDAGAKCFLILKLYDHLVRKSKWNMPTGSNVGESKPWKAIRVDLLRCPYGSFAFAMLQWTGSRMFRRDLRWYATDEKNMMLDYHSLYDLTKGIFLPAKSEEEIFAHLGLEYLEPFERNA

SEQ ID NO: 3471 - DNA, 1587 bp, synthetic construct
  misc_feature 1..1587: note = Variant of terminal deoxynucleotidyltransferase
  source 1..1587: mol_type = other DNA
atgcaccatcatcatcatcatggcggtagcggcagccacggcattcgtaccatcgattcggacttcgggaagaaacagcagaaaaaaggcgataaccacgatagttccgccacttatgaaatcaaatttcacgagtttgtgctgttcattctcgaagaaaaaatgggtgcgacgcgtcgtacttttctgacagatttagcccgcaagaaagggttccgcgtcgagaatgaactgaccgacgaagttacccacatcgtggcagaaaatctgtcacgctctgaagtattggcttggctgaaagaacacaagatggagaagaccaagcaattcgaactgctggatattagctggcttatcgaaagcatgaaagttggtaaaccggtggacaccaaggggaaataccagttggcggaatcggttgaggtgagtgcgaacccagatccgacagaaggtcgtgtaaacgagctgcctcctactatgaaaaccgtttctccgtatgcgtgtcaacgccgcaccaccctgaacaaccgtaatcaacgttttacggactcgctggaaattcttcgtgaaaattacgagtgtaaacgcaacgatgatactgcgctggaatttcgtcgtgctatctccgtgctgaaaagccttccgtttgaggtacgtagcctgaaagacacggaaggattgccctggatcggtgatgaagtcaaagggattatggaagaaatcatcgaggtcggggagtcgcgtgaagtgcaggccgtgctcaatgatgagtggtatcaaagcttccaccgctttaagagtgtctttggagtgggggtgaagacagcagacaagtggtaccgtatgggtctgcgcaccctcgaggatgttcgttccagcaagaccctgaagttgaccccgatgcagaaagtaggtctgctgtattatgaagatcttgctcgcggcgttacgcgtgccgaagctgacgcgatttggctgctggttcaggatgcagtcgcaactttcgacccggatgcgatcgtggagattgtcggtggatttcgtcgtgggaaacctcagggtcacgacgttgatctgcttatcagttctccgggagctgagaaagagcaagaagaccaactcctgcagaaagtgatgaatctgtggaagaaacaagggttgttgctgtacggtcgtctggaatggacccagtgggaagatgggggttcgccttccggtaaggctgacgagggtgacgcgggtgcgaaatgctttctgatcctcaaactttatgatcatctggtgcgtaaaagcaaatggaacatgccgacgggttcgaacgtgggcgagtccaaaccgtggaaagcaattcgcgtagatctgctgcgttgcccctatggcagttttgcgtttgcgatgttgcagtggaccggaagccgcatgttccgtcgtgatctgcgttggtacgccactgacgagaagaacatgatgctggacaatcattcgctgtatgacctgaccaagggtatcttcctccctgctaaatcggaagaggaaattttcgcacatctggggcttgaatacctggaaccgttcgaacgtaacgca

SEQ ID NO: 3472 - protein, 529 aa, synthetic construct
  REGION 1..529: note = Variant of terminal deoxynucleotidyltransferase
MHHHHHHGGSGSHGIRTIDSDFGKKQQKKGDNHDSSATYEIKFHEFVLFILEEKMGATRRTFLTDLARKKGFRVENELTDEVTHIVAENLSRSEVLAWLKEHKMEKTKQFELLDISWLIESMKVGKPVDTKGKYQLAESVEVSANPDPTEGRVNELPPTMKTVSPYACQRRTTLNNRNQRFTDSLEILRENYECKRNDDTALEFRRAISVLKSLPFEVRSLKDTEGLPWIGDEVKGIMEEIIEVGESREVQAVLNDEWYQSFHRFKSVFGVGVKTADKWYRMGLRTLEDVRSSKTLKLTPMQKVGLLYYEDLARGVTRAEADAIWLLVQDAVATFDPDAIVEIVGGFRRGKPQGHDVDLLISSPGAEKEQEDQLLQKVMNLWKKQGLLLYGRLEWTQWEDGGSPSGKADEGDAGAKCFLILKLYDHLVRKSKWNMPTGSNVGESKPWKAIRVDLLRCPYGSFAFAMLQWTGSRMFRRDLRWYATDEKNMMLDNHSLYDLTKGIFLPAKSEEEIFAHLGLEYLEPFERNA

SEQ ID NO: 3473 - DNA, 1587 bp, synthetic construct
  misc_feature 1..1587: note = Variant of terminal deoxynucleotidyltransferase
  source 1..1587: mol_type = other DNA
atgcaccatcatcatcatcatggcggtagcggcagccacggcattcgtaccatcgattcggacttcgggaagaaacagcagaaaaaaggcgataaccacgatagttccgccacttatgaaatcaaatttcacgagtttgtgctgttcattctcgaagaaaaaatgggtgcgacgcgtcgtacttttctgacagatttagcccgcaagaaagggttccgcgtcgagaatgaactgaccgacgaagttacccacatcgtggcagaaaatctgtcacgctctgaagtattggcttggctgaaagaacacaagatggagaagaccaagcaattcgaactgctggatattagctggcttatcgaaagcatgaaagttggtaaaccggtggacaccaaggggaaataccagttggcggaatcggttgaggtgagtgcgaacccagatccgacagaaggtcgtgtaaacgagctgcctcctactatgaaaaccgtttctccgtatgcgtgtcaacgccgcaccaccctgaacaaccgtaatcaacgttttacggactcgctggaaattcttcgtgaaaattacgagttcaaacgcaacgatgatactgcgctggaatttcgtcgtgctatctccgtgctgaaaagccttccgtttgaggtacgtagcctgaaagacacggaaggattgccctggatcggtgatgaagtcaaagggattatggaagaaatcatcgaggtcggggagtcgcgtgaagtgcaggccgtgctcaatgatgagtggtatcaaagcttccaccgctttaagagtgtctttggagtgggggtgaagacagcagacaagtggtaccgtatgggtctgcgcaccctcgaggatgttcgttccagcaagaccctgaagttgaatccgatgcagaaagtaggtctgctgtattatgaagatcttgctcgcggcgttacgcgtgccgaagctgacgcgatttggctgctggttcaggatgcagtcgcaactttcgacccggatgcgatcgtggagattgtcggtggatttcgtcgtgggaaacctcagggtcacgacgttgatctgcttatcagttctccgggagctgagaaagagcaagaagaccaactcctgcagaaagtgatgaatctgtggaagaaacaagggttgttgctgtacggtcgtctggaatggacccagtgggaagatgggggttcgccttccggtaaggctgacgagggtgacgcgggtgcgaaatgctttctgatcctcaaactttatgatcatctggtgcgtaaaagcaaatggaacatgccgacgggttcgaacgtgggcgagtccaaaccgtggaaagcaattcgcgtagatctgctgcgttgcccctatggcagttttgcgtttgcgatgttgcagtggaccggaagccgcatgttccgtcgtgatctgcgttggtacgccactgacgagaagaacatgatgctggacaatcattcgctgtatgacctgaccaagggtatcttcctccctgctaaatcggaagaggaaattttcgcacatctggggcttgaatacctggaaccgttcgaacgtaacgca

SEQ ID NO: 3474 - protein, 529 aa, synthetic construct
  REGION 1..529: note = Variant of terminal deoxynucleotidyltransferase
MHHHHHHGGSGSHGIRTIDSDFGKKQQKKGDNHDSSATYEIKFHEFVLFILEEKMGATRRTFLTDLARKKGFRVENELTDEVTHIVAENLSRSEVLAWLKEHKMEKTKQFELLDISWLIESMKVGKPVDTKGKYQLAESVEVSANPDPTEGRVNELPPTMKTVSPYACQRRTTLNNRNQRFTDSLEILRENYEFKRNDDTALEFRRAISVLKSLPFEVRSLKDTEGLPWIGDEVKGIMEEIIEVGESREVQAVLNDEWYQSFHRFKSVFGVGVKTADKWYRMGLRTLEDVRSSKTLKLNPMQKVGLLYYEDLARGVTRAEADAIWLLVQDAVATFDPDAIVEIVGGFRRGKPQGHDVDLLISSPGAEKEQEDQLLQKVMNLWKKQGLLLYGRLEWTQWEDGGSPSGKADEGDAGAKCFLILKLYDHLVRKSKWNMPTGSNVGESKPWKAIRVDLLRCPYGSFAFAMLQWTGSRMFRRDLRWYATDEKNMMLDNHSLYDLTKGIFLPAKSEEEIFAHLGLEYLEPFERNA

SEQ ID NO: 3475 - DNA, 1587 bp, synthetic construct
  misc_feature 1..1587: note = Variant of terminal deoxynucleotidyltransferase
  source 1..1587: mol_type = other DNA
atgcaccatcatcatcatcatggcggtagcggcagccacggcattcgtaccatcgattcggacttcgggaagaaacagcagaaaaaaggcgataaccacgatagttccgccacttatgaaatcaaatttcacgagtttgtgctgttcattctcgaagaaaaaatgggtgcgacgcgtcgtacttttctgacagatttagcccgcaagaaagggttccgcgtcgagaatgaactgaccgacgaagttacccacatcgtggcagaaaatctgtcacgctctgaagtattggcttggctgaaagaacacaagatggagaagaccaagcaattcgaactgctggatattagctggcttatcgaaagcatgaaagttggtaaaccggtggacaccaaggggaaataccagttggcggaatcggttgaggtgagtgcgaacccagatccgacagaaggtcgtgtaaacgagctgcctcctactatgaaaaccgtttctccgtatgcgtgtcaacgccgcaccaccctgaacaaccgtaatcaacgttttacggactcgctggaaattcttcgtgaaaattacgagttcaaacgcaacgatgatactgcgctggaatttcgtcgtgctatctccgtgctgaaaagccttccgtttgaggtacgtagcctgaaagacacggaaggattgccctggatcggtgatgaagtcaaagggattatggaagaaatcatcgaggtcggggagtcgcgtgaagtgcaggccgtgctcaatgatgagtggtatcaaagcttccaccgctttaagagtacgtttggagtgggggtgaagacagcagacaagtggtaccgtatgggtctgcgcaccctcgaggatgttcgttccagcaagaccctgaagttgaccccgatgcagaaagtaggtctgctgtattatgaagatcttgctcgcggcgttacgcgtgccgaagctgacgcgatttggctgctggttcaggatgcagtcgcaactttcgacccggatgcgatcgtggagattgtcggtggatttcgtcgtgggaaacctcagggtcacgacgttgatctgcttatcagttctccgggagctgagaaagagcaagaagaccaactcctgcagaaagtgatgaatctgtggaagaaacaagggttgttgctgtacggtcgtctggaatggacccagtgggaagatgggggttcgccttccggtaaggctgacgagggtgacgcgggtgcgaaatgctttctgatcctcaaactttatgatcatctggtgcgtaaaagcaaatggaacatgccgacgggttcgaacgtgggcgagtccaaaccgtggaaagcaattcgcgtagatctgctgcgttgcccctatggcagttttgcgtttgcgatgttgcagtggaccggaagccgcatgttccgtcgtgatctgcgttggtacgccactgacgagaagaacatgatgctggacaatcattcgctgtatgacctgaccaagggtatcttcctccctgctaaatcggaagaggaaattttcgcacatctggggcttgaatacctggaaccgttcgaacgtaacgca

SEQ ID NO: 3476 - protein, 529 aa, synthetic construct
  REGION 1..529: note = Variant of terminal deoxynucleotidyltransferase
MHHHHHHGGSGSHGIRTIDSDFGKKQQKKGDNHDSSATYEIKFHEFVLFILEEKMGATRRTFLTDLARKKGFRVENELTDEVTHIVAENLSRSEVLAWLKEHKMEKTKQFELLDISWLIESMKVGKPVDTKGKYQLAESVEVSANPDPTEGRVNELPPTMKTVSPYACQRRTTLNNRNQRFTDSLEILRENYEFKRNDDTALEFRRAISVLKSLPFEVRSLKDTEGLPWIGDEVKGIMEEIIEVGESREVQAVLNDEWYQSFHRFKSTFGVGVKTADKWYRMGLRTLEDVRSSKTLKLTPMQKVGLLYYEDLARGVTRAEADAIWLLVQDAVATFDPDAIVEIVGGFRRGKPQGHDVDLLISSPGAEKEQEDQLLQKVMNLWKKQGLLLYGRLEWTQWEDGGSPSGKADEGDAGAKCFLILKLYDHLVRKSKWNMPTGSNVGESKPWKAIRVDLLRCPYGSFAFAMLQWTGSRMFRRDLRWYATDEKNMMLDNHSLYDLTKGIFLPAKSEEEIFAHLGLEYLEPFERNA

SEQ ID NO: 3477 - DNA, 1587 bp, synthetic construct
  misc_feature 1..1587: note = Variant of terminal deoxynucleotidyltransferase
  source 1..1587: mol_type = other DNA
atgcaccatcatcatcatcatggcggtagcggcagccacggcattcgtaccatcgattcggacttcgggaagaaacagcagaaaaaaggcgataaccacgatagttccgccacttatgaaatcaaatttcacgagtttgtgctgttcattctcgaagaaaaaatgggtgcgacgcgtcgtacttttctgacagatttagcccgcaagaaagggttccgcgtcgagaatgaactgaccgacgaagttacccacatcgtggcagaaaatctgtcacgctctgaagtattggcttggctgaaagaacacaagatggagaagaccaagcaattcgaactgctggatattagctggcttatcgaaagcatgaaagttggtaaaccggtggacaccaaggggaaataccagttggcggaatcggttgaggtgagtgcgaacccagatccgacagaaggtcgtgtaaacgagctgcctcctactatgaaaaccgtttctccgtatgcgtgtcaacgccgcaccaccctgaacaaccgtaatcaacgttttacggactcgctggaaattcttcgtgaaaattacgagttcaaacgcaacgatgatactgcgctggaatttcgtcgtgctatctccgtgctgaaaagccttccgtttgaggtacgtagcctgaaagacacggaaggattgccctggatcggtgatgaagtcaaagggattatggaagaaatcatcgaggtcggggagtcgcgtgaagtgcaggccgtgctcaatgatgagtggtatcaaagcttccaccgctttaagagtgtctttggagtgggggtgaagacagcagacaagtggtaccgtatgggtctgcgcaccctcgaggatgttcgttccagcaagaccctgaagttggctccgatgcagaaagtaggtctgctgtattatgaagatcttgctcgcggcgttacgcgtgccgaagctgacgcgatttggctgctggttcaggatgcagtcgcaactttcgacccggatgcgatcgtggagattgtcggtggatttcgtcgtgggaaacctcagggtcacgacgttgatctgcttatcagttctccgggagctgagaaagagcaagaagaccaactcctgcagaaagtgatgaatctgtggaagaaacaagggttgttgctgtacggtcgtctggaatggacccagtgggaagatgggggttcgccttccggtaaggctgacgagggtgacgcgggtgcgaaatgctttctgatcctcaaactttatgatcatctggtgcgtaaaagcaaatggaacatgccgacgggttcgaacgtgggcgagtccaaaccgtggaaagcaattcgcgtagatctgctgcgttgcccctatggcagttttgcgtttgcgatgttgcagtggaccggaagccgcatgttccgtcgtgatctgcgttggtacgccactgacgagaagaacatgatgctggacaatcattcgctgtatgacctgaccaagggtatcttcctccctgctaaatcggaagaggaaattttcgcacatctggggcttgaatacctggaaccgttcgaacgtaacgca

SEQ ID NO: 3478 - protein, 529 aa, synthetic construct
  REGION 1..529: note = Variant of terminal deoxynucleotidyltransferase
MHHHHHHGGSGSHGIRTIDSDFGKKQQKKGDNHDSSATYEIKFHEFVLFILEEKMGATRRTFLTDLARKKGFRVENELTDEVTHIVAENLSRSEVLAWLKEHKMEKTKQFELLDISWLIESMKVGKPVDTKGKYQLAESVEVSANPDPTEGRVNELPPTMKTVSPYACQRRTTLNNRNQRFTDSLEILRENYEFKRNDDTALEFRRAISVLKSLPFEVRSLKDTEGLPWIGDEVKGIMEEIIEVGESREVQAVLNDEWYQSFHRFKSVFGVGVKTADKWYRMGLRTLEDVRSSKTLKLAPMQKVGLLYYEDLARGVTRAEADAIWLLVQDAVATFDPDAIVEIVGGFRRGKPQGHDVDLLISSPGAEKEQEDQLLQKVMNLWKKQGLLLYGRLEWTQWEDGGSPSGKADEGDAGAKCFLILKLYDHLVRKSKWNMPTGSNVGESKPWKAIRVDLLRCPYGSFAFAMLQWTGSRMFRRDLRWYATDEKNMMLDNHSLYDLTKGIFLPAKSEEEIFAHLGLEYLEPFERNA

SEQ ID NO: 3479 - DNA, 1587 bp, synthetic construct
  misc_feature 1..1587: note = Variant of terminal deoxynucleotidyltransferase
  source 1..1587: mol_type = other DNA
atgcaccatcatcatcatcatggcggtagcggcagccacggcattcgtaccatcgattcggacttcgggaagaaacagcagaaaaaaggcgataaccacgatagttccgccacttatgaaatcaaatttcacgagtttgtgctgttcattctcgaagaaaaaatgggtgcgacgcgtcgtacttttctgacagatttagcccgcaagaaagggttccgcgtcgagaatgaactgaccgacgaagttacccacatcgtggcagaaaatctgtcacgctctgaagtattggcttggctgaaagaacacaagatggagaagaccaagcaattcgaactgctggatattagctggcttatcgaaagcatgaaagttggtaaaccggtggacaccaaggggaaataccagttggcggaatcggttgaggtgagtgcgaacccagatccgacagaaggtcgtgtaaacgagctgcctcctactatgaaaaccgtttctccgtatgcgtgtcaacgccgcaccaccctgaacaaccgtaatcaacgttttacggactcgctggaaattcttcgtgaaaattacgagttcaaacgcaacgatgatactgcgctggaatttcgtcgtgctatctccgtgctgaaaagccttccgtttgaggtacgtagcctgaaagacacggaaggattgccctggatcggtgatgaagtcaaagggattatggaagaaatcatcgaggtcggggagtcgcgtgaagtgcaggccgtgctcaatgatgagtggtatcaaagcttccaccgctttaagtatgtctttggagtgggggtgaagacagcagacaagtggtaccgtatgggtctgcgcaccctcgaggatgttcgttccagcaagaccctgaagttgaccccgatgcagaaagtaggtctgctgtattatgaagatcttgctcgcggcgttacgcgtgccgaagctgacgcgatttggctgctggttcaggatgcagtcgcaactttcgacccggatgcgatcgtggagattgtcggtggatttcgtcgtgggaaacctcagggtcacgacgttgatctgcttatcagttctccgggagctgagaaagagcaagaagaccaactcctgcagaaagtgatgaatctgtggaagaaacaagggttgttgctgtacggtcgtctggaatggacccagtgggaagatgggggttcgccttccggtaaggctgacgagggtgacgcgggtgcgaaatgctttctgatcctcaaactttatgatcatctggtgcgtaaaagcaaatggaacatgccgacgggttcgaacgtgggcgagtccaaaccgtggaaagcaattcgcgtagatctgctgcgttgcccctatggcagttttgcgtttgcgatgttgcagtggaccggaagccgcatgttccgtcgtgatctgcgttggtacgccactgacgagaagaacatgatgctggacaatcattcgctgtatgacctgaccaagggtatcttcctccctgctaaatcggaagaggaaattttcgcacatctggggcttgaatacctggaaccgttcgaacgtaacgca

SEQ ID NO: 3480 - protein, 529 aa, synthetic construct
  REGION 1..529: note = Variant of terminal deoxynucleotidyltransferase
MHHHHHHGGSGSHGIRTIDSDFGKKQQKKGDNHDSSATYEIKFHEFVLFILEEKMGATRRTFLTDLARKKGFRVENELTDEVTHIVAENLSRSEVLAWLKEHKMEKTKQFELLDISWLIESMKVGKPVDTKGKYQLAESVEVSANPDPTEGRVNELPPTMKTVSPYACQRRTTLNNRNQRFTDSLEILRENYEFKRNDDTALEFRRAISVLKSLPFEVRSLKDTEGLPWIGDEVKGIMEEIIEVGESREVQAVLNDEWYQSFHRFKYVFGVGVKTADKWYRMGLRTLEDVRSSKTLKLTPMQKVGLLYYEDLARGVTRAEADAIWLLVQDAVATFDPDAIVEIVGGFRRGKPQGHDVDLLISSPGAEKEQEDQLLQKVMNLWKKQGLLLYGRLEWTQWEDGGSPSGKADEGDAGAKCFLILKLYDHLVRKSKWNMPTGSNVGESKPWKAIRVDLLRCPYGSFAFAMLQWTGSRMFRRDLRWYATDEKNMMLDNHSLYDLTKGIFLPAKSEEEIFAHLGLEYLEPFERNA

SEQ ID NO: 3481 - DNA, 1587 bp, synthetic construct
  misc_feature 1..1587: note = Variant of terminal deoxynucleotidyltransferase
  source 1..1587: mol_type = other DNA
atgcaccatcatcatcatcatggcggtagcggcagccacggcattcgtaccatcgattcggacttcgggaagaaacagcagaaaaaaggcgataaccacgatagttccgccacttatgaaatcaaatttcacgagtttgtgctgttcattctcgaagaaaaaatgggtgcgacgcgtcgtacttttctgacagatttagcccgcaagaaagggttccgcgtcgagaatgaactgaccgacgaagttacccacatcgtggcagaaaatctgtcacgctctgaagtattggcttggctgaaagaacacaagatggagaagaccaagcaattcgaactgctggatattagctggcttatcgaaagcatgaaagttggtaaaccggtggacaccaaggggaaataccagttggcggaatcggttgaggtgagtgcgaacccagatccgacagaaggtcgtgtaaacgagctgcctcctactatgaaaaccgtttctccgtatgcgtgtcaacgccgcaccaccctgaacaaccgtaatcaacgttttacggactcgctggaaattcttcgtgaaaattacgagttcaaacgcaacgatgatactgcgctggaatttcgtcgtgctatctccgtgctgaaaagccttccgtttgaggtacgtagcctgaaagacacggaaggattgccctggatcggtgatgaagtcaaagggattatggaagaaatcatcgaggtcggggagtcgcgtgaagtgcaggccgtgctcaatgatgagtggtatcaaagcttccaccgctttaagagtgtctttggagtgggggtgaagacagcagacaagtggtaccgtatgggtctgcgcaccctcgaggatgttcgttccagcaagaccctgaagatgaccccgatgcagaaagtaggtctgctgtattatgaagatcttgctcgcggcgttacgcgtgccgaagctgacgcgatttggctgctggttcaggatgcagtcgcaactttcgacccggatgcgatcgtggagattgtcggtggatttcgtcgtgggaaacctcagggtcacgacgttgatctgcttatcagttctccgggagctgagaaagagcaagaagaccaactcctgcagaaagtgatgaatctgtggaagaaacaagggttgttgctgtacggtcgtctggaatggacccagtgggaagatgggggttcgccttccggtaaggctgacgagggtgacgcgggtgcgaaatgctttctgatcctcaaactttatgatcatctggtgcgtaaaagcaaatggaacatgccgacgggttcgaacgtgggcgagtccaaaccgtggaaagcaattcgcgtagatctgctgcgttgcccctatggcagttttgcgtttgcgatgttgcagtggaccggaagccgcatgttccgtcgtgatctgcgttggtacgccactgacgagaagaacatgatgctggacaatcattcgctgtatgacctgaccaagggtatcttcctccctgctaaatcggaagaggaaattttcgcacatctggggcttgaatacctggaaccgttcgaacgtaacgca

SEQ ID NO: 3482 - protein, 529 aa, synthetic construct
  REGION 1..529: note = Variant of terminal deoxynucleotidyltransferase
MHHHHHHGGSGSHGIRTIDSDFGKKQQKKGDNHDSSATYEIKFHEFVLFILEEKMGATRRTFLTDLARKKGFRVENELTDEVTHIVAENLSRSEVLAWLKEHKMEKTKQFELLDISWLIESMKVGKPVDTKGKYQLAESVEVSANPDPTEGRVNELPPTMKTVSPYACQRRTTLNNRNQRFTDSLEILRENYEFKRNDDTALEFRRAISVLKSLPFEVRSLKDTEGLPWIGDEVKGIMEEIIEVGESREVQAVLNDEWYQSFHRFKSVFGVGVKTADKWYRMGLRTLEDVRSSKTLKMTPMQKVGLLYYEDLARGVTRAEADAIWLLVQDAVATFDPDAIVEIVGGFRRGKPQGHDVDLLISSPGAEKEQEDQLLQKVMNLWKKQGLLLYGRLEWTQWEDGGSPSGKADEGDAGAKCFLILKLYDHLVRKSKWNMPTGSNVGESKPWKAIRVDLLRCPYGSFAFAMLQWTGSRMFRRDLRWYATDEKNMMLDNHSLYDLTKGIFLPAKSEEEIFAHLGLEYLEPFERNA

SEQ ID NO: 3483 - DNA, 1587 bp, synthetic construct
  misc_feature 1..1587: note = Variant of terminal deoxynucleotidyltransferase
  source 1..1587: mol_type = other DNA
atgcaccatcatcatcatcatggcggtagcggcagccacggcattcgtaccatcgattcggacttcgggaagaaacagcagaaaaaaggcgataaccacgatagttccgccacttatgaaatcaaatttcacgagtttgtgctgttcattctcgaagaaaaaatgggtgcgacgcgtcgtacttttctgacagatttagcccgcaagaaagggttccgcgtcgagaatgaactgaccgacgaagttacccacatcgtggcagaaaatctgtcacgctctgaagtattggcttggctgaaagaacacaagatggagaagaccaagcaattcgaactgctggatattagctggcttatcgaaagcatgaaagttggtaaaccggtggacaccaaggggaaataccagttggcggaatcggttgaggtgagtgcgaacccagatccgacagaaggtcgtgtaaacgagctgcctcctactatgaaaaccgtttctccgtatgcgtgtcaacgccgcaccaccctgaacaaccgtaatcaacgttttacggactcgctggaaattcttcgtgaaaattacgagttcaaacgcaacgatgatactgcgctggaatttcgtcgtgctatctccgtgctgaaaagccttccgtttgaggtacgtagcctgaaagacacggaaggattgccctggatcggtgatgaagtcaaagggattatggaagaaatcatcgaggtcggggagtcgcgtgaagtgcaggccgtgctcaatgatgagtggtatcaaagcttccaccgctttaagagtgtctttggagtgggggtgaagacagcagacaagtggtaccgtatgggtctgcgcaccctcgaggatgttcgttccagcaagaccctgaagttgaccccgatgcagaaagtaggtctgctgtattatgaagatcttgctcgcggcgttacgcgtgccgaagctgacgcgatttggctgctggttcaggatgcagtcgcaactttcgacccggatgcgatcgtggagattgtcggtggatttcgtcgtgggaaacctcagggtcacgacgttgatctgcttatcagttctccgggagctgagaaagagcaagaagaccaactcctgcagaaagtgatgaatctgtggaagaaacaagggttgttgctgtacggtcgtctggaatggacccagtgggaagatgggggttcgccttccggtaagcttgacgagggtgacgcgggtgcgaaatgctttctgatcctcaaactttatgatcatctggtgcgtaaaagcaaatggaacatgccgacgggttcgaacgtgggcgagtccaaaccgtggaaagcaattcgcgtagatctgctgcgttgcccctatggcagttttgcgtttgcgatgttgcagtggaccggaagccgcatgttccgtcgtgatctgcgttggtacgccactgacgagaagaacatgatgctggacaatcattcgctgtatgacctgaccaagggtatcttcctccctgctaaatcggaagaggaaattttcgcacatctggggcttgaatacctggaaccgttcgaacgtaacgca

SEQ ID NO: 3484 - protein, 529 aa, synthetic construct
  REGION 1..529: note = Variant of terminal deoxynucleotidyltransferase
MHHHHHHGGSGSHGIRTIDSDFGKKQQKKGDNHDSSATYEIKFHEFVLFILEEKMGATRRTFLTDLARKKGFRVENELTDEVTHIVAENLSRSEVLAWLKEHKMEKTKQFELLDISWLIESMKVGKPVDTKGKYQLAESVEVSANPDPTEGRVNELPPTMKTVSPYACQRRTTLNNRNQRFTDSLEILRENYEFKRNDDTALEFRRAISVLKSLPFEVRSLKDTEGLPWIGDEVKGIMEEIIEVGESREVQAVLNDEWYQSFHRFKSVFGVGVKTADKWYRMGLRTLEDVRSSKTLKLTPMQKVGLLYYEDLARGVTRAEADAIWLLVQDAVATFDPDAIVEIVGGFRRGKPQGHDVDLLISSPGAEKEQEDQLLQKVMNLWKKQGLLLYGRLEWTQWEDGGSPSGKLDEGDAGAKCFLILKLYDHLVRKSKWNMPTGSNVGESKPWKAIRVDLLRCPYGSFAFAMLQWTGSRMFRRDLRWYATDEKNMMLDNHSLYDLTKGIFLPAKSEEEIFAHLGLEYLEPFERNA

SEQ ID NO: 3485 - DNA, 1587 bp, synthetic construct
  misc_feature 1..1587: note = Variant of terminal deoxynucleotidyltransferase
  source 1..1587: mol_type = other DNA
atgcaccatcatcatcatcatggcggtagcggcagccacggcattcgtaccatcgattcggacttcgggaagaaacagcagaaaaaaggcgataaccacgatagttccgccacttatgaaatcaaatttcacgagtttgtgctgttcattctcgaagaaaaaatgggtgcgacgcgtcgtacttttctgacagatttagcccgcaagaaagggttccgcgtcgagaatgaactgaccgacgaagttacccacatcgtggcagaaaatctgtcacgctctgaagtattggcttggctgaaagaacacaagatggagaagaccaagcaattcgaactgctggatattagctggcttatcgaaagcatgaaagttggtaaaccggtggacaccaaggggaaataccagttggcggaatcggttgaggtgagtgcgaacccagatccgacagaaggtcgtgtaaacgagctgcctcctactatgaaaaccgtttctccgtatgcgtgtcaacgccgcaccaccctgaacaaccgtaatcaacgttttacggactcgctggaaattcttcgtgaaaattacgagttcaaacgcaacgatgatactgcgctggaatttcgtcgtgctatctccgtgctgaaaagccttccgtttgaggtacgtagcctgaaagacacggaaggattgccctggatcggtgatgaagtcaaagggattatggaagaaatcatcgaggtcggggagtcgcgtgaagtgcaggccgtgctcaatgatgagtggtatcaaagcttccaccgctttaagagtgtctttggagtgggggtgaagacagcagacaagtggtaccgtatgggtctgcgcaccctcgaggatgttcgttccagcaagaccctgaagttgaccccgatgcagaaagtaggtctgctgtattatgaagatcttgctcgcggcgttacgcgtgccgaagctgacgcgatttggctgctggttcaggatgcagtcgcaactttcgacccggatgcgatcgtggagattgtcggtggatttcgtcgtcttaaacctcagggtcacgacgttgatctgcttatcagttctccgggagctgagaaagagcaagaagaccaactcctgcagaaagtgatgaatctgtggaagaaacaagggttgttgctgtacggtcgtctggaatggacccagtgggaagatgggggttcgccttccggtaaggctgacgagggtgacgcgggtgcgaaatgctttctgatcctcaaactttatgatcatctggtgcgtaaaagcaaatggaacatgccgacgggttcgaacgtgggcgagtccaaaccgtggaaagcaattcgcgtagatctgctgcgttgcccctatggcagttttgcgtttgcgatgttgcagtggaccggaagccgcatgttccgtcgtgatctgcgttggtacgccactgacgagaagaacatgatgctggacaatcattcgctgtatgacctgaccaagggtatcttcctccctgctaaatcggaagaggaaattttcgcacatctggggcttgaatacctggaaccgttcgaacgtaacgca

SEQ ID NO: 3486 - protein, 529 aa, synthetic construct
  REGION 1..529: note = Variant of terminal deoxynucleotidyltransferase
MHHHHHHGGSGSHGIRTIDSDFGKKQQKKGDNHDSSATYEIKFHEFVLFILEEKMGATRRTFLTDLARKKGFRVENELTDEVTHIVAENLSRSEVLAWLKEHKMEKTKQFELLDISWLIESMKVGKPVDTKGKYQLAESVEVSANPDPTEGRVNELPPTMKTVSPYACQRRTTLNNRNQRFTDSLEILRENYEFKRNDDTALEFRRAISVLKSLPFEVRSLKDTEGLPWIGDEVKGIMEEIIEVGESREVQAVLNDEWYQSFHRFKSVFGVGVKTADKWYRMGLRTLEDVRSSKTLKLTPMQKVGLLYYEDLARGVTRAEADAIWLLVQDAVATFDPDAIVEIVGGFRRLKPQGHDVDLLISSPGAEKEQEDQLLQKVMNLWKKQGLLLYGRLEWTQWEDGGSPSGKADEGDAGAKCFLILKLYDHLVRKSKWNMPTGSNVGESKPWKAIRVDLLRCPYGSFAFAMLQWTGSRMFRRDLRWYATDEKNMMLDNHSLYDLTKGIFLPAKSEEEIFAHLGLEYLEPFERNA

SEQ ID NO: 3487 - DNA, 1587 bp, synthetic construct
  misc_feature 1..1587: note = Variant of terminal deoxynucleotidyltransferase
  source 1..1587: mol_type = other DNA
atgcaccatcatcatcatcatggcggtagcggcagccacggcattcgtaccatcgattcggacttcgggaagaaacagcagaaaaaaggcgataaccacgatagttccgccacttatgaaatcaaatttcacgagtttgtgctgttcattctcgaagaaaaaatgggtgcgacgcgtcgtacttttctgacagatttagcccgcaagaaagggttccgcgtcgagaatgaactgaccgacgaagttacccacatcgtggcagaaaatctgtcacgctctgaagtattggcttggctgaaagaacacaagatggagaagaccaagcaattcgaactgctggatattagctggcttatcgaaagcatgaaagttggtaaaccggtggacaccaaggggaaataccagttggcggaatcggttgaggtgagtgcgaacccagatccgacagaaggtcgtgtaaacgagctgcctcctactatgaaaaccgtttctccgtatgcgtgtcaacgccgcaccaccctgaacaaccgtaatcaacgttttacggactcgctggaaattcttcgtgaaaattacgagttcaaacgcaacgatgatactgcgctggaatttcgtcgtgctatctccgtgctgaaaagccttccgtttgaggtacgtagcctgaaagacacggaaggattgccctggatcggtgatgaagtcaaagggattatggaagaaatcatcgaggtcggggagtcgcgtgaagtgcaggccgtgctcaatgatgagtggtatcaaagcttccaccgctttaagagtgtctttggagtgggggtgaagacagcagacaagtggtaccgtatgggtctgcgcaccctcgaggatgttcgttccagcaagaccctgaagttgaccccgatgcagaaagtaggtctgctgtattatgaagatcttgctcgcggcgttacgcgtgccgaagctgacgcgatttggctgctggttcaggatgcagtcgcaactttcgacccggatgcgatcgtggagattgtcggtggatttcgtcgtgggaaacctcagggtcacgacgttgatctgcttatcagttctccgggagctgagaaagagcaagaagaccaactcctgcagaaagtgatgaatctgtggaagaaacaagggttgttgctgtacggtcgtctggaatggacccagtgggaagatgggggttcgccttccggtaaggctgacgagggtgactttggtgcgaaatgctttctgatcctcaaactttatgatcatctggtgcgtaaaagcaaatggaacatgccgacgggttcgaacgtgggcgagtccaaaccgtggaaagcaattcgcgtagatctgctgcgttgcccctatggcagttttgcgtttgcgatgttgcagtggaccggaagccgcatgttccgtcgtgatctgcgttggtacgccactgacgagaagaacatgatgctggacaatcattcgctgtatgacctgaccaagggtatcttcctccctgctaaatcggaagaggaaattttcgcacatctggggcttgaatacctggaaccgttcgaacgtaacgca

SEQ ID NO: 3488 - protein, 529 aa, synthetic construct
  REGION 1..529: note = Variant of terminal deoxynucleotidyltransferase
MHHHHHHGGSGSHGIRTIDSDFGKKQQKKGDNHDSSATYEIKFHEFVLFILEEKMGATRRTFLTDLARKKGFRVENELTDEVTHIVAENLSRSEVLAWLKEHKMEKTKQFELLDISWLIESMKVGKPVDTKGKYQLAESVEVSANPDPTEGRVNELPPTMKTVSPYACQRRTTLNNRNQRFTDSLEILRENYEFKRNDDTALEFRRAISVLKSLPFEVRSLKDTEGLPWIGDEVKGIMEEIIEVGESREVQAVLNDEWYQSFHRFKSVFGVGVKTADKWYRMGLRTLEDVRSSKTLKLTPMQKVGLLYYEDLARGVTRAEADAIWLLVQDAVATFDPDAIVEIVGGFRRGKPQGHDVDLLISSPGAEKEQEDQLLQKVMNLWKKQGLLLYGRLEWTQWEDGGSPSGKADEGDFGAKCFLILKLYDHLVRKSKWNMPTGSNVGESKPWKAIRVDLLRCPYGSFAFAMLQWTGSRMFRRDLRWYATDEKNMMLDNHSLYDLTKGIFLPAKSEEEIFAHLGLEYLEPFERNA

SEQ ID NO: 3489 - DNA, 1587 bp, synthetic construct
  misc_feature 1..1587: note = Variant of terminal deoxynucleotidyltransferase
  source 1..1587: mol_type = other DNA
atgcaccatcatcatcatcatggcggtagcggcagccacggcattcgtaccatcgattcggacttcgggaagaaacagcagaaaaaaggcgataaccacgatagttccgccacttatgaaatcaaatttcacgagtttgtgctgttcattctcgaagaaaaaatgggtgcgacgcgtcgtacttttctgacagatttagcccgcaagaaagggttccgcgtcgagaatgaactgaccgacgaagttacccacatcgtggcagaaaatctgtcacgctctgaagtattggcttggctgaaagaacacaagatggagaagaccaagcaattcgaactgctggatattagctggcttatcgaaagcatgaaagttggtaaaccggtggacaccaaggggaaataccagttggcggaatcggttgaggtgagtgcgaacccagatccgacagaaggtcgtgtaaacgagctgcctcctactatgaaaaccgtttctccgtatgcgtgtcaacgccgcaccaccctgaacaaccgtaatcaacgttttacggactcgctggaaattcttcgtgaaaattacgagttcaaacgcaacgatgatactgcgctggaatttcgtcgtgctatctccgtgctgaaaagccttccgtttgaggtacgtagcctgaaagacacggaaggattgccctggatcggtgatgaagtcaaagggattatggaagaaatcatcgaggtcggggagtcgcgtgaagtgcaggccgtgctcaatgatgagtggtatcaaagcttccaccgctttaagagtgtctttggagtgggggtgaagacagcagacaagtggtaccgtatgggtctgcgcaccctcgaggatgttcgttccagcaagaccctgaagttgaccccgatgcagaaagtaggtctgctgtatattgaagatcttgctcgcggcgttacgcgtgccgaagctgacgcgatttggctgctggttcaggatgcagtcgcaactttcgacccggatgcgatcgtggagattgtcggtggatttcgtcgtgggaaacctcagggtcacgacgttgatctgcttatcagttctccgggagctgagaaagagcaagaagaccaactcctgcagaaagtgatgaatctgtggaagaaacaagggttgttgctgtacggtcgtctggaatggacccagtgggaagatgggggttcgccttccggtaaggctgacgagggtgacgcgggtgcgaaatgctttctgatcctcaaactttatgatcatctggtgcgtaaaagcaaatggaacatgccgacgggttcgaacgtgggcgagtccaaaccgtggaaagcaattcgcgtagatctgctgcgttgcccctatggcagttttgcgtttgcgatgttgcagtggaccggaagccgcatgttccgtcgtgatctgcgttggtacgccactgacgagaagaacatgatgctggacaatcattcgctgtatgacctgaccaagggtatcttcctccctgctaaatcggaagaggaaattttcgcacatctggggcttgaatacctggaaccgttcgaacgtaacgca

SEQ ID NO: 3490 - protein, 529 aa, synthetic construct
  REGION 1..529: note = Variant of terminal deoxynucleotidyltransferase
MHHHHHHGGSGSHGIRTIDSDFGKKQQKKGDNHDSSATYEIKFHEFVLFILEEKMGATRRTFLTDLARKKGFRVENELTDEVTHIVAENLSRSEVLAWLKEHKMEKTKQFELLDISWLIESMKVGKPVDTKGKYQLAESVEVSANPDPTEGRVNELPPTMKTVSPYACQRRTTLNNRNQRFTDSLEILRENYEFKRNDDTALEFRRAISVLKSLPFEVRSLKDTEGLPWIGDEVKGIMEEIIEVGESREVQAVLNDEWYQSFHRFKSVFGVGVKTADKWYRMGLRTLEDVRSSKTLKLTPMQKVGLLYIEDLARGVTRAEADAIWLLVQDAVATFDPDAIVEIVGGFRRGKPQGHDVDLLISSPGAEKEQEDQLLQKVMNLWKKQGLLLYGRLEWTQWEDGGSPSGKADEGDAGAKCFLILKLYDHLVRKSKWNMPTGSNVGESKPWKAIRVDLLRCPYGSFAFAMLQWTGSRMFRRDLRWYATDEKNMMLDNHSLYDLTKGIFLPAKSEEEIFAHLGLEYLEPFERNA

SEQ ID NO: 3491 - DNA, 1587 bp, synthetic construct
  misc_feature 1..1587: note = Variant of terminal deoxynucleotidyltransferase
  source 1..1587: mol_type = other DNA
atgcaccatcatcatcatcatggcggtagcggcagccacggcattcgtaccatcgattcggacttcgggaagaaacagcagaaaaaaggcgataaccacgatagttccgccacttatgaaatcaaatttcacgagtttgtgctgttcattctcgaagaaaaaatgggtgcgacgcgtcgtacttttctgacagatttagcccgcaagaaagggttccgcgtcgagaatgaactgaccgacgaagttacccacatcgtggcagaaaatctgtcacgctctgaagtattggcttggctgaaagaacacaagatggagaagaccaagcaattcgaactgctggatattagctggcttatcgaaagcatgaaagttggtaaaccggtggacaccaaggggaaataccagttggcggaatcggttgaggtgagtgcgaacccagatccgacagaaggtcgtgtaaacgagctgcctcctactatgaaaaccgtttctccgtatgcgtgtcaacgccgcaccaccctgaacaaccgtaatcaacgttttacggactcgctggaaattcttcgtgaaaattacgagttcaaacgcaacgatgatactgcgctggaatttcgtcgtgctatctccgtgctgaaaagccttccgtttgaggtacgtagcctgaaagacacggaaggattgccctggatcggtgatgaagtcaaagggattatggaagaaatcatcgaggtcggggagtcgcgtgaagtgcaggccgtgctcaatgatgagtggtatcaaagcttccaccgctttaagagtgtctttggagtgggggtgaagacagcagacaagtggtaccgtatgggtctgcgcaccctcgaggatgttcgttccagcaagaccctgaagttgaccccgatgcagaaagtaggtctgctgtattatgaagatcttgctcgcggcgttacgcgtgccgaagctgacgcgatttggctgctggttcaggatgcagtcgcaactttcgacccggatgcgatcgtggagattgtcggtggatttcgtcgtgggaaacctcagggtcacgacgttgatctgcttatcagttctccgggagctgagaaagagcaagaagaccaactcctgcagaaagtgatgaatctgtggaagaaacaagggttgttgctgtacggtcgtctggaatggacccagtgggaagatgggggttcgccttccggtaaggtggacgagggtgacgcgggtgcgaaatgctttctgatcctcaaactttatgatcatctggtgcgtaaaagcaaatggaacatgccgacgggttcgaacgtgggcgagtccaaaccgtggaaagcaattcgcgtagatctgctgcgttgcccctatggcagttttgcgtttgcgatgttgcagtggaccggaagccgcatgttccgtcgtgatctgcgttggtacgccactgacgagaagaacatgatgctggacaatcattcgctgtatgacctgaccaagggtatcttcctccctgctaaatcggaagaggaaattttcgcacatctggggcttgaatacctggaaccgttcgaacgtaacgca

SEQ ID NO: 3492 - protein, 529 aa, synthetic construct
  REGION 1..529: note = Variant of terminal deoxynucleotidyltransferase
MHHHHHHGGSGSHGIRTIDSDFGKKQQKKGDNHDSSATYEIKFHEFVLFILEEKMGATRRTFLTDLARKKGFRVENELTDEVTHIVAENLSRSEVLAWLKEHKMEKTKQFELLDISWLIESMKVGKPVDTKGKYQLAESVEVSANPDPTEGRVNELPPTMKTVSPYACQRRTTLNNRNQRFTDSLEILRENYEFKRNDDTALEFRRAISVLKSLPFEVRSLKDTEGLPWIGDEVKGIMEEIIEVGESREVQAVLNDEWYQSFHRFKSVFGVGVKTADKWYRMGLRTLEDVRSSKTLKLTPMQKVGLLYYEDLARGVTRAEADAIWLLVQDAVATFDPDAIVEIVGGFRRGKPQGHDVDLLISSPGAEKEQEDQLLQKVMNLWKKQGLLLYGRLEWTQWEDGGSPSGKVDEGDAGAKCFLILKLYDHLVRKSKWNMPTGSNVGESKPWKAIRVDLLRCPYGSFAFAMLQWTGSRMFRRDLRWYATDEKNMMLDNHSLYDLTKGIFLPAKSEEEIFAHLGLEYLEPFERNA

SEQ ID NO: 3493 - DNA, 1587 bp, synthetic construct
  misc_feature 1..1587: note = Variant of terminal deoxynucleotidyltransferase
  source 1..1587: mol_type = other DNA
atgcaccatcatcatcatcatggcggtagcggcagccacggcattcgtaccatcgattcggacttcgggaagaaacagcagaaaaaaggcgataaccacgatagttccgccacttatgaaatcaaatttcacgagtttgtgctgttcattctcgaagaaaaaatgggtgcgacgcgtcgtacttttctgacagatttagcccgcaagaaagggttccgcgtcgagaatgaactgaccgacgaagttacccacatcgtggcagaaaatctgtcacgctctgaagtattggcttggctgaaagaacacaagatggagaagaccaagcaattcgaactgctggatattagctggcttatcgaaagcatgaaagttggtaaaccggtggacaccaaggggaaataccagttggcggaatcggttgaggtgagtgcgaacccagatccgacagaaggtcgtgtaaacgagctgcctcctactatgaaaaccgtttctccgtatgcgtgtcaacgccgcaccaccctgaacaaccgtaatcaacgttttacggactcgctggaaattcttcgtgaaaattacgagttcaaacgcaacgatgatactgcgctggaatttcgtcgtgctatctccgtgctgaaaagccttccgtttgaggtacgtagcctgaaagacacggaaggattgccctggatcggtgatgaagtcaaagggattatggaagaaatcatcgaggtcggggagtcgcgtgaagtgcaggccgtgctcaatgatgagtggtatcaaagcttccaccgctttaagagtgtctttggagtgggggtgaagacagcagacaagtggtaccgtatgggtctgcgcaccctcgaggatgttcgttccagcaagaccctgaagttgaccccgatgcagaaagtaggtctgctgtattatgaagatcttgctcgcggcgttacgcgtgccgaagctgacgcgatttggctgctggttcaggatgcagtcgcaactttcgacccggatgcgatcgtggagattgtcggtggatttcgtcgtgggaaagtgcagggtcacgacgttgatctgcttatcagttctccgggagctgagaaagagcaagaagaccaactcctgcagaaagtgatgaatctgtggaagaaacaagggttgttgctgtacggtcgtctggaatggacccagtgggaagatgggggttcgccttccggtaaggctgacgagggtgacgcgggtgcgaaatgctttctgatcctcaaactttatgatcatctggtgcgtaaaagcaaatggaacatgccgacgggttcgaacgtgggcgagtccaaaccgtggaaagcaattcgcgtagatctgctgcgttgcccctatggcagttttgcgtttgcgatgttgcagtggaccggaagccgcatgttccgtcgtgatctgcgttggtacgccactgacgagaagaacatgatgctggacaatcattcgctgtatgacctgaccaagggtatcttcctccctgctaaatcggaagaggaaattttcgcacatctggggcttgaatacctggaaccgttcgaacgtaacgca

SEQ ID NO: 3494 - protein, 529 aa, synthetic construct
  REGION 1..529: note = Variant of terminal deoxynucleotidyltransferase
MHHHHHHGGSGSHGIRTIDSDFGKKQQKKGDNHDSSATYEIKFHEFVLFILEEKMGATRRTFLTDLARKKGFRVENELTDEVTHIVAENLSRSEVLAWLKEHKMEKTKQFELLDISWLIESMKVGKPVDTKGKYQLAESVEVSANPDPTEGRVNELPPTMKTVSPYACQRRTTLNNRNQRFTDSLEILRENYEFKRNDDTALEFRRAISVLKSLPFEVRSLKDTEGLPWIGDEVKGIMEEIIEVGESREVQAVLNDEWYQSFHRFKSVFGVGVKTADKWYRMGLRTLEDVRSSKTLKLTPMQKVGLLYYEDLARGVTRAEADAIWLLVQDAVATFDPDAIVEIVGGFRRGKVQGHDVDLLISSPGAEKEQEDQLLQKVMNLWKKQGLLLYGRLEWTQWEDGGSPSGKADEGDAGAKCFLILKLYDHLVRKSKWNMPTGSNVGESKPWKAIRVDLLRCPYGSFAFAMLQWTGSRMFRRDLRWYATDEKNMMLDNHSLYDLTKGIFLPAKSEEEIFAHLGLEYLEPFERNA

SEQ ID NO: 3495 - DNA, 1587 bp, synthetic construct
  misc_feature 1..1587: note = Variant of terminal deoxynucleotidyltransferase
  source 1..1587: mol_type = other DNA
atgcaccatcatcatcatcatggcggtagcggcagccacggcattcgtaccatcgattcggacttcgggaagaaacagcagaaaaaaggcgataaccacgatagttccgccacttatgaaatcaaatttcacgagtttgtgctgttcattctcgaagaaaaaatgggtgcgacgcgtcgtacttttctgacagatttagcccgcaagaaagggttccgcgtcgagaatgaactgaccgacgaagttacccacatcgtggcagaaaatctgtcacgctctgaagtattggcttggctgaaagaacacaagatggagaagaccaagcaattcgaactgctggatattagctggcttatcgaaagcatgaaagttggtaaaccggtggacaccaaggggaaataccagttggcggaatcggttgaggtgagtgcgaacccagatccgacagaaggtcgtgtaaacgagctgcctcctactatgaaaaccgtttctccgtatgcgtgtcaacgccgcaccaccctgaacaaccgtaatcaacgttttacggactcgctggaaattcttcgtgaaaattacgagttcaaacgcaacgatgatactgcgctggaatttcgtcgtgctatctccgtgctgaaaagccttccgtttgaggtacgtagcctgaaagacacggaaggattgccctggatcggtgatgaagtcaaagggattatggaagaaatcatcgaggtcggggagtcgcgtgaagtgcaggccgtgctcaatgatgagtggtatcaaagcttccaccgctttaagagtgtctttggagtgggggtgaagacagcagacaagtggtacttgatgggtctgcgcaccctcgaggatgttcgttccagcaagaccctgaagttgaccccgatgcagaaagtaggtctgctgtattatgaagatcttgctcgcggcgttacgcgtgccgaagctgacgcgatttggctgctggttcaggatgcagtcgcaactttcgacccggatgcgatcgtggagattgtcggtggatttcgtcgtgggaaacctcagggtcacgacgttgatctgcttatcagttctccgggagctgagaaagagcaagaagaccaactcctgcagaaagtgatgaatctgtggaagaaacaagggttgttgctgtacggtcgtctggaatggacccagtgggaagatgggggttcgccttccggtaaggctgacgagggtgacgcgggtgcgaaatgctttctgatcctcaaactttatgatcatctggtgcgtaaaagcaaatggaacatgccgacgggttcgaacgtgggcgagtccaaaccgtggaaagcaattcgcgtagatctgctgcgttgcccctatggcagttttgcgtttgcgatgttgcagtggaccggaagccgcatgttccgtcgtgatctgcgttggtacgccactgacgagaagaacatgatgctggacaatcattcgctgtatgacctgaccaagggtatcttcctccctgctaaatcggaagaggaaattttcgcacatctggggcttgaatacctggaaccgttcgaacgtaacgca

SEQ ID NO: 3496 - protein, 529 aa, synthetic construct
  REGION 1..529: note = Variant of terminal deoxynucleotidyltransferase
MHHHHHHGGSGSHGIRTIDSDFGKKQQKKGDNHDSSATYEIKFHEFVLFILEEKMGATRRTFLTDLARKKGFRVENELTDEVTHIVAENLSRSEVLAWLKEHKMEKTKQFELLDISWLIESMKVGKPVDTKGKYQLAESVEVSANPDPTEGRVNELPPTMKTVSPYACQRRTTLNNRNQRFTDSLEILRENYEFKRNDDTALEFRRAISVLKSLPFEVRSLKDTEGLPWIGDEVKGIMEEIIEVGESREVQAVLNDEWYQSFHRFKSVFGVGVKTADKWYLMGLRTLEDVRSSKTLKLTPMQKVGLLYYEDLARGVTRAEADAIWLLVQDAVATFDPDAIVEIVGGFRRGKPQGHDVDLLISSPGAEKEQEDQLLQKVMNLWKKQGLLLYGRLEWTQWEDGGSPSGKADEGDAGAKCFLILKLYDHLVRKSKWNMPTGSNVGESKPWKAIRVDLLRCPYGSFAFAMLQWTGSRMFRRDLRWYATDEKNMMLDNHSLYDLTKGIFLPAKSEEEIFAHLGLEYLEPFERNA

SEQ ID NO: 3497 - DNA, 1587 bp, synthetic construct
  misc_feature 1..1587: note = Variant of terminal deoxynucleotidyltransferase
  source 1..1587: mol_type = other DNA
atgcaccatcatcatcatcatggcggtagcggcagccacggcattcgtaccatcgattcggacttcgggaagaaacagcagaaaaaaggcgataaccacgatagttccgccacttatgaaatcaaatttcacgagtttgtgctgttcattctcgaagaaaaaatgggtgcgacgcgtcgtacttttctgacagatttagcccgcaagaaagggttccgcgtcgagaatgaactgaccgacgaagttacccacatcgtggcagaaaatctgtcacgctctgaagtattggcttggctgaaagaacacaagatggagaagaccaagcaattcgaactgctggatattagctggcttatcgaaagcatgaaagttggtaaaccggtggacaccaaggggaaataccagttggcggaatcggttgaggtgagtgcgaacccagatccgacagaaggtcgtgtaaacgagctgcctcctactatgaaaaccgtttctccgtatgcgtgtcaacgccgcaccaccctgaacaaccgtaatcaacgttttacggactcgctggaaattcttcgtgaaaattacgagttcaaacgcaacgatgatactgcgctggaatttcgtcgtgctatctccgtgctgaaaagccttccgtttgaggtacgtagcctgaaagacacggaaggattgccctggatcggtgatgaagtcaaagggattatggaagaaatcatcgaggtcggggagtcgcgtgaagtgcaggccgtgctcaatgatgagtggtatcaaagcttccaccgctttaagagtgtctttggagtgggggtgaagacagcagacaagtggtacaagatgggtctgcgcaccctcgaggatgttcgttccagcaagaccctgaagttgaccccgatgcagaaagtaggtctgctgtattatgaagatcttgctcgcggcgttacgcgtgccgaagctgacgcgatttggctgctggttcaggatgcagtcgcaactttcgacccggatgcgatcgtggagattgtcggtggatttcgtcgtgggaaacctcagggtcacgacgttgatctgcttatcagttctccgggagctgagaaagagcaagaagaccaactcctgcagaaagtgatgaatctgtggaagaaacaagggttgttgctgtacggtcgtctggaatggacccagtgggaagatgggggttcgccttccggtaaggctgacgagggtgacgcgggtgcgaaatgctttctgatcctcaaactttatgatcatctggtgcgtaaaagcaaatggaacatgccgacgggttcgaacgtgggcgagtccaaaccgtggaaagcaattcgcgtagatctgctgcgttgcccctatggcagttttgcgtttgcgatgttgcagtggaccggaagccgcatgttccgtcgtgatctgcgttggtacgccactgacgagaagaacatgatgctggacaatcattcgctgtatgacctgaccaagggtatcttcctccctgctaaatcggaagaggaaattttcgcacatctggggcttgaatacctggaaccgttcgaacgtaacgca

SEQ ID NO: 3498 - protein, 529 aa, synthetic construct
  REGION 1..529: note = Variant of terminal deoxynucleotidyltransferase
MHHHHHHGGSGSHGIRTIDSDFGKKQQKKGDNHDSSATYEIKFHEFVLFILEEKMGATRRTFLTDLARKKGFRVENELTDEVTHIVAENLSRSEVLAWLKEHKMEKTKQFELLDISWLIESMKVGKPVDTKGKYQLAESVEVSANPDPTEGRVNELPPTMKTVSPYACQRRTTLNNRNQRFTDSLEILRENYEFKRNDDTALEFRRAISVLKSLPFEVRSLKDTEGLPWIGDEVKGIMEEIIEVGESREVQAVLNDEWYQSFHRFKSVFGVGVKTADKWYKMGLRTLEDVRSSKTLKLTPMQKVGLLYYEDLARGVTRAEADAIWLLVQDAVATFDPDAIVEIVGGFRRGKPQGHDVDLLISSPGAEKEQEDQLLQKVMNLWKKQGLLLYGRLEWTQWEDGGSPSGKADEGDAGAKCFLILKLYDHLVRKSKWNMPTGSNVGESKPWKAIRVDLLRCPYGSFAFAMLQWTGSRMFRRDLRWYATDEKNMMLDNHSLYDLTKGIFLPAKSEEEIFAHLGLEYLEPFERNA

SEQ ID NO: 3499 - DNA, 1587 bp, synthetic construct
  misc_feature 1..1587: note = Variant of terminal deoxynucleotidyltransferase
  source 1..1587: mol_type = other DNA
atgcaccatcatcatcatcatggcggtagcggcagccacggcattcgtaccatcgattcggacttcgggaagaaacagcagaaaaaaggcgataaccacgatagttccgccacttatgaaatcaaatttcacgagtttgtgctgttcattctcgaagaaaaaatgggtgcgacgcgtcgtacttttctgacagatttagcccgcaagaaagggttccgcgtcgagaatgaactgaccgacgaagttacccacatcgtggcagaaaatctgtcacgctctgaagtattggcttggctgaaagaacacaagatggagaagaccaagcaattcgaactgctggatattagctggcttatcgaaagcatgaaagttggtaaaccggtggacaccaaggggaaataccagttggcggaatcggttgaggtgagtgcgaacccagatccgacagaaggtcgtgtaaacgagctgcctcctactatgaaaaccgtttctccgtatgcgtgtcaacgccgcaccaccctgaacaaccgtaatcaacgttttacggactcgctggaaattcttcgtgaaaattacgagttcaaacgcaacgatgatactgcgctggaatttcgtcgtgctatctccgtgctgaaaagccttccgtttgaggtacgtagcctgaaagacacggaaggattgccctggatcggtgatgaagtcaaagggattatggaagaaatcatcgaggtcggggagtcgcgtgaagtgcaggccgtgctcaatgatgagtggtatcaaagcttccaccgctttaagagtgtctttggagtgggggtgaagacagcagacaagtggtaccgtatgggtctgcgcaccctcgaggatgttcgttccagcaagaccctgaagttgaccccgatgcagaaagtaggtctgctgtattatgaagatcttgctcgcggcgttacgcgtgccgaagctgacgcgatttggctgctggttcaggatgcagtcgcaactttcgacccggatgcgatcgtggagattgtcggtggatttcgtcgtgggaaacctcagggtcacgacgttgatctgcttatcagttctccgggagctgagaaagagcaagaagaccaactcctgcagaaagtgatgaatctgtggaagaaacaagggttgttgctgtacggtcgtctggaatggacccagtgggaagatgggggttcgccttccggtaaggctgacgagggtgacgcgggtgcgaaatgctttctgatcctcaaactttatgatcatctggtgcgtaaaagcaaatggaacatgccgacgggttcgaacgtgggcgagtccaaaccgtggaaagcaattcgcgtagatctgctgcgttgcccctatggcagttttgcgtttgcgatgttgcagtggaccggaagccgcatgttccgtcgtgatgtgcgttggtacgccactgacgagaagaacatgatgctggacaatcattcgctgtatgacctgaccaagggtatcttcctccctgctaaatcggaagaggaaattttcgcacatctggggcttgaatacctggaaccgttcgaacgtaacgca

SEQ ID NO: 3500 - protein, 529 aa, synthetic construct
  REGION 1..529: note = Variant of terminal deoxynucleotidyltransferase
MHHHHHHGGSGSHGIRTIDSDFGKKQQKKGDNHDSSATYEIKFHEFVLFILEEKMGATRRTFLTDLARKKGFRVENELTDEVTHIVAENLSRSEVLAWLKEHKMEKTKQFELLDISWLIESMKVGKPVDTKGKYQLAESVEVSANPDPTEGRVNELPPTMKTVSPYACQRRTTLNNRNQRFTDSLEILRENYEFKRNDDTALEFRRAISVLKSLPFEVRSLKDTEGLPWIGDEVKGIMEEIIEVGESREVQAVLNDEWYQSFHRFKSVFGVGVKTADKWYRMGLRTLEDVRSSKTLKLTPMQKVGLLYYEDLARGVTRAEADAIWLLVQDAVATFDPDAIVEIVGGFRRGKPQGHDVDLLISSPGAEKEQEDQLLQKVMNLWKKQGLLLYGRLEWTQWEDGGSPSGKADEGDAGAKCFLILKLYDHLVRKSKWNMPTGSNVGESKPWKAIRVDLLRCPYGSFAFAMLQWTGSRMFRRDVRWYATDEKNMMLDNHSLYDLTKGIFLPAKSEEEIFAHLGLEYLEPFERNA

SEQ ID NO: 3501 - DNA, 1587 bp, synthetic construct
  misc_feature 1..1587: note = Variant of terminal deoxynucleotidyltransferase
  source 1..1587: mol_type = other DNA
atgcaccatcatcatcatcatggcggtagcggcagccacggcattcgtaccatcgattcggacttcgggaagaaacagcagaaaaaaggcgataaccacgatagttccgccacttatgaaatcaaatttcacgagtttgtgctgttcattctcgaagaaaaaatgggtgcgacgcgtcgtacttttctgacagatttagcccgcaagaaagggttccgcgtcgagaatgaactgaccgacgaagttacccacatcgtggcagaaaatctgtcacgctctgaagtattggcttggctgaaagaacacaagatggagaagaccaagcaattcgaactgctggatattagctggcttatcgaaagcatgaaagttggtaaaccggtggacaccaaggggaaataccagttggcggaatcggttgaggtgagtgcgaacccagatccgacagaaggtcgtgtaaacgagctgcctcctactatgaaaaccgtttctccgtatgcgtgtcaacgccgcaccaccctgaacaaccgtaatcaacgttttacggactcgctggaaattcttcgtgaaaattacgagttcaaacgcaacgatgatactgcgctggaatttcgtcgtgctatctccgtgctgaaaagccttccgtttgaggtacgtagcctgaaagacacggaaggattgccctggatcggtgatgaagtcaaagggattatggaagaaatcatcgaggtcggggagtcgcgtgaagtgcaggccgtgctcaatgatgagtggtatcaaagcttccaccgctttaagagtgtctttggagtgggggtgaagacagcagacaagtggtaccgtatgggtctgcgcaccctcgaggatgttcgttccagcaagaccctgaagttgaccccgatgcagaaagtaggtctgctgtattatgaagatactgctcgcggcgttacgcgtgccgaagctgacgcgatttggctgctggttcaggatgcagtcgcaactttcgacccggatgcgatcgtggagattgtcggtggatttcgtcgtgggaaacctcagggtcacgacgttgatctgcttatcagttctccgggagctgagaaagagcaagaagaccaactcctgcagaaagtgatgaatctgtggaagaaacaagggttgttgctgtacggtcgtctggaatggacccagtgggaagatgggggttcgccttccggtaaggctgacgagggtgacgcgggtgcgaaatgctttctgatcctcaaactttatgatcatctggtgcgtaaaagcaaatggaacatgccgacgggttcgaacgtgggcgagtccaaaccgtggaaagcaattcgcgtagatctgctgcgttgcccctatggcagttttgcgtttgcgatgttgcagtggaccggaagccgcatgttccgtcgtgatctgcgttggtacgccactgacgagaagaacatgatgctggacaatcattcgctgtatgacctgaccaagggtatcttcctccctgctaaatcggaagaggaaattttcgcacatctggggcttgaatacctggaaccgttcgaacgtaacgca

SEQ ID NO: 3502 - protein, 529 aa, synthetic construct
  REGION 1..529: note = Variant of terminal deoxynucleotidyltransferase
MHHHHHHGGSGSHGIRTIDSDFGKKQQKKGDNHDSSATYEIKFHEFVLFILEEKMGATRRTFLTDLARKKGFRVENELTDEVTHIVAENLSRSEVLAWLKEHKMEKTKQFELLDISWLIESMKVGKPVDTKGKYQLAESVEVSANPDPTEGRVNELPPTMKTVSPYACQRRTTLNNRNQRFTDSLEILRENYEFKRNDDTALEFRRAISVLKSLPFEVRSLKDTEGLPWIGDEVKGIMEEIIEVGESREVQAVLNDEWYQSFHRFKSVFGVGVKTADKWYRMGLRTLEDVRSSKTLKLTPMQKVGLLYYEDTARGVTRAEADAIWLLVQDAVATFDPDAIVEIVGGFRRGKPQGHDVDLLISSPGAEKEQEDQLLQKVMNLWKKQGLLLYGRLEWTQWEDGGSPSGKADEGDAGAKCFLILKLYDHLVRKSKWNMPTGSNVGESKPWKAIRVDLLRCPYGSFAFAMLQWTGSRMFRRDLRWYATDEKNMMLDNHSLYDLTKGIFLPAKSEEEIFAHLGLEYLEPFERNA

SEQ ID NO: 3503 - DNA, 1587 bp, synthetic construct
  misc_feature 1..1587: note = Variant of terminal deoxynucleotidyltransferase
  source 1..1587: mol_type = other DNA
atgcaccatcatcatcatcatggcggtagcggcagccacggcattcgtaccatcgattcggacttcgggaagaaacagcagaaaaaaggcgataaccacgatagttccgccacttatgaaatcaaatttcacgagtttgtgctgttcattctcgaagaaaaaatgggtgcgacgcgtcgtacttttctgacagatttagcccgcaagaaagggttccgcgtcgagaatgaactgaccgacgaagttacccacatcgtggcagaaaatctgtcacgctctgaagtattggcttggctgaaagaacacaagatggagaagaccaagcaattcgaactgctggatattagctggcttatcgaaagcatgaaagttggtaaaccggtggacaccaaggggaaataccagttggcggaatcggttgaggtgagtgcgaacccagatccgacagaaggtcgtgtaaacgagctgcctcctactatgaaaaccgtttctccgtatgcgtgtcaacgccgcaccaccctgaacaaccgtaatcaacgttttacggactcgctggaaattcttcgtgaaaattacgagttcaaacgcaacgatgatactgcgctggaatttcgtcgtgctatctccgtgctgaaaagccttccgtttgaggtacgtagcctgaaagacacggaaggattgccctggatcggtgatgaagtcaaagggattatggaagaaatcatcgaggtcggggagtcgcgtgaagtgcaggccgtgctcaatgatgagtggtatcaaagcttccaccgctttaagagtgtctttggagtgggggtgaagacagcagacaagtggtaccgtatgggtctgcgcaccctcgaggatgttcgttccagcaagaccctgaagttgaccccgatgcagaaaacgggtctgctgtattatgaagatcttgctcgcggcgttacgcgtgccgaagctgacgcgatttggctgctggttcaggatgcagtcgcaactttcgacccggatgcgatcgtggagattgtcggtggatttcgtcgtgggaaacctcagggtcacgacgttgatctgcttatcagttctccgggagctgagaaagagcaagaagaccaactcctgcagaaagtgatgaatctgtggaagaaacaagggttgttgctgtacggtcgtctggaatggacccagtgggaagatgggggttcgccttccggtaaggctgacgagggtgacgcgggtgcgaaatgctttctgatcctcaaactttatgatcatctggtgcgtaaaagcaaatggaacatgccgacgggttcgaacgtgggcgagtccaaaccgtggaaagcaattcgcgtagatctgctgcgttgcccctatggcagttttgcgtttgcgatgttgcagtggaccggaagccgcatgttccgtcgtgatctgcgttggtacgccactgacgagaagaacatgatgctggacaatcattcgctgtatgacctgaccaagggtatcttcctccctgctaaatcggaagaggaaattttcgcacatctggggcttgaatacctggaaccgttcgaacgtaacgca

SEQ ID NO: 3504 - protein, 529 aa, synthetic construct
  REGION 1..529: note = Variant of terminal deoxynucleotidyltransferase
MHHHHHHGGSGSHGIRTIDSDFGKKQQKKGDNHDSSATYEIKFHEFVLFILEEKMGATRRTFLTDLARKKGFRVENELTDEVTHIVAENLSRSEVLAWLKEHKMEKTKQFELLDISWLIESMKVGKPVDTKGKYQLAESVEVSANPDPTEGRVNELPPTMKTVSPYACQRRTTLNNRNQRFTDSLEILRENYEFKRNDDTALEFRRAISVLKSLPFEVRSLKDTEGLPWIGDEVKGIMEEIIEVGESREVQAVLNDEWYQSFHRFKSVFGVGVKTADKWYRMGLRTLEDVRSSKTLKLTPMQKTGLLYYEDLARGVTRAEADAIWLLVQDAVATFDPDAIVEIVGGFRRGKPQGHDVDLLISSPGAEKEQEDQLLQKVMNLWKKQGLLLYGRLEWTQWEDGGSPSGKADEGDAGAKCFLILKLYDHLVRKSKWNMPTGSNVGESKPWKAIRVDLLRCPYGSFAFAMLQWTGSRMFRRDLRWYATDEKNMMLDNHSLYDLTKGIFLPAKSEEEIFAHLGLEYLEPFERNA

SEQ ID NO: 3505 - DNA, 1587 bp, synthetic construct
  misc_feature 1..1587: note = Variant of terminal deoxynucleotidyltransferase
  source 1..1587: mol_type = other DNA
atgcaccatcatcatcatcatggcggtagcggcagccacggcattcgtaccatcgattcggacttcgggaagaaacagcagaaaaaaggcgataaccacgatagttccgccacttatgaaatcaaatttcacgagtttgtgctgttcattctcgaagaaaaaatgggtgcgacgcgtcgtacttttctgacagatttagcccgcaagaaagggttccgcgtcgagaatgaactgaccgacgaagttacccacatcgtggcagaaaatctgtcacgctctgaagtattggcttggctgaaagaacacaagatggagaagaccaagcaattcgaactgctggatattagctggcttatcgaaagcatgaaagttggtaaaccggtggacaccaaggggaaataccagttggcggaatcggttgaggtgagtgcgaacccagatccgacagaaggtcgtgtaaacgagctgcctcctactatgaaaaccgtttctccgtatgcgtgtcaacgccgcaccaccctgaacaaccgtaatcaacgttttacggactcgctggaaattcttcgtgaaaattactctttcaaacgcaacgatgatactgcgctggaatttcgtcgtgctatctccgtgctgaaaagccttccgtttgaggtacgtagcctgaaagacacggaaggattgccctggatcggtgatgaagtcaaagggattatggaagaaatcatcgaggtcggggagtcgcgtgaagtgcaggccgtgctcaatgatgagtggtatcaaagcttccaccgctttaagagtgtctttggagtgggggtgaagacagcagacaagtggtaccgtatgggtctgcgcaccctcgaggatgttcgttccagcaagaccctgaagttgaccccgatgcagaaagtaggtctgctgtattatgaagatcttgctcgcggcgttacgcgtgccgaagctgacgcgatttggctgctggttcaggatgcagtcgcaactttcgacccggatgcgatcgtggagattgtcggtggatttcgtcgtgggaaacctcagggtcacgacgttgatctgcttatcagttctccgggagctgagaaagagcaagaagaccaactcctgcagaaagtgatgaatctgtggaagaaacaagggttgttgctgtacggtcgtctggaatggacccagtgggaagatgggggttcgccttccggtaaggctgacgagggtgacgcgggtgcgaaatgctttctgatcctcaaactttatgatcatctggtgcgtaaaagcaaatggaacatgccgacgggttcgaacgtgggcgagtccaaaccgtggaaagcaattcgcgtagatctgctgcgttgcccctatggcagttttgcgtttgcgatgttgcagtggaccggaagccgcatgttccgtcgtgatctgcgttggtacgccactgacgagaagaacatgatgctggacaatcattcgctgtatgacctgaccaagggtatcttcctccctgctaaatcggaagaggaaattttcgcacatctggggcttgaatacctggaaccgttcgaacgtaacgca

SEQ ID NO: 3506 - protein, 529 aa, synthetic construct
  REGION 1..529: note = Variant of terminal deoxynucleotidyltransferase
MHHHHHHGGSGSHGIRTIDSDFGKKQQKKGDNHDSSATYEIKFHEFVLFILEEKMGATRRTFLTDLARKKGFRVENELTDEVTHIVAENLSRSEVLAWLKEHKMEKTKQFELLDISWLIESMKVGKPVDTKGKYQLAESVEVSANPDPTEGRVNELPPTMKTVSPYACQRRTTLNNRNQRFTDSLEILRENYSFKRNDDTALEFRRAISVLKSLPFEVRSLKDTEGLPWIGDEVKGIMEEIIEVGESREVQAVLNDEWYQSFHRFKSVFGVGVKTADKWYRMGLRTLEDVRSSKTLKLTPMQKVGLLYYEDLARGVTRAEADAIWLLVQDAVATFDPDAIVEIVGGFRRGKPQGHDVDLLISSPGAEKEQEDQLLQKVMNLWKKQGLLLYGRLEWTQWEDGGSPSGKADEGDAGAKCFLILKLYDHLVRKSKWNMPTGSNVGESKPWKAIRVDLLRCPYGSFAFAMLQWTGSRMFRRDLRWYATDEKNMMLDNHSLYDLTKGIFLPAKSEEEIFAHLGLEYLEPFERNA

SEQ ID NO: 3507 - DNA, 1587 bp, synthetic construct
  misc_feature 1..1587: note = Variant of terminal deoxynucleotidyltransferase
  source 1..1587: mol_type = other DNA
atgcaccatcatcatcatcatggcggtagcggcagccacggcattcgtaccatcgattcggacttcgggaagaaacagcagaaaaaaggcgataaccacgatagttccgccacttatgaaatcaaatttcacgagtttgtgctgttcattctcgaagaaaaaatgggtgcgacgcgtcgtacttttctgacagatttagcccgcaagaaagggttccgcgtcgagaatgaactgaccgacgaagttacccacatcgtggcagaaaatctgtcacgctctgaagtattggcttggctgaaagaacacaagatggagaagaccaagcaattcgaactgctggatattagctggcttatcgaaagcatgaaagttggtaaaccggtggacaccaaggggaaataccagttggcggaatcggttgaggtgagtgcgaacccagatccgacagaaggtcgtgtaaacgagctgcctcctactatgaaaaccgtttctccgtatgcgtgtcaacgccgcaccaccctgaacaaccgtaatcaacgttttacggactcgctggaaattcttcgtgaaaattacgagttcaaacgcaacgatgatactgcgctggaatttcgtcgtgctatctccgtgctgaaaagccttccgtttgaggtacgtagcctgaaagacacggaaggattgccctggatcggtgatgaagtcaaagggattatggaagaaatcatcgaggtcggggagtcgcgtgaagtgcaggccgtgctcaatgatgagtggtatcaaagcttccaccgctttaagagtgtctttggagtgggggtgaagacagcagacaagtattaccgtatgggtctgcgcaccctcgaggatgttcgttccagcaagaccctgaagttgaccccgatgcagaaagtaggtctgctgtattatgaagatcttgctcgcggcgttacgcgtgccgaagctgacgcgatttggctgctggttcaggatgcagtcgcaactttcgacccggatgcgatcgtggagattgtcggtggatttcgtcgtgggaaacctcagggtcacgacgttgatctgcttatcagttctccgggagctgagaaagagcaagaagaccaactcctgcagaaagtgatgaatctgtggaagaaacaagggttgttgctgtacggtcgtctggaatggacccagtgggaagatgggggttcgccttccggtaaggctgacgagggtgacgcgggtgcgaaatgctttctgatcctcaaactttatgatcatctggtgcgtaaaagcaaatggaacatgccgacgggttcgaacgtgggcgagtccaaaccgtggaaagcaattcgcgtagatctgctgcgttgcccctatggcagttttgcgtttgcgatgttgcagtggaccggaagccgcatgttccgtcgtgatctgcgttggtacgccactgacgagaagaacatgatgctggacaatcattcgctgtatgacctgaccaagggtatcttcctccctgctaaatcggaagaggaaattttcgcacatctggggcttgaatacctggaaccgttcgaacgtaacgca

SEQ ID NO: 3508 - protein, 529 aa, synthetic construct
  REGION 1..529: note = Variant of terminal deoxynucleotidyltransferase
MHHHHHHGGSGSHGIRTIDSDFGKKQQKKGDNHDSSATYEIKFHEFVLFILEEKMGATRRTFLTDLARKKGFRVENELTDEVTHIVAENLSRSEVLAWLKEHKMEKTKQFELLDISWLIESMKVGKPVDTKGKYQLAESVEVSANPDPTEGRVNELPPTMKTVSPYACQRRTTLNNRNQRFTDSLEILRENYEFKRNDDTALEFRRAISVLKSLPFEVRSLKDTEGLPWIGDEVKGIMEEIIEVGESREVQAVLNDEWYQSFHRFKSVFGVGVKTADKYYRMGLRTLEDVRSSKTLKLTPMQKVGLLYYEDLARGVTRAEADAIWLLVQDAVATFDPDAIVEIVGGFRRGKPQGHDVDLLISSPGAEKEQEDQLLQKVMNLWKKQGLLLYGRLEWTQWEDGGSPSGKADEGDAGAKCFLILKLYDHLVRKSKWNMPTGSNVGESKPWKAIRVDLLRCPYGSFAFAMLQWTGSRMFRRDLRWYATDEKNMMLDNHSLYDLTKGIFLPAKSEEEIFAHLGLEYLEPFERNA

SEQ ID NO: 3509 - DNA, 1587 bp, synthetic construct
  misc_feature 1..1587: note = Variant of terminal deoxynucleotidyltransferase
  source 1..1587: mol_type = other DNA
atgcaccatcatcatcatcatggcggtagcggcagccacggcattcgtaccatcgattcggacttcgggaagaaacagcagaaaaaaggcgataaccacgatagttccgccacttatgaaatcaaatttcacgagtttgtgctgttcattctcgaagaaaaaatgggtgcgacgcgtcgtacttttctgacagatttagcccgcaagaaagggttccgcgtcgagaatgaactgaccgacgaagttacccacatcgtggcagaaaatctgtcacgctctgaagtattggcttggctgaaagaacacaagatggagaagaccaagcaattcgaactgctggatattagctggcttatcgaaagcataaaagttggtaaaccggtggacaccaaggggaaataccagttggcggaatcggttgaggtgagtgcgaacccagatccgacagaaggtcgtgtaaacgagctgcctcctactatgaaaaccgtttctccgtatgcgtgtcaacgccgcaccaccctgaacaaccgtaatcaacgttttacggactcgctggaaattcttcgtgaaaattacgagttcaaacgcaacgatgatactgcgctggaatttcgtcgtgctatctccgtgctgaaaagccttccgtttgaggtacgtagcctgaaagacacggaaggattgccctggatcggtgatgaagtcaaagggattatggaagaaatcatcgaggtcggggagtcgcgtgaagtgcaggccgtgctcaatgatgagtggtatcaaagcttccaccgctttaagagtgtctttggagtgggggtgaagacagcagacaagtggtaccgtatgggtctgcgcaccctcgaggatgttcgttccagcaagaccctgaagttgaccccgatgcagaaagtaggtctgctgtattatgaagatcttgctcgcggcgttacgcgtgccgaagctgacgcgatttggctgctggttcaggatgcagtcgcaactttcgacccggatgcgatcgtggagattgtcggtggatttcgtcgtgggaaacctcagggtcacgacgttgatctgcttatcagttctccgggagctgagaaagagcaagaagaccaactcctgcagaaagtgatgaatctgtggaagaaacaagggttgttgctgtacggtcgtctggaatggacccagtgggaagatgggggttcgccttccggtaaggctgacgagggtgacgcgggtgcgaaatgctttctgatcctcaaactttatgatcatctggtgcgtaaaagcaaatggaacatgccgacgggttcgaacgtgggcgagtccaaaccgtggaaagcaattcgcgtagatctgctgcgttgcccctatggcagttttgcgtttgcgatgttgcagtggaccggaagcaagatgttccgtcgtgatctgcgttggtacgccactgacgagaagaacatgatgctggacaatcattcgctgtatgacctgaccaagggtatcttcctccctgctaaatcggaagaggaaattttcgcacatctggggcttgaatacctggaaccgttcgaacgtaacgca

SEQ ID NO: 3510 - protein, 529 aa, synthetic construct
  REGION 1..529: note = Variant of terminal deoxynucleotidyltransferase
MHHHHHHGGSGSHGIRTIDSDFGKKQQKKGDNHDSSATYEIKFHEFVLFILEEKMGATRRTFLTDLARKKGFRVENELTDEVTHIVAENLSRSEVLAWLKEHKMEKTKQFELLDISWLIESIKVGKPVDTKGKYQLAESVEVSANPDPTEGRVNELPPTMKTVSPYACQRRTTLNNRNQRFTDSLEILRENYEFKRNDDTALEFRRAISVLKSLPFEVRSLKDTEGLPWIGDEVKGIMEEIIEVGESREVQAVLNDEWYQSFHRFKSVFGVGVKTADKWYRMGLRTLEDVRSSKTLKLTPMQKVGLLYYEDLARGVTRAEADAIWLLVQDAVATFDPDAIVEIVGGFRRGKPQGHDVDLLISSPGAEKEQEDQLLQKVMNLWKKQGLLLYGRLEWTQWEDGGSPSGKADEGDAGAKCFLILKLYDHLVRKSKWNMPTGSNVGESKPWKAIRVDLLRCPYGSFAFAMLQWTGSKMFRRDLRWYATDEKNMMLDNHSLYDLTKGIFLPAKSEEEIFAHLGLEYLEPFERNA

SEQ ID NO: 3511 - DNA, 1587 bp, synthetic construct
  misc_feature 1..1587: note = Variant of terminal deoxynucleotidyltransferase
  source 1..1587: mol_type = other DNA
atgcaccatcatcatcatcatggcggtagcggcagccacggcattcgtaccatcgattcggacttcgggaagaaacagcagaaaaaaggcgataaccacgatagttccgccacttatgaaatcaaatttcacgagtttgtgctgttcattctcgaagaaaaaatgggtgcgacgcgtcgtacttttctgacagatttagcccgcaagaaagggttccgcgtcgagaatgaactgaccgacgaagttacccacatcgtggcagaaaatctgtcacgctctgaagtattggcttggctgaaagaacacaagatggagaagaccaagcaattcgaactgctggatattagctggcttatcgaaagcatgaaagttggtaaaccggtggacaccaaggggaaataccagttggcggaatcggttgaggtgagtgcgaacccagatccgacagaaggtcgtgtaaacgagctgcctcctactatgaaaaccgtttctccgtatgcgtgtcaacgccgcaccaccctgaacaaccgtaatcaacgttttacggactcgctggaaattcttcgtgaaaattacgagttcaaacgcaacgatgatactgcgctggaatttcgtcgtgctatctccgtgctgaaaagccttccgtttgaggtacgtagcctgaaagacacggaaggattgccctggatcggtgatgaagtcaaagggattatggaagaaatcatcgaggtcggggagtcgcgtgaagtgcaggccgtgctcaatgatgagtggtatcaaagcttccaccgctttaagagtgtctttggagtgggggtgaagacagcagacaagtggtaccgtatgggtctgcgcaccctcgaggatgttcgttccagcaagaccctgttgttgaccccgatgcagaaagtaggtctgctgtattatgaagatcttgctcgcggcgttacgcgtgccgaagctgacgcgatttggctgctggttcaggatgcagtcgcaactttcgacccggatgcgatcgtggagattgtcggtggatttcgtcgtgggaaacctcagggtcacgacgttgatctgcttatcagttctccgggagctgagaaagagcaagaagaccaactcctgcagaaagtgatgaatctgtggaagaaacaagggttgttgctgtacggtcgtctggaatggacccagtgggaagatgggggttcgccttccggtaaggctgacgagggtgacgcgggtgcgaaatgctttctgatcctcaaactttatgatcatctggtgcgtaaaagcaaatggaacatgccgacgggttcgaacgtgggcgagtccaaaccgtggaaagcaattcgcgtagatctgctgcgttgcccctatggcagttttgcgtttgcgatgttgcagtggaccggaagccgcatgttccgtcgtgatctgcgttggtacgccactgacgagaagaacatgatgctggacaatcattcgctgtatgacctgaccaagggtatcttcctccctgctaaatcggaagaggaaattttcgcacatctggggcttgaatacctggaaccgttcgaacgtaacgca

SEQ ID NO: 3512 - protein, 529 aa, synthetic construct
  REGION 1..529: note = Variant of terminal deoxynucleotidyltransferase
MHHHHHHGGSGSHGIRTIDSDFGKKQQKKGDNHDSSATYEIKFHEFVLFILEEKMGATRRTFLTDLARKKGFRVENELTDEVTHIVAENLSRSEVLAWLKEHKMEKTKQFELLDISWLIESMKVGKPVDTKGKYQLAESVEVSANPDPTEGRVNELPPTMKTVSPYACQRRTTLNNRNQRFTDSLEILRENYEFKRNDDTALEFRRAISVLKSLPFEVRSLKDTEGLPWIGDEVKGIMEEIIEVGESREVQAVLNDEWYQSFHRFKSVFGVGVKTADKWYRMGLRTLEDVRSSKTLLLTPMQKVGLLYYEDLARGVTRAEADAIWLLVQDAVATFDPDAIVEIVGGFRRGKPQGHDVDLLISSPGAEKEQEDQLLQKVMNLWKKQGLLLYGRLEWTQWEDGGSPSGKADEGDAGAKCFLILKLYDHLVRKSKWNMPTGSNVGESKPWKAIRVDLLRCPYGSFAFAMLQWTGSRMFRRDLRWYATDEKNMMLDNHSLYDLTKGIFLPAKSEEEIFAHLGLEYLEPFERNA

SEQ ID NO: 3513 - DNA, 1587 bp, synthetic construct
  misc_feature 1..1587: note = Variant of terminal deoxynucleotidyltransferase
  source 1..1587: mol_type = other DNA
atgcaccatcatcatcatcatggcggtagcggcagccacggcattcgtaccatcgattcggacttcgggaagaaacagcagaaaaaaggcgataaccacgatagttccgccacttatgaaatcaaatttcacgagtttgtgctgttcattctcgaagaaaaaatgggtgcgacgcgtcgtacttttctgacagatttagcccgcaagaaagggttccgcgtcgagaatgaactgaccgacgaagttacccacatcgtggcagaaaatctgtcacgctctgaagtattggcttggctgaaagaacacaagatggagaagaccaagcaattcgaactgctggatattagctggcttatcgaaagcatgaaagttggtaaaccggtggacaccaaggggaaataccagttggcggaatcggttgaggtgagtgcgaacccagatccgacagaaggtcgtgtaaacgagctgcctcctactatgaaaaccgtttctccgtatgcgtgtcaacgccgcaccaccctgaacaaccgtaatcaacgttttacggactcgctggaaattcttcgtgaaaattacgagttcaaacgcaacgatgatactgcgctggaatttcgtcgtgctatctccgtgctgaaaagccttccgtttgaggtacgtagcctgaaagacacggaaggattgccctggatcggtgatgaagtcaaagggattatggaagaaatcatcgaggtcggggagtcgcgtgaagtgcaggccgtgctcaatgatgagtggtatcaaagcttccaccgctttaagtgtgtctttggagtgggggtgaagacagcagacaagtggtaccgtatgggtctgcgcaccctcgaggatgttcgttccagcaagaccctgaagttgaccccgatgcagaaagtaggtctgctgtattatgaagatcttgctcgcggcgttacgcgtgccgaagctgacgcgatttggctgctggttcaggatgcagtcgcaactttcgacccggatgcgatcgtggagattgtcggtggatttcgtcgtgggaaacctcagggtcacgacgttgatctgcttatcagttctccgggagctgagaaagagcaagaagaccaactcctgcagaaagtgatgaatctgtggaagaaacaagggttgttgctgtacggtcgtctggaatggacccagtgggaagatgggggttcgccttccggtaaggctgacgagggtgacgcgggtgcgaaatgctttctgatcctcaaactttatgatcatctggtgcgtaaaagcaaatggaacatgccgacgggttcgaacgtgggcgagtccaaaccgtggaaagcaattcgcgtagatctgctgcgttgcccctatggcagttttgcgtttgcgatgttgcagtggaccggaagccgcatgttccgtcgtgatctgcgttggtacgccactgacgagaagaacatgatgctggacaatcattcgctgtatgacctgaccaagggtatcttcctccctgctaaatcggaagaggaaattttcgcacatctggggcttgaatacctggaaccgttcgaacgtaacgca

SEQ ID NO: 3514 - protein, 529 aa, synthetic construct
  REGION 1..529: note = Variant of terminal deoxynucleotidyltransferase
MHHHHHHGGSGSHGIRTIDSDFGKKQQKKGDNHDSSATYEIKFHEFVLFILEEKMGATRRTFLTDLARKKGFRVENELTDEVTHIVAENLSRSEVLAWLKEHKMEKTKQFELLDISWLIESMKVGKPVDTKGKYQLAESVEVSANPDPTEGRVNELPPTMKTVSPYACQRRTTLNNRNQRFTDSLEILRENYEFKRNDDTALEFRRAISVLKSLPFEVRSLKDTEGLPWIGDEVKGIMEEIIEVGESREVQAVLNDEWYQSFHRFKCVFGVGVKTADKWYRMGLRTLEDVRSSKTLKLTPMQKVGLLYYEDLARGVTRAEADAIWLLVQDAVATFDPDAIVEIVGGFRRGKPQGHDVDLLISSPGAEKEQEDQLLQKVMNLWKKQGLLLYGRLEWTQWEDGGSPSGKADEGDAGAKCFLILKLYDHLVRKSKWNMPTGSNVGESKPWKAIRVDLLRCPYGSFAFAMLQWTGSRMFRRDLRWYATDEKNMMLDNHSLYDLTKGIFLPAKSEEEIFAHLGLEYLEPFERNA

SEQ ID NO: 3515 - DNA, 1587 bp, synthetic construct
  misc_feature 1..1587: note = Variant of terminal deoxynucleotidyltransferase
  source 1..1587: mol_type = other DNA
atgcaccatcatcatcatcatggcggtagcggcagccacggcattcgtaccatcgattcggacttcgggaagaaacagcagaaaaaaggcgataaccacgatagttccgccacttatgaaatcaaatttcacgagtttgtgctgttcattctcgaagaaaaaatgggtgcgacgcgtcgtacttttctgacagatttagcccgcaagaaagggttccgcgtcgagaatgaactgaccgacgaagttacccacatcgtggcagaaaatctgtcacgctctgaagtattggcttggctgaaagaacacaagatggagaagaccaagcaattcgaactgctggatattagctggcttatcgaaagcatgaaagttggtaaaccggtggacaccaaggggaaataccagttggcggaatcggttgaggtgagtgcgaacccagatccgacagaaggtcgtgtaaacgagctgcctcctactatgaaaaccgtttctccgtatgcgtgtcaacgccgcaccaccctgaacaaccgtaatcaacgttttacggactcgctggaaattcttcgtgaaaattacgagttcaaacgcaacgatgatactgcgctggaatttcgtcgtgctatctccgtgctgaaaagccttccgtttgaggtacgtagcctgaaagacacggaaggattgccctggatcggtgatgaagtcaaagggattatggaagaaatcatcgaggtcggggagtcgcgtgaagtgcaggccgtgctcaatgatgagtggtatcaaagcttccaccgctttaagagtgtctttggagtgggggtgaagacagcagacaagtggtaccgtatgggtctgcgcaccctcgaggatgttcgttccagcaagaccctgaagttgtatccgatgcagaaagtaggtctgctgtattatgaagatcttgctcgcggcgttacgcgtgccgaagctgacgcgatttggctgctggttcaggatgcagtcgcaactttcgacccggatgcgatcgtggagattgtcggtggatttcgtcgtgggaaacctcagggtcacgacgttgatctgcttatcagttctccgggagctgagaaagagcaagaagaccaactcctgcagaaagtgatgaatctgtggaagaaacaagggttgttgctgtacggtcgtctggaatggacccagtgggaagatgggggttcgccttccggtaaggctgacgagggtgacgcgggtgcgaaatgctttctgatcctcaaactttatgatcatctggtgcgtaaaagcaaatggaacatgccgacgggttcgaacgtgggcgagtccaaaccgtggaaagcaattcgcgtagatctgctgcgttgcccctatggcagttttgcgtttgcgatgttgcagtggaccggaagccgcatgttccgtcgtgatctgcgttggtacgccactgacgagaagaacatgatgctggacaatcattcgctgtatgacctgaccaagggtatcttcctccctgctaaatcggaagaggaaattttcgcacatctggggcttgaatacctggaaccgttcgaacgtaacgca

SEQ ID NO: 3516 - protein, 529 aa, synthetic construct
  REGION 1..529: note = Variant of terminal deoxynucleotidyltransferase
MHHHHHHGGSGSHGIRTIDSDFGKKQQKKGDNHDSSATYEIKFHEFVLFILEEKMGATRRTFLTDLARKKGFRVENELTDEVTHIVAENLSRSEVLAWLKEHKMEKTKQFELLDISWLIESMKVGKPVDTKGKYQLAESVEVSANPDPTEGRVNELPPTMKTVSPYACQRRTTLNNRNQRFTDSLEILRENYEFKRNDDTALEFRRAISVLKSLPFEVRSLKDTEGLPWIGDEVKGIMEEIIEVGESREVQAVLNDEWYQSFHRFKSVFGVGVKTADKWYRMGLRTLEDVRSSKTLKLYPMQKVGLLYYEDLARGVTRAEADAIWLLVQDAVATFDPDAIVEIVGGFRRGKPQGHDVDLLISSPGAEKEQEDQLLQKVMNLWKKQGLLLYGRLEWTQWEDGGSPSGKADEGDAGAKCFLILKLYDHLVRKSKWNMPTGSNVGESKPWKAIRVDLLRCPYGSFAFAMLQWTGSRMFRRDLRWYATDEKNMMLDNHSLYDLTKGIFLPAKSEEEIFAHLGLEYLEPFERNA

SEQ ID NO: 3517 - DNA, 1587 bp, synthetic construct
  misc_feature 1..1587: note = Variant of terminal deoxynucleotidyltransferase
  source 1..1587: mol_type = other DNA
atgcaccatcatcatcatcatggcggtagcggcagccacggcattcgtaccatcgattcggacttcgggaagaaacagcagaaaaaaggcgataaccacgatagttccgccacttatgaaatcaaatttcacgagtttgtgctgttcattctcgaagaaaaaatgggtgcgacgcgtcgtacttttctgacagatttagcccgcaagaaagggttccgcgtcgagaatgaactgaccgacgaagttacccacatcgtggcagaaaatctgtcacgctctgaagtattggcttggctgaaagaacacaagatggagaagaccaagcaattcgaactgctggatattagctggcttatcgaaagcatgaaagttggtaaaccggtggacaccaaggggaaataccagttggcggaatcggttgaggtgagtgcgaacccagatccgacagaaggtcgtgtaaacgagctgcctcctactatgaaaaccgtttctccgtatgcgtgtcaacgccgcaccaccctgaacaaccgtaatcaacgttttacggactcgctggaaattcttcgtgaaaattacgagttcaaacgcaacgatgatactgcgctggaatttcgtcgtgctatctccgtgctgaaaagccttccgtttgaggtacgtagcctgaaagacacggaaggattgccctggatcggtgatgaagtcaaagggattatggaagaaatcatcgaggtcggggagtcgcgtgaagtgcaggccgtgctcaatgatgagtggtatcaaagcttccaccgctttaagagtgtctttggagtgggggtgaagacagcagacaagtggtaccgtatgggtctgcgcaccctcgaggatgttcgttccagcaagaccctgaagttgaccccgatgcagaaagtaggtctgctgtattatgaagatcttgctcgcggcgttacgcgtgccgaagctgacgcgatttggctgctggttcaggatgcagtcgcaactttcgacccggatgcgatcgtggagattgtcggtggatttcgtcgtgggaaacctcagggtcacgacgttgatctgcttatcagttctccgggagctgagaaagagcaagaagaccaactcctgcagaaagtgatgaatctgtggaagaaacaagggttgttgctgtacggtcgtctggaatggacccagtgggaagatgggggttcgccttccggtaaggctgacgagggtgacgttggtgcgaaatgctttctgatcctcaaactttatgatcatctggtgcgtaaaagcaaatggaacatgccgacgggttcgaacgtgggcgagtccaaaccgtggaaagcaattcgcgtagatctgctgcgttgcccctatggcagttttgcgtttgcgatgttgcagtggaccggaagccgcatgttccgtcgtgatctgcgttggtacgccactgacgagaagaacatgatgctggacaatcattcgctgtatgacctgaccaagggtatcttcctccctgctaaatcggaagaggaaattttcgcacatctggggcttgaatacctggaaccgttcgaacgtaacgca

SEQ ID NO: 3518 - protein, 529 aa, synthetic construct
  REGION 1..529: note = Variant of terminal deoxynucleotidyltransferase
MHHHHHHGGSGSHGIRTIDSDFGKKQQKKGDNHDSSATYEIKFHEFVLFILEEKMGATRRTFLTDLARKKGFRVENELTDEVTHIVAENLSRSEVLAWLKEHKMEKTKQFELLDISWLIESMKVGKPVDTKGKYQLAESVEVSANPDPTEGRVNELPPTMKTVSPYACQRRTTLNNRNQRFTDSLEILRENYEFKRNDDTALEFRRAISVLKSLPFEVRSLKDTEGLPWIGDEVKGIMEEIIEVGESREVQAVLNDEWYQSFHRFKSVFGVGVKTADKWYRMGLRTLEDVRSSKTLKLTPMQKVGLLYYEDLARGVTRAEADAIWLLVQDAVATFDPDAIVEIVGGFRRGKPQGHDVDLLISSPGAEKEQEDQLLQKVMNLWKKQGLLLYGRLEWTQWEDGGSPSGKADEGDVGAKCFLILKLYDHLVRKSKWNMPTGSNVGESKPWKAIRVDLLRCPYGSFAFAMLQWTGSRMFRRDLRWYATDEKNMMLDNHSLYDLTKGIFLPAKSEEEIFAHLGLEYLEPFERNA

SEQ ID NO: 3519 - DNA, 1587 bp, synthetic construct
  misc_feature 1..1587: note = Variant of terminal deoxynucleotidyltransferase
  source 1..1587: mol_type = other DNA
atgcaccatcatcatcatcatggcggtagcggcagccacggcattcgtaccatcgattcggacttcgggaagaaacagcagaaaaaaggcgataaccacgatagttccgccacttatgaaatcaaatttcacgagtttgtgctgttcattctcgaagaaaaaatgggtgcgacgcgtcgtacttttctgacagatttagcccgcaagaaagggttccgcgtcgagaatgaactgaccgacgaagttacccacatcgtggcagaaaatctgtcacgctctgaagtattggcttggctgaaagaacacaagatggagaagaccaagcaattcgaactgctggatattagctggcttatcgaaagcatgaaagttggtaaaccggtggacaccaaggggaaataccagttggcggaatcggttgaggtgagtgcgaacccagatccgacagaaggtcgtgtaaacgagctgcctcctactatgaaaaccgtttctccgtatgcgtgtcaacgccgcaccaccctgaacaaccgtaatcaacgttttacggactcgctggaaattcttcgtgaaaattacgagttcaaacgcaacgatgatactgcgctggaatttcgtcgtgctatctccgtgctgaaaagccttccgtttgaggtacgtagcctgaaagacacggaaggattgccctggatcggtgatgaagtcaaagggattatggaagaaatcatcgaggtcggggagtcgcgtgaagtgcaggccgtgctcaatgatgagtggtatcaaagcttccaccgctttaagagtgtctttggagtgggggtgaagacagcagacaagtggtaccgtatgggtctgcgcaccctcgaggatgttcgttccagcaagaccctgaagttgaccccgatgcagaaagtaggtctgctgtattatgaagatcttgctcgcggcgttacgcgtgccgaagctgacgcgatttggctgctggttcaggatgcagtcgcaactttcgacccggatgcgatcgtggagattgtcggtggatttcgtcgtgggaaacctcagggtcacgacgttgatctgcttatcagttctccgggagctgagaaagagcaagaagaccaactcctgcagaaagtgatgaatctgtggaagaaacaagggttgttgctgtacggtcgtctggaatggacccagtgggaagatgggggttcgccttccggtaaggctgacgagggtgacgcgggtgcgaaatgctttctgatcctcaaactttatgatcatctggtgcgtaaaagcaaatggaacatgccgacgggttcgaacgtgggcgagtccaaaccgtggaaagcaattcgcgtagatctgctgcgttgcccctatggcagttttgcgtttgcgatgttgcagtggaccggaagccgcatgttccgtcgtgattttcgttggtacgccactgacgagaagaacatgatgctggacaatcattcgctgtatgacctgaccaagggtatcttcctccctgctaaatcggaagaggaaattttcgcacatctggggcttgaatacctggaaccgttcgaacgtaacgca

SEQ ID NO: 3520 - protein, 529 aa, synthetic construct
  REGION 1..529: note = Variant of terminal deoxynucleotidyltransferase
MHHHHHHGGSGSHGIRTIDSDFGKKQQKKGDNHDSSATYEIKFHEFVLFILEEKMGATRRTFLTDLARKKGFRVENELTDEVTHIVAENLSRSEVLAWLKEHKMEKTKQFELLDISWLIESMKVGKPVDTKGKYQLAESVEVSANPDPTEGRVNELPPTMKTVSPYACQRRTTLNNRNQRFTDSLEILRENYEFKRNDDTALEFRRAISVLKSLPFEVRSLKDTEGLPWIGDEVKGIMEEIIEVGESREVQAVLNDEWYQSFHRFKSVFGVGVKTADKWYRMGLRTLEDVRSSKTLKLTPMQKVGLLYYEDLARGVTRAEADAIWLLVQDAVATFDPDAIVEIVGGFRRGKPQGHDVDLLISSPGAEKEQEDQLLQKVMNLWKKQGLLLYGRLEWTQWEDGGSPSGKADEGDAGAKCFLILKLYDHLVRKSKWNMPTGSNVGESKPWKAIRVDLLRCPYGSFAFAMLQWTGSRMFRRDFRWYATDEKNMMLDNHSLYDLTKGIFLPAKSEEEIFAHLGLEYLEPFERNA

SEQ ID NO: 3521 - DNA, 1587 bp, synthetic construct
  misc_feature 1..1587: note = Variant of terminal deoxynucleotidyltransferase
  source 1..1587: mol_type = other DNA
atgcaccatcatcatcatcatggcggtagcggcagccacggcattcgtaccatcgattcggacttcgggaagaaacagcagaaaaaaggcgataaccacgatagttccgccacttatgaaatcaaatttcacgagtttgtgctgttcattctcgaagaaaaaatgggtgcgacgcgtcgtacttttctgacagatttagcccgcaagaaagggttccgcgtcgagaatgaactgaccgacgaagttacccacatcgtggcagaaaatctgtcacgctctgaagtattggcttggctgaaagaacacaagatggagaagaccaagcaattcgaactgctggatattagctggcttatcgaaagcatgaaagttggtaaaccggtggacaccaaggggaaataccagttggcggaatcggttgaggtgagtgcgaacccagatccgacagaaggtcgtgtaaacgagctgcctcctactatgaaaaccgtttctccgtatgcgtgtcaacgccgcaccaccctgaacaaccgtaatcaacgttttacggactcgctggaaattcttcgtgaaaattacgagttcaaacgcaacgatgatactgcgctggaatttcgtcgtgctatctccgtgctgaaaagccttccgtttgaggtacgtagcctgaaagacacggaaggattgccctggatcggtgatgaagtcaaagggattatggaagaaatcatcgaggtcggggagtcgcgtgaagtgcaggccgtgctcaatgatgagtggtatcaaagcttccgtcgctttaagagtgtctttggagtgggggtgaagacagcagacaagtggtaccgtatgggtctgcgcaccctcgaggatgttcgttccagcaagaccctgaagttgaccccgatgcagaaagtaggtctgctgtattatgaagatcttgctcgcggcgttacgcgtgccgaagctgacgcgatttggctgctggttcaggatgcagtcgcaactttcgacccggatgcgatcgtggagattgtcggtggatttcgtcgtgggaaacctcagggtcacgacgttgatctgcttatcagttctccgggagctgagaaagagcaagaagaccaactcctgcagaaagtgatgaatctgtggaagaaacaagggttgttgctgtacggtcgtctggaatggacccagtgggaagatgggggttcgccttccggtaaggctgacgagggtgacgcgggtgcgaaatgctttctgatcctcaaactttatgatcatctggtgcgtaaaagcaaatggaacatgccgacgggttcgaacgtgggcgagtccaaaccgtggaaagcaattcgcgtagatctgctgcgttgcccctatggcagttttgcgtttgcgatgttgcagtggaccggaagccgcatgttccgtcgtgatctgcgttggtacgccactgacgagaagaacatgatgctggacaatcattcgctgtatgacctgaccaagggtatcttcctccctgctaaatcggaagaggaaattttcgcacatctggggcttgaatacctggaaccgttcgaacgtaacgca

SEQ ID NO: 3522 - protein, 529 aa, synthetic construct
  REGION 1..529: note = Variant of terminal deoxynucleotidyltransferase
MHHHHHHGGSGSHGIRTIDSDFGKKQQKKGDNHDSSATYEIKFHEFVLFILEEKMGATRRTFLTDLARKKGFRVENELTDEVTHIVAENLSRSEVLAWLKEHKMEKTKQFELLDISWLIESMKVGKPVDTKGKYQLAESVEVSANPDPTEGRVNELPPTMKTVSPYACQRRTTLNNRNQRFTDSLEILRENYEFKRNDDTALEFRRAISVLKSLPFEVRSLKDTEGLPWIGDEVKGIMEEIIEVGESREVQAVLNDEWYQSFRRFKSVFGVGVKTADKWYRMGLRTLEDVRSSKTLKLTPMQKVGLLYYEDLARGVTRAEADAIWLLVQDAVATFDPDAIVEIVGGFRRGKPQGHDVDLLISSPGAEKEQEDQLLQKVMNLWKKQGLLLYGRLEWTQWEDGGSPSGKADEGDAGAKCFLILKLYDHLVRKSKWNMPTGSNVGESKPWKAIRVDLLRCPYGSFAFAMLQWTGSRMFRRDLRWYATDEKNMMLDNHSLYDLTKGIFLPAKSEEEIFAHLGLEYLEPFERNA

SEQ ID NO: 3523 - DNA, 1587 bp, synthetic construct
  misc_feature 1..1587: note = Variant of terminal deoxynucleotidyltransferase
  source 1..1587: mol_type = other DNA
atgcaccatcatcatcatcatggcggtagcggcagccacggcattcgtaccatcgattcggacttcgggaagaaacagcagaaaaaaggcgataaccacgatagttccgccacttatgaaatcaaatttcacgagtttgtgctgttcattctcgaagaaaaaatgggtgcgacgcgtcgtacttttctgacagatttagcccgcaagaaagggttccgcgtcgagaatgaactgaccgacgaagttacccacatcgtggcagaaaatctgtcacgctctgaagtattggcttggctgaaagaacacaagatggagaagaccaagcaattcgaactgctggatattagctggcttatcgaaagcatgaaagttggtaaaccggtggacaccaaggggaaataccagttggcggaatcggttgaggtgagtgcgaacccagatccgacagaaggtcgtgtaaacgagctgcctcctactatgaaaaccgtttctccgtatgcgtgtcaacgccgcaccaccctgaacaaccgtaatcaacgttttacggactcgctggaaattcttcgtgaaaattacgagttcaaacgcaacgatgatactgcgctggaatttcgtcgtgctatctccgtgctgaaaagccttccgtttgaggtacgtagcctgaaagacacggaaggattgccctggatcggtgatgaagtcaaagggattatggaagaaatcatcgaggtcggggagtcgcgtgaagtgcaggccgtgctcaatgatgagtggtatcaaagcttccaccgctttaagagtgtctttggagtgggggtgaagacagcagacatgtggtaccgtatgggtctgcgcaccctcgaggatgttcgttccagcaagaccctgaagttgaccccgatgcagaaagtaggtctgctgtattatgaagatcttgctcgcggcgttacgcgtgccgaagctgacgcgatttggctgctggttcaggatgcagtcgcaactttcgacccggatgcgatcgtggagattgtcggtggatttcgtcgtgggaaacctcagggtcacgacgttgatctgcttatcagttctccgggagctgagaaagagcaagaagaccaactcctgcagaaagtgatgaatctgtggaagaaacaagggttgttgctgtacggtcgtctggaatggacccagtgggaagatgggggttcgccttccggtaaggctgacgagggtgacgcgggtgcgaaatgctttctgatcctcaaactttatgatcatctggtgcgtaaaagcaaatggaacatgccgacgggttcgaacgtgggcgagtccaaaccgtggaaagcaattcgcgtagatctgctgcgttgcccctatggcagttttgcgtttgcgatgttgcagtggaccggaagccgcatgttccgtcgtgatctgcgttggtacgccactgacgagaagaacatgatgctggacaatcattcgctgtatgacctgaccaagggtatcttcctccctgctaaatcggaagaggaaattttcgcacatctggggcttgaatacctggaaccgttcgaacgtaacgca

SEQ ID NO: 3524 - protein, 529 aa, synthetic construct
  REGION 1..529: note = Variant of terminal deoxynucleotidyltransferase
MHHHHHHGGSGSHGIRTIDSDFGKKQQKKGDNHDSSATYEIKFHEFVLFILEEKMGATRRTFLTDLARKKGFRVENELTDEVTHIVAENLSRSEVLAWLKEHKMEKTKQFELLDISWLIESMKVGKPVDTKGKYQLAESVEVSANPDPTEGRVNELPPTMKTVSPYACQRRTTLNNRNQRFTDSLEILRENYEFKRNDDTALEFRRAISVLKSLPFEVRSLKDTEGLPWIGDEVKGIMEEIIEVGESREVQAVLNDEWYQSFHRFKSVFGVGVKTADMWYRMGLRTLEDVRSSKTLKLTPMQKVGLLYYEDLARGVTRAEADAIWLLVQDAVATFDPDAIVEIVGGFRRGKPQGHDVDLLISSPGAEKEQEDQLLQKVMNLWKKQGLLLYGRLEWTQWEDGGSPSGKADEGDAGAKCFLILKLYDHLVRKSKWNMPTGSNVGESKPWKAIRVDLLRCPYGSFAFAMLQWTGSRMFRRDLRWYATDEKNMMLDNHSLYDLTKGIFLPAKSEEEIFAHLGLEYLEPFERNA

SEQ ID NO: 3525 - DNA, 1587 bp, synthetic construct
  misc_feature 1..1587: note = Variant of terminal deoxynucleotidyltransferase
  source 1..1587: mol_type = other DNA
atgcaccatcatcatcatcatggcggtagcggcagccacggcattcgtaccatcgattcggacttcgggaagaaacagcagaaaaaaggcgataaccacgatagttccgccacttatgaaatcaaatttcacgagtttgtgctgttcattctcgaagaaaaaatgggtgcgacgcgtcgtacttttctgacagatttagcccgcaagaaagggttccgcgtcgagaatgaactgaccgacgaagttacccacatcgtggcagaaaatctgtcacgctctgaagtattggcttggctgaaagaacacaagatggagaagaccaagcaattcgaactgctggatattagctggcttatcgaaagcatgaaagttggtaaaccggtggacaccaaggggaaataccagttggcggaatcggttgaggtgagtgcgaacccagatccgacagaaggtcgtgtaaacgagctgcctcctactatgaaaaccgtttctccgtatgcgtgtcaacgccgcaccaccctgaacaaccgtaatcaacgttttacggactcgctggaaattcttcgtgaaaattacgagttcaaacgcaacgatgatactgcgctggaatttcgtcgtgctatctccgtgctgaaaagccttccgtttgaggtacgtagcctgaaagacacggaaggattgccctggatcggtgatgaagtcaaagggattatggaagaaatcatcgaggtcggggagtcgcgtgaagtgcaggccgtgctcaatgatgagtggtatcaaagcttccaccgctttaagagtgtctttggagtgggggtgaagacagcagacaagtggtaccgtatgggtctgcgcaccctcgaggatgttcgttccagcaagaccctgaagttgaccccgatgcagaaagtaggtctgctgtattatgaagatcttgctcgcggcgttacgcgtgccgaagctgacgcgatttggctgctggttcaggatgcagtcgcaactttcgacccggatgcgatcgtggagattgtcggtggatttcgtcgtgggaaacctcagggtcacgacgttgatctgcttatcagttctccgggagctgagaaagagcaagaagaccaactcctgcagaaagtgatgaatctgtggaagaaacaagggttgttgctgtacggtcgtctggaatggacccagtgggaagatgggggttcgccttccggtaaggctgacgagggtgacgcgggtgcgaaatgctttctgatcctcaaactttatgatcatctggtgcgtaaaagcaaatggaacatgccgacgggttcgaacgtgggcgagtccaaaccgtggaaagcaattcgcgtagatctgctgcgttgcccctatggcagttttgcgtttgcgatgttgttttggaccggaagccgcatgttccgtcgtgatctgcgttggtacgccactgacgagaagaacatgatgctggacaatcattcgctgtatgacctgaccaagggtatcttcctccctgctaaatcggaagaggaaattttcgcacatctggggcttgaatacctggaaccgttcgaacgtaacgca

SEQ ID NO: 3526 - protein, 529 aa, synthetic construct
  REGION 1..529: note = Variant of terminal deoxynucleotidyltransferase
MHHHHHHGGSGSHGIRTIDSDFGKKQQKKGDNHDSSATYEIKFHEFVLFILEEKMGATRRTFLTDLARKKGFRVENELTDEVTHIVAENLSRSEVLAWLKEHKMEKTKQFELLDISWLIESMKVGKPVDTKGKYQLAESVEVSANPDPTEGRVNELPPTMKTVSPYACQRRTTLNNRNQRFTDSLEILRENYEFKRNDDTALEFRRAISVLKSLPFEVRSLKDTEGLPWIGDEVKGIMEEIIEVGESREVQAVLNDEWYQSFHRFKSVFGVGVKTADKWYRMGLRTLEDVRSSKTLKLTPMQKVGLLYYEDLARGVTRAEADAIWLLVQDAVATFDPDAIVEIVGGFRRGKPQGHDVDLLISSPGAEKEQEDQLLQKVMNLWKKQGLLLYGRLEWTQWEDGGSPSGKADEGDAGAKCFLILKLYDHLVRKSKWNMPTGSNVGESKPWKAIRVDLLRCPYGSFAFAMLFWTGSRMFRRDLRWYATDEKNMMLDNHSLYDLTKGIFLPAKSEEEIFAHLGLEYLEPFERNA

SEQ ID NO: 3527 - DNA, 1587 bp, synthetic construct
  misc_feature 1..1587: note = Variant of terminal deoxynucleotidyltransferase
  source 1..1587: mol_type = other DNA
atgcaccatcatcatcatcatggcggtagcggcagccacggcattcgtaccatcgattcggacttcgggaagaaacagcagaaaaaaggcgataaccacgatagttccgccacttatgaaatcaaatttcacgagtttgtgctgttcattctcgaagaaaaaatgggtgcgacgcgtcgtacttttctgacagatttagcccgcaagaaagggttccgcgtcgagaatgaactgaccgacgaagttacccacatcgtggcagaaaatctgtcacgctctgaagtattggcttggctgaaagaacacaagatggagaagaccaagcaattcgaactgctggatattagctggcttatcgaaagcatgaaagttggtaaaccggtggacaccaaggggaaataccagttggcggaatcggttgaggtgagtgcgaacccagatccgacagaaggtcgtgtaaacgagctgcctcctactatgaaaaccgtttctccgtatgcgtgtcaacgccgcaccaccctgaacaaccgtaatcaacgttttacggactcgctggaaattcttcgtgaaaattacgagttcaaacgcaacgatgatactgcgctggaatttcgtcgtgctatctccgtgctgaaaagccttccgtttgaggtacgtagcctgaaagacacggaaggattgccctggatcggtgatgaagtcaaagggattatggaagaaatcatcgaggtcggggagtcgcgtgaagtgcaggccgtgctcaatgatgagtggtatcaaagcttccaccgctttaaggttgtctttggagtgggggtgaagacagcagacaagtggtaccgtatgggtctgcgcaccctcgaggatgttcgttccagcaagaccctgaagttgaccccgatgcagaaagtaggtctgctgtattatgaagatcttgctcgcggcgttacgcgtgccgaagctgacgcgatttggctgctggttcaggatgcagtcgcaactttcgacccggatgcgatcgtggagattgtcggtggatttcgtcgtgggaaacctcagggtcacgacgttgatctgcttatcagttctccgggagctgagaaagagcaagaagaccaactcctgcagaaagtgatgaatctgtggaagaaacaagggttgttgctgtacggtcgtctggaatggacccagtgggaagatgggggttcgccttccggtaaggctgacgagggtgacgcgggtgcgaaatgctttctgatcctcaaactttatgatcatctggtgcgtaaaagcaaatggaacatgccgacgggttcgaacgtgggcgagtccaaaccgtggaaagcaattcgcgtagatctgctgcgttgcccctatggcagttttgcgtttgcgatgttgcagtggaccggaagccgcatgttccgtcgtgatctgcgttggtacgccactgacgagaagaacatgatgctggacaatcattcgctgtatgacctgaccaagggtatcttcctccctgctaaatcggaagaggaaattttcgcacatctggggcttgaatacctggaaccgttcgaacgtaacgca

SEQ ID NO: 3528 - protein, 529 aa, synthetic construct
  REGION 1..529: note = Variant of terminal deoxynucleotidyltransferase
MHHHHHHGGSGSHGIRTIDSDFGKKQQKKGDNHDSSATYEIKFHEFVLFILEEKMGATRRTFLTDLARKKGFRVENELTDEVTHIVAENLSRSEVLAWLKEHKMEKTKQFELLDISWLIESMKVGKPVDTKGKYQLAESVEVSANPDPTEGRVNELPPTMKTVSPYACQRRTTLNNRNQRFTDSLEILRENYEFKRNDDTALEFRRAISVLKSLPFEVRSLKDTEGLPWIGDEVKGIMEEIIEVGESREVQAVLNDEWYQSFHRFKVVFGVGVKTADKWYRMGLRTLEDVRSSKTLKLTPMQKVGLLYYEDLARGVTRAEADAIWLLVQDAVATFDPDAIVEIVGGFRRGKPQGHDVDLLISSPGAEKEQEDQLLQKVMNLWKKQGLLLYGRLEWTQWEDGGSPSGKADEGDAGAKCFLILKLYDHLVRKSKWNMPTGSNVGESKPWKAIRVDLLRCPYGSFAFAMLQWTGSRMFRRDLRWYATDEKNMMLDNHSLYDLTKGIFLPAKSEEEIFAHLGLEYLEPFERNA

SEQ ID NO: 3529 - DNA, 1587 bp, synthetic construct
  misc_feature 1..1587: note = Variant of terminal deoxynucleotidyltransferase
  source 1..1587: mol_type = other DNA
atgcaccatcatcatcatcatggcggtagcggcagccacggcattcgtaccatcgattcggacttcgggaagaaacagcagaaaaaaggcgataaccacgatagttccgccacttatgaaatcaaatttcacgagtttgtgctgttcattctcgaagaaaaaatgggtgcgacgcgtcgtacttttctgacagatttagcccgcaagaaagggttccgcgtcgagaatgaactgaccgacgaagttacccacatcgtggcagaaaatctgtcacgctctgaagtattggcttggctgaaagaacacaagatggagaagaccaagcaattcgaactgctggatattagctggcttatcgaaagcatgaaagttggtaaaccggtggacaccaaggggaaataccagttggcggaatcggttgaggtgagtgcgaacccagatccgacagaaggtcgtgtaaacgagctgcctcctactatgaaaaccgtttctccgtatgcgtgtcaacgccgcaccaccctgaacaaccgtaatcaacgttttacggactcgctggaaattcttcgtgaaaattacgagttcaaacgcaacgatgatactgcgctggaatttcgtcgtgctatctccgtgctgaaaagccttccgtttgaggtacgtagcctgaaagacacggaaggattgccctggatcggtgatgaagtcaaagggattatggaagaaatcatcgaggtcggggagtcgcgtgaagtgcaggccgtgctcaatgatgagtggtatcaaagcttccaccgctttaagagtgtctttggagtgggggtgaagacagcagacaagtggtaccgtatgggtctgcgcaccctcgaggatgttcgttccagcaagaccctgaagttgaccccgatgcagaaagtaggtctgctgtattatgaagatcttgctcgcggcgttacgcgtgccgaagctgacgcgatttggctgctggttcaggatgcagtcgcaactttcgacccggatgcgatcgtggagattgtcggtggatttcgtcgtgggaaacctcagggtcacgacgttgatctgcttatcagttctccgggagctgagaaagagcaagaagaccaactcctgcagaaagtgatgaatctgtggaagaaacaagggttgttgctgtacggtcgtctggaatggacccagtgggaagatgggggttcgccttccggtaaggctgactttggtgacgcgggtgcgaaatgctttctgatcctcaaactttatgatcatctggtgcgtaaaagcaaatggaacatgccgacgggttcgaacgtgggcgagtccaaaccgtggaaagcaattcgcgtagatctgctgcgttgcccctatggcagttttgcgtttgcgatgttgcagtggaccggaagccgcatgttccgtcgtgatctgcgttggtacgccactgacgagaagaacatgatgctggacaatcattcgctgtatgacctgaccaagggtatcttcctccctgctaaatcggaagaggaaattttcgcacatctggggcttgaatacctggaaccgttcgaacgtaacgca

SEQ ID NO: 3530 - protein, 529 aa, synthetic construct
  REGION 1..529: note = Variant of terminal deoxynucleotidyltransferase
MHHHHHHGGSGSHGIRTIDSDFGKKQQKKGDNHDSSATYEIKFHEFVLFILEEKMGATRRTFLTDLARKKGFRVENELTDEVTHIVAENLSRSEVLAWLKEHKMEKTKQFELLDISWLIESMKVGKPVDTKGKYQLAESVEVSANPDPTEGRVNELPPTMKTVSPYACQRRTTLNNRNQRFTDSLEILRENYEFKRNDDTALEFRRAISVLKSLPFEVRSLKDTEGLPWIGDEVKGIMEEIIEVGESREVQAVLNDEWYQSFHRFKSVFGVGVKTADKWYRMGLRTLEDVRSSKTLKLTPMQKVGLLYYEDLARGVTRAEADAIWLLVQDAVATFDPDAIVEIVGGFRRGKPQGHDVDLLISSPGAEKEQEDQLLQKVMNLWKKQGLLLYGRLEWTQWEDGGSPSGKADFGDAGAKCFLILKLYDHLVRKSKWNMPTGSNVGESKPWKAIRVDLLRCPYGSFAFAMLQWTGSRMFRRDLRWYATDEKNMMLDNHSLYDLTKGIFLPAKSEEEIFAHLGLEYLEPFERNA

SEQ ID NO: 3531 - DNA, 1587 bp, synthetic construct
  misc_feature 1..1587: note = Variant of terminal deoxynucleotidyltransferase
  source 1..1587: mol_type = other DNA
atgcaccatcatcatcatcatggcggtagcggcagccacggcattcgtaccatcgattcggacttcgggaagaaacagcagaaaaaaggcgataaccacgatagttccgccacttatgaaatcaaatttcacgagtttgtgctgttcattctcgaagaaaaaatgggtgcgacgcgtcgtacttttctgacagatttagcccgcaagaaagggttccgcgtcgagaatgaactgaccgacgaagttacccacatcgtggcagaaaatctgtcacgctctgaagtattggcttggctgaaagaacacaagatggagaagaccaagcaattcgaactgctggatattagctggcttatcgaaagcatgaaagttggtaaaccggtggacaccaaggggaaataccagttggcggaatcggttgaggtgagtgcgaacccagatccgacagaaggtcgtgtaaacgagctgcctcctactatgaaaaccgtttctccgtatgcgtgtcaacgccgcaccaccctgaacaaccgtaatcaacgttttacggactcgctggaaattcttcgtgaaaattacactttcaaacgcaacgatgatactgcgctggaatttcgtcgtgctatctccgtgctgaaaagccttccgtttgaggtacgtagcctgaaagacacggaaggattgccctggatcggtgatgaagtcaaagggattatggaagaaatcatcgaggtcggggagtcgcgtgaagtgcaggccgtgctcaatgatgagtggtatcaaagcttccaccgctttaagagtgtctttggagtgggggtgaagacagcagacaagtggtaccgtatgggtctgcgcaccctcgaggatgttcgttccagcaagaccctgaagttgaccccgatgcagaaagtaggtctgctgtattatgaagatcttgctcgcggcgttacgcgtgccgaagctgacgcgatttggctgctggttcaggatgcagtcgcaactttcgacccggatgcgatcgtggagattgtcggtggatttcgtcgtgggaaacctcagggtcacgacgttgatctgcttatcagttctccgggagctgagaaagagcaagaagaccaactcctgcagaaagtgatgaatctgtggaagaaacaagggttgttgctgtacggtcgtctggaatggacccagtgggaagatgggggttcgccttccggtaaggctgacgagggtgacgcgggtgcgaaatgctttctgatcctcaaactttatgatcatctggtgcgtaaaagcaaatggaacatgccgacgggttcgaacgtgggcgagtccaaaccgtggaaagcaattcgcgtagatctgctgcgttgcccctatggcagttttgcgtttgcgatgttgcagtggaccggaagccgcatgttccgtcgtgatctgcgttggtacgccactgacgagaagaacatgatgctggacaatcattcgctgtatgacctgaccaagggtatcttcctccctgctaaatcggaagaggaaattttcgcacatctggggcttgaatacctggaaccgttcgaacgtaacgca

SEQ ID NO: 3532 - protein, 529 aa, synthetic construct
  REGION 1..529: note = Variant of terminal deoxynucleotidyltransferase
MHHHHHHGGSGSHGIRTIDSDFGKKQQKKGDNHDSSATYEIKFHEFVLFILEEKMGATRRTFLTDLARKKGFRVENELTDEVTHIVAENLSRSEVLAWLKEHKMEKTKQFELLDISWLIESMKVGKPVDTKGKYQLAESVEVSANPDPTEGRVNELPPTMKTVSPYACQRRTTLNNRNQRFTDSLEILRENYTFKRNDDTALEFRRAISVLKSLPFEVRSLKDTEGLPWIGDEVKGIMEEIIEVGESREVQAVLNDEWYQSFHRFKSVFGVGVKTADKWYRMGLRTLEDVRSSKTLKLTPMQKVGLLYYEDLARGVTRAEADAIWLLVQDAVATFDPDAIVEIVGGFRRGKPQGHDVDLLISSPGAEKEQEDQLLQKVMNLWKKQGLLLYGRLEWTQWEDGGSPSGKADEGDAGAKCFLILKLYDHLVRKSKWNMPTGSNVGESKPWKAIRVDLLRCPYGSFAFAMLQWTGSRMFRRDLRWYATDEKNMMLDNHSLYDLTKGIFLPAKSEEEIFAHLGLEYLEPFERNA

SEQ ID NO: 3533 - DNA, 1587 bp, synthetic construct
  misc_feature 1..1587: note = Variant of terminal deoxynucleotidyltransferase
  source 1..1587: mol_type = other DNA
atgcaccatcatcatcatcatggcggtagcggcagccacggcattcgtaccatcgattcggacttcgggaagaaacagcagaaaaaaggcgataaccacgatagttccgccacttatgaaatcaaatttcacgagtttgtgctgttcattctcgaagaaaaaatgggtgcgacgcgtcgtacttttctgacagatttagcccgcaagaaagggttccgcgtcgagaatgaactgaccgacgaagttacccacatcgtggcagaaaatctgtcacgctctgaagtattggcttggctgaaagaacacaagatggagaagaccaagcaattcgaactgctggatattagctggcttatcgaaagcatgaaagttggtaaaccggtggacaccaaggggaaataccagttggcggaatcggttgaggtgagtgcgaacccagatccgacagaaggtcgtgtaaacgagctgcctcctactatgaaaaccgtttctccgtatgcgtgtcaacgccgcaccaccctgaacaaccgtaatcaacgttttacggactcgctggaaattcttcgtgaaaattacgagttcaaacgcaacgatgatactgcgctggaatttcgtcgtgctatctccgtgctgaaaagccttccgtttgaggtacgtagcctgaaagacacggaaggattgccctggatcggtgatgaagtcaaagggattatggaagaaatcatcgaggtcggggagtcgcgtgaagtgcaggccgtgctcaatgatgagtggtatcaaagcttccaccgctttaagagtgtctttggagtgggggtgaagacagcagacaagtggtaccgtatgggtctgcgcaccctcgaggatgttcgttccagcaagaccctgaagttgaccccgatgcagaaagtaggtctgctgtattatgaagatcttgctcgccaggttacgcgtgccgaagctgacgcgatttggctgctggttcaggatgcagtcgcaactttcgacccggatgcgatcgtggagattgtcggtggatttcgtcgtgggaaacctcagggtcacgacgttgatctgcttatcagttctccgggagctgagaaagagcaagaagaccaactcctgcagaaagtgatgaatctgtggaagaaacaagggttgttgctgtacggtcgtctggaatggacccagtgggaagatgggggttcgccttccggtaaggctgacgagggtgacgcgggtgcgaaatgctttctgatcctcaaactttatgatcatctggtgcgtaaaagcaaatggaacatgccgacgggttcgaacgtgggcgagtccaaaccgtggaaagcaattcgcgtagatctgctgcgttgcccctatggcagttttgcgtttgcgatgttgcagtggaccggaagccgcatgttccgtcgtgatctgcgttggtacgccactgacgagaagaacatgatgctggacaatcattcgctgtatgacctgaccaagggtatcttcctccctgctaaatcggaagaggaaattttcgcacatctggggcttgaatacctggaaccgttcgaacgtaacgca

SEQ ID NO: 3534 - protein, 529 aa, synthetic construct
  REGION 1..529: note = Variant of terminal deoxynucleotidyltransferase
MHHHHHHGGSGSHGIRTIDSDFGKKQQKKGDNHDSSATYEIKFHEFVLFILEEKMGATRRTFLTDLARKKGFRVENELTDEVTHIVAENLSRSEVLAWLKEHKMEKTKQFELLDISWLIESMKVGKPVDTKGKYQLAESVEVSANPDPTEGRVNELPPTMKTVSPYACQRRTTLNNRNQRFTDSLEILRENYEFKRNDDTALEFRRAISVLKSLPFEVRSLKDTEGLPWIGDEVKGIMEEIIEVGESREVQAVLNDEWYQSFHRFKSVFGVGVKTADKWYRMGLRTLEDVRSSKTLKLTPMQKVGLLYYEDLARQVTRAEADAIWLLVQDAVATFDPDAIVEIVGGFRRGKPQGHDVDLLISSPGAEKEQEDQLLQKVMNLWKKQGLLLYGRLEWTQWEDGGSPSGKADEGDAGAKCFLILKLYDHLVRKSKWNMPTGSNVGESKPWKAIRVDLLRCPYGSFAFAMLQWTGSRMFRRDLRWYATDEKNMMLDNHSLYDLTKGIFLPAKSEEEIFAHLGLEYLEPFERNA

SEQ ID NO: 3535 - DNA, 1587 bp, synthetic construct
  misc_feature 1..1587: note = Variant of terminal deoxynucleotidyltransferase
  source 1..1587: mol_type = other DNA
atgcaccatcatcatcatcatggcggtagcggcagccacggcattcgtaccatcgattcggacttcgggaagaaacagcagaaaaaaggcgataaccacgatagttccgccacttatgaaatcaaatttcacgagtttgtgctgttcattctcgaagaaaaaatgggtgcgacgcgtcgtacttttctgacagatttagcccgcaagaaagggttccgcgtcgagaatgaactgaccgacgaagttacccacatcgtggcagaaaatctgtcacgctctgaagtattggcttggctgaaagaacacaagatggagaagaccaagcaattcgaactgctggatattagctggcttatcgaaagcatgaaagttggtaaaccggtggacaccaaggggaaataccagttggcggaatcggttgaggtgagtgcgaacccagatccgacagaaggtcgtgtaaacgagctgcctcctactatgaaaaccgtttctccgtatgcgtgtcaacgccgcaccaccctgaacaaccgtaatcaacgttttacggactcgctggaaattcttcgtgaaaattacgagttcaaacgcaacgatgatactgcgctggaatttcgtcgtgctatctccgtgctgaaaagccttccgtttgaggtacgtagcctgaaagacacggaaggattgccctggatcggtgatgaagtcaaagggattatggaagaaatcatcgaggtcggggagtcgcgtgaagtgcaggccgtgctcaatgatgagtggtatcaaagcttccaccgctttaagagtgtctttggagtgggggtgaagacagcagacaagtggtaccgtatgggtctgcgcaccctcgaggatgttcgttccagcaagaccctgaagttgaccccgatgcagaaagtaggtctgctgtattatgaagatcttgctcgcggcgttacgcgtgccgaagctgacgcgatttggctgctggttcaggatgcagtcgcaactttcgacccggatgcgatcgtggagattgtcggtggatttcgtcgtaggaaacctcagggtcacgacgttgatctgcttatcagttctccgggagctgagaaagagcaagaagaccaactcctgcagaaagtgatgaatctgtggaagaaacaagggttgttgctgtacggtcgtctggaatggacccagtgggaagatgggggttcgccttccggtaaggctgacgagggtgacgcgggtgcgaaatgctttctgatcctcaaactttatgatcatctggtgcgtaaaagcaaatggaacatgccgacgggttcgaacgtgggcgagtccaaaccgtggaaagcaattcgcgtagatctgctgcgttgcccctatggcagttttgcgtttgcgatgttgcagtggaccggaagccgcatgttccgtcgtgatctgcgttggtacgccactgacgagaagaacatgatgctggacaatcattcgctgtatgacctgaccaagggtatcttcctccctgctaaatcggaagaggaaattttcgcacatctggggcttgaatacctggaaccgttcgaacgtaacgca

SEQ ID NO: 3536 - protein, 529 aa, synthetic construct
  REGION 1..529: note = Variant of terminal deoxynucleotidyltransferase
MHHHHHHGGSGSHGIRTIDSDFGKKQQKKGDNHDSSATYEIKFHEFVLFILEEKMGATRRTFLTDLARKKGFRVENELTDEVTHIVAENLSRSEVLAWLKEHKMEKTKQFELLDISWLIESMKVGKPVDTKGKYQLAESVEVSANPDPTEGRVNELPPTMKTVSPYACQRRTTLNNRNQRFTDSLEILRENYEFKRNDDTALEFRRAISVLKSLPFEVRSLKDTEGLPWIGDEVKGIMEEIIEVGESREVQAVLNDEWYQSFHRFKSVFGVGVKTADKWYRMGLRTLEDVRSSKTLKLTPMQKVGLLYYEDLARGVTRAEADAIWLLVQDAVATFDPDAIVEIVGGFRRRKPQGHDVDLLISSPGAEKEQEDQLLQKVMNLWKKQGLLLYGRLEWTQWEDGGSPSGKADEGDAGAKCFLILKLYDHLVRKSKWNMPTGSNVGESKPWKAIRVDLLRCPYGSFAFAMLQWTGSRMFRRDLRWYATDEKNMMLDNHSLYDLTKGIFLPAKSEEEIFAHLGLEYLEPFERNA

SEQ ID NO: 3537 - DNA, 1587 bp, synthetic construct
  misc_feature 1..1587: note = Variant of terminal deoxynucleotidyltransferase
  source 1..1587: mol_type = other DNA
atgcaccatcatcatcatcatggcggtagcggcagccacggcattcgtaccatcgattcggacttcgggaagaaacagcagaaaaaaggcgataaccacgatagttccgccacttatgaaatcaaatttcacgagtttgtgctgttcattctcgaagaaaaaatgggtgcgacgcgtcgtacttttctgacagatttagcccgcaagaaagggttccgcgtcgagaatgaactgaccgacgaagttacccacatcgtggcagaaaatctgtcacgctctgaagtattggcttggctgaaagaacacaagatggagaagaccaagcaattcgaactgctggatattagctggcttatcgaaagcatgaaagttggtaaaccggtggacaccaaggggaaataccagttggcggaatcggttgaggtgagtgcgaacccagatccgacagaaggtcgtgtaaacgagctgcctcctactatgaaaaccgtttctccgtatgcgtgtcaacgccgcaccaccctgaacaaccgtaatcaacgttttacggactcgctggaaattcttcgtgaaaattacgagttcaaacgcaacgatgatactgcgctggaatttcgtcgtgctatctccgtgctgaaaagccttccgtttgaggtacgtagcctgaaagacacggaaggattgccctggatcggtgatgaagtcaaagggattatggaagaaatcatcgaggtcggggagtcgcgtgaagtgcaggccgtgctcaatgatgagtggtatcaaagcttccaccgctttaagagtgtctttggagtgggggtgaagacagcagacaagtggtaccgtatgggtctgcgcaccctcgaggatgttcgttccagcaagaccctgaagttgaccccgatgcagaaagtaggtctgctgtattatgaagatcttgctcgcggcgttacgcgtgccgaagctgacgcgatttggctgctggttcaggatgcagtcgcaactttcgacccggatgcgatcgtggagattgtcggtggatttcgtcgtgggaaacctcagggtcacgacgttgatctgcttatcagttctccgggagctgagaaagagcaagaagaccaactcctgcagaaagtgatgaatctgtggaagaaacaagggttgttgctgtacggtcgtctggaatggacccagtgggaagatgggggttcgccttccggtaaggctgacgagggtgacgcgggtgcgaaatgctttctgatcctcaaactttatgatcatctggtgcgtaaaagcaaatggaacatgccgacgggttcgaacgtgggcgagtccaaaccgtggaaagcaattcgcgtagatctgctgcgttgcccctatggcagttttgcgtttgcgatgttgcagtggaccggaagccgcatgttccgtcgtgatctgaagtggtacgccactgacgagaagaacatgatgctggacaatcattcgctgtatgacctgaccaagggtatcttcctccctgctaaatcggaagaggaaattttcgcacatctggggcttgaatacctggaaccgttcgaacgtaacgca

SEQ ID NO: 3538 - protein, 529 aa, synthetic construct
  REGION 1..529: note = Variant of terminal deoxynucleotidyltransferase
MHHHHHHGGSGSHGIRTIDSDFGKKQQKKGDNHDSSATYEIKFHEFVLFILEEKMGATRRTFLTDLARKKGFRVENELTDEVTHIVAENLSRSEVLAWLKEHKMEKTKQFELLDISWLIESMKVGKPVDTKGKYQLAESVEVSANPDPTEGRVNELPPTMKTVSPYACQRRTTLNNRNQRFTDSLEILRENYEFKRNDDTALEFRRAISVLKSLPFEVRSLKDTEGLPWIGDEVKGIMEEIIEVGESREVQAVLNDEWYQSFHRFKSVFGVGVKTADKWYRMGLRTLEDVRSSKTLKLTPMQKVGLLYYEDLARGVTRAEADAIWLLVQDAVATFDPDAIVEIVGGFRRGKPQGHDVDLLISSPGAEKEQEDQLLQKVMNLWKKQGLLLYGRLEWTQWEDGGSPSGKADEGDAGAKCFLILKLYDHLVRKSKWNMPTGSNVGESKPWKAIRVDLLRCPYGSFAFAMLQWTGSRMFRRDLKWYATDEKNMMLDNHSLYDLTKGIFLPAKSEEEIFAHLGLEYLEPFERNA

SEQ ID NO: 3539 - DNA, 1587 bp, synthetic construct
  misc_feature 1..1587: note = Variant of terminal deoxynucleotidyltransferase
  source 1..1587: mol_type = other DNA
atgcaccatcatcatcatcatggcggtagcggcagccacggcattcgtaccatcgattcggacttcgggaagaaacagcagaaaaaaggcgataaccacgatagttccgccacttatgaaatcaaatttcacgagtttgtgctgttcattctcgaagaaaaaatgggtgcgacgcgtcgtacttttctgacagatttagcccgcaagaaagggttccgcgtcgagaatgaactgaccgacgaagttacccacatcgtggcagaaaatctgtcacgctctgaagtattggcttggctgaaagaacacaagatggagaagaccaagcaattcgaactgctggatattagctggcttatcgaaagcatgaaagttggtaaaccggtggacaccaaggggaaataccagttggcggaatcggttgaggtgagtgcgaacccagatccgacagaaggtcgtgtaaacgagctgcctcctactatgaaaaccgtttctccgtatgcgtgtcaacgccgcaccaccctgaacaaccgtaatcaacgttttacggactcgctggaaattcttcgtgaaaattacgagttcaaacgcaacgatgatactgcgctggaatttcgtcgtgctatctccgtgctgaaaagccttccgtttgaggtacgtagcctgaaagacacggaaggattgccctggatcggtgatgaagtcaaagggattatggaagaaatcatcgaggtcggggagtcgcgtgaagtgcaggccgtgctcaatgatgagtggtatcaaagcttccaccgctttaagagtgtctttggagtgggggtgaagacagcagacaagtggtaccgtatgggtctgcgcaccctcgaggatgttcgttccagcaagaccctgaagttgaccccgatgcagaaagtaggtctgctgtattatgaagatcttgctcgcggcgttacgcgtgccgaagctgacgcgatttggctgctggttcaggatgcagtcgcaactttcgacccggatgcgatcgtggagattgtcggtggatttcgtcgtgggaaacctcagggtcacgacgttgatctgcttatcagttctccgggagctgagaaagagcaagaagaccaactcctgcagaaagtgatgaatctgtggaagaaacaagggttgttgctgtacggtcgtctggaatggacccagtgggaagatgggggttcgccttccggtaagactgacgagggtgacgcgggtgcgaaatgctttctgatcctcaaactttatgatcatctggtgcgtaaaagcaaatggaacatgccgacgggttcgaacgtgggcgagtccaaaccgtggaaagcaattcgcgtagatctgctgcgttgcccctatggcagttttgcgtttgcgatgttgcagtggaccggaagccgcatgttccgtcgtgatctgcgttggtacgccactgacgagaagaacatgatgctggacaatcattcgctgtatgacctgaccaagggtatcttcctccctgctaaatcggaagaggaaattttcgcacatctggggcttgaatacctggaaccgttcgaacgtaacgca

SEQ ID NO: 3540 - protein, 529 aa, synthetic construct
  REGION 1..529: note = Variant of terminal deoxynucleotidyltransferase
MHHHHHHGGSGSHGIRTIDSDFGKKQQKKGDNHDSSATYEIKFHEFVLFILEEKMGATRRTFLTDLARKKGFRVENELTDEVTHIVAENLSRSEVLAWLKEHKMEKTKQFELLDISWLIESMKVGKPVDTKGKYQLAESVEVSANPDPTEGRVNELPPTMKTVSPYACQRRTTLNNRNQRFTDSLEILRENYEFKRNDDTALEFRRAISVLKSLPFEVRSLKDTEGLPWIGDEVKGIMEEIIEVGESREVQAVLNDEWYQSFHRFKSVFGVGVKTADKWYRMGLRTLEDVRSSKTLKLTPMQKVGLLYYEDLARGVTRAEADAIWLLVQDAVATFDPDAIVEIVGGFRRGKPQGHDVDLLISSPGAEKEQEDQLLQKVMNLWKKQGLLLYGRLEWTQWEDGGSPSGKTDEGDAGAKCFLILKLYDHLVRKSKWNMPTGSNVGESKPWKAIRVDLLRCPYGSFAFAMLQWTGSRMFRRDLRWYATDEKNMMLDNHSLYDLTKGIFLPAKSEEEIFAHLGLEYLEPFERNA

SEQ ID NO: 3541 - DNA, 1587 bp, synthetic construct
  misc_feature 1..1587: note = Variant of terminal deoxynucleotidyltransferase
  source 1..1587: mol_type = other DNA
atgcaccatcatcatcatcatggcggtagcggcagccacggcattcgtaccatcgattcggacttcgggaagaaacagcagaaaaaaggcgataaccacgatagttccgccacttatgaaatcaaatttcacgagtttgtgctgttcattctcgaagaaaaaatgggtgcgacgcgtcgtacttttctgacagatttagcccgcaagaaagggttccgcgtcgagaatgaactgaccgacgaagttacccacatcgtggcagaaaatctgtcacgctctgaagtattggcttggctgaaagaacacaagatggagaagaccaagcaattcgaactgctggatattagctggcttatcgaaagcatgaaagttggtaaaccggtggacaccaaggggaaataccagttggcggaatcggttgaggtgagtgcgaacccagatccgacagaaggtcgtgtaaacgagctgcctcctactatgaaaaccgtttctccgtatgcgtgtcaacgccgcaccaccctgaacaaccgtaatcaacgttttacggactcgctggaaattcttcgtgaaaattacgagtcgaaacgcaacgatgatactgcgctggaatttcgtcgtgctatctccgtgctgaaaagccttccgtttgaggtacgtagcctgaaagacacggaaggattgccctggatcggtgatgaagtcaaagggattatggaagaaatcatcgaggtcggggagtcgcgtgaagtgcaggccgtgctcaatgatgagtggtatcaaagcttccaccgctttaagagtgtctttggagtgggggtgaagacagcagacaagtggtaccgtatgggtctgcgcaccctcgaggatgttcgttccagcaagaccctgaagttgaccccgatgcagaaagtaggtctgctgtattatgaagatcttgctcgcggcgttacgcgtgccgaagctgacgcgatttggctgctggttcaggatgcagtcgcaactttcgacccggatgcgatcgtggagattgtcggtggatttcgtcgtgggaaacctcagggtcacgacgttgatctgcttatcagttctccgggagctgagaaagagcaagaagaccaactcctgcagaaagtgatgaatctgtggaagaaacaagggttgttgctgtacggtcgtctggaatggacccagtgggaagatgggggttcgccttccggtaaggctgacgagggtgacgcgggtgcgaaatgctttctgatcctcaaactttatgatcatctggtgcgtaaaagcaaatggaacatgccgacgggttcgaacgtgggcgagtccaaaccgtggaaagcaattcgcgtagatctgctgcgttgcccctatggcagttttgcgtttgcgatgttgcagtggaccggaagccgcatgttccgtcgtgatctgcgttggtacgccactgacgagaagaacatgatgctggacaatcattcgctgtatgacctgaccaagggtatcttcctccctgctaaatcggaagaggaaattttcgcacatctggggcttgaatacctggaaccgttcgaacgtaacgca

SEQ ID NO: 3542 - protein, 529 aa, synthetic construct
  REGION 1..529: note = Variant of terminal deoxynucleotidyltransferase
MHHHHHHGGSGSHGIRTIDSDFGKKQQKKGDNHDSSATYEIKFHEFVLFILEEKMGATRRTFLTDLARKKGFRVENELTDEVTHIVAENLSRSEVLAWLKEHKMEKTKQFELLDISWLIESMKVGKPVDTKGKYQLAESVEVSANPDPTEGRVNELPPTMKTVSPYACQRRTTLNNRNQRFTDSLEILRENYESKRNDDTALEFRRAISVLKSLPFEVRSLKDTEGLPWIGDEVKGIMEEIIEVGESREVQAVLNDEWYQSFHRFKSVFGVGVKTADKWYRMGLRTLEDVRSSKTLKLTPMQKVGLLYYEDLARGVTRAEADAIWLLVQDAVATFDPDAIVEIVGGFRRGKPQGHDVDLLISSPGAEKEQEDQLLQKVMNLWKKQGLLLYGRLEWTQWEDGGSPSGKADEGDAGAKCFLILKLYDHLVRKSKWNMPTGSNVGESKPWKAIRVDLLRCPYGSFAFAMLQWTGSRMFRRDLRWYATDEKNMMLDNHSLYDLTKGIFLPAKSEEEIFAHLGLEYLEPFERNA

SEQ ID NO: 3543 - DNA, 1587 bp, synthetic construct
  misc_feature 1..1587: note = Variant of terminal deoxynucleotidyltransferase
  source 1..1587: mol_type = other DNA
atgcaccatcatcatcatcatggcggtagcggcagccacggcattcgtaccatcgattcggacttcgggaagaaacagcagaaaaaaggcgataaccacgatagttccgccacttatgaaatcaaatttcacgagtttgtgctgttcattctcgaagaaaaaatgggtgcgacgcgtcgtacttttctgacagatttagcccgcaagaaagggttccgcgtcgagaatgaactgaccgacgaagttacccacatcgtggcagaaaatctgtcacgctctgaagtattggcttggctgaaagaacacaagatggagaagaccaagcaattcgaactgctggatattagctggcttatcgaaagcatgaaagttggtaaaccggtggacaccaaggggaaataccagttggcggaatcggttgaggtgagtgcgaacccagatccgacagaaggtcgtgtaaacgagctgcctcctactatgaaaaccgtttctccgtatgcgtgtcaacgccgcaccaccctgaacaaccgtaatcaacgttttacggactcgctggaaattcttcgtgaaaattacgagttcaaacgcaacgatgatactgcgctggaatttcgtcgtgctatctccgtgctgaaaagccttccgtttgaggtacgtagcctgaaagacacggaaggattgccctggatcggtgatgaagtcaaagggattatggaagaaatcatcgaggtcggggagtcgcgtgaagtgcaggccgtgctcaatgatgagtggtatcaaagcttccaccgctttaagagtgtctttggagtgggggtgaagacagcagacaagtggtaccgtatgggtctgcgcaccctcgaggatgttcgttccagcaagaccctgaagttgaccccgatgcagaaagtaggtctgctgtattatgaagatcttgctcgcggcgttacgcgtgccgaagctgacgcgatttggctgctggttcaggatgcagtcgcaactttcgacccggatgcgatcgtggagattgtcggtggatttcgtcgtgggaaacctcagggtcacgacgttgatctgcttatcagttctccgggagctgagaaagagcaagaagaccaactcctgcagaaagtgatgaatctgtggaagaaacaagggttgttgctgtacggtcgtctggaatggacccagtgggaagatgggggttcgccttccggtaaggctgacgagggtgacgcgggtgcgaaatgctttctgatcctcaaactttatgatcatctggtgcgtaaaagcaaatggaacatgccgacgggttcgaacgtgggcgagtccaaaccgtggaaagcaattcgcgtagatctgctgcgttgcccctatggcagttttgcgtttgcgatgttgacttggaccggaagccgcatgttccgtcgtgatctgcgttggtacgccactgacgagaagaacatgatgctggacaatcattcgctgtatgacctgaccaagggtatcttcctccctgctaaatcggaagaggaaattttcgcacatctggggcttgaatacctggaaccgttcgaacgtaacgca

SEQ ID NO: 3544 - protein, 529 aa, synthetic construct
  REGION 1..529: note = Variant of terminal deoxynucleotidyltransferase
MHHHHHHGGSGSHGIRTIDSDFGKKQQKKGDNHDSSATYEIKFHEFVLFILEEKMGATRRTFLTDLARKKGFRVENELTDEVTHIVAENLSRSEVLAWLKEHKMEKTKQFELLDISWLIESMKVGKPVDTKGKYQLAESVEVSANPDPTEGRVNELPPTMKTVSPYACQRRTTLNNRNQRFTDSLEILRENYEFKRNDDTALEFRRAISVLKSLPFEVRSLKDTEGLPWIGDEVKGIMEEIIEVGESREVQAVLNDEWYQSFHRFKSVFGVGVKTADKWYRMGLRTLEDVRSSKTLKLTPMQKVGLLYYEDLARGVTRAEADAIWLLVQDAVATFDPDAIVEIVGGFRRGKPQGHDVDLLISSPGAEKEQEDQLLQKVMNLWKKQGLLLYGRLEWTQWEDGGSPSGKADEGDAGAKCFLILKLYDHLVRKSKWNMPTGSNVGESKPWKAIRVDLLRCPYGSFAFAMLTWTGSRMFRRDLRWYATDEKNMMLDNHSLYDLTKGIFLPAKSEEEIFAHLGLEYLEPFERNA

SEQ ID NO: 3545 - DNA, 1587 bp, synthetic construct
  misc_feature 1..1587: note = Variant of terminal deoxynucleotidyltransferase
  source 1..1587: mol_type = other DNA
atgcaccatcatcatcatcatggcggtagcggcagccacggcattcgtaccatcgattcggacttcgggaagaaacagcagaaaaaaggcgataaccacgatagttccgccacttatgaaatcaaatttcacgagtttgtgctgttcattctcgaagaaaaaatgggtgcgacgcgtcgtacttttctgacagatttagcccgcaagaaagggttccgcgtcgagaatgaactgaccgacgaagttacccacatcgtggcagaaaatctgtcacgctctgaagtattggcttggctgaaagaacacaagatggagaagaccaagcaattcgaactgctggatattagctggcttatcgaaagcatgaaagttggtaaaccggtggacaccaaggggaaataccagttggcggaatcggttgaggtgagtgcgaacccagatccgacagaaggtcgtgtaaacgagctgcctcctactatgaaaaccgtttctccgtatgcgtgtcaacgccgcaccaccctgaacaaccgtaatcaacgttttacggactcgctggaaattcttcgtgaaaattacgagttcaaacgcaacgatgatactgcgctggaatttcgtcgtgctatctccgtgctgaaaagccttccgtttgaggtacgtagcctgaaagacacggaaggattgccctggatcggtgatgaagtcaaagggattatggaagaaatcatcgaggtcggggagtcgcgtgaagtgcaggccgtgctcaatgatgagtggtatcaaagcttccaccgctttaagagtgtctttggagtgggggtgaagacagcagacaagtggtaccgtatgggtctgcgcaccctcgaggatgttcgttccagcaagaccctgacgttgaccccgatgcagaaagtaggtctgctgtattatgaagatcttgctcgcggcgttacgcgtgccgaagctgacgcgatttggctgctggttcaggatgcagtcgcaactttcgacccggatgcgatcgtggagattgtcggtggatttcgtcgtgggaaacctcagggtcacgacgttgatctgcttatcagttctccgggagctgagaaagagcaagaagaccaactcctgcagaaagtgatgaatctgtggaagaaacaagggttgttgctgtacggtcgtctggaatggacccagtgggaagatgggggttcgccttccggtaaggctgacgagggtgacgcgggtgcgaaatgctttctgatcctcaaactttatgatcatctggtgcgtaaaagcaaatggaacatgccgacgggttcgaacgtgggcgagtccaaaccgtggaaagcaattcgcgtagatctgctgcgttgcccctatggcagttttgcgtttgcgatgttgcagtggaccggaagccgcatgttccgtcgtgatctgcgttggtacgccactgacgagaagaacatgatgctggacaatcattcgctgtatgacctgaccaagggtatcttcctccctgctaaatcggaagaggaaattttcgcacatctggggcttgaatacctggaaccgttcgaacgtaacgca

SEQ ID NO: 3546 - protein, 529 aa, synthetic construct
  REGION 1..529: note = Variant of terminal deoxynucleotidyltransferase
MHHHHHHGGSGSHGIRTIDSDFGKKQQKKGDNHDSSATYEIKFHEFVLFILEEKMGATRRTFLTDLARKKGFRVENELTDEVTHIVAENLSRSEVLAWLKEHKMEKTKQFELLDISWLIESMKVGKPVDTKGKYQLAESVEVSANPDPTEGRVNELPPTMKTVSPYACQRRTTLNNRNQRFTDSLEILRENYEFKRNDDTALEFRRAISVLKSLPFEVRSLKDTEGLPWIGDEVKGIMEEIIEVGESREVQAVLNDEWYQSFHRFKSVFGVGVKTADKWYRMGLRTLEDVRSSKTLTLTPMQKVGLLYYEDLARGVTRAEADAIWLLVQDAVATFDPDAIVEIVGGFRRGKPQGHDVDLLISSPGAEKEQEDQLLQKVMNLWKKQGLLLYGRLEWTQWEDGGSPSGKADEGDAGAKCFLILKLYDHLVRKSKWNMPTGSNVGESKPWKAIRVDLLRCPYGSFAFAMLQWTGSRMFRRDLRWYATDEKNMMLDNHSLYDLTKGIFLPAKSEEEIFAHLGLEYLEPFERNA

SEQ ID NO: 3547 - DNA, 1587 bp, synthetic construct
  misc_feature 1..1587: note = Variant of terminal deoxynucleotidyltransferase
  source 1..1587: mol_type = other DNA
atgcaccatcatcatcatcatggcggtagcggcagccacggcattcgtaccatcgattcggacttcgggaagaaacagcagaaaaaaggcgataaccacgatagttccgccacttatgaaatcaaatttcacgagtttgtgctgttcattctcgaagaaaaaatgggtgcgacgcgtcgtacttttctgacagatttagcccgcaagaaagggttccgcgtcgagaatgaactgaccgacgaagttacccacatcgtggcagaaaatctgtcacgctctgaagtattggcttggctgaaagaacacaagatggagaagaccaagcaattcgaactgctggatattagctggcttatcgaaagcatgaaagttggtaaaccggtggacaccaaggggaaataccagttggcggaatcggttgaggtgagtgcgaacccagatccgacagaaggtcgtgtaaacgagctgcctcctactatgaaaaccgtttctccgtatgcgtgtcaacgccgcaccaccctgaacaaccgtaatcaacgttttacggactcgctggaaattcttcgtgaaaattacgagttcaaacgcaacgatgatactgcgctggaatttcgtcgtgctatctccgtgctgaaaagccttccgtttgaggtacgtagcctgaaagacacggaaggattgccctggatcggtgatgaagtcaaagggattatggaagaaatcatcgaggtcggggagtcgcgtgaagtgcaggccgtgctcaatgatgagtggtatcaaagcttccaccgctttaagagtgtctttggagtgggggtgaagacagcagacaagtggtaccgtatgggtctgcgcaccctcgaggatgttcgttccagcaagaccctgaagttgaccccgatgcagaaagtaggtctgctgtattatgaagatcttgctcgcggcgttacgcgtgccgaagctgacgcgatttggctgctggttcaggatgcagtcgcaactttcgacccggatgcgatcgtggagattgtcggtggatttcgtcgtgggaaacctcagggtcacgacgttgatctgcttatcagttctccgggagctgagaaagagcaagaagaccaactcctgcagaaagtgatgaatctgtggaagaaacaagggttgttgctgtacggtcgtctggaatggacccagtgggaagatgggggttcgccttccggtaaggctgacgagggtgacgcgggtgcgaaatgctttctgatcctcaaactttatgatcatctggtgcgtaaaagcaaatggaacatgtcgacgggttcgaacgtgggcgagtccaaaccgtggaaagcaattcgcgtagatctgctgcgttgcccctatggcagttttgcgtttgcgatgttgcagtggaccggaagccgcatgttccgtcgtgatctgcgttggtacgccactgacgagaagaacatgatgctggacaatcattcgctgtatgacctgaccaagggtatcttcctccctgctaaatcggaagaggaaattttcgcacatctggggcttgaatacctggaaccgttcgaacgtaacgca

SEQ ID NO: 3548 - protein, 529 aa, synthetic construct
  REGION 1..529: note = Variant of terminal deoxynucleotidyltransferase
MHHHHHHGGSGSHGIRTIDSDFGKKQQKKGDNHDSSATYEIKFHEFVLFILEEKMGATRRTFLTDLARKKGFRVENELTDEVTHIVAENLSRSEVLAWLKEHKMEKTKQFELLDISWLIESMKVGKPVDTKGKYQLAESVEVSANPDPTEGRVNELPPTMKTVSPYACQRRTTLNNRNQRFTDSLEILRENYEFKRNDDTALEFRRAISVLKSLPFEVRSLKDTEGLPWIGDEVKGIMEEIIEVGESREVQAVLNDEWYQSFHRFKSVFGVGVKTADKWYRMGLRTLEDVRSSKTLKLTPMQKVGLLYYEDLARGVTRAEADAIWLLVQDAVATFDPDAIVEIVGGFRRGKPQGHDVDLLISSPGAEKEQEDQLLQKVMNLWKKQGLLLYGRLEWTQWEDGGSPSGKADEGDAGAKCFLILKLYDHLVRKSKWNMSTGSNVGESKPWKAIRVDLLRCPYGSFAFAMLQWTGSRMFRRDLRWYATDEKNMMLDNHSLYDLTKGIFLPAKSEEEIFAHLGLEYLEPFERNA

SEQ ID NO: 3549 - DNA, 1587 bp, synthetic construct
  misc_feature 1..1587: note = Variant of terminal deoxynucleotidyltransferase
  source 1..1587: mol_type = other DNA
atgcaccatcatcatcatcatggcggtagcggcagccacggcattcgtaccatcgattcggacttcgggaagaaacagcagaaaaaaggcgataaccacgatagttccgccacttatgaaatcaaatttcacgagtttgtgctgttcattctcgaagaaaaaatgggtgcgacgcgtcgtacttttctgacagatttagcccgcaagaaagggttccgcgtcgagaatgaactgaccgacgaagttacccacatcgtggcagaaaatctgtcacgctctgaagtattggcttggctgaaagaacacaagatggagaagaccaagcaattcgaactgctggatattagctggcttatcgaaagcatgaaagttggtaaaccggtggacaccaaggggaaataccagttggcggaatcggttgaggtgagtgcgaacccagatccgacagaaggtcgtgtaaacgagctgcctcctactatgaaaaccgtttctccgtatgcgtgtcaacgccgcaccaccctgaacaaccgtaatcaacgttttacggactcgctggaaattcttcgtgaaaattacgagttcaaacgcaacgatgatactgcgctggaatttcgtcgtgctatctccgtgctgaaaagccttccgtttgaggtacgtagcctgaaagacacggaaggattgccctggatcggtgatgaagtcaaagggattatggaagaaatcatcgaggtcggggagtcgcgtgaagtgcaggccgtgctcaatgatgagtggtatcaaagcttccaccgctttaagagtgtctttggagtgggggtgaagacagcagacaagtggtaccgtatgggtctgcgcaccctcgaggatgttcgttccagcaagaccctgatgttgaccccgatgcagaaagtaggtctgctgtattatgaagatcttgctcgcggcgttacgcgtgccgaagctgacgcgatttggctgctggttcaggatgcagtcgcaactttcgacccggatgcgatcgtggagattgtcggtggatttcgtcgtgggaaacctcagggtcacgacgttgatctgcttatcagttctccgggagctgagaaagagcaagaagaccaactcctgcagaaagtgatgaatctgtggaagaaacaagggttgttgctgtacggtcgtctggaatggacccagtgggaagatgggggttcgccttccggtaaggctgacgagggtgacgcgggtgcgaaatgctttctgatcctcaaactttatgatcatctggtgcgtaaaagcaaatggaacatgccgacgggttcgaacgtgggcgagtccaaaccgtggaaagcaattcgcgtagatctgctgcgttgcccctatggcagttttgcgtttgcgatgttgcagtggaccggaagccgcatgttccgtcgtgatctgcgttggtacgccactgacgagaagaacatgatgctggacaatcattcgctgtatgacctgaccaagggtatcttcctccctgctaaatcggaagaggaaattttcgcacatctggggcttgaatacctggaaccgttcgaacgtaacgca

SEQ ID NO: 3550 - protein, 529 aa, synthetic construct
  REGION 1..529: note = Variant of terminal deoxynucleotidyltransferase
MHHHHHHGGSGSHGIRTIDSDFGKKQQKKGDNHDSSATYEIKFHEFVLFILEEKMGATRRTFLTDLARKKGFRVENELTDEVTHIVAENLSRSEVLAWLKEHKMEKTKQFELLDISWLIESMKVGKPVDTKGKYQLAESVEVSANPDPTEGRVNELPPTMKTVSPYACQRRTTLNNRNQRFTDSLEILRENYEFKRNDDTALEFRRAISVLKSLPFEVRSLKDTEGLPWIGDEVKGIMEEIIEVGESREVQAVLNDEWYQSFHRFKSVFGVGVKTADKWYRMGLRTLEDVRSSKTLMLTPMQKVGLLYYEDLARGVTRAEADAIWLLVQDAVATFDPDAIVEIVGGFRRGKPQGHDVDLLISSPGAEKEQEDQLLQKVMNLWKKQGLLLYGRLEWTQWEDGGSPSGKADEGDAGAKCFLILKLYDHLVRKSKWNMPTGSNVGESKPWKAIRVDLLRCPYGSFAFAMLQWTGSRMFRRDLRWYATDEKNMMLDNHSLYDLTKGIFLPAKSEEEIFAHLGLEYLEPFERNA

SEQ ID NO: 3551 - DNA, 1587 bp, synthetic construct
  misc_feature 1..1587: note = Variant of terminal deoxynucleotidyltransferase
  source 1..1587: mol_type = other DNA
atgcaccatcatcatcatcatggcggtagcggcagccacggcattcgtaccatcgattcggacttcgggaagaaacagcagaaaaaaggcgataaccacgatagttccgccacttatgaaatcaaatttcacgagtttgtgctgttcattctcgaagaaaaaatgggtgcgacgcgtcgtacttttctgacagatttagcccgcaagaaagggttccgcgtcgagaatgaactgaccgacgaagttacccacatcgtggcagaaaatctgtcacgctctgaagtattggcttggctgaaagaacacaagatggagaagaccaagcaattcgaactgctggatattagctggcttatcgaaagcatgaaagttggtaaaccggtggacaccaaggggaaataccagttggcggaatcggttgaggtgagtgcgaacccagatccgacagaaggtcgtgtaaacgagctgcctcctactatgaaaaccgtttctccgtatgcgtgtcaacgccgcaccaccctgaacaaccgtaatcaacgttttacggactcgctggaaattcttcgtgaaaattacgagttcaaacgcaacgatgatactgcgctggaatttcgtcgtgctatctccgtgctgaaaagccttccgtttgaggtacgtagcctgaaagacacggaaggattgccctggatcggtgatgaagtcaaagggattatggaagaaatcatcgaggtcggggagtcgcgtgaagtgcaggccgtgctcaatgatgagtggtatcaaagcttccactgttttaagagtgtctttggagtgggggtgaagacagcagacaagtggtaccgtatgggtctgcgcaccctcgaggatgttcgttccagcaagaccctgaagttgaccccgatgcagaaagtaggtctgctgtattatgaagatcttgctcgcggcgttacgcgtgccgaagctgacgcgatttggctgctggttcaggatgcagtcgcaactttcgacccggatgcgatcgtggagattgtcggtggatttcgtcgtgggaaacctcagggtcacgacgttgatctgcttatcagttctccgggagctgagaaagagcaagaagaccaactcctgcagaaagtgatgaatctgtggaagaaacaagggttgttgctgtacggtcgtctggaatggacccagtgggaagatgggggttcgccttccggtaaggctgacgagggtgacgcgggtgcgaaatgctttctgatcctcaaactttatgatcatctggtgcgtaaaagcaaatggaacatgccgacgggttcgaacgtgggcgagtccaaaccgtggaaagcaattcgcgtagatctgctgcgttgcccctatggcagttttgcgtttgcgatgttgcagtggaccggaagccgcatgttccgtcgtgatctgcgttggtacgccactgacgagaagaacatgatgctggacaatcattcgctgtatgacctgaccaagggtatcttcctccctgctaaatcggaagaggaaattttcgcacatctggggcttgaatacctggaaccgttcgaacgtaacgca

SEQ ID NO: 3552 - protein, 529 aa, synthetic construct
  REGION 1..529: note = Variant of terminal deoxynucleotidyltransferase
MHHHHHHGGSGSHGIRTIDSDFGKKQQKKGDNHDSSATYEIKFHEFVLFILEEKMGATRRTFLTDLARKKGFRVENELTDEVTHIVAENLSRSEVLAWLKEHKMEKTKQFELLDISWLIESMKVGKPVDTKGKYQLAESVEVSANPDPTEGRVNELPPTMKTVSPYACQRRTTLNNRNQRFTDSLEILRENYEFKRNDDTALEFRRAISVLKSLPFEVRSLKDTEGLPWIGDEVKGIMEEIIEVGESREVQAVLNDEWYQSFHCFKSVFGVGVKTADKWYRMGLRTLEDVRSSKTLKLTPMQKVGLLYYEDLARGVTRAEADAIWLLVQDAVATFDPDAIVEIVGGFRRGKPQGHDVDLLISSPGAEKEQEDQLLQKVMNLWKKQGLLLYGRLEWTQWEDGGSPSGKADEGDAGAKCFLILKLYDHLVRKSKWNMPTGSNVGESKPWKAIRVDLLRCPYGSFAFAMLQWTGSRMFRRDLRWYATDEKNMMLDNHSLYDLTKGIFLPAKSEEEIFAHLGLEYLEPFERNA

SEQ ID NO: 3553 - DNA, 1587 bp, synthetic construct
  misc_feature 1..1587: note = Variant of terminal deoxynucleotidyltransferase
  source 1..1587: mol_type = other DNA
atgcaccatcatcatcatcatggcggtagcggcagccacggcattcgtaccatcgattcggacttcgggaagaaacagcagaaaaaaggcgataaccacgatagttccgccacttatgaaatcaaatttcacgagtttgtgctgttcattctcgaagaaaaaatgggtgcgacgcgtcgtacttttctgacagatttagcccgcaagaaagggttccgcgtcgagaatgaactgaccgacgaagttacccacatcgtggcagaaaatctgtcacgctctgaagtattggcttggctgaaagaacacaagatggagaagaccaagcaattcgaactgctggatattagctggcttatcgaaagcatgaaagttggtaaaccggtggacaccaaggggaaataccagttggcggaatcggttgaggtgagtgcgaacccagatccgacagaaggtcgtgtaaacgagctgcctcctactatgaaaaccgtttctccgtatgcgtgtcaacgccgcaccaccctgaacaaccgtaatcaacgttttacggactcgctggaaattcttcgtgaaaattacgagttcaaacgcaacgatgatactgcgctggaatttcgtcgtgctatctccgtgctgaaaagccttccgtttgaggtacgtagcctgaaagacacggaaggattgccctggatcggtgatgaagtcaaagggattatggaagaaatcatcgaggtcggggagtcgcgtgaagtgcaggccgtgctcaatgatgagtggtatcaaagcttccaccgctttaagagtgtctttggagtgggggtgaagacagcagacaagtggtaccgtatgggtctgcgcaccctcgaggatgttcgttccagcaagaccctgaagttgacccatatgcagaaagtaggtctgctgtattatgaagatcttgctcgcggcgttacgcgtgccgaagctgacgcgatttggctgctggttcaggatgcagtcgcaactttcgacccggatgcgatcgtggagattgtcggtggatttcgtcgtgggaaacctcagggtcacgacgttgatctgcttatcagttctccgggagctgagaaagagcaagaagaccaactcctgcagaaagtgatgaatctgtggaagaaacaagggttgttgctgtacggtcgtctggaatggacccagtgggaagatgggggttcgccttccggtaaggctgacgagggtgacgcgggtgcgaaatgctttctgatcctcaaactttatgatcatctggtgcgtaaaagcaaatggaacatgccgacgggttcgaacgtgggcgagtccaaaccgtggaaagcaattcgcgtagatctgctgcgttgcccctatggcagttttgcgtttgcgatgttgcagtggaccggaagccgcatgttccgtcgtgatctgcgttggtacgccactgacgagaagaacatgatgctggacaatcattcgctgtatgacctgaccaagggtatcttcctccctgctaaatcggaagaggaaattttcgcacatctggggcttgaatacctggaaccgttcgaacgtaacgca

SEQ ID NO: 3554 - protein, 529 aa, synthetic construct
  REGION 1..529: note = Variant of terminal deoxynucleotidyltransferase
MHHHHHHGGSGSHGIRTIDSDFGKKQQKKGDNHDSSATYEIKFHEFVLFILEEKMGATRRTFLTDLARKKGFRVENELTDEVTHIVAENLSRSEVLAWLKEHKMEKTKQFELLDISWLIESMKVGKPVDTKGKYQLAESVEVSANPDPTEGRVNELPPTMKTVSPYACQRRTTLNNRNQRFTDSLEILRENYEFKRNDDTALEFRRAISVLKSLPFEVRSLKDTEGLPWIGDEVKGIMEEIIEVGESREVQAVLNDEWYQSFHRFKSVFGVGVKTADKWYRMGLRTLEDVRSSKTLKLTHMQKVGLLYYEDLARGVTRAEADAIWLLVQDAVATFDPDAIVEIVGGFRRGKPQGHDVDLLISSPGAEKEQEDQLLQKVMNLWKKQGLLLYGRLEWTQWEDGGSPSGKADEGDAGAKCFLILKLYDHLVRKSKWNMPTGSNVGESKPWKAIRVDLLRCPYGSFAFAMLQWTGSRMFRRDLRWYATDEKNMMLDNHSLYDLTKGIFLPAKSEEEIFAHLGLEYLEPFERNA

SEQ ID NO: 3555 - DNA, 1587 bp, synthetic construct
  misc_feature 1..1587: note = Variant of terminal deoxynucleotidyltransferase
  source 1..1587: mol_type = other DNA
atgcaccatcatcatcatcatggcggtagcggcagccacggcattcgtaccatcgattcggacttcgggaagaaacagcagaaaaaaggcgataaccacgatagttccgccacttatgaaatcaaatttcacgagtttgtgctgttcattctcgaagaaaaaatgggtgcgacgcgtcgtacttttctgacagatttagcccgcaagaaagggttccgcgtcgagaatgaactgaccgacgaagttacccacatcgtggcagaaaatctgtcacgctctgaagtattggcttggctgaaagaacacaagatggagaagaccaagcaattcgaactgctggatattagctggcttatcgaaagcatgaaagttggtaaaccggtggacaccaaggggaaataccagttggcggaatcggttgaggtgagtgcgaacccagatccgacagaaggtcgtgtaaacgagctgcctcctactatgaaaaccgtttctccgtatgcgtgtcaacgccgcaccaccctgaacaaccgtaatcaacgttttacggactcgctggaaattcttttggaaaattacgagttcaaacgcaacgatgatactgcgctggaatttcgtcgtgctatctccgtgctgaaaagccttccgtttgaggtacgtagcctgaaagacacggaaggattgccctggatcggtgatgaagtcaaagggattatggaagaaatcatcgaggtcggggagtcgcgtgaagtgcaggccgtgctcaatgatgagtggtatcaaagcttccaccgctttaagagtgtctttggagtgggggtgaagacagcagacaagtggtaccgtatgggtctgcgcaccctcgaggatgttcgttccagcaagaccctgaagttgaccccgatgcagaaagtaggtctgctgtattatgaagatcttgctcgcggcgttacgcgtgccgaagctgacgcgatttggctgctggttcaggatgcagtcgcaactttcgacccggatgcgatcgtggagattgtcggtggatttcgtcgtgggaaacctcagggtcacgacgttgatctgcttatcagttctccgggagctgagaaagagcaagaagaccaactcctgcagaaagtgatgaatctgtggaagaaacaagggttgttgctgtacggtcgtctggaatggacccagtgggaagatgggggttcgccttccggtaaggctgacgagggtgacgcgggtgcgaaatgctttctgatcctcaaactttatgatcatctggtgcgtaaaagcaaatggaacatgccgacgggttcgaacgtgggcgagtccaaaccgtggaaagcaattcgcgtagatctgctgcgttgcccctatggcagttttgcgtttgcgatgttgcagtggaccggaagccgcatgttccgtcgtgatctgcgttggtacgccactgacgagaagaacatgatgctggacaatcattcgctgtatgacctgaccaagggtatcttcctccctgctaaatcggaagaggaaattttcgcacatctggggcttgaatacctggaaccgttcgaacgtaacgca

SEQ ID NO: 3556 - protein, 529 aa, synthetic construct
  REGION 1..529: note = Variant of terminal deoxynucleotidyltransferase
MHHHHHHGGSGSHGIRTIDSDFGKKQQKKGDNHDSSATYEIKFHEFVLFILEEKMGATRRTFLTDLARKKGFRVENELTDEVTHIVAENLSRSEVLAWLKEHKMEKTKQFELLDISWLIESMKVGKPVDTKGKYQLAESVEVSANPDPTEGRVNELPPTMKTVSPYACQRRTTLNNRNQRFTDSLEILLENYEFKRNDDTALEFRRAISVLKSLPFEVRSLKDTEGLPWIGDEVKGIMEEIIEVGESREVQAVLNDEWYQSFHRFKSVFGVGVKTADKWYRMGLRTLEDVRSSKTLKLTPMQKVGLLYYEDLARGVTRAEADAIWLLVQDAVATFDPDAIVEIVGGFRRGKPQGHDVDLLISSPGAEKEQEDQLLQKVMNLWKKQGLLLYGRLEWTQWEDGGSPSGKADEGDAGAKCFLILKLYDHLVRKSKWNMPTGSNVGESKPWKAIRVDLLRCPYGSFAFAMLQWTGSRMFRRDLRWYATDEKNMMLDNHSLYDLTKGIFLPAKSEEEIFAHLGLEYLEPFERNA

SEQ ID NO: 3557 - DNA, 1587 bp, synthetic construct
  misc_feature 1..1587: note = Variant of terminal deoxynucleotidyltransferase
  source 1..1587: mol_type = other DNA
atgcaccatcatcatcatcatggcggtagcggcagccacggcattcgtaccatcgattcggacttcgggaagaaacagcagaaaaaaggcgataaccacgatagttccgccacttatgaaatcaaatttcacgagtttgtgctgttcattctcgaagaaaaaatgggtgcgacgcgtcgtacttttctgacagatttagcccgcaagaaagggttccgcgtcgagaatgaactgaccgacgaagttacccacatcgtggcagaaaatctgtcacgctctgaagtattggcttggctgaaagaacacaagatggagaagaccaagcaattcgaactgctggatattagctggcttatcgaaagcatgaaagttggtaaaccggtggacaccaaggggaaataccagttggcggaatcggttgaggtgagtgcgaacccagatccgacagaaggtcgtgtaaacgagctgcctcctactatgaaaaccgtttctccgtatgcgtgtcaacgccgcaccaccctgaacaaccgtaatcaacgttttacggactcgctggaaattcttcgtgaaaattacgagttcaaacgcaacgatgatactgcgctggaatttcgtcgtgctatctccgtgctgaaaagccttccgtttgaggtacgtagcctgaaagacacggaaggattgccctggatcggtgatgaagtcaaagggattatggaagaaatcatcgaggtcggggagtcgcgtgaagtgcaggccgtgctcaatgatgagtggtatcaaagcttccaccgctttcggagtgtctttggagtgggggtgaagacagcagacaagtggtaccgtatgggtctgcgcaccctcgaggatgttcgttccagcaagaccctgaagttgaccccgatgcagaaagtaggtctgctgtattatgaagatcttgctcgcggcgttacgcgtgccgaagctgacgcgatttggctgctggttcaggatgcagtcgcaactttcgacccggatgcgatcgtggagattgtcggtggatttcgtcgtgggaaacctcagggtcacgacgttgatctgcttatcagttctccgggagctgagaaagagcaagaagaccaactcctgcagaaagtgatgaatctgtggaagaaacaagggttgttgctgtacggtcgtctggaatggacccagtgggaagatgggggttcgccttccggtaaggctgacgagggtgacgcgggtgcgaaatgctttctgatcctcaaactttatgatcatctggtgcgtaaaagcaaatggaacatgccgacgggttcgaacgtgggcgagtccaaaccgtggaaagcaattcgcgtagatctgctgcgttgcccctatggcagttttgcgtttgcgatgttgcagtggaccggaagccgcatgttccgtcgtgatctgcgttggtacgccactgacgagaagaacatgatgctggacaatcattcgctgtatgacctgaccaagggtatcttcctccctgctaaatcggaagaggaaattttcgcacatctggggcttgaatacctggaaccgttcgaacgtaacgca

SEQ ID NO: 3558 - protein, 529 aa, synthetic construct
  REGION 1..529: note = Variant of terminal deoxynucleotidyltransferase
MHHHHHHGGSGSHGIRTIDSDFGKKQQKKGDNHDSSATYEIKFHEFVLFILEEKMGATRRTFLTDLARKKGFRVENELTDEVTHIVAENLSRSEVLAWLKEHKMEKTKQFELLDISWLIESMKVGKPVDTKGKYQLAESVEVSANPDPTEGRVNELPPTMKTVSPYACQRRTTLNNRNQRFTDSLEILRENYEFKRNDDTALEFRRAISVLKSLPFEVRSLKDTEGLPWIGDEVKGIMEEIIEVGESREVQAVLNDEWYQSFHRFRSVFGVGVKTADKWYRMGLRTLEDVRSSKTLKLTPMQKVGLLYYEDLARGVTRAEADAIWLLVQDAVATFDPDAIVEIVGGFRRGKPQGHDVDLLISSPGAEKEQEDQLLQKVMNLWKKQGLLLYGRLEWTQWEDGGSPSGKADEGDAGAKCFLILKLYDHLVRKSKWNMPTGSNVGESKPWKAIRVDLLRCPYGSFAFAMLQWTGSRMFRRDLRWYATDEKNMMLDNHSLYDLTKGIFLPAKSEEEIFAHLGLEYLEPFERNA

SEQ ID NO: 3559 - DNA, 1587 bp, synthetic construct
  misc_feature 1..1587: note = Variant of terminal deoxynucleotidyltransferase
  source 1..1587: mol_type = other DNA
atgcaccatcatcatcatcatggcggtagcggcagccacggcattcgtaccatcgattcggacttcgggaagaaacagcagaaaaaaggcgataaccacgatagttccgccacttatgaaatcaaatttcacgagtttgtgctgttcattctcgaagaaaaaatgggtgcgacgcgtcgtacttttctgacagatttagcccgcaagaaagggttccgcgtcgagaatgaactgaccgacgaagttacccacatcgtggcagaaaatctgtcacgctctgaagtattggcttggctgaaagaacacaagatggagaagaccaagcaattcgaactgctggatattagctggcttatcgaaagcatgaaagttggtaaaccggtggacaccaaggggaaataccagttggcggaatcggttgaggtgagtgcgaacccagatccgacagaaggtcgtgtaaacgagctgcctcctactatgaaaaccgtttctccgtatgcgtgtcaacgccgcaccaccctgaacaaccgtaatcaacgttttacggactcgctggaaattcttcgtgaaaattacgagttcaaacgcaacgatgatactgcgctggaatttcgtcgtgctatctccgtgctgaaaagccttccgtttgaggtacgtagcctgaaagacacggaaggattgccctggatcggtgatgaagtcaaagggattatggaagaaatcatcgaggtcggggagtcgcgtgaagtgcaggccgtgctcaatgatgagtggtatcaaagcttccaccgctttaagagtgtctttggagtgggggtgaagacagcagacaagtggtaccgtatgggtctgcgcaccctcgaggatgttcgttccagcaagaccctgaagttgaccccgatgcagaaagtaggtctgctgtattatgaagatcttgctcgcggcgttacgcgtgccgaagctgacgcgatttggctgctggttcaggatgcagtcgcaactttcgacccggatgcgatcgtggagattgtcggtggatttcgtcgtgggaaacctcagggtcacgacgttgatctgcttatcagttctccgggagctgagaaagagcaagaagaccaactcctgcagaaagtgatgaatctgtggaagaaacaagggttgttgctgtacggtcgtctggaatggacccagtgggaagatgggggttcgccttccggtaaggctgacgagggtgacgcgggtgcgaaatgctttctgatcctcaaactttatgatcatctggtgcgtaaaagcaaatggaacatgccgacgggttcgaacgtgggcgagtccaaaccgtggaaagcaattcgcgtagatctgctgcgttgcccctatggcagttttgcgtttgcgatgttgcagtggaccggaggtcgcatgttccgtcgtgatctgcgttggtacgccactgacgagaagaacatgatgctggacaatcattcgctgtatgacctgaccaagggtatcttcctccctgctaaatcggaagaggaaattttcgcacatctggggcttgaatacctggaaccgttcgaacgtaacgca

SEQ ID NO: 3560 - protein, 529 aa, synthetic construct
  REGION 1..529: note = Variant of terminal deoxynucleotidyltransferase
MHHHHHHGGSGSHGIRTIDSDFGKKQQKKGDNHDSSATYEIKFHEFVLFILEEKMGATRRTFLTDLARKKGFRVENELTDEVTHIVAENLSRSEVLAWLKEHKMEKTKQFELLDISWLIESMKVGKPVDTKGKYQLAESVEVSANPDPTEGRVNELPPTMKTVSPYACQRRTTLNNRNQRFTDSLEILRENYEFKRNDDTALEFRRAISVLKSLPFEVRSLKDTEGLPWIGDEVKGIMEEIIEVGESREVQAVLNDEWYQSFHRFKSVFGVGVKTADKWYRMGLRTLEDVRSSKTLKLTPMQKVGLLYYEDLARGVTRAEADAIWLLVQDAVATFDPDAIVEIVGGFRRGKPQGHDVDLLISSPGAEKEQEDQLLQKVMNLWKKQGLLLYGRLEWTQWEDGGSPSGKADEGDAGAKCFLILKLYDHLVRKSKWNMPTGSNVGESKPWKAIRVDLLRCPYGSFAFAMLQWTGGRMFRRDLRWYATDEKNMMLDNHSLYDLTKGIFLPAKSEEEIFAHLGLEYLEPFERNA

SEQ ID NO: 3561 - DNA, 1587 bp, synthetic construct
  misc_feature 1..1587: note = Variant of terminal deoxynucleotidyltransferase
  source 1..1587: mol_type = other DNA
atgcaccatcatcatcatcatggcggtagcggcagccacggcattcgtaccatcgattcggacttcgggaagaaacagcagaaaaaaggcgataaccacgatagttccgccacttatgaaatcaaatttcacgagtttgtgctgttcattctcgaagaaaaaatgggtgcgacgcgtcgtacttttctgacagatttagcccgcaagaaagggttccgcgtcgagaatgaactgaccgacgaagttacccacatcgtggcagaaaatctgtcacgctctgaagtattggcttggctgaaagaacacaagatggagaagaccaagcaattcgaactgctggatattagctggcttatcgaaagcatgaaagttggtaaaccggtggacaccaaggggaaataccagttggcggaatcggttgaggtgagtgcgaacccagatccgacagaaggtcgtgtaaacgagctgcctcctactatgaaaaccgtttctccgtatgcgtgtcaacgccgcaccaccctgaacaaccgtaatcaacgttttacggactcgctggaaattcttcgtgaaaattacgagttcaaacgcaacgatgatactgcgctggaatttcgtcgtgctatctccgtgctgaaaagccttccgtttgaggtacgtagcctgaaagacacggaaggattgccctggatcggtgatgaagtcaaagggattatggaagaaatcatcgaggtcggggagtcgcgtgaagtgcaggccgtgctcaatgatgagtggtatcaaagcttccaccgctttaagagtgtctttggagtgggggtgaagacagcagacaagtggtaccgtatgggtctgcgcaccctcgaggatgttcgttccagcaagaccctgaggttgaccccgatgcagaaagtaggtctgctgtattatgaagatcttgctcgcggcgttacgcgtgccgaagctgacgcgatttggctgctggttcaggatgcagtcgcaactttcgacccggatgcgatcgtggagattgtcggtggatttcgtcgtgggaaacctcagggtcacgacgttgatctgcttatcagttctccgggagctgagaaagagcaagaagaccaactcctgcagaaagtgatgaatctgtggaagaaacaagggttgttgctgtacggtcgtctggaatggacccagtgggaagatgggggttcgccttccggtaaggctgacgagggtgacgcgggtgcgaaatgctttctgatcctcaaactttatgatcatctggtgcgtaaaagcaaatggaacatgccgacgggttcgaacgtgggcgagtccaaaccgtggaaagcaattcgcgtagatctgctgcgttgcccctatggcagttttgcgtttgcgatgttgcagtggaccggaagccgcatgttccgtcgtgatctgcgttggtacgccactgacgagaagaacatgatgctggacaatcattcgctgtatgacctgaccaagggtatcttcctccctgctaaatcggaagaggaaattttcgcacatctggggcttgaatacctggaaccgttcgaacgtaacgca

SEQ ID NO: 3562 - protein, 529 aa, synthetic construct
  REGION 1..529: note = Variant of terminal deoxynucleotidyltransferase
MHHHHHHGGSGSHGIRTIDSDFGKKQQKKGDNHDSSATYEIKFHEFVLFILEEKMGATRRTFLTDLARKKGFRVENELTDEVTHIVAENLSRSEVLAWLKEHKMEKTKQFELLDISWLIESMKVGKPVDTKGKYQLAESVEVSANPDPTEGRVNELPPTMKTVSPYACQRRTTLNNRNQRFTDSLEILRENYEFKRNDDTALEFRRAISVLKSLPFEVRSLKDTEGLPWIGDEVKGIMEEIIEVGESREVQAVLNDEWYQSFHRFKSVFGVGVKTADKWYRMGLRTLEDVRSSKTLRLTPMQKVGLLYYEDLARGVTRAEADAIWLLVQDAVATFDPDAIVEIVGGFRRGKPQGHDVDLLISSPGAEKEQEDQLLQKVMNLWKKQGLLLYGRLEWTQWEDGGSPSGKADEGDAGAKCFLILKLYDHLVRKSKWNMPTGSNVGESKPWKAIRVDLLRCPYGSFAFAMLQWTGSRMFRRDLRWYATDEKNMMLDNHSLYDLTKGIFLPAKSEEEIFAHLGLEYLEPFERNA

SEQ ID NO: 3563 - DNA, 1587 bp, synthetic construct
  misc_feature 1..1587: note = Variant of terminal deoxynucleotidyltransferase
  source 1..1587: mol_type = other DNA
atgcaccatcatcatcatcatggcggtagcggcagccacggcattcgtaccatcgattcggacttcgggaagaaacagcagaaaaaaggcgataaccacgatagttccgccacttatgaaatcaaatttcacgagtttgtgctgttcattctcgaagaaaaaatgggtgcgacgcgtcgtacttttctgacagatttagcccgcaagaaagggttccgcgtcgagaatgaactgaccgacgaagttacccacatcgtggcagaaaatctgtcacgctctgaagtattggcttggctgaaagaacacaagatggagaagaccaagcaattcgaactgctggatattagctggcttatcgaaagcatgaaagttggtaaaccggtggacaccaaggggaaataccagttggcggaatcggttgaggtgagtgcgaacccagatccgacagaaggtcgtgtaaacgagctgcctcctactatgaaaaccgtttctccgtatgcgtgtcaacgccgcaccaccctgaacaaccgtaatcaacgttttacggactcgctggaaattcttcgtgaaaattacgagttcaaacgcaacgatgatactgcgctggaatttcgtcgtgctatctccgtgctgaaaagccttccgtttgaggtacgtagcctgaaagacacggaaggattgccctggatcggtgatgaagtcaaagggattatggaagaaatcatcgaggtcggggagtcgcgtgaagtgcaggccgtgctcaatgatgagtggtatcaaagcttccaccgctttaagagtgtctttggagtgggggtgaagacagcagacaagtggtaccgtatgggtctgcgcaccctcgaggatgttcgttccagcaagaccctggtgttgaccccgatgcagaaagtaggtctgctgtattatgaagatcttgctcgcggcgttacgcgtgccgaagctgacgcgatttggctgctggttcaggatgcagtcgcaactttcgacccggatgcgatcgtggagattgtcggtggatttcgtcgtgggaaacctcagggtcacgacgttgatctgcttatcagttctccgggagctgagaaagagcaagaagaccaactcctgcagaaagtgatgaatctgtggaagaaacaagggttgttgctgtacggtcgtctggaatggacccagtgggaagatgggggttcgccttccggtaaggctgacgagggtgacgcgggtgcgaaatgctttctgatcctcaaactttatgatcatctggtgcgtaaaagcaaatggaacatgccgacgggttcgaacgtgggcgagtccaaaccgtggaaagcaattcgcgtagatctgctgcgttgcccctatggcagttttgcgtttgcgatgttgcagtggaccggaagccgcatgttccgtcgtgatctgcgttggtacgccactgacgagaagaacatgatgctggacaatcattcgctgtatgacctgaccaagggtatcttcctccctgctaaatcggaagaggaaattttcgcacatctggggcttgaatacctggaaccgttcgaacgtaacgca

SEQ ID NO: 3564 - protein, 529 aa, synthetic construct
  REGION 1..529: note = Variant of terminal deoxynucleotidyltransferase
MHHHHHHGGSGSHGIRTIDSDFGKKQQKKGDNHDSSATYEIKFHEFVLFILEEKMGATRRTFLTDLARKKGFRVENELTDEVTHIVAENLSRSEVLAWLKEHKMEKTKQFELLDISWLIESMKVGKPVDTKGKYQLAESVEVSANPDPTEGRVNELPPTMKTVSPYACQRRTTLNNRNQRFTDSLEILRENYEFKRNDDTALEFRRAISVLKSLPFEVRSLKDTEGLPWIGDEVKGIMEEIIEVGESREVQAVLNDEWYQSFHRFKSVFGVGVKTADKWYRMGLRTLEDVRSSKTLVLTPMQKVGLLYYEDLARGVTRAEADAIWLLVQDAVATFDPDAIVEIVGGFRRGKPQGHDVDLLISSPGAEKEQEDQLLQKVMNLWKKQGLLLYGRLEWTQWEDGGSPSGKADEGDAGAKCFLILKLYDHLVRKSKWNMPTGSNVGESKPWKAIRVDLLRCPYGSFAFAMLQWTGSRMFRRDLRWYATDEKNMMLDNHSLYDLTKGIFLPAKSEEEIFAHLGLEYLEPFERNA

SEQ ID NO: 3565 - DNA, 1587 bp, synthetic construct
  misc_feature 1..1587: note = Variant of terminal deoxynucleotidyltransferase
  source 1..1587: mol_type = other DNA
atgcaccatcatcatcatcatggcggtagcggcagccacggcattcgtaccatcgattcggacttcgggaagaaacagcagaaaaaaggcgataaccacgatagttccgccacttatgaaatcaaatttcacgagtttgtgctgttcattctcgaagaaaaaatgggtgcgacgcgtcgtacttttctgacagatttagcccgcaagaaagggttccgcgtcgagaatgaactgaccgacgaagttacccacatcgtggcagaaaatctgtcacgctctgaagtattggcttggctgaaagaacacaagatggagaagaccaagcaattcgaactgctggatattagctggcttatcgaaagcatgaaagttggtaaaccggtggacaccaaggggaaataccagttggcggaatcggttgaggtgagtgcgaacccagatccgacagaaggtcgtgtaaacgagctgcctcctactatgaaaaccgtttctccgtatgcgtgtcaacgccgcaccaccctgaacaaccgtaatcaacgttttacggactcgctggaaattcttcgtgaaaattacgagttcaaacgcaacgatgatactgcgctggaatttcgtcgtgctatctccgtgctgaaaagccttccgtttgaggtacgtagcctgaaagacacggaaggattgccctggatcggtgatgaagtcaaagggattatggaagaaatcatcgaggtcggggagtcgcgtgaagtgcaggccgtgctcaatgatgagtggtatcaaagcttccaccgctttaagagtgtctttggagtgggggtgaagacagcagacaagtggtaccgtatgggtctgcgcaccctcgaggatgttcgttccagcaagaccctgaagttgaccccgatgcagaaagtaggtctgctgtattatgaagatcttgctcgcggcgttacgcgtgccgaagctgacgcgatttggctgctggttcaggatgcagtcgcaactttcgacccggatgcgatcgtggagattgtcggtggatttcgtcgtgggaaacctcagggtcacgacgttgatctgcttatcagttctccgggagctgagaaagagcaagaagaccaactcctgcagaaagtgatgaatctgtggaagaaacaagggttgttgctgtacggtcgtctggaatggacccagtgggaagatgggggttcgccttccggtaaggctgacgggggtgacgcgggtgcgaaatgctttctgatcctcaaactttatgatcatctggtgcgtaaaagcaaatggaacatgccgacgggttcgaacgtgggcgagtccaaaccgtggaaagcaattcgcgtagatctgctgcgttgcccctatggcagttttgcgtttgcgatgttgcagtggaccggaagccgcatgttccgtcgtgatctgcgttggtacgccactgacgagaagaacatgatgctggacaatcattcgctgtatgacctgaccaagggtatcttcctccctgctaaatcggaagaggaaattttcgcacatctggggcttgaatacctggaaccgttcgaacgtaacgca

SEQ ID NO: 3566 - protein, 529 aa, synthetic construct
  REGION 1..529: note = Variant of terminal deoxynucleotidyltransferase
MHHHHHHGGSGSHGIRTIDSDFGKKQQKKGDNHDSSATYEIKFHEFVLFILEEKMGATRRTFLTDLARKKGFRVENELTDEVTHIVAENLSRSEVLAWLKEHKMEKTKQFELLDISWLIESMKVGKPVDTKGKYQLAESVEVSANPDPTEGRVNELPPTMKTVSPYACQRRTTLNNRNQRFTDSLEILRENYEFKRNDDTALEFRRAISVLKSLPFEVRSLKDTEGLPWIGDEVKGIMEEIIEVGESREVQAVLNDEWYQSFHRFKSVFGVGVKTADKWYRMGLRTLEDVRSSKTLKLTPMQKVGLLYYEDLARGVTRAEADAIWLLVQDAVATFDPDAIVEIVGGFRRGKPQGHDVDLLISSPGAEKEQEDQLLQKVMNLWKKQGLLLYGRLEWTQWEDGGSPSGKADGGDAGAKCFLILKLYDHLVRKSKWNMPTGSNVGESKPWKAIRVDLLRCPYGSFAFAMLQWTGSRMFRRDLRWYATDEKNMMLDNHSLYDLTKGIFLPAKSEEEIFAHLGLEYLEPFERNA

SEQ ID NO: 3567 - DNA, 1587 bp, synthetic construct
  misc_feature 1..1587: note = Variant of terminal deoxynucleotidyltransferase
  source 1..1587: mol_type = other DNA
atgcaccatcatcatcatcatggcggtagcggcagccacggcattcgtaccatcgattcggacttcgggaagaaacagcagaaaaaaggcgataaccacgatagttccgccacttatgaaatcaaatttcacgagtttgtgctgttcattctcgaagaaaaaatgggtgcgacgcgtcgtacttttctgacagatttagcccgcaagaaagggttccgcgtcgagaatgaactgaccgacgaagttacccacatcgtggcagaaaatctgtcacgctctgaagtattggcttggctgaaagaacacaagatggagaagaccaagcaattcgaactgctggatattagctggcttatcgaaagcatgaaagttggtaaaccggtggacaccaaggggaaataccagttggcggaatcggttgaggtgagtgcgaacccagatccgacagaaggtcgtgtaaacgagctgcctcctactatgaaaaccgtttctccgtatgcgtgtcaacgccgcaccaccctgaacaaccgtaatcaacgttttacggactcgctggaaattcttcgtgaaaattacgagttcaaacgcaacgatgatactgcgctggaatttcgtcgtgctatctccgtgctgaaaagccttccgtttgaggtacgtagcctgaaagacacggaaggattgccctggatcggtgatgaagtcaaagggattatggaagaaatcatcgaggtcggggagtcgcgtgaagtgcaggccgtgctcaatgatgagtggtatcaaagcttccaccgctttaagagtgtctttggagtgggggtgaagacagcagacaagtggtaccgtatgggtctgcgcaccctcgaggatgttcgttccagcaagaccctgaagttgaccccgatgcagaaagtaggtctgctgtattatgaagatcttgctcgcggcgttacgcgtgccgaagctgacgcgatttggctgctggttcaggatgcagtcgcaactttcgacccggatgcgatcgtggagattgtcggtggatttcgtcgtgggaaacctcagggtcacgacgttgatctgcttatcagttctccgggagctgagaaagagcaagaagaccaactcctgcagaaagtgatgaatctgtggaagaaacaagggttgttgctgtacggtcgtctggaatggacccagtgggaagatgggggttcgccttccggtaaggctgacattggtgacgcgggtgcgaaatgctttctgatcctcaaactttatgatcatctggtgcgtaaaagcaaatggaacatgccgacgggttcgaacgtgggcgagtccaaaccgtggaaagcaattcgcgtagatctgctgcgttgcccctatggcagttttgcgtttgcgatgttgcagtggaccggaagccgcatgttccgtcgtgatctgcgttggtacgccactgacgagaagaacatgatgctggacaatcattcgctgtatgacctgaccaagggtatcttcctccctgctaaatcggaagaggaaattttcgcacatctggggcttgaatacctggaaccgttcgaacgtaacgca

SEQ ID NO: 3568 - protein, 529 aa, synthetic construct
  REGION 1..529: note = Variant of terminal deoxynucleotidyltransferase
MHHHHHHGGSGSHGIRTIDSDFGKKQQKKGDNHDSSATYEIKFHEFVLFILEEKMGATRRTFLTDLARKKGFRVENELTDEVTHIVAENLSRSEVLAWLKEHKMEKTKQFELLDISWLIESMKVGKPVDTKGKYQLAESVEVSANPDPTEGRVNELPPTMKTVSPYACQRRTTLNNRNQRFTDSLEILRENYEFKRNDDTALEFRRAISVLKSLPFEVRSLKDTEGLPWIGDEVKGIMEEIIEVGESREVQAVLNDEWYQSFHRFKSVFGVGVKTADKWYRMGLRTLEDVRSSKTLKLTPMQKVGLLYYEDLARGVTRAEADAIWLLVQDAVATFDPDAIVEIVGGFRRGKPQGHDVDLLISSPGAEKEQEDQLLQKVMNLWKKQGLLLYGRLEWTQWEDGGSPSGKADIGDAGAKCFLILKLYDHLVRKSKWNMPTGSNVGESKPWKAIRVDLLRCPYGSFAFAMLQWTGSRMFRRDLRWYATDEKNMMLDNHSLYDLTKGIFLPAKSEEEIFAHLGLEYLEPFERNA

SEQ ID NO: 3569 - DNA, 1587 bp, synthetic construct
  misc_feature 1..1587: note = Variant of terminal deoxynucleotidyltransferase
  source 1..1587: mol_type = other DNA
atgcaccatcatcatcatcatggcggtagcggcagccacggcattcgtaccatcgattcggacttcgggaagaaacagcagaaaaaaggcgataaccacgatagttccgccacttatgaaatcaaatttcacgagtttgtgctgttcattctcgaagaaaaaatgggtgcgacgcgtcgtacttttctgacagatttagcccgcaagaaagggttccgcgtcgagaatgaactgaccgacgaagttacccacatcgtggcagaaaatctgtcacgctctgaagtattggcttggctgaaagaacacaagatggagaagaccaagcaattcgaactgctggatattagctggcttatcgaaagcatgaaagttggtaaaccggtggacaccaaggggaaataccagttggcggaatcggttgaggtgagtgcgaacccagatccgacagaaggtcgtgtaaacgagctgcctcctactatgaaaaccgtttctccgtatgcgtgtcaacgccgcaccaccctgaacaaccgtaatcaacgttttacggactcgctggaaattcttcgtgaaaattacgagttcaaacgcaacgatgatactgcgctggaatttcgtcgtgctatctccgtgctgaaaagccttccgtttgaggtacgtagcctgaaagacacggaaggattgccctggatcggtgatgaagtcaaagggattatggaagaaatcatcgaggtcggggagtcgcgtgaagtgcaggccgtgctcaatgatgagtggtatcaaagcttccaccgctttaagagtgtctttggagtgggggtgaagacagcagacaagtggtaccgtatgggtctgcgcaccctcgaggatgttcgttccagcaagaccctgaagttgaccccgatgcagaaagtaggtctgctgtattatgaagatcttgctcgcggcgttacgcgtgccgaagctgacgcgatttggctgctggttcaggatgcagtcgcaactttcgacccggatgcgatcgtggagattgtcggtggatttcgtcgtgggaaacctcagggtcacgacgttgatctgcttatcagttctccgggagctgagaaagagcaagaagaccaactcctgcagaaagtgatgaatctgtggaagaaacaagggttgttgctgtacggtcgtctggaatggacccagtgggaagatgggggttcgccttccggtaaggctgacgagggtgacgcgggtgcgaaatgctttctgatcctcaaactttatgatcatctggtgcgtaaaagcaaatggaacatgccgacgggttcgaacgtgggcgagtccaaaccgtggaaagcaattcgcgtagatgtgctgcgttgcccctatggcagttttgcgtttgcgatgttgcagtggaccggaagccgcatgttccgtcgtgatctgcgttggtacgccactgacgagaagaacatgatgctggacaatcattcgctgtatgacctgaccaagggtatcttcctccctgctaaatcggaagaggaaattttcgcacatctggggcttgaatacctggaaccgttcgaacgtaacgca

SEQ ID NO: 3570 - protein, 529 aa, synthetic construct
  REGION 1..529: note = Variant of terminal deoxynucleotidyltransferase
MHHHHHHGGSGSHGIRTIDSDFGKKQQKKGDNHDSSATYEIKFHEFVLFILEEKMGATRRTFLTDLARKKGFRVENELTDEVTHIVAENLSRSEVLAWLKEHKMEKTKQFELLDISWLIESMKVGKPVDTKGKYQLAESVEVSANPDPTEGRVNELPPTMKTVSPYACQRRTTLNNRNQRFTDSLEILRENYEFKRNDDTALEFRRAISVLKSLPFEVRSLKDTEGLPWIGDEVKGIMEEIIEVGESREVQAVLNDEWYQSFHRFKSVFGVGVKTADKWYRMGLRTLEDVRSSKTLKLTPMQKVGLLYYEDLARGVTRAEADAIWLLVQDAVATFDPDAIVEIVGGFRRGKPQGHDVDLLISSPGAEKEQEDQLLQKVMNLWKKQGLLLYGRLEWTQWEDGGSPSGKADEGDAGAKCFLILKLYDHLVRKSKWNMPTGSNVGESKPWKAIRVDVLRCPYGSFAFAMLQWTGSRMFRRDLRWYATDEKNMMLDNHSLYDLTKGIFLPAKSEEEIFAHLGLEYLEPFERNA

SEQ ID NO: 3571 - DNA, 1587 bp, synthetic construct
  misc_feature 1..1587: note = Variant of terminal deoxynucleotidyltransferase
  source 1..1587: mol_type = other DNA
atgcaccatcatcatcatcatggcggtagcggcagccacggcattcgtaccatcgattcggacttcgggaagaaacagcagaaaaaaggcgataaccacgatagttccgccacttatgaaatcaaatttcacgagtttgtgctgttcattctcgaagaaaaaatgggtgcgacgcgtcgtacttttctgacagatttagcccgcaagaaagggttccgcgtcgagaatgaactgaccgacgaagttacccacatcgtggcagaaaatctgtcacgctctgaagtattggcttggctgaaagaacacaagatggagaagaccaagcaattcgaactgctggatattagctggcttatcgaaagcatgaaagttggtaaaccggtggacaccaaggggaaataccagttggcggaatcggttgaggtgagtgcgaacccagatccgacagaaggtcgtgtaaacgagctgcctcctactatgaaaaccgtttctccgtatgcgtgtcaacgccgcaccaccctgaacaaccgtaatcaacgttttacggactcgctggaaattcttcgtatgaattacgagttcaaacgcaacgatgatactgcgctggaatttcgtcgtgctatctccgtgctgaaaagccttccgtttgaggtacgtagcctgaaagacacggaaggattgccctggatcggtgatgaagtcaaagggattatggaagaaatcatcgaggtcggggagtcgcgtgaagtgcaggccgtgctcaatgatgagtggtatcaaagcttccaccgctttaagagtgtctttggagtgggggtgaagacagcagacaagtggtaccgtatgggtctgcgcaccctcgaggatgttcgttccagcaagaccctgaagttgaccccgatgcagaaagtaggtctgctgtattatgaagatcttgctcgcggcgttacgcgtgccgaagctgacgcgatttggctgctggttcaggatgcagtcgcaactttcgacccggatgcgatcgtggagattgtcggtggatttcgtcgtgggaaacctcagggtcacgacgttgatctgcttatcagttctccgggagctgagaaagagcaagaagaccaactcctgcagaaagtgatgaatctgtggaagaaacaagggttgttgctgtacggtcgtctggaatggacccagtgggaagatgggggttcgccttccggtaaggctgacgagggtgacgcgggtgcgaaatgctttctgatcctcaaactttatgatcatctggtgcgtaaaagcaaatggaacatgccgacgggttcgaacgtgggcgagtccaaaccgtggaaagcaattcgcgtagatctgctgcgttgcccctatggcagttttgcgtttgcgatgttgcagtggaccggaagccgcatgttccgtcgtgatctgcgttggtacgccactgacgagaagaacatgatgctggacaatcattcgctgtatgacctgaccaagggtatcttcctccctgctaaatcggaagaggaaattttcgcacatctggggcttgaatacctggaaccgttcgaacgtaacgca

SEQ ID NO: 3572 - protein, 529 aa, synthetic construct
  REGION 1..529: note = Variant of terminal deoxynucleotidyltransferase
MHHHHHHGGSGSHGIRTIDSDFGKKQQKKGDNHDSSATYEIKFHEFVLFILEEKMGATRRTFLTDLARKKGFRVENELTDEVTHIVAENLSRSEVLAWLKEHKMEKTKQFELLDISWLIESMKVGKPVDTKGKYQLAESVEVSANPDPTEGRVNELPPTMKTVSPYACQRRTTLNNRNQRFTDSLEILRMNYEFKRNDDTALEFRRAISVLKSLPFEVRSLKDTEGLPWIGDEVKGIMEEIIEVGESREVQAVLNDEWYQSFHRFKSVFGVGVKTADKWYRMGLRTLEDVRSSKTLKLTPMQKVGLLYYEDLARGVTRAEADAIWLLVQDAVATFDPDAIVEIVGGFRRGKPQGHDVDLLISSPGAEKEQEDQLLQKVMNLWKKQGLLLYGRLEWTQWEDGGSPSGKADEGDAGAKCFLILKLYDHLVRKSKWNMPTGSNVGESKPWKAIRVDLLRCPYGSFAFAMLQWTGSRMFRRDLRWYATDEKNMMLDNHSLYDLTKGIFLPAKSEEEIFAHLGLEYLEPFERNA

SEQ ID NO: 3573 - DNA, 1587 bp, synthetic construct
  misc_feature 1..1587: note = Variant of terminal deoxynucleotidyltransferase
  source 1..1587: mol_type = other DNA
atgcaccatcatcatcatcatggcggtagcggcagccacggcattcgtaccatcgattcggacttcgggaagaaacagcagaaaaaaggcgataaccacgatagttccgccacttatgaaatcaaatttcacgagtttgtgctgttcattctcgaagaaaaaatgggtgcgacgcgtcgtacttttctgacagatttagcccgcaagaaagggttccgcgtcgagaatgaactgaccgacgaagttacccacatcgtggcagaaaatctgtcacgctctgaagtattggcttggctgaaagaacacaagatggagaagaccaagcaattcgaactgctggatattagctggcttatcgaaagcatgaaagttggtaaaccggtggacaccaaggggaaataccagttggcggaatcggttgaggtgagtgcgaacccagatccgacagaaggtcgtgtaaacgagctgcctcctactatgaaaaccgtttctccgtatgcgtgtcaacgccgcaccaccctgaacaaccgtaatcaacgttttacggactcgctggaaattcttcgtgaaaattacgagttcaaacgcaacgatgatactgcgctggaatttcgtcgtgctatctccgtgctgaaaagccttccgtttgaggtacgtagcctgaaagacacggaaggattgccctggatcggtgatgaagtcaaagggattatggaagaaatcatcgaggtcggggagtcgcgtgaagtgcaggccgtgctcaatgatgagtggtatcaaagcttccaccgctttaagagtgtctttggagtgggggtgaagacagcagacaagtggtaccgtatgggtctgcgcaccctcgaggatgttcgttccagcaagaccctgaagttgaccccgatgcagaaagtaggtctgctgtattatgaagatcttgctcgcggcgttacgcgtgccgaagctgacgcgatttggctgctggttcaggatgcagtcgcaactttcgacccggatgcgatcgtggagattgtcggtggatttcgtcgtgggaaacctcagggtcacgacgttgatctgcttatcagttctccgggagctgagaaagagcaagaagaccaactcctgcagaaagtgatgaatctgtggaagaaacaagggttgttgctgtacggtcgtctggaatggacccagtgggaagatgggggttcgccttccggttgggctgacgagggtgacgcgggtgcgaaatgctttctgatcctcaaactttatgatcatctggtgcgtaaaagcaaatggaacatgccgacgggttcgaacgtgggcgagtccaaaccgtggaaagcaattcgcgtagatctgctgcgttgcccctatggcagttttgcgtttgcgatgttgcagtggaccggaagccgcatgttccgtcgtgatctgcgttggtacgccactgacgagaagaacatgatgctggacaatcattcgctgtatgacctgaccaagggtatcttcctccctgctaaatcggaagaggaaattttcgcacatctggggcttgaatacctggaaccgttcgaacgtaacgca

SEQ ID NO: 3574 - protein, 529 aa, synthetic construct
  REGION 1..529: note = Variant of terminal deoxynucleotidyltransferase
MHHHHHHGGSGSHGIRTIDSDFGKKQQKKGDNHDSSATYEIKFHEFVLFILEEKMGATRRTFLTDLARKKGFRVENELTDEVTHIVAENLSRSEVLAWLKEHKMEKTKQFELLDISWLIESMKVGKPVDTKGKYQLAESVEVSANPDPTEGRVNELPPTMKTVSPYACQRRTTLNNRNQRFTDSLEILRENYEFKRNDDTALEFRRAISVLKSLPFEVRSLKDTEGLPWIGDEVKGIMEEIIEVGESREVQAVLNDEWYQSFHRFKSVFGVGVKTADKWYRMGLRTLEDVRSSKTLKLTPMQKVGLLYYEDLARGVTRAEADAIWLLVQDAVATFDPDAIVEIVGGFRRGKPQGHDVDLLISSPGAEKEQEDQLLQKVMNLWKKQGLLLYGRLEWTQWEDGGSPSGWADEGDAGAKCFLILKLYDHLVRKSKWNMPTGSNVGESKPWKAIRVDLLRCPYGSFAFAMLQWTGSRMFRRDLRWYATDEKNMMLDNHSLYDLTKGIFLPAKSEEEIFAHLGLEYLEPFERNA

SEQ ID NO: 3575 - DNA, 1587 bp, synthetic construct
  misc_feature 1..1587: note = Variant of terminal deoxynucleotidyltransferase
  source 1..1587: mol_type = other DNA
atgcaccatcatcatcatcatggcggtagcggcagccacggcattcgtaccatcgattcggacttcgggaagaaacagcagaaaaaaggcgataaccacgatagttccgccacttatgaaatcaaatttcacgagtttgtgctgttcattctcgaagaaaaaatgggtgcgacgcgtcgtacttttctgacagatttagcccgcaagaaagggttccgcgtcgagaatgaactgaccgacgaagttacccacatcgtggcagaaaatctgtcacgctctgaagtattggcttggctgaaagaacacaagatggagaagaccaagcaattcgaactgctggatattagctggcttatcgaaagcatgaaagttggtaaaccggtggacaccaaggggaaataccagttggcggaatcggttgaggtgagtgcgaacccagatccgacagaaggtcgtgtaaacgagctgcctcctactatgaaaaccgtttctccgtatgcgtgtcaacgccgcaccaccctgaacaaccgtaatcaacgttttacggactcgctggaaattcttcgtaggaattacgagttcaaacgcaacgatgatactgcgctggaatttcgtcgtgctatctccgtgctgaaaagccttccgtttgaggtacgtagcctgaaagacacggaaggattgccctggatcggtgatgaagtcaaagggattatggaagaaatcatcgaggtcggggagtcgcgtgaagtgcaggccgtgctcaatgatgagtggtatcaaagcttccaccgctttaagagtgtctttggagtgggggtgaagacagcagacaagtggtaccgtatgggtctgcgcaccctcgaggatgttcgttccagcaagaccctgaagttgaccccgatgcagaaagtaggtctgctgtattatgaagatcttgctcgcggcgttacgcgtgccgaagctgacgcgatttggctgctggttcaggatgcagtcgcaactttcgacccggatgcgatcgtggagattgtcggtggatttcgtcgtgggaaacctcagggtcacgacgttgatctgcttatcagttctccgggagctgagaaagagcaagaagaccaactcctgcagaaagtgatgaatctgtggaagaaacaagggttgttgctgtacggtcgtctggaatggacccagtgggaagatgggggttcgccttccggtaaggctgacgagggtgacgcgggtgcgaaatgctttctgatcctcaaactttatgatcatctggtgcgtaaaagcaaatggaacatgccgacgggttcgaacgtgggcgagtccaaaccgtggaaagcaattcgcgtagatctgctgcgttgcccctatggcagttttgcgtttgcgatgttgcagtggaccggaagccgcatgttccgtcgtgatctgcgttggtacgccactgacgagaagaacatgatgctggacaatcattcgctgtatgacctgaccaagggtatcttcctccctgctaaatcggaagaggaaattttcgcacatctggggcttgaatacctggaaccgttcgaacgtaacgca

SEQ ID NO: 3576 - protein, 529 aa, synthetic construct
  REGION 1..529: note = Variant of terminal deoxynucleotidyltransferase
MHHHHHHGGSGSHGIRTIDSDFGKKQQKKGDNHDSSATYEIKFHEFVLFILEEKMGATRRTFLTDLARKKGFRVENELTDEVTHIVAENLSRSEVLAWLKEHKMEKTKQFELLDISWLIESMKVGKPVDTKGKYQLAESVEVSANPDPTEGRVNELPPTMKTVSPYACQRRTTLNNRNQRFTDSLEILRRNYEFKRNDDTALEFRRAISVLKSLPFEVRSLKDTEGLPWIGDEVKGIMEEIIEVGESREVQAVLNDEWYQSFHRFKSVFGVGVKTADKWYRMGLRTLEDVRSSKTLKLTPMQKVGLLYYEDLARGVTRAEADAIWLLVQDAVATFDPDAIVEIVGGFRRGKPQGHDVDLLISSPGAEKEQEDQLLQKVMNLWKKQGLLLYGRLEWTQWEDGGSPSGKADEGDAGAKCFLILKLYDHLVRKSKWNMPTGSNVGESKPWKAIRVDLLRCPYGSFAFAMLQWTGSRMFRRDLRWYATDEKNMMLDNHSLYDLTKGIFLPAKSEEEIFAHLGLEYLEPFERNA

SEQ ID NO: 3577 - DNA, 1587 bp, synthetic construct
  misc_feature 1..1587: note = Variant of terminal deoxynucleotidyltransferase
  source 1..1587: mol_type = other DNA
atgcaccatcatcatcatcatggcggtagcggcagccacggcattcgtaccatcgattcggacttcgggaagaaacagcagaaaaaaggcgataaccacgatagttccgccacttatgaaatcaaatttcacgagtttgtgctgttcattctcgaagaaaaaatgggtgcgacgcgtcgtacttttctgacagatttagcccgcaagaaagggttccgcgtcgagaatgaactgaccgacgaagttacccacatcgtggcagaaaatctgtcacgctctgaagtattggcttggctgaaagaacacaagatggagaagaccaagcaattcgaactgctggatattagctggcttatcgaaagcatgaaagttggtaaaccggtggacaccaaggggaaataccagttggcggaatcggttgaggtgagtgcgaacccagatccgacagaaggtcgtgtaaacgagctgcctcctactatgaaaaccgtttctccgtatgcgtgtcaacgccgcaccaccctgaacaaccgtaatcaacgttttacggactcgctggaaattcttcgtgaaaattacgagttcaaacgcaacgatgatactgcgctggaatttcgtcgtgctatctccgtgctgaaaagccttccgtttgaggtacgtagcctgaaagacacggaaggattgccctggatcggtgatgaagtcaaagggattatggaagaaatcatcgaggtcggggagtcgcgtgaagtgcaggccgtgctcaatgatgagtggtatcaaagcttccaccgctttaagagtgtctttggagtgggggtgaagacagcagacaagtggtaccgtatgggtctgcgcaccctcgaggatgttcgttccagcaagaccctgaagttgaccccgatgcagaaagtaggtctgctgtattatgaagatcttgctcgcggcgttacgcgtgccgaagctgacgcgatttggctgctggttcaggatgcagtcgcaactttcgacccggatgcgatcgtggagattgtcggtggatttcgtcgtgggaaacctcagggtcacgacgttgatctgcttatcagttctccgggagctgagaaagagcaagaagaccaactcctgcagaaagtgatgaatctgtggaagaaacaagggttgttgctgctgggtcgtctggaatggacccagtgggaagatgggggttcgccttccggtaaggctgacgagggtgacgcgggtgcgaaatgctttctgatcctcaaactttatgatcatctggtgcgtaaaagcaaatggaacatgccgacgggttcgaacgtgggcgagtccaaaccgtggaaagcaattcgcgtagatctgctgcgttgcccctatggcagttttgcgtttgcgatgttgcagtggaccggaagccgcatgttccgtcgtgatctgcgttggtacgccactgacgagaagaacatgatgctggacaatcattcgctgtatgacctgaccaagggtatcttcctccctgctaaatcggaagaggaaattttcgcacatctggggcttgaatacctggaaccgttcgaacgtaacgca

SEQ ID NO: 3578 - protein, 529 aa, synthetic construct
  REGION 1..529: note = Variant of terminal deoxynucleotidyltransferase
MHHHHHHGGSGSHGIRTIDSDFGKKQQKKGDNHDSSATYEIKFHEFVLFILEEKMGATRRTFLTDLARKKGFRVENELTDEVTHIVAENLSRSEVLAWLKEHKMEKTKQFELLDISWLIESMKVGKPVDTKGKYQLAESVEVSANPDPTEGRVNELPPTMKTVSPYACQRRTTLNNRNQRFTDSLEILRENYEFKRNDDTALEFRRAISVLKSLPFEVRSLKDTEGLPWIGDEVKGIMEEIIEVGESREVQAVLNDEWYQSFHRFKSVFGVGVKTADKWYRMGLRTLEDVRSSKTLKLTPMQKVGLLYYEDLARGVTRAEADAIWLLVQDAVATFDPDAIVEIVGGFRRGKPQGHDVDLLISSPGAEKEQEDQLLQKVMNLWKKQGLLLLGRLEWTQWEDGGSPSGKADEGDAGAKCFLILKLYDHLVRKSKWNMPTGSNVGESKPWKAIRVDLLRCPYGSFAFAMLQWTGSRMFRRDLRWYATDEKNMMLDNHSLYDLTKGIFLPAKSEEEIFAHLGLEYLEPFERNA

SEQ ID NO: 3579 - DNA, 1587 bp, synthetic construct
  misc_feature 1..1587: note = Variant of terminal deoxynucleotidyltransferase
  source 1..1587: mol_type = other DNA
atgcaccatcatcatcatcatggcggtagcggcagccacggcattcgtaccatcgattcggacttcgggaagaaacagcagaaaaaaggcgataaccacgatagttccgccacttatgaaatcaaatttcacgagtttgtgctgttcattctcgaagaaaaaatgggtgcgacgcgtcgtacttttctgacagatttagcccgcaagaaagggttccgcgtcgagaatgaactgaccgacgaagttacccacatcgtggcagaaaatctgtcacgctctgaagtattggcttggctgaaagaacacaagatggagaagaccaagcaattcgaactgctggatattagctggcttatcgaaagcatgaaagttggtaaaccggtggacaccaaggggaaataccagttggcggaatcggttgaggtgagtgcgaacccagatccgacagaaggtcgtgtaaacgagctgcctcctactatgaaaaccgtttctccgtatgcgtgtcaacgccgcaccaccctgaacaaccgtaatcaacgttttacggactcgctggaaattcttcgtgaaaattacgagttcaaacgcaacgatgatactgcgctggaatttcgtcgtgctatctccgtgctgaaaagccttccgtttgaggtacgtagcctgaaagacacggaaggattgccctggatcggtgatgaagtcaaagggattatggaagaaatcatcgaggtcggggagtcgcgtgaagtgcaggccgtgctcaatgatgagtggtatcaaagcttccaccgctttaagagtgtctttggagtgggggtgaagacagcagacaagtggtaccgtatgggtctgcgcaccctcgaggatgttcgttccagcaagaccctgaagttgaccccgatgcagaaagtaggtctgctgtattatgaagatcttgctcgcggcgttacgcgtgccgaagctgacgcgatttggctgctggttcaggatgcagtcgcaactttcgacccggatgcgatcgtggagattgtcggtggatttcgtcgtgggaaacctcagggtcacgacgttgatctgcttatcagttctccgggagctgagaaagagcaagaagaccaactcctgcagaaagtgatgaatctgtggaagaaacaagggttgttgctgtacggtcgtctggaatggacccagtgggaagatgggggttcgccttccggtaagatggacgagggtgacgcgggtgcgaaatgctttctgatcctcaaactttatgatcatctggtgcgtaaaagcaaatggaacatgccgacgggttcgaacgtgggcgagtccaaaccgtggaaagcaattcgcgtagatctgctgcgttgcccctatggcagttttgcgtttgcgatgttgcagtggaccggaagccgcatgttccgtcgtgatctgcgttggtacgccactgacgagaagaacatgatgctggacaatcattcgctgtatgacctgaccaagggtatcttcctccctgctaaatcggaagaggaaattttcgcacatctggggcttgaatacctggaaccgttcgaacgtaacgca

SEQ ID NO: 3580 - protein, 529 aa, synthetic construct
  REGION 1..529: note = Variant of terminal deoxynucleotidyltransferase
MHHHHHHGGSGSHGIRTIDSDFGKKQQKKGDNHDSSATYEIKFHEFVLFILEEKMGATRRTFLTDLARKKGFRVENELTDEVTHIVAENLSRSEVLAWLKEHKMEKTKQFELLDISWLIESMKVGKPVDTKGKYQLAESVEVSANPDPTEGRVNELPPTMKTVSPYACQRRTTLNNRNQRFTDSLEILRENYEFKRNDDTALEFRRAISVLKSLPFEVRSLKDTEGLPWIGDEVKGIMEEIIEVGESREVQAVLNDEWYQSFHRFKSVFGVGVKTADKWYRMGLRTLEDVRSSKTLKLTPMQKVGLLYYEDLARGVTRAEADAIWLLVQDAVATFDPDAIVEIVGGFRRGKPQGHDVDLLISSPGAEKEQEDQLLQKVMNLWKKQGLLLYGRLEWTQWEDGGSPSGKMDEGDAGAKCFLILKLYDHLVRKSKWNMPTGSNVGESKPWKAIRVDLLRCPYGSFAFAMLQWTGSRMFRRDLRWYATDEKNMMLDNHSLYDLTKGIFLPAKSEEEIFAHLGLEYLEPFERNA

SEQ ID NO: 3581 - DNA, 1587 bp, synthetic construct
  misc_feature 1..1587: note = Variant of terminal deoxynucleotidyltransferase
  source 1..1587: mol_type = other DNA
atgcaccatcatcatcatcatggcggtagcggcagccacggcattcgtaccatcgattcggacttcgggaagaaacagcagaaaaaaggcgataaccacgatagttccgccacttatgaaatcaaatttcacgagtttgtgctgttcattctcgaagaaaaaatgggtgcgacgcgtcgtacttttctgacagatttagcccgcaagaaagggttccgcgtcgagaatgaactgaccgacgaagttacccacatcgtggcagaaaatctgtcacgctctgaagtattggcttggctgaaagaacacaagatggagaagaccaagcaattcgaactgctggatattagctggcttatcgaaagcatgaaagttggtaaaccggtggacaccaaggggaaataccagttggcggaatcggttgaggtgagtgcgaacccagatccgacagaaggtcgtgtaaacgagctgcctcctactatgaaaaccgtttctccgtatgcgtgtcaacgccgcaccaccctgaacaaccgtaatcaacgttttacggactcgctggaaattcttcgtgaaaattacgagttcaaacgcaacgatgatactgcgctggaatttcgtcgtgctatctccgtgctgaaaagccttccgtttgaggtacgtagcctgaaagacacggaaggattgccctggatcggtgatgaagtcaaagggattatggaagaaatcatcgaggtcggggagtcgcgtgaagtgcaggccgtgctcaatgatgagtggtatcaaagcttccaccgctttaagagtgtctttggagtgggggtgaagacagcagaccattggtaccgtatgggtctgcgcaccctcgaggatgttcgttccagcaagaccctgaagttgaccccgatgcagaaagtaggtctgctgtattatgaagatcttgctcgcggcgttacgcgtgccgaagctgacgcgatttggctgctggttcaggatgcagtcgcaactttcgacccggatgcgatcgtggagattgtcggtggatttcgtcgtgggaaacctcagggtcacgacgttgatctgcttatcagttctccgggagctgagaaagagcaagaagaccaactcctgcagaaagtgatgaatctgtggaagaaacaagggttgttgctgtacggtcgtctggaatggacccagtgggaagatgggggttcgccttccggtaaggctgacgagggtgacgcgggtgcgaaatgctttctgatcctcaaactttatgatcatctggtgcgtaaaagcaaatggaacatgccgacgggttcgaacgtgggcgagtccaaaccgtggaaagcaattcgcgtagatctgctgcgttgcccctatggcagttttgcgtttgcgatgttgcagtggaccggaagccgcatgttccgtcgtgatctgcgttggtacgccactgacgagaagaacatgatgctggacaatcattcgctgtatgacctgaccaagggtatcttcctccctgctaaatcggaagaggaaattttcgcacatctggggcttgaatacctggaaccgttcgaacgtaacgca

SEQ ID NO: 3582 - protein, 529 aa, synthetic construct
  REGION 1..529: note = Variant of terminal deoxynucleotidyltransferase
MHHHHHHGGSGSHGIRTIDSDFGKKQQKKGDNHDSSATYEIKFHEFVLFILEEKMGATRRTFLTDLARKKGFRVENELTDEVTHIVAENLSRSEVLAWLKEHKMEKTKQFELLDISWLIESMKVGKPVDTKGKYQLAESVEVSANPDPTEGRVNELPPTMKTVSPYACQRRTTLNNRNQRFTDSLEILRENYEFKRNDDTALEFRRAISVLKSLPFEVRSLKDTEGLPWIGDEVKGIMEEIIEVGESREVQAVLNDEWYQSFHRFKSVFGVGVKTADHWYRMGLRTLEDVRSSKTLKLTPMQKVGLLYYEDLARGVTRAEADAIWLLVQDAVATFDPDAIVEIVGGFRRGKPQGHDVDLLISSPGAEKEQEDQLLQKVMNLWKKQGLLLYGRLEWTQWEDGGSPSGKADEGDAGAKCFLILKLYDHLVRKSKWNMPTGSNVGESKPWKAIRVDLLRCPYGSFAFAMLQWTGSRMFRRDLRWYATDEKNMMLDNHSLYDLTKGIFLPAKSEEEIFAHLGLEYLEPFERNA

SEQ ID NO: 3583 - DNA, 1587 bp, synthetic construct
  misc_feature 1..1587: note = Variant of terminal deoxynucleotidyltransferase
  source 1..1587: mol_type = other DNA
atgcaccatcatcatcatcatggcggtagcggcagccacggcattcgtaccatcgattcggacttcgggaagaaacagcagaaaaaaggcgataaccacgatagttccgccacttatgaaatcaaatttcacgagtttgtgctgttcattctcgaagaaaaaatgggtgcgacgcgtcgtacttttctgacagatttagcccgcaagaaagggttccgcgtcgagaatgaactgaccgacgaagttacccacatcgtggcagaaaatctgtcacgctctgaagtattggcttggctgaaagaacacaagatggagaagaccaagcaattcgaactgctggatattagctggcttatcgaaagcatgaaagttggtaaaccggtggacaccaaggggaaataccagttggcggaatcggttgaggtgagtgcgaacccagatccgacagaaggtcgtgtaaacgagctgcctcctactatgaaaaccgtttctccgtatgcgtgtcaacgccgcaccaccctgaacaaccgtaatcaacgttttacggactcgctggaaattcttcgtgaaaattacgagttcaaacgcaacgatgatactgcgctggaatttcgtcgtgctatctccgtgctgaaaagccttccgtttgaggtacgtagcctgaaagacacggaaggattgccctggatcggtgatgaagtcaaagggattatggaagaaatcatcgaggtcggggagtcgcgtgaagtgcaggccgtgctcaatgatgagtggtatcaaagcttccaccgctttaagagtgtctttggagtgggggtgaagacagcagacaagtggtaccgtatgggtctgcgcaccctcgaggatgttcgttccagcaagaccctgaagttgaccccgatgcagaaagtaggtctgctgtattatgaagatcttgctcgcggcgttacgcgtgccgaagctgacgcgatttggctgctggttcaggatgcagtcgcaactttcgacccggatgcgatcgtggagattgtcggtggatttcgtcgtgggaaacctcagggtcacgacgttgatctgcttatcagttctccgggagctgagaaagagcaagaagaccaactcctgcagaaagtgatgaatctgtggaagaaacaagggttgttgctgtacggtgttctggaatggacccagtgggaagatgggggttcgccttccggtaaggctgacgagggtgacgcgggtgcgaaatgctttctgatcctcaaactttatgatcatctggtgcgtaaaagcaaatggaacatgccgacgggttcgaacgtgggcgagtccaaaccgtggaaagcaattcgcgtagatctgctgcgttgcccctatggcagttttgcgtttgcgatgttgcagtggaccggaagccgcatgttccgtcgtgatctgcgttggtacgccactgacgagaagaacatgatgctggacaatcattcgctgtatgacctgaccaagggtatcttcctccctgctaaatcggaagaggaaattttcgcacatctggggcttgaatacctggaaccgttcgaacgtaacgca

SEQ ID NO: 3584 - protein, 529 aa, synthetic construct
  REGION 1..529: note = Variant of terminal deoxynucleotidyltransferase
MHHHHHHGGSGSHGIRTIDSDFGKKQQKKGDNHDSSATYEIKFHEFVLFILEEKMGATRRTFLTDLARKKGFRVENELTDEVTHIVAENLSRSEVLAWLKEHKMEKTKQFELLDISWLIESMKVGKPVDTKGKYQLAESVEVSANPDPTEGRVNELPPTMKTVSPYACQRRTTLNNRNQRFTDSLEILRENYEFKRNDDTALEFRRAISVLKSLPFEVRSLKDTEGLPWIGDEVKGIMEEIIEVGESREVQAVLNDEWYQSFHRFKSVFGVGVKTADKWYRMGLRTLEDVRSSKTLKLTPMQKVGLLYYEDLARGVTRAEADAIWLLVQDAVATFDPDAIVEIVGGFRRGKPQGHDVDLLISSPGAEKEQEDQLLQKVMNLWKKQGLLLYGVLEWTQWEDGGSPSGKADEGDAGAKCFLILKLYDHLVRKSKWNMPTGSNVGESKPWKAIRVDLLRCPYGSFAFAMLQWTGSRMFRRDLRWYATDEKNMMLDNHSLYDLTKGIFLPAKSEEEIFAHLGLEYLEPFERNA

SEQ ID NO: 3585 - DNA, 1587 bp, synthetic construct
  misc_feature 1..1587: note = Variant of terminal deoxynucleotidyltransferase
  source 1..1587: mol_type = other DNA
atgcaccatcatcatcatcatggcggtagcggcagccacggcattcgtaccatcgattcggacttcgggaagaaacagcagaaaaaaggcgataaccacgatagttccgccacttatgaaatcaaatttcacgagtttgtgctgttcattctcgaagaaaaaatgggtgcgacgcgtcgtacttttctgacagatttagcccgcaagaaagggttccgcgtcgagaatgaactgaccgacgaagttacccacatcgtggcagaaaatctgtcacgctctgaagtattggcttggctgaaagaacacaagatggagaagaccaagcaattcgaactgctggatattagctggcttatcgaaagcatgaaagttggtaaaccggtggacaccaaggggaaataccagttggcggaatcggttgaggtgagtgcgaacccagatccgacagaaggtcgtgtaaacgagctgcctcctactatgaaaaccgtttctccgtatgcgtgtcaacgccgcaccaccctgaacaaccgtaatcaacgttttacggactcgctggaaattcttcgtgaaaattacgagttcaaacgcaacgatgatactgcgctggaatttcgtcgtgctatctccgtgctgaaaagccttccgtttgaggtacgtagcctgaaagacacggaaggattgccctggatcggtgatgaagtcaaagggattatggaagaaatcatcgaggtcggggagtcgcgtgaagtgcaggccgtgctcaatgatgagtggtatcaaagcttccaccgctttaagagtgtctttggagtgggggtgaagacagcagacaagtggtaccgtatgggtctgcgcaccctcgaggatgttcgttccagcaagaccctgaagttgaccccgatgcagaaagtaggtctgctgtattatgaagatcttgctcgcggcgttacgcgtgccgaagctgacgcgatttggctgctggttcaggatgcagtcgcaactttcgacccggatgcgatcgtggagattgtcggtggatttcgtcgtgggaaacctcagggtcacgacgttgatctgcttatcagttctccgggagctgagaaagagcaagaagaccaactcctgcagaaagtgatgaatctgtggaagaaacaagggttgttgctgtacggtcgtctggaatggacccagtgggaagatgggggttcgccttccggtaaggctgacgagggtgacgcgggtgcgaaatgctttctgatcctcaaactttatgatcatctggtgcgtaaaagcaaatggaacatgccgacgggttcgaacgtgggcgagtccaaaccgtggaaagcaattcgcgtagatctgctgcgttgcccctatggcagttttgcgtttgcgatgttggcttggaccggaagccgcatgttccgtcgtgatctgcgttggtacgccactgacgagaagaacatgatgctggacaatcattcgctgtatgacctgaccaagggtatcttcctccctgctaaatcggaagaggaaattttcgcacatctggggcttgaatacctggaaccgttcgaacgtaacgca

SEQ ID NO: 3586 - protein, 529 aa, synthetic construct
  REGION 1..529: note = Variant of terminal deoxynucleotidyltransferase
MHHHHHHGGSGSHGIRTIDSDFGKKQQKKGDNHDSSATYEIKFHEFVLFILEEKMGATRRTFLTDLARKKGFRVENELTDEVTHIVAENLSRSEVLAWLKEHKMEKTKQFELLDISWLIESMKVGKPVDTKGKYQLAESVEVSANPDPTEGRVNELPPTMKTVSPYACQRRTTLNNRNQRFTDSLEILRENYEFKRNDDTALEFRRAISVLKSLPFEVRSLKDTEGLPWIGDEVKGIMEEIIEVGESREVQAVLNDEWYQSFHRFKSVFGVGVKTADKWYRMGLRTLEDVRSSKTLKLTPMQKVGLLYYEDLARGVTRAEADAIWLLVQDAVATFDPDAIVEIVGGFRRGKPQGHDVDLLISSPGAEKEQEDQLLQKVMNLWKKQGLLLYGRLEWTQWEDGGSPSGKADEGDAGAKCFLILKLYDHLVRKSKWNMPTGSNVGESKPWKAIRVDLLRCPYGSFAFAMLAWTGSRMFRRDLRWYATDEKNMMLDNHSLYDLTKGIFLPAKSEEEIFAHLGLEYLEPFERNA

SEQ ID NO: 3587 - DNA, 1587 bp, synthetic construct
  misc_feature 1..1587: note = Variant of terminal deoxynucleotidyltransferase
  source 1..1587: mol_type = other DNA
atgcaccatcatcatcatcatggcggtagcggcagccacggcattcgtaccatcgattcggacttcgggaagaaacagcagaaaaaaggcgataaccacgatagttccgccacttatgaaatcaaatttcacgagtttgtgctgttcattctcgaagaaaaaatgggtgcgacgcgtcgtacttttctgacagatttagcccgcaagaaagggttccgcgtcgagaatgaactgaccgacgaagttacccacatcgtggcagaaaatctgtcacgctctgaagtattggcttggctgaaagaacacaagatggagaagaccaagcaattcgaactgctggatattagctggcttatcgaaagcatgaaagttggtaaaccggtggacaccaaggggaaataccagttggcggaatcggttgaggtgagtgcgaacccagatccgacagaaggtcgtgtaaacgagctgcctcctactatgaaaaccgtttctccgtatgcgtgtcaacgccgcaccaccctgaacaaccgtaatcaacgttttacggactcgctggaaattcttcgtgaaaattacgagttcaaacgcaacgatgatactgcgctggaatttcgtcgtgctatctccgtgctgaaaagccttccgtttgaggtacgtagcctgaaagacacggaaggattgccctggatcggtgatgaagtcaaagggattatggaagaaatcatcgaggtcggggagtcgcgtgaagtgcaggccgtgctcaatgatgagtggtatcaaagcttccaccgctttaagagtgtctttggagtgggggtgaagacagcagacaagtggtaccgtatgggtctgcgcaccctcgaggatgttcgttccagcaagaccctgaagttgaccccgatgcagaaagtaggtctgctgtattatgaagatcttgctcgcggcgttacgcgtgccgaagctgacgcgatttggctgctggttcaggatgcagtcgcaactttcgacccggatgcgatcgtggagattgtcggtggatttcgtcgtgggaaacctcagggtcacgacgttgatctgcttatcagttctccgggagctgagaaagagcaagaagaccaactcctgcagaaagtgatgaatctgtggaagaaacaagggttgttgctgtacggtcgtctggaatggacccagtgggaagatgggggttcgccttccggtaaggctgacgagggtgacgcgggtgcgaaatgctttctgatcctcaaactttatgatcatctggtgcgtaaaagcaaatggaacatgccgacgggttcgaacgtgggcgagtccaaaccgtggaaagcaattcgcgtagatctgctgcgttgcccctatggcagttttgcgtttgcgatgttgcagtggaccggaagccgcatgttccgtagtgatctgcgttggtacgccactgacgagaagaacatgatgctggacaatcattcgctgtatgacctgaccaagggtatcttcctccctgctaaatcggaagaggaaattttcgcacatctggggcttgaatacctggaaccgttcgaacgtaacgca

SEQ ID NO: 3588 - protein, 529 aa, synthetic construct
  REGION 1..529: note = Variant of terminal deoxynucleotidyltransferase
MHHHHHHGGSGSHGIRTIDSDFGKKQQKKGDNHDSSATYEIKFHEFVLFILEEKMGATRRTFLTDLARKKGFRVENELTDEVTHIVAENLSRSEVLAWLKEHKMEKTKQFELLDISWLIESMKVGKPVDTKGKYQLAESVEVSANPDPTEGRVNELPPTMKTVSPYACQRRTTLNNRNQRFTDSLEILRENYEFKRNDDTALEFRRAISVLKSLPFEVRSLKDTEGLPWIGDEVKGIMEEIIEVGESREVQAVLNDEWYQSFHRFKSVFGVGVKTADKWYRMGLRTLEDVRSSKTLKLTPMQKVGLLYYEDLARGVTRAEADAIWLLVQDAVATFDPDAIVEIVGGFRRGKPQGHDVDLLISSPGAEKEQEDQLLQKVMNLWKKQGLLLYGRLEWTQWEDGGSPSGKADEGDAGAKCFLILKLYDHLVRKSKWNMPTGSNVGESKPWKAIRVDLLRCPYGSFAFAMLQWTGSRMFRSDLRWYATDEKNMMLDNHSLYDLTKGIFLPAKSEEEIFAHLGLEYLEPFERNA

SEQ ID NO: 3589 - DNA, 1587 bp, synthetic construct
  misc_feature 1..1587: note = Variant of terminal deoxynucleotidyltransferase
  source 1..1587: mol_type = other DNA
atgcaccatcatcatcatcatggcggtagcggcagccacggcattcgtaccatcgattcggacttcgggaagaaacagcagaaaaaaggcgataaccacgatagttccgccacttatgaaatcaaatttcacgagtttgtgctgttcattctcgaagaaaaaatgggtgcgacgcgtcgtacttttctgacagatttagcccgcaagaaagggttccgcgtcgagaatgaactgaccgacgaagttacccacatcgtggcagaaaatctgtcacgctctgaagtattggcttggctgaaagaacacaagatggagaagaccaagcaattcgaactgctggatattagctggcttatcgaaagcatgaaagttggtaaaccggtggacaccaaggggaaataccagttggcggaatcggttgaggtgagtgcgaacccagatccgacagaaggtcgtgtaaacgagctgcctcctactatgaaaaccgtttctccgtatgcgtgtcaacgccgcaccaccctgaacaaccgtaatcaacgttttacggactcgctggaaattcttcgtgaaaattacgagttcaaacgcaacgatgatactgcgctggaatttcgtcgtgctatctccgtgctgaaaagccttccgtttgaggtacgtagcctgaaagacacggaaggattgccctggatcggtgatgaagtcaaagggattatggaagaaatcatcgaggtcggggagtcgcgtgaagtgcaggccgtgctcaatgatgagtggtatcaaagcttccaccgctttaagagtgtctttggagtgggggtgaagacagcagacaagtggtaccgtatgggtctgcgcaccctcgaggatgttcgttccagcaagaccctgaagttgaccccgatgcagaaagtaggtctgctgtattatgaagatcttgctcgcggcgttacgcgtgccgaagctgacgcgatttggctgctggttcaggatgcagtcgcaactttcgacccggatgcgatcgtggagattgtcggtggatttcgtcgtgggaaacctcagggtcacgacgttgatctgcttatcagttctccgggagctgagaaagagcaagaagaccaactcctgcagaaagtgatgaatctgtggaagaaacaagggttgttgctgtacggtcgtctggaatggacccagtgggaagatgggggttcgccttccggtaaggctgacgagggtgacgcgggtgcgagttgctttctgatcctcaaactttatgatcatctggtgcgtaaaagcaaatggaacatgccgacgggttcgaacgtgggcgagtccaaaccgtggaaagcaattcgcgtagatctgctgcgttgcccctatggcagttttgcgtttgcgatgttgcagtggaccggaagccgcatgttccgtcgtgatctgcgttggtacgccactgacgagaagaacatgatgctggacaatcattcgctgtatgacctgaccaagggtatcttcctccctgctaaatcggaagaggaaattttcgcacatctggggcttgaatacctggaaccgttcgaacgtaacgca

SEQ ID NO: 3590 - protein, 529 aa, synthetic construct
  REGION 1..529: note = Variant of terminal deoxynucleotidyltransferase
MHHHHHHGGSGSHGIRTIDSDFGKKQQKKGDNHDSSATYEIKFHEFVLFILEEKMGATRRTFLTDLARKKGFRVENELTDEVTHIVAENLSRSEVLAWLKEHKMEKTKQFELLDISWLIESMKVGKPVDTKGKYQLAESVEVSANPDPTEGRVNELPPTMKTVSPYACQRRTTLNNRNQRFTDSLEILRENYEFKRNDDTALEFRRAISVLKSLPFEVRSLKDTEGLPWIGDEVKGIMEEIIEVGESREVQAVLNDEWYQSFHRFKSVFGVGVKTADKWYRMGLRTLEDVRSSKTLKLTPMQKVGLLYYEDLARGVTRAEADAIWLLVQDAVATFDPDAIVEIVGGFRRGKPQGHDVDLLISSPGAEKEQEDQLLQKVMNLWKKQGLLLYGRLEWTQWEDGGSPSGKADEGDAGASCFLILKLYDHLVRKSKWNMPTGSNVGESKPWKAIRVDLLRCPYGSFAFAMLQWTGSRMFRRDLRWYATDEKNMMLDNHSLYDLTKGIFLPAKSEEEIFAHLGLEYLEPFERNA

SEQ ID NO: 3591 - DNA, 1587 bp, synthetic construct
  misc_feature 1..1587: note = Variant of terminal deoxynucleotidyltransferase
  source 1..1587: mol_type = other DNA
atgcaccatcatcatcatcatggcggtagcggcagccacggcattcgtaccatcgattcggacttcgggaagaaacagcagaaaaaaggcgataaccacgatagttccgccacttatgaaatcaaatttcacgagtttgtgctgttcattctcgaagaaaaaatgggtgcgacgcgtcgtacttttctgacagatttagcccgcaagaaagggttccgcgtcgagaatgaactgaccgacgaagttacccacatcgtggcagaaaatctgtcacgctctgaagtattggcttggctgaaagaacacaagatggagaagaccaagcaattcgaactgctggatattagctggcttatcgaaagcatgaaagttggtaaaccggtggacaccaaggggaaataccagttggcggaatcggttgaggtgagtgcgaacccagatccgacagaaggtcgtgtaaacgagctgcctcctactatgaaaaccgtttctccgtatgcgtgtcaacgccgcaccaccctgaacaaccgtaatcaacgttttacggactcgctggaaattcttcgtgaaaattacgagttcaaacgcaacgatgatactgcgctggaatttcgtcgtgctatctccgtgctgaaaagccttccgtttgaggtacgtagcctgaaagacacggaaggattgccctggatcggtgatgaagtcaaagggattatggaagaaatcatcgaggtcggggagtcgcgtgaagtgcaggccgtgctcaatgatgagtggtatcaaagcttccaccgctttaagagtgtctttggagtgggggtgaagacagcagacaagtggtaccgtatgggtctgcgcaccctcgaggatgttcgttccagcaagaccctgaagttgaccccgatgcagaaagtaggtctgctgtattatgaagatcttgctcgcggcgttacgcgtgccgaagctgacgcgatttggctgctggttcaggatgcagtcgcaactttcgacccggatgcgatcgtggagattgtcggtggatttcgtcgtgggaaacctcagggtcacgacgttgatctgcttatcagttctccgggagctgagaaagagcaagaagaccaactcctgcagaaagtgatgaatctgtggaagaaacaagggttgttgctgtacggtcgtctggaatggacccagtgggaagatgggggttcgccttccggtgatgctgacgagggtgacgcgggtgcgaaatgctttctgatcctcaaactttatgatcatctggtgcgtaaaagcaaatggaacatgccgacgggttcgaacgtgggcgagtccaaaccgtggaaagcaattcgcgtagatctgctgcgttgcccctatggcagttttgcgtttgcgatgttgcagtggaccggaagccgcatgttccgtcgtgatctgcgttggtacgccactgacgagaagaacatgatgctggacaatcattcgctgtatgacctgaccaagggtatcttcctccctgctaaatcggaagaggaaattttcgcacatctggggcttgaatacctggaaccgttcgaacgtaacgca

SEQ ID NO: 3592 - protein, 529 aa, synthetic construct
  REGION 1..529: note = Variant of terminal deoxynucleotidyltransferase
MHHHHHHGGSGSHGIRTIDSDFGKKQQKKGDNHDSSATYEIKFHEFVLFILEEKMGATRRTFLTDLARKKGFRVENELTDEVTHIVAENLSRSEVLAWLKEHKMEKTKQFELLDISWLIESMKVGKPVDTKGKYQLAESVEVSANPDPTEGRVNELPPTMKTVSPYACQRRTTLNNRNQRFTDSLEILRENYEFKRNDDTALEFRRAISVLKSLPFEVRSLKDTEGLPWIGDEVKGIMEEIIEVGESREVQAVLNDEWYQSFHRFKSVFGVGVKTADKWYRMGLRTLEDVRSSKTLKLTPMQKVGLLYYEDLARGVTRAEADAIWLLVQDAVATFDPDAIVEIVGGFRRGKPQGHDVDLLISSPGAEKEQEDQLLQKVMNLWKKQGLLLYGRLEWTQWEDGGSPSGDADEGDAGAKCFLILKLYDHLVRKSKWNMPTGSNVGESKPWKAIRVDLLRCPYGSFAFAMLQWTGSRMFRRDLRWYATDEKNMMLDNHSLYDLTKGIFLPAKSEEEIFAHLGLEYLEPFERNA

SEQ ID NO: 3593 - DNA, 1587 bp, synthetic construct
  misc_feature 1..1587: note = Variant of terminal deoxynucleotidyltransferase
  source 1..1587: mol_type = other DNA
atgcaccatcatcatcatcatggcggtagcggcagccacggcattcgtaccatcgattcggacttcgggaagaaacagcagaaaaaaggcgataaccacgatagttccgccacttatgaaatcaaatttcacgagtttgtgctgttcattctcgaagaaaaaatgggtgcgacgcgtcgtacttttctgacagatttagcccgcaagaaagggttccgcgtcgagaatgaactgaccgacgaagttacccacatcgtggcagaaaatctgtcacgctctgaagtattggcttggctgaaagaacacaagatggagaagaccaagcaattcgaactgctggatattagctggcttatcgaaagcatgaaagttggtaaaccggtggacaccaaggggaaataccagttggcggaatcggttgaggtgagtgcgaacccagatccgacagaaggtcgtgtaaacgagctgcctcctactatgaaaaccgtttctccgtatgcgtgtcaacgccgcaccaccctgaacaaccgtaatcaacgttttacggactcgctggaaattcttcgtgaaaattacgagttcaaacgcaacgatgatactgcgctggaatttcgtcgtgctatctccgtgctgaaaagccttccgtttgaggtacgtagcctgaaagacacggaaggattgccctggatcggtgatgaagtcaaagggattatggaagaaatcatcgaggtcggggagtcgcgtgaagtgcaggccgtgctcaatgatgagtggtatcaaagcttccaccgctttaagagtgtctttggagtgggggtgaagacagcagacaagtggtaccgtatgggtctgcgcaccctcgaggatgttcgttccagcaagaccctgaagttgtctccgatgcagaaagtaggtctgctgtattatgaagatcttgctcgcggcgttacgcgtgccgaagctgacgcgatttggctgctggttcaggatgcagtcgcaactttcgacccggatgcgatcgtggagattgtcggtggatttcgtcgtgggaaacctcagggtcacgacgttgatctgcttatcagttctccgggagctgagaaagagcaagaagaccaactcctgcagaaagtgatgaatctgtggaagaaacaagggttgttgctgtacggtcgtctggaatggacccagtgggaagatgggggttcgccttccggtaaggctgacgagggtgacgcgggtgcgaaatgctttctgatcctcaaactttatgatcatctggtgcgtaaaagcaaatggaacatgccgacgggttcgaacgtgggcgagtccaaaccgtggaaagcaattcgcgtagatctgctgcgttgcccctatggcagttttgcgtttgcgatgttgcagtggaccggaagccgcatgttccgtcgtgatctgcgttggtacgccactgacgagaagaacatgatgctggacaatcattcgctgtatgacctgaccaagggtatcttcctccctgctaaatcggaagaggaaattttcgcacatctggggcttgaatacctggaaccgttcgaacgtaacgca

SEQ ID NO: 3594 - protein, 529 aa, synthetic construct
  REGION 1..529: note = Variant of terminal deoxynucleotidyltransferase
MHHHHHHGGSGSHGIRTIDSDFGKKQQKKGDNHDSSATYEIKFHEFVLFILEEKMGATRRTFLTDLARKKGFRVENELTDEVTHIVAENLSRSEVLAWLKEHKMEKTKQFELLDISWLIESMKVGKPVDTKGKYQLAESVEVSANPDPTEGRVNELPPTMKTVSPYACQRRTTLNNRNQRFTDSLEILRENYEFKRNDDTALEFRRAISVLKSLPFEVRSLKDTEGLPWIGDEVKGIMEEIIEVGESREVQAVLNDEWYQSFHRFKSVFGVGVKTADKWYRMGLRTLEDVRSSKTLKLSPMQKVGLLYYEDLARGVTRAEADAIWLLVQDAVATFDPDAIVEIVGGFRRGKPQGHDVDLLISSPGAEKEQEDQLLQKVMNLWKKQGLLLYGRLEWTQWEDGGSPSGKADEGDAGAKCFLILKLYDHLVRKSKWNMPTGSNVGESKPWKAIRVDLLRCPYGSFAFAMLQWTGSRMFRRDLRWYATDEKNMMLDNHSLYDLTKGIFLPAKSEEEIFAHLGLEYLEPFERNA

SEQ ID NO: 3595 - DNA, 1587 bp, synthetic construct
  misc_feature 1..1587: note = Variant of terminal deoxynucleotidyltransferase
  source 1..1587: mol_type = other DNA
atgcaccatcatcatcatcatggcggtagcggcagccacggcattcgtaccatcgattcggacttcgggaagaaacagcagaaaaaaggcgataaccacgatagttccgccacttatgaaatcaaatttcacgagtttgtgctgttcattctcgaagaaaaaatgggtgcgacgcgtcgtacttttctgacagatttagcccgcaagaaagggttccgcgtcgagaatgaactgaccgacgaagttacccacatcgtggcagaaaatctgtcacgctctgaagtattggcttggctgaaagaacacaagatggagaagaccaagcaattcgaactgctggatattagctggcttatcgaaagcatgaaagttggtaaaccggtggacaccaaggggaaataccagttggcggaatcggttgaggtgagtgcgaacccagatccgacagaaggtcgtgtaaacgagctgcctcctactatgaaaaccgtttctccgtatgcgtgtcaacgccgcaccaccctgaacaaccgtaatcaacgttttacggactcgctggaaattcttcgtgaaaattacgagttcaaacgcaacgatgatactgcgctggaatttcgtcgtgctatctccgtgctgaaaagccttccgtttgaggtacgtagcctgaaagacacggaaggattgccctggatcggtgatgaagtcaaagggattatggaagaaatcatcgaggtcggggagtcgcgtgaagtgcaggccgtgctcaatgatgagtggtatcaaagcttccaccgctttaagagtgtctttggagtgggggtgaagacagcagagaagtggtaccgtatgggtctgcgcaccctcgaggatgttcgttccagcaagaccctgaagttgaccccgatgcagaaagtaggtctgctgtattatgaagatcttgctcgcggcgttacgcgtgccgaagctgacgcgatttggctgctggttcaggatgcagtcgcaactttcgacccggatgcgatcgtggagattgtcggtggatttcgtcgtgggaaacctcagggtcacgacgttgatctgcttatcagttctccgggagctgagaaagagcaagaagaccaactcctgcagaaagtgatgaatctgtggaagaaacaagggttgttgctgtacggtcgtctggaatggacccagtgggaagatgggggttcgccttccggtaaggctgacgagggtgacgcgggtgcgaaatgctttctgatcctcaaactttatgatcatctggtgcgtaaaagcaaatggaacatgccgacgggttcgaacgtgggcgagtccaaaccgtggaaagcaattcgcgtagatctgctgcgttgcccctatggcagttttgcgtttgcgatgttgcagtggaccggaagccgcatgttccgtcgtgatctgcgttggtacgccactgacgagaagaacatgatgctggacaatcattcgctgtatgacctgaccaagggtatcttcctccctgctaaatcggaagaggaaattttcgcacatctggggcttgaatacctggaaccgttcgaacgtaacgca

SEQ ID NO: 3596 - protein, 529 aa, synthetic construct
  REGION 1..529: note = Variant of terminal deoxynucleotidyltransferase
MHHHHHHGGSGSHGIRTIDSDFGKKQQKKGDNHDSSATYEIKFHEFVLFILEEKMGATRRTFLTDLARKKGFRVENELTDEVTHIVAENLSRSEVLAWLKEHKMEKTKQFELLDISWLIESMKVGKPVDTKGKYQLAESVEVSANPDPTEGRVNELPPTMKTVSPYACQRRTTLNNRNQRFTDSLEILRENYEFKRNDDTALEFRRAISVLKSLPFEVRSLKDTEGLPWIGDEVKGIMEEIIEVGESREVQAVLNDEWYQSFHRFKSVFGVGVKTAEKWYRMGLRTLEDVRSSKTLKLTPMQKVGLLYYEDLARGVTRAEADAIWLLVQDAVATFDPDAIVEIVGGFRRGKPQGHDVDLLISSPGAEKEQEDQLLQKVMNLWKKQGLLLYGRLEWTQWEDGGSPSGKADEGDAGAKCFLILKLYDHLVRKSKWNMPTGSNVGESKPWKAIRVDLLRCPYGSFAFAMLQWTGSRMFRRDLRWYATDEKNMMLDNHSLYDLTKGIFLPAKSEEEIFAHLGLEYLEPFERNA

SEQ ID NO: 3597 - DNA, 1587 bp, synthetic construct
  misc_feature 1..1587: note = Variant of terminal deoxynucleotidyltransferase
  source 1..1587: mol_type = other DNA
atgcaccatcatcatcatcatggcggtagcggcagccacggcattcgtaccatcgattcggacttcgggaagaaacagcagaaaaaaggcgataaccacgatagttccgccacttatgaaatcaaatttcacgagtttgtgctgttcattctcgaagaaaaaatgggtgcgacgcgtcgtacttttctgacagatttagcccgcaagaaagggttccgcgtcgagaatgaactgaccgacgaagttacccacatcgtggcagaaaatctgtcacgctctgaagtattggcttggctgaaagaacacaagatggagaagaccaagcaattcgaactgctggatattagctggcttatcgaaagcatgaaagttggtaaaccggtggacaccaaggggaaataccagttggcggaatcggttgaggtgagtgcgaacccagatccgacagaaggtcgtgtaaacgagctgcctcctactatgaaaaccgtttctccgtatgcgtgtcaacgccgcaccaccctgaacaaccgtaatcaacgttttacggactcgctggaaattcttcgtgaaaattacgagttcaaacgcaacgatgatactgcgctggaatttcgtcgtgctatctccgtgctgaaaagccttccgtttgaggtacgtagcctgaaagacacggaaggattgccctggatcggtgatgaagtcaaagggattatggaagaaatcatcgaggtcggggagtcgcgtgaagtgcaggccgtgctcaatgatgagtggtatcaaagcttccaccgctttaagagtgtctttggagtgggggtgaagacagcagactattggtaccgtatgggtctgcgcaccctcgaggatgttcgttccagcaagaccctgaagttgaccccgatgcagaaagtaggtctgctgtattatgaagatcttgctcgcggcgttacgcgtgccgaagctgacgcgatttggctgctggttcaggatgcagtcgcaactttcgacccggatgcgatcgtggagattgtcggtggatttcgtcgtgggaaacctcagggtcacgacgttgatctgcttatcagttctccgggagctgagaaagagcaagaagaccaactcctgcagaaagtgatgaatctgtggaagaaacaagggttgttgctgtacggtcgtctggaatggacccagtgggaagatgggggttcgccttccggtaaggctgacgagggtgacgcgggtgcgaaatgctttctgatcctcaaactttatgatcatctggtgcgtaaaagcaaatggaacatgccgacgggttcgaacgtgggcgagtccaaaccgtggaaagcaattcgcgtagatctgctgcgttgcccctatggcagttttgcgtttgcgatgttgcagtggaccggaagccgcatgttccgtcgtgatctgcgttggtacgccactgacgagaagaacatgatgctggacaatcattcgctgtatgacctgaccaagggtatcttcctccctgctaaatcggaagaggaaattttcgcacatctggggcttgaatacctggaaccgttcgaacgtaacgca

SEQ ID NO: 3598 - protein, 529 aa, synthetic construct
  REGION 1..529: note = Variant of terminal deoxynucleotidyltransferase
MHHHHHHGGSGSHGIRTIDSDFGKKQQKKGDNHDSSATYEIKFHEFVLFILEEKMGATRRTFLTDLARKKGFRVENELTDEVTHIVAENLSRSEVLAWLKEHKMEKTKQFELLDISWLIESMKVGKPVDTKGKYQLAESVEVSANPDPTEGRVNELPPTMKTVSPYACQRRTTLNNRNQRFTDSLEILRENYEFKRNDDTALEFRRAISVLKSLPFEVRSLKDTEGLPWIGDEVKGIMEEIIEVGESREVQAVLNDEWYQSFHRFKSVFGVGVKTADYWYRMGLRTLEDVRSSKTLKLTPMQKVGLLYYEDLARGVTRAEADAIWLLVQDAVATFDPDAIVEIVGGFRRGKPQGHDVDLLISSPGAEKEQEDQLLQKVMNLWKKQGLLLYGRLEWTQWEDGGSPSGKADEGDAGAKCFLILKLYDHLVRKSKWNMPTGSNVGESKPWKAIRVDLLRCPYGSFAFAMLQWTGSRMFRRDLRWYATDEKNMMLDNHSLYDLTKGIFLPAKSEEEIFAHLGLEYLEPFERNA

SEQ ID NO: 3599 - DNA, 1587 bp, synthetic construct
  misc_feature 1..1587: note = Variant of terminal deoxynucleotidyltransferase
  source 1..1587: mol_type = other DNA
atgcaccatcatcatcatcatggcggtagcggcagccacggcattcgtaccatcgattcggacttcgggaagaaacagcagaaaaaaggcgataaccacgatagttccgccacttatgaaatcaaatttcacgagtttgtgctgttcattctcgaagaaaaaatgggtgcgacgcgtcgtacttttctgacagatttagcccgcaagaaagggttccgcgtcgagaatgaactgaccgacgaagttacccacatcgtggcagaaaatctgtcacgctctgaagtattggcttggctgaaagaacacaagatggagaagaccaagcaattcgaactgctggatattagctggcttatcgaaagcatgaaagttggtaaaccggtggacaccaaggggaaataccagttggcggaatcggttgaggtgagtgcgaacccagatccgacagaaggtcgtgtaaacgagctgcctcctactatgaaaaccgtttctccgtatgcgtgtcaacgccgcaccaccctgaacaaccgtaatcaacgttttacggactcgctggacattcttcgtgaaaattacgagttcaaacgcaacgatgatactgcgctggaatttcgtcgtgctatctccgtgctgaaaagccttccgtttgaggtacgtagcctgaaagacacggaaggattgccctggatcggtgatgaagtcaaagggattatggaagaaatcatctcggtcggggagtcgaaggaagtgcaggccgtgctcaatgatgagtggtatcaaagcttccacgcatttacgagtgtctttggagtgggggtgaagacagcagacaagtggtaccgtatgggtctgcgcaccctcgaggatgttcgttccagcaagaccctgaagttgaccccgatgcagaaagtaggtctgctgtattatgaagatcttgctcgcggcgttacgcgtgccgaagctgacgcgatttggctgctggttcaggatgcagtcgcaactttcgacccggatgcgatcgtggagattgtcggtggatttcgtcgtgggaaacctcagggtcacgacgttgatctgcttatcagttctccgggagctgagaaagagcaagaagaccaactcctgcagaaagtgatgaatctgtggaagaaacaagggttgttgctgtacggtcgtctgtactggagtcagtgggaagatgggggttcgccttccggtaaggctgacgagggtgacgcggaggcgaaatgctttctgatcctcaaactttatgatcatctggtgcgtaaaagtaaacgcaatatgccgactggttcgaacatgggcgagtccaaaccgtggaaagcaattcgcgtagatctgctgcgttgcccctatggcagttttgcgtttgcgatgttgcagtggaccggaagccgcatgttccgtcgtgatctgcgttggtacgccctggaagagaagaacatgatgctggacaatcattcgctgtatgacctgaccaaaggcatcttcctccctgctaaatcggaagaggaaattttcgaacatctggggcttgaatacctggaaccgttcgaacgtaacgca

SEQ ID NO: 3600 - protein, 529 aa, synthetic construct
  REGION 1..529: note = Variant of terminal deoxynucleotidyltransferase
MHHHHHHGGSGSHGIRTIDSDFGKKQQKKGDNHDSSATYEIKFHEFVLFILEEKMGATRRTFLTDLARKKGFRVENELTDEVTHIVAENLSRSEVLAWLKEHKMEKTKQFELLDISWLIESMKVGKPVDTKGKYQLAESVEVSANPDPTEGRVNELPPTMKTVSPYACQRRTTLNNRNQRFTDSLDILRENYEFKRNDDTALEFRRAISVLKSLPFEVRSLKDTEGLPWIGDEVKGIMEEIISVGESKEVQAVLNDEWYQSFHAFTSVFGVGVKTADKWYRMGLRTLEDVRSSKTLKLTPMQKVGLLYYEDLARGVTRAEADAIWLLVQDAVATFDPDAIVEIVGGFRRGKPQGHDVDLLISSPGAEKEQEDQLLQKVMNLWKKQGLLLYGRLYWSQWEDGGSPSGKADEGDAEAKCFLILKLYDHLVRKSKRNMPTGSNMGESKPWKAIRVDLLRCPYGSFAFAMLQWTGSRMFRRDLRWYALEEKNMMLDNHSLYDLTKGIFLPAKSEEEIFEHLGLEYLEPFERNA

SEQ ID NO: 3601 - DNA, 1587 bp, synthetic construct
  misc_feature 1..1587: note = Variant of terminal deoxynucleotidyltransferase
  source 1..1587: mol_type = other DNA
atgcaccatcatcatcatcatggcggtagcggcagccacggcattcgtaccatcgattcggacttcgggaagaaacagcagaaaaaaggcgataaccacgatagttccgccacttatgaaatcaaatttcacgagtttgtgctgttcattctcgaagaaaaaatgggtgcgacgcgtcgtacttttctgacagatttagcccgcaagaaagggttccgcgtcgagaatgaactgaccgacgaagttacccacatcgtggcagaaaatctgtcacgctctgaagtattggcttggctgaaagaacacaagatggagaagaccaagcaattcgaactgctggatattagctggcttatcgaaagcatgaaagttggtaaaccggtggacaccaaggggaaataccagttggcggaatcggttgaggtgagtgcgaacccagatccgacagaaggtcgtgtaaacgagctgcctcctactatgaaaaccgtttctccgtatgcgtgtcaacgccgcaccaccctgaacaaccgtaatcaacgttttacggactcgctggagattcttcgtgaaaattacgagctgaaacgcaacgatgatactgcgctggaatttcgtcgtgctatctccgtgctgaaaagccttccgtttgaggtacgtagcctgaaagacacggaaggattgccctggatcggtgatgaagtcaaagggattatggaagaaatcatcgaagtcggggagtcgcgtgaagtgcaggccgtgctcaatgatgagtggtatcaaagcttccacgcatttacgagtgtctttggagtgggggtgaagacagcagacaagtggtaccgtatgggtctgcgcaccctcgaggatgttcgttccagcaagaccctgaagttgaccccgatgcagaaagtaggtctgctgtattatgaagatcttgctcgcggcgttacgcgtgccgaagctgacgcgatttggctgctggttcaggatgcagtcgcaactttcgacccggatgcgatcgtggagattgtcggtggatttcgtcgtgggaaacctcagggtcacgacgttgatctgcttatcagttctccgggagctgagaaagagcaagaagaccaactcctgcagaaagtgatgaatctgtggaagaaacaagggttgttgctgtacggtcgtctggaatggagccagtgggaagatgggggttcgccttccggtaaggctgacgagggtgacgcggaggcgaaatgctttctgatcctcaaactttatgatcatctggtgcgtaaaagtaaacgcaatatgccgactggttcgaacatgggcgagtccaaaccgtggaaagcaattcgcgtagatctgctgcgttgcccctatggcagttttgcgtttgcgatgttgcagtggaccggaagccgcatgttccgtcgtgatctgcgttggtacgccactgacgagaagaacatgatgctggacaatcattcgctgtatgacctgaccaaaggcatcttcctccctgctaaatcggaagaggaaattttcgcgcatctggggcttgactacctggaaccgttcgaacgtaacgca

SEQ ID NO: 3602 - protein, 529 aa, synthetic construct
  REGION 1..529: note = Variant of terminal deoxynucleotidyltransferase
MHHHHHHGGSGSHGIRTIDSDFGKKQQKKGDNHDSSATYEIKFHEFVLFILEEKMGATRRTFLTDLARKKGFRVENELTDEVTHIVAENLSRSEVLAWLKEHKMEKTKQFELLDISWLIESMKVGKPVDTKGKYQLAESVEVSANPDPTEGRVNELPPTMKTVSPYACQRRTTLNNRNQRFTDSLEILRENYELKRNDDTALEFRRAISVLKSLPFEVRSLKDTEGLPWIGDEVKGIMEEIIEVGESREVQAVLNDEWYQSFHAFTSVFGVGVKTADKWYRMGLRTLEDVRSSKTLKLTPMQKVGLLYYEDLARGVTRAEADAIWLLVQDAVATFDPDAIVEIVGGFRRGKPQGHDVDLLISSPGAEKEQEDQLLQKVMNLWKKQGLLLYGRLEWSQWEDGGSPSGKADEGDAEAKCFLILKLYDHLVRKSKRNMPTGSNMGESKPWKAIRVDLLRCPYGSFAFAMLQWTGSRMFRRDLRWYATDEKNMMLDNHSLYDLTKGIFLPAKSEEEIFAHLGLDYLEPFERNA

SEQ ID NO: 3603 - DNA, 1587 bp, synthetic construct
  misc_feature 1..1587: note = Variant of terminal deoxynucleotidyltransferase
  source 1..1587: mol_type = other DNA
atgcaccatcatcatcatcatggcggtagcggcagccacggcattcgtaccatcgattcggacttcgggaagaaacagcagaaaaaaggcgataaccacgatagttccgccacttatgaaatcaaatttcacgagtttgtgctgttcattctcgaagaaaaaatgggtgcgacgcgtcgtacttttctgacagatttagcccgcaagaaagggttccgcgtcgagaatgaactgaccgacgaagttacccacatcgtggcagaaaatctgtcacgctctgaagtattggcttggctgaaagaacacaagatggagaagaccaagcaattcgaactgctggatattagctggcttatcgaaagcatgaaagttggtaaaccggtggacaccaaggggaaataccagttggcggaatcggttgaggtgagtgcgaacccagatccgacagaaggtcgtgtaaacgagctgcctcctactatgaaaaccgtttctccgtatgcgtgtcaacgccgcaccaccctgaacaaccgtaatcaacgttttacggactcgctggagattcttcgtgaaaattacgagttcaaacgcaacgaggatactgcgctggaatttcgtcgtgctatctccgtgctgaaaagccttccgtttgaggtacgtagcctgaaagacacggaaggattgccctggatcggtgatgaagtcaaagggattatggaagaaatcatcgaagtcggggagtcgaaggaagtgcaggccgtgctcaatgatgagtggtatcaaagcttccacgcatttacgagtgtctttggagtgggggtgaagacagcagacaagtggtaccgtatgggtctgcgcaccctcgaggatgttcgttccagcaagaccctgaagttgaccccgatgcagaaagtaggtctgctgtattatgaagatcttgctcgcggcgttacgcgtgccgaagctgacgcgatttggctgctggttcaggatgcagtcgcaactttcgacccggatgcgatcgtggagattgtcggtggatttcgtcgtgggaaacctcagggtcacgacgttgatctgcttatcagttctccgggagctgagaaagagcaagaagaccaactcctgcagaaagtgatgaatctgtggaagaaacaagggttgttgctgtacggtcgtctgtactggactcagtgggaagatgggggttcgccttccggtaaggctgacgagggtgacgcggaggcgaaatgctttctgatcctcaaactttatgatcatctggtgcgtaaaagtaaacgcaatatgccgactggttcgaacatgggcgagtccaaaccgtggaaagcaattcgcgtagatctgctgcgttgcccctatggcagttttgcgtttgcgatgttgcagtggaccggaagccgcatgttccgtcgtgatctgcgttggtacgccctggaagagaagaacatgatgctggacaatcattcgctgtatgacatgaccaaaggtatcttcctccctgctaaatcggaagaggaaattttcgaacatctggggcttgaatacctggaaccgttcgaacgtaacgca

SEQ ID NO: 3604 - protein, 529 aa, synthetic construct
  REGION 1..529: note = Variant of terminal deoxynucleotidyltransferase
MHHHHHHGGSGSHGIRTIDSDFGKKQQKKGDNHDSSATYEIKFHEFVLFILEEKMGATRRTFLTDLARKKGFRVENELTDEVTHIVAENLSRSEVLAWLKEHKMEKTKQFELLDISWLIESMKVGKPVDTKGKYQLAESVEVSANPDPTEGRVNELPPTMKTVSPYACQRRTTLNNRNQRFTDSLEILRENYEFKRNEDTALEFRRAISVLKSLPFEVRSLKDTEGLPWIGDEVKGIMEEIIEVGESKEVQAVLNDEWYQSFHAFTSVFGVGVKTADKWYRMGLRTLEDVRSSKTLKLTPMQKVGLLYYEDLARGVTRAEADAIWLLVQDAVATFDPDAIVEIVGGFRRGKPQGHDVDLLISSPGAEKEQEDQLLQKVMNLWKKQGLLLYGRLYWTQWEDGGSPSGKADEGDAEAKCFLILKLYDHLVRKSKRNMPTGSNMGESKPWKAIRVDLLRCPYGSFAFAMLQWTGSRMFRRDLRWYALEEKNMMLDNHSLYDMTKGIFLPAKSEEEIFEHLGLEYLEPFERNA

SEQ ID NO: 3605 - DNA, 1587 bp, synthetic construct
  misc_feature 1..1587: note = Variant of terminal deoxynucleotidyltransferase
  source 1..1587: mol_type = other DNA
atgcaccatcatcatcatcatggcggtagcggcagccacggcattcgtaccatcgattcggacttcgggaagaaacagcagaaaaaaggcgataaccacgatagttccgccacttatgaaatcaaatttcacgagtttgtgctgttcattctcgaagaaaaaatgggtgcgacgcgtcgtacttttctgacagatttagcccgcaagaaagggttccgcgtcgagaatgaactgaccgacgaagttacccacatcgtggcagaaaatctgtcacgctctgaagtattggcttggctgaaagaacacaagatggagaagaccaagcaattcgaactgctggatattagctggcttatcgaaagcatgaaagttggtaaaccggtggacaccaaggggaaataccagttggcggaatcggttgaggtgagtgcgaacccagatccgacagaaggtcgtgtaaacgagctgcctcctactatgaaaaccgtttctccgtatgcgtgtcaacgccgcaccaccctgaacaaccgtaatcaacgttttacggactcgctggacattcttcgtgaaaattacgagttcaaacgcaacgatgatactgcgctggaatttcgtcgtgctatctccgtgctgaaaagccttccgtttgaggtacgtagcctgaaagacacggaaggattgccctggatcagtgatgaagtcaaagggattatggaagaaatcatcgaagtcggggagtcgcgtgaagtgcaggccgtgctcaatgatgagtggtatcaaagcttccacgcatttacgagtgtctttggagtgggggtgaagacagcagacaagtggtaccgtatgggtctgcgcaccctcgaggatgttcgttccagcaagaccctgaagttgaccccgatgcagaaagtaggtctgctgtattatgaagatcttgctcgcggcgttacgcgtgccgaagctgacgcgatttggctgctggttcaggatgcagtcgcaactttcgacccggatgcgatcgtggagattgtcggtggatttcgtcgtgggaaacctcagggtcacgacgttgatctgcttatcagttctccgggcgtggagcgtgagcaagaagaccaactcctgcagaaagtgatgaatctgtggaagaaacaagggttgttgctgtacggtcgtctgtactggagtcagtgggaagatgggggttcgccttccggtaaggctgacgagggtgacgcggaggcgaaatgctttctgatcctcaaactttatgatcatctggtgcgtaaaagtaaacgcaatatgccgactggttcgaacatgggcgagtccaaaccgtggaaagcaattcgcgtagatctgctgcgttgcccctatggcagttttgcgtttgcgatgttgcagtggaccggaagccgcatgttccgtcgtgatctgcgttggtacgccactgaagagaagaacatgatgctggacaatcattcgctgtatgacctgaccaaaggcatcttcctccctgctaaatcggaagaggaaattttcgaacatctggggcttgaatacctggaaccgttcgaacgtaacgca

SEQ ID NO: 3606 - protein, 529 aa, synthetic construct
  REGION 1..529: note = Variant of terminal deoxynucleotidyltransferase
MHHHHHHGGSGSHGIRTIDSDFGKKQQKKGDNHDSSATYEIKFHEFVLFILEEKMGATRRTFLTDLARKKGFRVENELTDEVTHIVAENLSRSEVLAWLKEHKMEKTKQFELLDISWLIESMKVGKPVDTKGKYQLAESVEVSANPDPTEGRVNELPPTMKTVSPYACQRRTTLNNRNQRFTDSLDILRENYEFKRNDDTALEFRRAISVLKSLPFEVRSLKDTEGLPWISDEVKGIMEEIIEVGESREVQAVLNDEWYQSFHAFTSVFGVGVKTADKWYRMGLRTLEDVRSSKTLKLTPMQKVGLLYYEDLARGVTRAEADAIWLLVQDAVATFDPDAIVEIVGGFRRGKPQGHDVDLLISSPGVEREQEDQLLQKVMNLWKKQGLLLYGRLYWSQWEDGGSPSGKADEGDAEAKCFLILKLYDHLVRKSKRNMPTGSNMGESKPWKAIRVDLLRCPYGSFAFAMLQWTGSRMFRRDLRWYATEEKNMMLDNHSLYDLTKGIFLPAKSEEEIFEHLGLEYLEPFERNA

SEQ ID NO: 3607 - DNA, 1587 bp, synthetic construct
  misc_feature 1..1587: note = Variant of terminal deoxynucleotidyltransferase
  source 1..1587: mol_type = other DNA
atgcaccatcatcatcatcatggcggtagcggcagccacggcattcgtaccatcgattcggacttcgggaagaaacagcagaaaaaaggcgataaccacgatagttccgccacttatgaaatcaaatttcacgagtttgtgctgttcattctcgaagaaaaaatgggtgcgacgcgtcgtacttttctgacagatttagcccgcaagaaagggttccgcgtcgagaatgaactgaccgacgaagttacccacatcgtggcagaaaatctgtcacgctctgaagtattggcttggctgaaagaacacaagatggagaagaccaagcaattcgaactgctggatattagctggcttatcgaaagcatgaaagttggtaaaccggtggacaccaaggggaaataccagttggcggaatcggttgaggtgagtgcgaacccagatccgacagaaggtcgtgtaaacgagctgcctcctactatgaaaaccgtttctccgtatgcgtgtcaacgccgcaccaccctgaacaaccgtaatcaacgttttacggactcgctggagattcttcgtgaaaattacgagttcaaacgcaacgaggatactgcgctggaatttcgtcgtgctatctccgtgctgaaaagccttccgtttgaggtacgtagcctgaaagacacggaaggattgccctggatcggtgatgaagtcaaagggattatggaagaaatcatcgaagtcggggagtcgcgtgaagtgcaggccgtgctcaatgatgagtggtatcaaagcttccacgcatttacgagtgtctttggagtgggggtgaagacagcagacaagtggtaccgtatgggtctgcgcaccctcgaggatgttcgttccagcaagaccctgaagttgaccccgatgcagaaagtaggtctgctgtattatgaagatcttgctcgcggcgttacgcgtgccgaagctgacgcgatttggctgctggttcaggatgcagtcgcaactttcgacccggatgcgatcgtggagattgtcggtggatttcgtcgtgggaaacctcagggtcacgacgttgatctgcttatcagttctccgggagctgagaaagagcaagaagaccaactcctgcagaaagtgatgaatctgtggaagaaacaagggttgttgctgtacggtcgtctgtactggactcagtgggaagatgggggttcgccttccggtaaggctgacgagggtgacgcggaggcgaaatgctttctgatcctcaaactttatgatcatctggtgcgtaaaagtaaacgcaatatgccgactggttcgaacatgggcgagtccaaaccgtggaaagcaattcgcgtagatctgctgcgttgcccctatggcagttttgcgtttgcgatgttgcagtggaccggaagccgcatgttccgtcgtgatctgcgttggtacgccctggaagagaagaacatgatgctggacaatcattcgctgtatgacatgaccaaaggtatcttcctccctgctaaatcggaagaggaaattttcgaacatctggggcttgaatacctggaaccgttcgaacgtaacgca

SEQ ID NO: 3608 - protein, 529 aa, synthetic construct
  REGION 1..529: note = Variant of terminal deoxynucleotidyltransferase
MHHHHHHGGSGSHGIRTIDSDFGKKQQKKGDNHDSSATYEIKFHEFVLFILEEKMGATRRTFLTDLARKKGFRVENELTDEVTHIVAENLSRSEVLAWLKEHKMEKTKQFELLDISWLIESMKVGKPVDTKGKYQLAESVEVSANPDPTEGRVNELPPTMKTVSPYACQRRTTLNNRNQRFTDSLEILRENYEFKRNEDTALEFRRAISVLKSLPFEVRSLKDTEGLPWIGDEVKGIMEEIIEVGESREVQAVLNDEWYQSFHAFTSVFGVGVKTADKWYRMGLRTLEDVRSSKTLKLTPMQKVGLLYYEDLARGVTRAEADAIWLLVQDAVATFDPDAIVEIVGGFRRGKPQGHDVDLLISSPGAEKEQEDQLLQKVMNLWKKQGLLLYGRLYWTQWEDGGSPSGKADEGDAEAKCFLILKLYDHLVRKSKRNMPTGSNMGESKPWKAIRVDLLRCPYGSFAFAMLQWTGSRMFRRDLRWYALEEKNMMLDNHSLYDMTKGIFLPAKSEEEIFEHLGLEYLEPFERNA

SEQ ID NO: 3609 - DNA, 1587 bp, synthetic construct
  misc_feature 1..1587: note = Variant of terminal deoxynucleotidyltransferase
  source 1..1587: mol_type = other DNA
atgcaccatcatcatcatcatggcggtagcggcagccacggcattcgtaccatcgattcggacttcgggaagaaacagcagaaaaaaggcgataaccacgatagttccgccacttatgaaatcaaatttcacgagtttgtgctgttcattctcgaagaaaaaatgggtgcgacgcgtcgtacttttctgacagatttagcccgcaagaaagggttccgcgtcgagaatgaactgaccgacgaagttacccacatcgtggcagaaaatctgtcacgctctgaagtattggcttggctgaaagaacacaagatggagaagaccaagcaattcgaactgctggatattagctggcttatcgaaagcatgaaagttggtaaaccggtggacaccaaggggaaataccagttggcggaatcggttgaggtgagtgcgaacccagatccgacagaaggtcgtgtaaacgagctgcctcctactatgaaaaccgtttctccgtatgcgtgtcaacgccgcaccaccctgaacaaccgtaatcaacgttttacggactcgctggagattcttcgtgaaaattacgagttcaaacgcaacgatgatactgcgctggaatttcgtcgtgctatctccgtgctgaaaagccttccgtttgaggtacgtagcctgaaagacacggaaggattgccctggatcggtgatgaagtcaaagggattatggaagaaatcatcgaagtcggggagtcgaaggaagtgcaggccgtgctcaatgatgagtggtatcaaagcttccacgcatttacgagtgtctttggagtgggggtgaagacagcagacaagtggtaccgtatgggtctgcgcaccctcgaggatgttcgttccagcaagaccctgaagttgaccccgatgcagaaagtaggtctgctgtattatgaagatcttgctcgcggcgttacgcgtgccgaagctgacgcgatttggctgctggttcaggatgcagtcgcaactttcgacccggatgcgatcgtggagattgtcggtggatttcgtcgtgggaaacctcagggtcacgacgttgatctgcttatcagttctccgggagctgagaaagagcaagaagaccaactcctgcagaaagtgatgaatctgtggaagaaacaagggttgttgctgtacggtcgtctgtactggagtcagtgggaagatgggggttcgccttccggtaaggctgacgagggtgacgcggaggcgaaatgctttctgatcctcaaactttatgatcatctggtgcgtaaaagtaaacgcaatatgccgactggttcgaacatgggcgagtccaaaccgtggaaagcaattcgcgtagatctgctgcgttgcccctatggcagttttgcgtttgcgatgttgcagtggaccggaagccgcatgttccgtcgtgatctgcgttggtacgccctggacgagaagaacatgatgctggacaatcattcgctgtatgacctgaccaaaggcatcttcctccctgctaaatcggaagaggaaattttcgaacatctggggcttgaatacctggaaccgttcgaacgtaacgca

SEQ ID NO: 3610 - protein, 529 aa, synthetic construct
  REGION 1..529: note = Variant of terminal deoxynucleotidyltransferase
MHHHHHHGGSGSHGIRTIDSDFGKKQQKKGDNHDSSATYEIKFHEFVLFILEEKMGATRRTFLTDLARKKGFRVENELTDEVTHIVAENLSRSEVLAWLKEHKMEKTKQFELLDISWLIESMKVGKPVDTKGKYQLAESVEVSANPDPTEGRVNELPPTMKTVSPYACQRRTTLNNRNQRFTDSLEILRENYEFKRNDDTALEFRRAISVLKSLPFEVRSLKDTEGLPWIGDEVKGIMEEIIEVGESKEVQAVLNDEWYQSFHAFTSVFGVGVKTADKWYRMGLRTLEDVRSSKTLKLTPMQKVGLLYYEDLARGVTRAEADAIWLLVQDAVATFDPDAIVEIVGGFRRGKPQGHDVDLLISSPGAEKEQEDQLLQKVMNLWKKQGLLLYGRLYWSQWEDGGSPSGKADEGDAEAKCFLILKLYDHLVRKSKRNMPTGSNMGESKPWKAIRVDLLRCPYGSFAFAMLQWTGSRMFRRDLRWYALDEKNMMLDNHSLYDLTKGIFLPAKSEEEIFEHLGLEYLEPFERNA

SEQ ID NO: 3611 - DNA, 1587 bp, synthetic construct
  misc_feature 1..1587: note = Variant of terminal deoxynucleotidyltransferase
  source 1..1587: mol_type = other DNA
atgcaccatcatcatcatcatggcggtagcggcagccacggcattcgtaccatcgattcggacttcgggaagaaacagcagaaaaaaggcgataaccacgatagttccgccacttatgaaatcaaatttcacgagtttgtgctgttcattctcgaagaaaaaatgggtgcgacgcgtcgtacttttctgacagatttagcccgcaagaaagggttccgcgtcgagaatgaactgaccgacgaagttacccacatcgtggcagaaaatctgtcacgctctgaagtattggcttggctgaaagaacacaagatggagaagaccaagcaattcgaactgctggatattagctggcttatcgaaagcatgaaagttggtaaaccggtggacaccaaggggaaataccagttggcggaatcggttgaggtgagtgcgaacccagatccgacagaaggtcgtgtaaacgagctgcctcctactatgaaaaccgtttctccgtatgcgtgtcaacgccgcaccaccctgaacaaccgtaatcaacgttttacggactcgctggagattcttcgtgaaaattacgagttcaaacgcaacgatgatactgcgctggaatttcgtcgtgctatctccgtgctgaaaagccttccgtttgaggtacgtagcctgaaagacacggaaggattgccctggatcggtgatgaagtcaaagggattatggaagaaatcatcgaagtcggggagtcgaaggaagtgcaggccgtgctcaatgatgagtggtatcaaagcttccacgcatttacgagtgtctttggagtgggggtgaagacagcagacaagtggtaccgtatgggtctgcgcaccctcgaggatgttcgttccagcaagaccctgaagttgaccccgatgcagaaagtaggtctgctgtattatgaagatcttgctcgcggcgttacgcgtgccgaagctgacgcgatttggctgctggttcaggatgcagtcgcaactttcgacccggatgcgatcgtggagattgtcggtggatttcgtcgtgggaaacctcagggtcacgacgttgatctgcttatcagttctccggccgtggagcgtgagcaagaagaccaactcctgcagaaagtgatgaatctgtggaagaaacaagggttgttgctgtacggtcgtctgtactggagtcagtgggaagatgggggttcgccttccggtaaggctgacgagggtgacgcggaggcgaaatgctttctgatcctcaaactttatgatcatctggtgcgtaaaagtaaacgcaatatgccgactggttcgaacatgggcgagtccaaaccgtggaaagcaattcgcgtagatctgctgcgttgcccctatggcagttttgcgtttgcgatgttgcagtggaccggaagccgcatgttccgtcgtgatctgcgttggtacgccctggacgagaagaacatgatgctggacaatcattcgctgtatgacctgaccaaaggcatcttcctccctgctaaatcggaagaggaaattttcgagcatctggggcttgactacctggaaccgttcgaacgtaacgca

SEQ ID NO: 3612 - protein, 529 aa, synthetic construct
  REGION 1..529: note = Variant of terminal deoxynucleotidyltransferase
MHHHHHHGGSGSHGIRTIDSDFGKKQQKKGDNHDSSATYEIKFHEFVLFILEEKMGATRRTFLTDLARKKGFRVENELTDEVTHIVAENLSRSEVLAWLKEHKMEKTKQFELLDISWLIESMKVGKPVDTKGKYQLAESVEVSANPDPTEGRVNELPPTMKTVSPYACQRRTTLNNRNQRFTDSLEILRENYEFKRNDDTALEFRRAISVLKSLPFEVRSLKDTEGLPWIGDEVKGIMEEIIEVGESKEVQAVLNDEWYQSFHAFTSVFGVGVKTADKWYRMGLRTLEDVRSSKTLKLTPMQKVGLLYYEDLARGVTRAEADAIWLLVQDAVATFDPDAIVEIVGGFRRGKPQGHDVDLLISSPAVEREQEDQLLQKVMNLWKKQGLLLYGRLYWSQWEDGGSPSGKADEGDAEAKCFLILKLYDHLVRKSKRNMPTGSNMGESKPWKAIRVDLLRCPYGSFAFAMLQWTGSRMFRRDLRWYALDEKNMMLDNHSLYDLTKGIFLPAKSEEEIFEHLGLDYLEPFERNA

SEQ ID NO: 3613 - DNA, 1587 bp, synthetic construct
  misc_feature 1..1587: note = Variant of terminal deoxynucleotidyltransferase
  source 1..1587: mol_type = other DNA
atgcaccatcatcatcatcatggcggtagcggcagccacggcattcgtaccatcgattcggacttcgggaagaaacagcagaaaaaaggcgataaccacgatagttccgccacttatgaaatcaaatttcacgagtttgtgctgttcattctcgaagaaaaaatgggtgcgacgcgtcgtacttttctgacagatttagcccgcaagaaagggttccgcgtcgagaatgaactgaccgacgaagttacccacatcgtggcagaaaatctgtcacgctctgaagtattggcttggctgaaagaacacaagatggagaagaccaagcaattcgaactgctggatattagctggcttatcgaaagcatgaaagttggtaaaccggtggacaccaaggggaaataccagttggcggaatcggttgaggtgagtgcgaacccagatccgacagaaggtcgtgtaaacgagctgcctcctactatgaaaaccgtttctccgtatgcgtgtcaacgccgcaccaccctgaacaaccgtaatcaacgttttacggactcgctggagattcttcgtgaaaattacgagttcaaacgcaacgatgatactgcgctggaatttcgtcgtgctatctccgtgctgaaaagccttccgtttgaggtacgtagcctgaaagacacggaaggattgccctggatcagtgatgaagtcaaagggattatggaagaaatcatcgaagtcggggagtcgcgtgaagtgcaggccgtgctcaatgatgagtggtatcaaagcttccacgcatttacgagtgtctttggagtgggggtgaagacagcagacaagtggtaccgtatgggtctgcgcaccctcgaggatgttcgttccagcaagaccctgaagttgaccccgatgcagaaagtaggtctgctgtattatgaagatcttgctcgcggcgttacgcgtgccgaagctgacgcgatttggctgctggttcaggatgcagtcgcaactttcgacccggatgcgatcgtggagattgtcggtggatttcgtcgtgggaaacctcagggtcacgacgttgatctgcttatcagttctccgggcgcggagcgtgagcaagaagaccaactcctgcagaaagtgatgaatctgtggaagaaacaagggttgttgctgtacggtcgtctgtactggagtcagtgggaagatgggggttcgccttccggtaaggctgacgagggtgacgcggaggcgaaatgctttctgatcctcaaactttatgatcatctggtgcgtaaaagtaaacgcaatatgccgactggttcgaacatgggcgagtccaaaccgtggaaagcaattcgcgtagatctgctgcgttgcccctatggcagttttgcgtttgcgatgttgcagtggaccggaagccgcatgttccgtcgtgatctgcgttggtacgccactgacgagaagaacatgatgctggacaatcattcgctgtatgacctgaccaaaggcatcttcctccctgctaaatcggaagaggaaattttcgaacatctggggcttgaatacctggaaccgttcgaacgtaacgca

SEQ ID NO: 3614 - protein, 529 aa, synthetic construct
  REGION 1..529: note = Variant of terminal deoxynucleotidyltransferase
MHHHHHHGGSGSHGIRTIDSDFGKKQQKKGDNHDSSATYEIKFHEFVLFILEEKMGATRRTFLTDLARKKGFRVENELTDEVTHIVAENLSRSEVLAWLKEHKMEKTKQFELLDISWLIESMKVGKPVDTKGKYQLAESVEVSANPDPTEGRVNELPPTMKTVSPYACQRRTTLNNRNQRFTDSLEILRENYEFKRNDDTALEFRRAISVLKSLPFEVRSLKDTEGLPWISDEVKGIMEEIIEVGESREVQAVLNDEWYQSFHAFTSVFGVGVKTADKWYRMGLRTLEDVRSSKTLKLTPMQKVGLLYYEDLARGVTRAEADAIWLLVQDAVATFDPDAIVEIVGGFRRGKPQGHDVDLLISSPGAEREQEDQLLQKVMNLWKKQGLLLYGRLYWSQWEDGGSPSGKADEGDAEAKCFLILKLYDHLVRKSKRNMPTGSNMGESKPWKAIRVDLLRCPYGSFAFAMLQWTGSRMFRRDLRWYATDEKNMMLDNHSLYDLTKGIFLPAKSEEEIFEHLGLEYLEPFERNA

SEQ ID NO: 3615 - DNA, 1587 bp, synthetic construct
  misc_feature 1..1587: note = Variant of terminal deoxynucleotidyltransferase
  source 1..1587: mol_type = other DNA
atgcaccatcatcatcatcatggcggtagcggcagccacggcattcgtaccatcgattcggacttcgggaagaaacagcagaaaaaaggcgataaccacgatagttccgccacttatgaaatcaaatttcacgagtttgtgctgttcattctcgaagaaaaaatgggtgcgacgcgtcgtacttttctgacagatttagcccgcaagaaagggttccgcgtcgagaatgaactgaccgacgaagttacccacatcgtggcagaaaatctgtcacgctctgaagtattggcttggctgaaagaacacaagatggagaagaccaagcaattcgaactgctggatattagctggcttatcgaaagcatgaaagttggtaaaccggtggacaccaaggggaaataccagttggcggaatcggttgaggtgagtgcgaacccagatccgacagaaggtcgtgtaaacgagctgcctcctactatgaaaaccgtttctccgtatgcgtgtcaacgccgcaccaccctgaacaaccgtaatcaacgttttacggactcgctggacattcttcgtgaaaattacgagttcaaacgcaacgatgatactgcgctggaatttcgtcgtgctatctccgtgctgaaaagccttccgtttgaggtacgtagcctgaaagacacggaaggattgccctggatcagtgatgaagtcaaagggattatggaagaaatcatctcggtcggggagtcgcgtgaagtgcaggccgtgctcaatgatgagtggtatcaaagcttccacgcatttacgagtgtctttggagtgggggtgaagacagcagacaagtggtaccgtatgggtctgcgcaccctcgaggatgttcgttccagcaagaccctgaagttgaccccgatgcagaaagtaggtctgctgtattatgaagatcttgctcgcggcgttacgcgtgccgaagctgacgcgatttggctgctggttcaggatgcagtcgcaactttcgacccggatgcgatcgtggagattgtcggtggatttcgtcgtgggaaacctcagggtcacgacgttgatctgcttatcagttctccgggcgcggagcgtgagcaagaagaccaactcctgcagaaagtgatgaatctgtggaagaaacaagggttgttgctgtacggtcgtctgtactggagtcagtgggaagatgggggttcgccttccggtaaggctgacgagggtgacgcggaggcgaaatgctttctgatcctcaaactttatgatcatctggtgcgtaaaagtaaacgcaatatgccgactggttcgaacatgggcgagtccaaaccgtggaaagcaattcgcgtagatctgctgcgttgcccctatggcagttttgcgtttgcgatgttgcagtggaccggaagccgcatgttccgtcgtgatctgcgttggtacgccactgaagagaagaacatgatgctggacaatcattcgctgtatgacatgaccaaaggtatcttcctccctgctaaatcggaagaggaaattttcgagcatctggggcttgaatacctggaaccgttcgaacgtaacgca

SEQ ID NO: 3616 - protein, 529 aa, synthetic construct
  REGION 1..529: note = Variant of terminal deoxynucleotidyltransferase
MHHHHHHGGSGSHGIRTIDSDFGKKQQKKGDNHDSSATYEIKFHEFVLFILEEKMGATRRTFLTDLARKKGFRVENELTDEVTHIVAENLSRSEVLAWLKEHKMEKTKQFELLDISWLIESMKVGKPVDTKGKYQLAESVEVSANPDPTEGRVNELPPTMKTVSPYACQRRTTLNNRNQRFTDSLDILRENYEFKRNDDTALEFRRAISVLKSLPFEVRSLKDTEGLPWISDEVKGIMEEIISVGESREVQAVLNDEWYQSFHAFTSVFGVGVKTADKWYRMGLRTLEDVRSSKTLKLTPMQKVGLLYYEDLARGVTRAEADAIWLLVQDAVATFDPDAIVEIVGGFRRGKPQGHDVDLLISSPGAEREQEDQLLQKVMNLWKKQGLLLYGRLYWSQWEDGGSPSGKADEGDAEAKCFLILKLYDHLVRKSKRNMPTGSNMGESKPWKAIRVDLLRCPYGSFAFAMLQWTGSRMFRRDLRWYATEEKNMMLDNHSLYDMTKGIFLPAKSEEEIFEHLGLEYLEPFERNA

SEQ ID NO: 3617 - DNA, 1587 bp, synthetic construct
  misc_feature 1..1587: note = Variant of terminal deoxynucleotidyltransferase
  source 1..1587: mol_type = other DNA
atgcaccatcatcatcatcatggcggtagcggcagccacggcattcgtaccatcgattcggacttcgggaagaaacagcagaaaaaaggcgataaccacgatagttccgccacttatgaaatcaaatttcacgagtttgtgctgttcattctcgaagaaaaaatgggtgcgacgcgtcgtacttttctgacagatttagcccgcaagaaagggttccgcgtcgagaatgaactgaccgacgaagttacccacatcgtggcagaaaatctgtcacgctctgaagtattggcttggctgaaagaacacaagatggagaagaccaagcaattcgaactgctggatattagctggcttatcgaaagcatgaaagttggtaaaccggtggacaccaaggggaaataccagttggcggaatcggttgaggtgagtgcgaacccagatccgacagaaggtcgtgtaaacgagctgcctcctactatgaaaaccgtttctccgtatgcgtgtcaacgccgcaccaccctgaacaaccgtaatcaacgttttacggactcgctggacattcttcgtgaaaattacgagctgaaacgcaacgatgatactgcgctggaatttcgtcgtgctatctccgtgctgaaaagccttccgtttgaggtacgtagcctgaaagacacggaaggattgccctggatcggtgatgaagtcaaagggattatggaagaaatcatcgaagtcggggagtcgaaggaagtgcaggccgtgctcaatgatgagtggtatcaaagcttccacgcatttacgagtgtctttggagtgggggtgaagacagcagacaagtggtaccgtatgggtctgcgcaccctcgaggatgttcgttccagcaagaccctgaagttgaccccgatgcagaaagtaggtctgctgtattatgaagatcttgctcgcggcgttacgcgtgccgaagctgacgcgatttggctgctggttcaggatgcagtcgcaactttcgacccggatgcgatcgtggagattgtcggtggatttcgtcgtgggaaacctcagggtcacgacgttgatctgcttatcagttctccgggagctgagaaagagcaagaagaccaactcctgcagaaagtgatgaatctgtggaagaaacaagggttgttgctgtacggtcgtctggagtggactcagtgggaagatgggggttcgccttccggtaaggctgacgagggtgacgcggaggcgaaatgctttctgatcctcaaactttatgatcatctggtgcgtaaaagtaaacgcaatatgccgactggttcgaacatgggcgagtccaaaccgtggaaagcaattcgcgtagatctgctgcgttgcccctatggcagttttgcgtttgcgatgttgcagtggaccggaagccgcatgttccgtcgtgatctgcgttggtacgccactgacgagaagaacatgatgctggacaatcattcgctgtatgacctgaccaaaggcatcttcctccctgctaaatcggaagaggaaattttcgaacatctggggcttgaatacctggaaccgttcgaacgtaacgca

SEQ ID NO: 3618 - protein, 529 aa, synthetic construct
  REGION 1..529: note = Variant of terminal deoxynucleotidyltransferase
MHHHHHHGGSGSHGIRTIDSDFGKKQQKKGDNHDSSATYEIKFHEFVLFILEEKMGATRRTFLTDLARKKGFRVENELTDEVTHIVAENLSRSEVLAWLKEHKMEKTKQFELLDISWLIESMKVGKPVDTKGKYQLAESVEVSANPDPTEGRVNELPPTMKTVSPYACQRRTTLNNRNQRFTDSLDILRENYELKRNDDTALEFRRAISVLKSLPFEVRSLKDTEGLPWIGDEVKGIMEEIIEVGESKEVQAVLNDEWYQSFHAFTSVFGVGVKTADKWYRMGLRTLEDVRSSKTLKLTPMQKVGLLYYEDLARGVTRAEADAIWLLVQDAVATFDPDAIVEIVGGFRRGKPQGHDVDLLISSPGAEKEQEDQLLQKVMNLWKKQGLLLYGRLEWTQWEDGGSPSGKADEGDAEAKCFLILKLYDHLVRKSKRNMPTGSNMGESKPWKAIRVDLLRCPYGSFAFAMLQWTGSRMFRRDLRWYATDEKNMMLDNHSLYDLTKGIFLPAKSEEEIFEHLGLEYLEPFERNA

SEQ ID NO: 3619 - DNA, 1587 bp, synthetic construct
  misc_feature 1..1587: note = Variant of terminal deoxynucleotidyltransferase
  source 1..1587: mol_type = other DNA
atgcaccatcatcatcatcatggcggtagcggcagccacggcattcgtaccatcgattcggacttcgggaagaaacagcagaaaaaaggcgataaccacgatagttccgccacttatgaaatcaaatttcacgagtttgtgctgttcattctcgaagaaaaaatgggtgcgacgcgtcgtacttttctgacagatttagcccgcaagaaagggttccgcgtcgagaatgaactgaccgacgaagttacccacatcgtggcagaaaatctgtcacgctctgaagtattggcttggctgaaagaacacaagatggagaagaccaagcaattcgaactgctggatattagctggcttatcgaaagcatgaaagttggtaaaccggtggacaccaaggggaaataccagttggcggaatcggttgaggtgagtgcgaacccagatccgacagaaggtcgtgtaaacgagctgcctcctactatgaaaaccgtttctccgtatgcgtgtcaacgccgcaccaccctgaacaaccgtaatcaacgttttacggactcgctggacattcttcgtgaaaattacgagttcaaacgcaacgatgatactgcgctggaatttcgtcgtgctatctccgtgctgaaaagccttccgtttgaggtacgtagcctgaaagacacggaaggattgccctggatcggtgatgaagtcaaagggattatggaagaaatcatctcggtcggggagtcgaaggaagtgcaggccgtgctcaatgatgagtggtatcaaagcttccacgcatttacgagtgtctttggagtgggggtgaagacagcagacaagtggtaccgtatgggtctgcgcaccctcgaggatgttcgttccagcaagaccctgaagttgaccccgatgcagaaagtaggtctgctgtattatgaagatcttgctcgcggcgttacgcgtgccgaagctgacgcgatttggctgctggttcaggatgcagtcgcaactttcgacccggatgcgatcgtggagattgtcggtggatttcgtcgtgggaaacctcagggtcacgacgttgatctgcttatcagttctccgggcgtggagcgtgagcaagaagaccaactcctgcagaaagtgatgaatctgtggaagaaacaagggttgttgctgtacggtcgtctgtactggagtcagtgggaagatgggggttcgccttccggtaaggctgacgagggtgacgcggaggcgaaatgctttctgatcctcaaactttatgatcatctggtgcgtaaaagtaaacgcaatatgccgactggttcgaacatgggcgagtccaaaccgtggaaagcaattcgcgtagatctgctgcgttgcccctatggcagttttgcgtttgcgatgttgcagtggaccggaagccgcatgttccgtcgtgatctgcgttggtacgccactgacgagaagaacatgatgctggacaatcattcgctgtatgacctgaccaaaggcatcttcctccctgctaaatcggaagaggaaattttcgaacatctggggcttgaatacctggaaccgttcgaacgtaacgca

SEQ ID NO: 3620 - protein, 529 aa, synthetic construct
  REGION 1..529: note = Variant of terminal deoxynucleotidyltransferase
MHHHHHHGGSGSHGIRTIDSDFGKKQQKKGDNHDSSATYEIKFHEFVLFILEEKMGATRRTFLTDLARKKGFRVENELTDEVTHIVAENLSRSEVLAWLKEHKMEKTKQFELLDISWLIESMKVGKPVDTKGKYQLAESVEVSANPDPTEGRVNELPPTMKTVSPYACQRRTTLNNRNQRFTDSLDILRENYEFKRNDDTALEFRRAISVLKSLPFEVRSLKDTEGLPWIGDEVKGIMEEIISVGESKEVQAVLNDEWYQSFHAFTSVFGVGVKTADKWYRMGLRTLEDVRSSKTLKLTPMQKVGLLYYEDLARGVTRAEADAIWLLVQDAVATFDPDAIVEIVGGFRRGKPQGHDVDLLISSPGVEREQEDQLLQKVMNLWKKQGLLLYGRLYWSQWEDGGSPSGKADEGDAEAKCFLILKLYDHLVRKSKRNMPTGSNMGESKPWKAIRVDLLRCPYGSFAFAMLQWTGSRMFRRDLRWYATDEKNMMLDNHSLYDLTKGIFLPAKSEEEIFEHLGLEYLEPFERNA

SEQ ID NO: 3621 - DNA, 1587 bp, synthetic construct
  misc_feature 1..1587: note = Variant of terminal deoxynucleotidyltransferase
  source 1..1587: mol_type = other DNA
atgcaccatcatcatcatcatggcggtagcggcagccacggcattcgtaccatcgattcggacttcgggaagaaacagcagaaaaaaggcgataaccacgatagttccgccacttatgaaatcaaatttcacgagtttgtgctgttcattctcgaagaaaaaatgggtgcgacgcgtcgtacttttctgacagatttagcccgcaagaaagggttccgcgtcgagaatgaactgaccgacgaagttacccacatcgtggcagaaaatctgtcacgctctgaagtattggcttggctgaaagaacacaagatggagaagaccaagcaattcgaactgctggatattagctggcttatcgaaagcatgaaagttggtaaaccggtggacaccaaggggaaataccagttggcggaatcggttgaggtgagtgcgaacccagatccgacagaaggtcgtgtaaacgagctgcctcctactatgaaaaccgtttctccgtatgcgtgtcaacgccgcaccaccctgaacaaccgtaatcaacgttttacggactcgctggacattcttcgtgaaaattacgagttcaaacgcaacgatgatactgcgctggaatttcgtcgtgctatctccgtgctgaaaagccttccgtttgaggtacgtagcctgaaagacacggaaggattgccctggatcggtgatgaagtcaaagggattatggaagaaatcatcgaagtcggggagtcgcgtgaagtgcaggccgtgctcaatgatgagtggtatcaaagcttccacgcatttacgagtgtctttggagtgggggtgaagacagcagacaagtggtaccgtatgggtctgcgcaccctcgaggatgttcgttccagcaagaccctgaagttgaccccgatgcagaaagtaggtctgctgtattatgaagatcttgctcgcggcgttacgcgtgccgaagctgacgcgatttggctgctggttcaggatgcagtcgcaactttcgacccggatgcgatcgtggagattgtcggtggatttcgtcgtgggaaacctcagggtcacgacgttgatctgcttatcagttctccgggcgtggagcgtgagcaagaagaccaactcctgcagaaagtgatgaatctgtggaagaaacaagggttgttgctgtacggtcgtctgtactggactcagtgggaagatgggggttcgccttccggtaaggctgacgagggtgacgcggaggcgaaatgctttctgatcctcaaactttatgatcatctggtgcgtaaaagtaaacgcaatatgccgactggttcgaacatgggcgagtccaaaccgtggaaagcaattcgcgtagatctgctgcgttgcccctatggcagttttgcgtttgcgatgttgcagtggaccggaagccgcatgttccgtcgtgatctgcgttggtacgccctggacgagaagaacatgatgctggacaatcattcgctgtatgacctgaccaaaggcatcttcctccctgctaaatcggaagaggaaattttcgaacatctggggcttgaatacctggaaccgttcgaacgtaacgca

SEQ ID NO: 3622 - protein, 529 aa, synthetic construct
  REGION 1..529: note = Variant of terminal deoxynucleotidyltransferase
MHHHHHHGGSGSHGIRTIDSDFGKKQQKKGDNHDSSATYEIKFHEFVLFILEEKMGATRRTFLTDLARKKGFRVENELTDEVTHIVAENLSRSEVLAWLKEHKMEKTKQFELLDISWLIESMKVGKPVDTKGKYQLAESVEVSANPDPTEGRVNELPPTMKTVSPYACQRRTTLNNRNQRFTDSLDILRENYEFKRNDDTALEFRRAISVLKSLPFEVRSLKDTEGLPWIGDEVKGIMEEIIEVGESREVQAVLNDEWYQSFHAFTSVFGVGVKTADKWYRMGLRTLEDVRSSKTLKLTPMQKVGLLYYEDLARGVTRAEADAIWLLVQDAVATFDPDAIVEIVGGFRRGKPQGHDVDLLISSPGVEREQEDQLLQKVMNLWKKQGLLLYGRLYWTQWEDGGSPSGKADEGDAEAKCFLILKLYDHLVRKSKRNMPTGSNMGESKPWKAIRVDLLRCPYGSFAFAMLQWTGSRMFRRDLRWYALDEKNMMLDNHSLYDLTKGIFLPAKSEEEIFEHLGLEYLEPFERNA

SEQ ID NO: 3623 - DNA, 1587 bp, synthetic construct
  misc_feature 1..1587: note = Variant of terminal deoxynucleotidyltransferase
  source 1..1587: mol_type = other DNA
atgcaccatcatcatcatcatggcggtagcggcagccacggcattcgtaccatcgattcggacttcgggaagaaacagcagaaaaaaggcgataaccacgatagttccgccacttatgaaatcaaatttcacgagtttgtgctgttcattctcgaagaaaaaatgggtgcgacgcgtcgtacttttctgacagatttagcccgcaagaaagggttccgcgtcgagaatgaactgaccgacgaagttacccacatcgtggcagaaaatctgtcacgctctgaagtattggcttggctgaaagaacacaagatggagaagaccaagcaattcgaactgctggatattagctggcttatcgaaagcatgaaagttggtaaaccggtggacaccaaggggaaataccagttggcggaatcggttgaggtgagtgcgaacccagatccgacagaaggtcgtgtaaacgagctgcctcctactatgaaaaccgtttctccgtatgcgtgtcaacgccgcaccaccctgaacaaccgtaatcaacgttttacggactcgctggacattcttcgtgaaaattacgagttcaaacgcaacgatgatactgcgctggaatttcgtcgtgctatctccgtgctgaaaagccttccgtttgaggtacgtagcctgaaagacacggaaggattgccctggatcggtgatgaagtcaaagggattatggaagaaatcatcgaagtcggggagtcgcgtgaagtgcaggccgtgctcaatgatgagtggtatcaaagcttccacgcatttacgagtgtctttggagtgggggtgaagacagcagacaagtggtaccgtatgggtctgcgcaccctcgaggatgttcgttccagcaagaccctgaagttgaccccgatgcagaaagtaggtctgctgtattatgaagatcttgctcgcggcgttacgcgtgccgaagctgacgcgatttggctgctggttcaggatgcagtcgcaactttcgacccggatgcgatcgtggagattgtcggtggatttcgtcgtgggaaacctcagggtcacgacgttgatctgcttatcagttctccgggcgcggagaaggagcaagaagaccaactcctgcagaaagtgatgaatctgtggaagaaacaagggttgttgctgtacggtcgtctgtactggactcagtgggaagatgggggttcgccttccggtaaggctgacgagggtgacgcggaggcgaaatgctttctgatcctcaaactttatgatcatctggtgcgtaaaagtaaacgcaatatgccgactggttcgaacatgggcgagtccaaaccgtggaaagcaattcgcgtagatctgctgcgttgcccctatggcagttttgcgtttgcgatgttgcagtggaccggaagccgcatgttccgtcgtgatctgcgttggtacgccactgaagagaagaacatgatgctggacaatcattcgctgtatgacctgaccaaaggcatcttcctccctgctaaatcggaagaggaaattttcgaacatctggggcttgaatacctggaaccgttcgaacgtaacgca

SEQ ID NO: 3624 - protein, 529 aa, synthetic construct
  REGION 1..529: note = Variant of terminal deoxynucleotidyltransferase
MHHHHHHGGSGSHGIRTIDSDFGKKQQKKGDNHDSSATYEIKFHEFVLFILEEKMGATRRTFLTDLARKKGFRVENELTDEVTHIVAENLSRSEVLAWLKEHKMEKTKQFELLDISWLIESMKVGKPVDTKGKYQLAESVEVSANPDPTEGRVNELPPTMKTVSPYACQRRTTLNNRNQRFTDSLDILRENYEFKRNDDTALEFRRAISVLKSLPFEVRSLKDTEGLPWIGDEVKGIMEEIIEVGESREVQAVLNDEWYQSFHAFTSVFGVGVKTADKWYRMGLRTLEDVRSSKTLKLTPMQKVGLLYYEDLARGVTRAEADAIWLLVQDAVATFDPDAIVEIVGGFRRGKPQGHDVDLLISSPGAEKEQEDQLLQKVMNLWKKQGLLLYGRLYWTQWEDGGSPSGKADEGDAEAKCFLILKLYDHLVRKSKRNMPTGSNMGESKPWKAIRVDLLRCPYGSFAFAMLQWTGSRMFRRDLRWYATEEKNMMLDNHSLYDLTKGIFLPAKSEEEIFEHLGLEYLEPFERNA

SEQ ID NO: 3625 - DNA, 1587 bp, synthetic construct
  misc_feature 1..1587: note = Variant of terminal deoxynucleotidyltransferase
  source 1..1587: mol_type = other DNA
atgcaccatcatcatcatcatggcggtagcggcagccacggcattcgtaccatcgattcggacttcgggaagaaacagcagaaaaaaggcgataaccacgatagttccgccacttatgaaatcaaatttcacgagtttgtgctgttcattctcgaagaaaaaatgggtgcgacgcgtcgtacttttctgacagatttagcccgcaagaaagggttccgcgtcgagaatgaactgaccgacgaagttacccacatcgtggcagaaaatctgtcacgctctgaagtattggcttggctgaaagaacacaagatggagaagaccaagcaattcgaactgctggatattagctggcttatcgaaagcatgaaagttggtaaaccggtggacaccaaggggaaataccagttggcggaatcggttgaggtgagtgcgaacccagatccgacagaaggtcgtgtaaacgagctgcctcctactatgaaaaccgtttctccgtatgcgtgtcaacgccgcaccaccctgaacaaccgtaatcaacgttttacggactcgctggagattcttcgtgaaaattacgagttcaaacgcaacgatgatactgcgctggaatttcgtcgtgctatctccgtgctgaaaagccttccgtttgaggtacgtagcctgaaagacacggaaggattgccctggatcggtgatgaagtcaaagggattatggaagaaatcatcgaagtcggggagtcgcgtgaagtgcaggccgtgctcaatgatgagtggtatcaaagcttccacgcatttacgagtgtctttggagtgggggtgaagacagcagacaagtggtaccgtatgggtctgcgcaccctcgaggatgttcgttccagcaagaccctgaagttgaccccgatgcagaaagtaggtctgctgtattatgaagatcttgctcgcggcgttacgcgtgccgaagctgacgcgatttggctgctggttcaggatgcagtcgcaactttcgacccggatgcgatcgtggagattgtcggtggatttcgtcgtgggaaacctcagggtcacgacgttgatctgcttatcagttctccgggagctgagaaagagcaagaagaccaactcctgcagaaagtgatgaatctgtggaagaaacaagggttgttgctgtacggtcgtctgtactggactcagtgggaagatgggggttcgccttccggtaaggctgacgagggtgacgcggaggcgaaatgctttctgatcctcaaactttatgatcatctggtgcgtaaaagtaaacgcaatatgccgactggttcgaacatgggcgagtccaaaccgtggaaagcaattcgcgtagatctgctgcgttgcccctatggcagttttgcgtttgcgatgttgcagtggaccggaagccgcatgttccgtcgtgatctgcgttggtacgccactgacgagaagaacatgatgctggacaatcattcgctgtatgacctgaccaaaggtatcttcctccctgctaaatcggaagaggaaattttcgaacatctggggcttgaatacctggaaccgttcgaacgtaacgca

SEQ ID NO: 3626 - protein, 529 aa, synthetic construct
  REGION 1..529: note = Variant of terminal deoxynucleotidyltransferase
MHHHHHHGGSGSHGIRTIDSDFGKKQQKKGDNHDSSATYEIKFHEFVLFILEEKMGATRRTFLTDLARKKGFRVENELTDEVTHIVAENLSRSEVLAWLKEHKMEKTKQFELLDISWLIESMKVGKPVDTKGKYQLAESVEVSANPDPTEGRVNELPPTMKTVSPYACQRRTTLNNRNQRFTDSLEILRENYEFKRNDDTALEFRRAISVLKSLPFEVRSLKDTEGLPWIGDEVKGIMEEIIEVGESREVQAVLNDEWYQSFHAFTSVFGVGVKTADKWYRMGLRTLEDVRSSKTLKLTPMQKVGLLYYEDLARGVTRAEADAIWLLVQDAVATFDPDAIVEIVGGFRRGKPQGHDVDLLISSPGAEKEQEDQLLQKVMNLWKKQGLLLYGRLYWTQWEDGGSPSGKADEGDAEAKCFLILKLYDHLVRKSKRNMPTGSNMGESKPWKAIRVDLLRCPYGSFAFAMLQWTGSRMFRRDLRWYATDEKNMMLDNHSLYDLTKGIFLPAKSEEEIFEHLGLEYLEPFERNA

SEQ ID NO: 3627 - DNA, 1587 bp, synthetic construct
  misc_feature 1..1587: note = Variant of terminal deoxynucleotidyltransferase
  source 1..1587: mol_type = other DNA
atgcaccatcatcatcatcatggcggtagcggcagccacggcattcgtaccatcgattcggacttcgggaagaaacagcagaaaaaaggcgataaccacgatagttccgccacttatgaaatcaaatttcacgagtttgtgctgttcattctcgaagaaaaaatgggtgcgacgcgtcgtacttttctgacagatttagcccgcaagaaagggttccgcgtcgagaatgaactgaccgacgaagttacccacatcgtggcagaaaatctgtcacgctctgaagtattggcttggctgaaagaacacaagatggagaagaccaagcaattcgaactgctggatattagctggcttatcgaaagcatgaaagttggtaaaccggtggacaccaaggggaaataccagttggcggaatcggttgaggtgagtgcgaacccagatccgacagaaggtcgtgtaaacgagctgcctcctactatgaaaaccgtttctccgtatgcgtgtcaacgccgcaccaccctgaacaaccgtaatcaacgttttacggactcgctggagattcttcgtgaaaattacgagttcaaacgcaacgatgatactgcgctggaatttcgtcgtgctatctccgtgctgaaaagccttccgtttgaggtacgtagcctgaaagacacggaaggattgccctggatcggtgatgaagtcaaagggattatggaagaaatcatcgaagtcggggagtcgcgtgaagtgcaggccgtgctcaatgatgagtggtatcaaagcttccacgcatttacgagtgtctttggagtgggggtgaagacagcagacaagtggtaccgtatgggtctgcgcaccctcgaggatgttcgttccagcaagaccctgaagttgaccccgatgcagaaagtaggtctgctgtattatgaagatcttgctcgcggcgttacgcgtgccgaagctgacgcgatttggctgctggttcaggatgcagtcgcaactttcgacccggatgcgatcgtggagattgtcggtggatttcgtcgtgggaaacctcagggtcacgacgttgatctgcttatcagttctccgggagctgagaaagagcaagaagaccaactcctgcagaaagtgatgaatctgtggaagaaacaagggttgttgctgtacggtcgtctgtactggagtcagtgggaagatgggggttcgccttccggtaaggctgacgagggtgacgcggaggcgaaatgctttctgatcctcaaactttatgatcatctggtgcgtaaaagtaaacgcaatatgccgactggttcgaacatgggcgagtccaaaccgtggaaagcaattcgcgtagatctgctgcgttgcccctatggcagttttgcgtttgcgatgttgcagtggaccggaagccgcatgttccgtcgtgatctgcgttggtacgccactgacgagaagaacatgatgctggacaatcattcgctgtatgacatgaccaaaggtatcttcctccctgctaaatcggaagaggaaattttcgaacatctggggcttgaatacctggaaccgttcgaacgtaacgca

SEQ ID NO: 3628 - protein, 529 aa, synthetic construct
  REGION 1..529: note = Variant of terminal deoxynucleotidyltransferase
MHHHHHHGGSGSHGIRTIDSDFGKKQQKKGDNHDSSATYEIKFHEFVLFILEEKMGATRRTFLTDLARKKGFRVENELTDEVTHIVAENLSRSEVLAWLKEHKMEKTKQFELLDISWLIESMKVGKPVDTKGKYQLAESVEVSANPDPTEGRVNELPPTMKTVSPYACQRRTTLNNRNQRFTDSLEILRENYEFKRNDDTALEFRRAISVLKSLPFEVRSLKDTEGLPWIGDEVKGIMEEIIEVGESREVQAVLNDEWYQSFHAFTSVFGVGVKTADKWYRMGLRTLEDVRSSKTLKLTPMQKVGLLYYEDLARGVTRAEADAIWLLVQDAVATFDPDAIVEIVGGFRRGKPQGHDVDLLISSPGAEKEQEDQLLQKVMNLWKKQGLLLYGRLYWSQWEDGGSPSGKADEGDAEAKCFLILKLYDHLVRKSKRNMPTGSNMGESKPWKAIRVDLLRCPYGSFAFAMLQWTGSRMFRRDLRWYATDEKNMMLDNHSLYDMTKGIFLPAKSEEEIFEHLGLEYLEPFERNA

SEQ ID NO: 3629 - DNA, 1587 bp, synthetic construct
  misc_feature 1..1587: note = Variant of terminal deoxynucleotidyltransferase
  source 1..1587: mol_type = other DNA
atgcaccatcatcatcatcatggcggtagcggcagccacggcattcgtaccatcgattcggacttcgggaagaaacagcagaaaaaaggcgataaccacgatagttccgccacttatgaaatcaaatttcacgagtttgtgctgttcattctcgaagaaaaaatgggtgcgacgcgtcgtacttttctgacagatttagcccgcaagaaagggttccgcgtcgagaatgaactgaccgacgaagttacccacatcgtggcagaaaatctgtcacgctctgaagtattggcttggctgaaagaacacaagatggagaagaccaagcaattcgaactgctggatattagctggcttatcgaaagcatgaaagttggtaaaccggtggacaccaaggggaaataccagttggcggaatcggttgaggtgagtgcgaacccagatccgacagaaggtcgtgtaaacgagctgcctcctactatgaaaaccgtttctccgtatgcgtgtcaacgccgcaccaccctgaacaaccgtaatcaacgttttacggactcgctggacattcttcgtgaaaattacgagttcaaacgcaacgatgatactgcgctggaatttcgtcgtgctatctccgtgctgaaaagccttccgtttgaggtacgtagcctgaaagacacggaaggattgccctggatcggtgatgaagtcaaagggattatggaagaaatcatcgaagtcggggagtcgcgtgaagtgcaggccgtgctcaatgatgagtggtatcaaagcttccacgcatttacgagtgtctttggagtgggggtgaagacagcagacaagtggtaccgtatgggtctgcgcaccctcgaggatgttcgttccagcaagaccctgaagttgaccccgatgcagaaagtaggtctgctgtattatgaagatcttgctcgcggcgttacgcgtgccgaagctgacgcgatttggctgctggttcaggatgcagtcgcaactttcgacccggatgcgatcgtggagattgtcggtggatttcgtcgtgggaaacctcagggtcacgacgttgatctgcttatcagttctccggccgtggagaaggagcaagaagaccaactcctgcagaaagtgatgaatctgtggaagaaacaagggttgttgctgtacggtcgtctgtactggagtcagtgggaagatgggggttcgccttccggtaaggctgacgagggtgacgcggaggcgaaatgctttctgatcctcaaactttatgatcatctggtgcgtaaaagtaaacgcaatatgccgactggttcgaacatgggcgagtccaaaccgtggaaagcaattcgcgtagatctgctgcgttgcccctatggcagttttgcgtttgcgatgttgcagtggaccggaagccgcatgttccgtcgtgatctgcgttggtacgccactgaagagaagaacatgatgctggacaatcattcgctgtatgacctgaccaaaggcatcttcctccctgctaaatcggaagaggaaattttcgaacatctggggcttgaatacctggaaccgttcgaacgtaacgca

SEQ ID NO: 3630 - protein, 529 aa, synthetic construct
  REGION 1..529: note = Variant of terminal deoxynucleotidyltransferase
MHHHHHHGGSGSHGIRTIDSDFGKKQQKKGDNHDSSATYEIKFHEFVLFILEEKMGATRRTFLTDLARKKGFRVENELTDEVTHIVAENLSRSEVLAWLKEHKMEKTKQFELLDISWLIESMKVGKPVDTKGKYQLAESVEVSANPDPTEGRVNELPPTMKTVSPYACQRRTTLNNRNQRFTDSLDILRENYEFKRNDDTALEFRRAISVLKSLPFEVRSLKDTEGLPWIGDEVKGIMEEIIEVGESREVQAVLNDEWYQSFHAFTSVFGVGVKTADKWYRMGLRTLEDVRSSKTLKLTPMQKVGLLYYEDLARGVTRAEADAIWLLVQDAVATFDPDAIVEIVGGFRRGKPQGHDVDLLISSPAVEKEQEDQLLQKVMNLWKKQGLLLYGRLYWSQWEDGGSPSGKADEGDAEAKCFLILKLYDHLVRKSKRNMPTGSNMGESKPWKAIRVDLLRCPYGSFAFAMLQWTGSRMFRRDLRWYATEEKNMMLDNHSLYDLTKGIFLPAKSEEEIFEHLGLEYLEPFERNA

SEQ ID NO: 3631 - DNA, 1587 bp, synthetic construct
  misc_feature 1..1587: note = Variant of terminal deoxynucleotidyltransferase
  source 1..1587: mol_type = other DNA
atgcaccatcatcatcatcatggcggtagcggcagccacggcattcgtaccatcgattcggacttcgggaagaaacagcagaaaaaaggcgataaccacgatagttccgccacttatgaaatcaaatttcacgagtttgtgctgttcattctcgaagaaaaaatgggtgcgacgcgtcgtacttttctgacagatttagcccgcaagaaagggttccgcgtcgagaatgaactgaccgacgaagttacccacatcgtggcagaaaatctgtcacgctctgaagtattggcttggctgaaagaacacaagatggagaagaccaagcaattcgaactgctggatattagctggcttatcgaaagcatgaaagttggtaaaccggtggacaccaaggggaaataccagttggcggaatcggttgaggtgagtgcgaacccagatccgacagaaggtcgtgtaaacgagctgcctcctactatgaaaaccgtttctccgtatgcgtgtcaacgccgcaccaccctgaacaaccgtaatcaacgttttacggactcgctggacattcttcgtgaaaattacgagttcaaacgcaacgatgatactgcgctggaatttcgtcgtgctatctccgtgctgaaaagccttccgtttgaggtacgtagcctgaaagacacggaaggattgccctggatcggtgatgaagtcaaagggattatggaagaaatcatcgaagtcggggagtcgcgtgaagtgcaggccgtgctcaatgatgagtggtatcaaagcttccacgcatttacgagtgtctttggagtgggggtgaagacagcagacaagtggtaccgtatgggtctgcgcaccctcgaggatgttcgttccagcaagaccctgaagttgaccccgatgcagaaagtaggtctgctgtattatgaagatcttgctcgcggcgttacgcgtgccgaagctgacgcgatttggctgctggttcaggatgcagtcgcaactttcgacccggatgcgatcgtggagattgtcggtggatttcgtcgtgggaaacctcagggtcacgacgttgatctgcttatcagttctccgggcgtggagcgtgagcaagaagaccaactcctgcagaaagtgatgaatctgtggaagaaacaagggttgttgctgtacggtcgtctgtactggactcagtgggaagatgggggttcgccttccggtaaggctgacgagggtgacgcggaggcgaaatgctttctgatcctcaaactttatgatcatctggtgcgtaaaagtaaacgcaatatgccgactggttcgaacatgggcgagtccaaaccgtggaaagcaattcgcgtagatctgctgcgttgcccctatggcagttttgcgtttgcgatgttgcagtggaccggaagccgcatgttccgtcgtgatctgcgttggtacgccctggaagagaagaacatgatgctggacaatcattcgctgtatgacctgaccaaaggcatcttcctccctgctaaatcggaagaggaaattttcgagcatctggggcttgaatacctggaaccgttcgaacgtaacgca

SEQ ID NO: 3632 - protein, 529 aa, synthetic construct
  REGION 1..529: note = Variant of terminal deoxynucleotidyltransferase
MHHHHHHGGSGSHGIRTIDSDFGKKQQKKGDNHDSSATYEIKFHEFVLFILEEKMGATRRTFLTDLARKKGFRVENELTDEVTHIVAENLSRSEVLAWLKEHKMEKTKQFELLDISWLIESMKVGKPVDTKGKYQLAESVEVSANPDPTEGRVNELPPTMKTVSPYACQRRTTLNNRNQRFTDSLDILRENYEFKRNDDTALEFRRAISVLKSLPFEVRSLKDTEGLPWIGDEVKGIMEEIIEVGESREVQAVLNDEWYQSFHAFTSVFGVGVKTADKWYRMGLRTLEDVRSSKTLKLTPMQKVGLLYYEDLARGVTRAEADAIWLLVQDAVATFDPDAIVEIVGGFRRGKPQGHDVDLLISSPGVEREQEDQLLQKVMNLWKKQGLLLYGRLYWTQWEDGGSPSGKADEGDAEAKCFLILKLYDHLVRKSKRNMPTGSNMGESKPWKAIRVDLLRCPYGSFAFAMLQWTGSRMFRRDLRWYALEEKNMMLDNHSLYDLTKGIFLPAKSEEEIFEHLGLEYLEPFERNA

SEQ ID NO: 3633 - DNA, 1587 bp, synthetic construct
  misc_feature 1..1587: note = Variant of terminal deoxynucleotidyltransferase
  source 1..1587: mol_type = other DNA
atgcaccatcatcatcatcatggcggtagcggcagccacggcattcgtaccatcgattcggacttcgggaagaaacagcagaaaaaaggcgataaccacgatagttccgccacttatgaaatcaaatttcacgagtttgtgctgttcattctcgaagaaaaaatgggtgcgacgcgtcgtacttttctgacagatttagcccgcaagaaagggttccgcgtcgagaatgaactgaccgacgaagttacccacatcgtggcagaaaatctgtcacgctctgaagtattggcttggctgaaagaacacaagatggagaagaccaagcaattcgaactgctggatattagctggcttatcgaaagcatgaaagttggtaaaccggtggacaccaaggggaaataccagttggcggaatcggttgaggtgagtgcgaacccagatccgacagaaggtcgtgtaaacgagctgcctcctactatgaaaaccgtttctccgtatgcgtgtcaacgccgcaccaccctgaacaaccgtaatcaacgttttacggactcgctggagattcttcgtgaaaattacgagttcaaacgcaacgatgatactgcgctggaatttcgtcgtgctatctccgtgctgaaaagccttccgtttgaggtacgtagcctgaaagacacggaaggattgccctggatcggtgatgaagtcaaagggattatggaagaaatcatctcggtcggggagtcgcgtgaagtgcaggccgtgctcaatgatgagtggtatcaaagcttccacgcatttacgagtgtctttggagtgggggtgaagacagcagacaagtggtaccgtatgggtctgcgcaccctcgaggatgttcgttccagcaagaccctgaagttgaccccgatgcagaaagtaggtctgctgtattatgaagatcttgctcgcggcgttacgcgtgccgaagctgacgcgatttggctgctggttcaggatgcagtcgcaactttcgacccggatgcgatcgtggagattgtcggtggatttcgtcgtgggaaacctcagggtcacgacgttgatctgcttatcagttctccgggagctgagaaagagcaagaagaccaactcctgcagaaagtgatgaatctgtggaagaaacaagggttgttgctgtacggtcgtctggagtggagtcagtgggaagatgggggttcgccttccggtaaggctgacgagggtgacgcggaggcgaaatgctttctgatcctcaaactttatgatcatctggtgcgtaaaagtaaacgcaatatgccgactggttcgaacatgggcgagtccaaaccgtggaaagcaattcgcgtagatctgctgcgttgcccctatggcagttttgcgtttgcgatgttgcagtggaccggaagccgcatgttccgtcgtgatctgcgttggtacgccctggacgagaagaacatgatgctggacaatcattcgctgtatgacctgaccaaaggcatcttcctccctgctaaatcggaagaggaaattttcgaacatctggggcttgaatacctggaaccgttcgaacgtaacgca

SEQ ID NO: 3634 - protein, 529 aa, synthetic construct
  REGION 1..529: note = Variant of terminal deoxynucleotidyltransferase
MHHHHHHGGSGSHGIRTIDSDFGKKQQKKGDNHDSSATYEIKFHEFVLFILEEKMGATRRTFLTDLARKKGFRVENELTDEVTHIVAENLSRSEVLAWLKEHKMEKTKQFELLDISWLIESMKVGKPVDTKGKYQLAESVEVSANPDPTEGRVNELPPTMKTVSPYACQRRTTLNNRNQRFTDSLEILRENYEFKRNDDTALEFRRAISVLKSLPFEVRSLKDTEGLPWIGDEVKGIMEEIISVGESREVQAVLNDEWYQSFHAFTSVFGVGVKTADKWYRMGLRTLEDVRSSKTLKLTPMQKVGLLYYEDLARGVTRAEADAIWLLVQDAVATFDPDAIVEIVGGFRRGKPQGHDVDLLISSPGAEKEQEDQLLQKVMNLWKKQGLLLYGRLEWSQWEDGGSPSGKADEGDAEAKCFLILKLYDHLVRKSKRNMPTGSNMGESKPWKAIRVDLLRCPYGSFAFAMLQWTGSRMFRRDLRWYALDEKNMMLDNHSLYDLTKGIFLPAKSEEEIFEHLGLEYLEPFERNA

SEQ ID NO: 3635 - DNA, 1587 bp, synthetic construct
  misc_feature 1..1587: note = Variant of terminal deoxynucleotidyltransferase
  source 1..1587: mol_type = other DNA
atgcaccatcatcatcatcatggcggtagcggcagccacggcattcgtaccatcgattcggacttcgggaagaaacagcagaaaaaaggcgataaccacgatagttccgccacttatgaaatcaaatttcacgagtttgtgctgttcattctcgaagaaaaaatgggtgcgacgcgtcgtacttttctgacagatttagcccgcaagaaagggttccgcgtcgagaatgaactgaccgacgaagttacccacatcgtggcagaaaatctgtcacgctctgaagtattggcttggctgaaagaacacaagatggagaagaccaagcaattcgaactgctggatattagctggcttatcgaaagcatgaaagttggtaaaccggtggacaccaaggggaaataccagttggcggaatcggttgaggtgagtgcgaacccagatccgacagaaggtcgtgtaaacgagctgcctcctactatgaaaaccgtttctccgtatgcgtgtcaacgccgcaccaccctgaacaaccgtaatcaacgttttacggactcgctggaaattcttcgtgaaaattacgagttcaaacgcaacgatgatactgcgctggaatttcgtcgtgctatctccgtgctgaaaagccttccgtttgaggtacgtagcctgaaagacacggaaggattgccctggatcggtgatgaagtcaaagggattatggaagaaatcatcgaagtcggggagtcgcgtgaagtgcaggccgtgctcaatgatgagtggtatcaaagcttccacgcatttacgagtgtctttggagtgggggtgaagacagcagacaagtggtaccgtatgggtctgcgcaccctcgaggatgttcgttccagcaagaccctgaagttgaccccgatgcagaaagtaggtctgctgtattatgaagatcttgctcgcggcgttacgcgtgccgaagctgacgcgatttggctgctggttcaggatgcagtcgcaactttcgacccggatgcgatcgtggagattgtcggtggatttcgtcgtgggaaacctcagggtcacgacgttgatctgcttatcagttctccggccgtggagcgtgagcaagaagaccaactcctgcagaaagtgatgaatctgtggaagaaacaagggttgttgctgtacggtcgtctgtactggagtcagtgggaagatgggggttcgccttccggtaaggctgacgagggtgacgcggaggcgaaatgctttctgatcctcaaactttatgatcatctggtgcgtaaaagtaaacgcaatatgccgactggttcgaacatgggcgagtccaaaccgtggaaagcaattcgcgtagatctgctgcgttgcccctatggcagttttgcgtttgcgatgttgcagtggaccggaagccgcatgttccgtcgtgatctgcgttggtacgccactgacgagaagaacatgatgctggacaatcattcgctgtatgacctgaccaaaggcatcttcctccctgctaaatcggaagaggaaattttcgaacatctggggcttgaatacctggaaccgttcgaacgtaacgca

SEQ ID NO: 3636 - protein, 529 aa, synthetic construct
  REGION 1..529: note = Variant of terminal deoxynucleotidyltransferase
MHHHHHHGGSGSHGIRTIDSDFGKKQQKKGDNHDSSATYEIKFHEFVLFILEEKMGATRRTFLTDLARKKGFRVENELTDEVTHIVAENLSRSEVLAWLKEHKMEKTKQFELLDISWLIESMKVGKPVDTKGKYQLAESVEVSANPDPTEGRVNELPPTMKTVSPYACQRRTTLNNRNQRFTDSLEILRENYEFKRNDDTALEFRRAISVLKSLPFEVRSLKDTEGLPWIGDEVKGIMEEIIEVGESREVQAVLNDEWYQSFHAFTSVFGVGVKTADKWYRMGLRTLEDVRSSKTLKLTPMQKVGLLYYEDLARGVTRAEADAIWLLVQDAVATFDPDAIVEIVGGFRRGKPQGHDVDLLISSPAVEREQEDQLLQKVMNLWKKQGLLLYGRLYWSQWEDGGSPSGKADEGDAEAKCFLILKLYDHLVRKSKRNMPTGSNMGESKPWKAIRVDLLRCPYGSFAFAMLQWTGSRMFRRDLRWYATDEKNMMLDNHSLYDLTKGIFLPAKSEEEIFEHLGLEYLEPFERNA

SEQ ID NO: 3637 - DNA, 1587 bp, synthetic construct
  misc_feature 1..1587: note = Variant of terminal deoxynucleotidyltransferase
  source 1..1587: mol_type = other DNA
atgcaccatcatcatcatcatggcggtagcggcagccacggcattcgtaccatcgattcggacttcgggaagaaacagcagaaaaaaggcgataaccacgatagttccgccacttatgaaatcaaatttcacgagtttgtgctgttcattctcgaagaaaaaatgggtgcgacgcgtcgtacttttctgacagatttagcccgcaagaaagggttccgcgtcgagaatgaactgaccgacgaagttacccacatcgtggcagaaaatctgtcacgctctgaagtattggcttggctgaaagaacacaagatggagaagaccaagcaattcgaactgctggatattagctggcttatcgaaagcatgaaagttggtaaaccggtggacaccaaggggaaataccagttggcggaatcggttgaggtgagtgcgaacccagatccgacagaaggtcgtgtaaacgagctgcctcctactatgaaaaccgtttctccgtatgcgtgtcaacgccgcaccaccctgaacaaccgtaatcaacgttttacggactcgctggacattcttcgtgaaaattacgagttcaaacgcaacgatgatactgcgctggaatttcgtcgtgctatctccgtgctgaaaagccttccgtttgaggtacgtagcctgaaagacacggaaggattgccctggatcggtgatgaagtcaaagggattatggaagaaatcatcgaagtcggggagtcgaaggaagtgcaggccgtgctcaatgatgagtggtatcaaagcttccacgcatttacgagtgtctttggagtgggggtgaagacagcagacaagtggtaccgtatgggtctgcgcaccctcgaggatgttcgttccagcaagaccctgaagttgaccccgatgcagaaagtaggtctgctgtattatgaagatcttgctcgcggcgttacgcgtgccgaagctgacgcgatttggctgctggttcaggatgcagtcgcaactttcgacccggatgcgatcgtggagattgtcggtggatttcgtcgtgggaaacctcagggtcacgacgttgatctgcttatcagttctccgggagctgagaaagagcaagaagaccaactcctgcagaaagtgatgaatctgtggaagaaacaagggttgttgctgtacggtcgtctggaatggagccagtgggaagatgggggttcgccttccggtaaggctgacgagggtgacgcggaggcgaaatgctttctgatcctcaaactttatgatcatctggtgcgtaaaagtaaacgcaatatgccgactggttcgaacatgggcgagtccaaaccgtggaaagcaattcgcgtagatctgctgcgttgcccctatggcagttttgcgtttgcgatgttgcagtggaccggaagccgcatgttccgtcgtgatctgcgttggtacgccactgacgagaagaacatgatgctggacaatcattcgctgtatgacctgaccaaaggcatcttcctccctgctaaatcggaagaggaaattttcgaacatctggggcttgaatacctggaaccgttcgaacgtaacgca

SEQ ID NO: 3638 - protein, 529 aa, synthetic construct
  REGION 1..529: note = Variant of terminal deoxynucleotidyltransferase
MHHHHHHGGSGSHGIRTIDSDFGKKQQKKGDNHDSSATYEIKFHEFVLFILEEKMGATRRTFLTDLARKKGFRVENELTDEVTHIVAENLSRSEVLAWLKEHKMEKTKQFELLDISWLIESMKVGKPVDTKGKYQLAESVEVSANPDPTEGRVNELPPTMKTVSPYACQRRTTLNNRNQRFTDSLDILRENYEFKRNDDTALEFRRAISVLKSLPFEVRSLKDTEGLPWIGDEVKGIMEEIIEVGESKEVQAVLNDEWYQSFHAFTSVFGVGVKTADKWYRMGLRTLEDVRSSKTLKLTPMQKVGLLYYEDLARGVTRAEADAIWLLVQDAVATFDPDAIVEIVGGFRRGKPQGHDVDLLISSPGAEKEQEDQLLQKVMNLWKKQGLLLYGRLEWSQWEDGGSPSGKADEGDAEAKCFLILKLYDHLVRKSKRNMPTGSNMGESKPWKAIRVDLLRCPYGSFAFAMLQWTGSRMFRRDLRWYATDEKNMMLDNHSLYDLTKGIFLPAKSEEEIFEHLGLEYLEPFERNA

SEQ ID NO: 3639 - DNA, 1587 bp, synthetic construct
  misc_feature 1..1587: note = Variant of terminal deoxynucleotidyltransferase
  source 1..1587: mol_type = other DNA
atgcaccatcatcatcatcatggcggtagcggcagccacggcattcgtaccatcgattcggacttcgggaagaaacagcagaaaaaaggcgataaccacgatagttccgccacttatgaaatcaaatttcacgagtttgtgctgttcattctcgaagaaaaaatgggtgcgacgcgtcgtacttttctgacagatttagcccgcaagaaagggttccgcgtcgagaatgaactgaccgacgaagttacccacatcgtggcagaaaatctgtcacgctctgaagtattggcttggctgaaagaacacaagatggagaagaccaagcaattcgaactgctggatattagctggcttatcgaaagcatgaaagttggtaaaccggtggacaccaaggggaaataccagttggcggaatcggttgaggtgagtgcgaacccagatccgacagaaggtcgtgtaaacgagctgcctcctactatgaaaaccgtttctccgtatgcgtgtcaacgccgcaccaccctgaacaaccgtaatcaacgttttacggactcgctggaaattcttcgtgaaaattacgagttcaaacgcaacgatgatactgcgctggaatttcgtcgtgctatctccgtgctgaaaagccttccgtttgaggtacgtagcctgaaagacacggaaggattgccctggatcggtgatgaagtcaaagggattatggaagaaatcatcgaagtcggggagtcgcgtgaagtgcaggccgtgctcaatgatgagtggtatcaaagcttccacgcatttacgagtgtctttggagtgggggtgaagacagcagacaagtggtaccgtatgggtctgcgcaccctcgaggatgttcgttccagcaagaccctgaagttgaccccgatgcagaaagtaggtctgctgtattatgaagatcttgctcgcggcgttacgcgtgccgaagctgacgcgatttggctgctggttcaggatgcagtcgcaactttcgacccggatgcgatcgtggagattgtcggtggatttcgtcgtgggaaacctcagggtcacgacgttgatctgcttatcagttctccggccgcggagcgtgagcaagaagaccaactcctgcagaaagtgatgaatctgtggaagaaacaagggttgttgctgtacggtcgtctgtactggactcagtgggaagatgggggttcgccttccggtaaggctgacgagggtgacgcggaggcgaaatgctttctgatcctcaaactttatgatcatctggtgcgtaaaagtaaacgcaatatgccgactggttcgaacatgggcgagtccaaaccgtggaaagcaattcgcgtagatctgctgcgttgcccctatggcagttttgcgtttgcgatgttgcagtggaccggaagccgcatgttccgtcgtgatctgcgttggtacgccactgacgagaagaacatgatgctggacaatcattcgctgtatgacctgaccaaaggcatcttcctccctgctaaatcggaagaggaaattttcgagcatctggggcttgactacctggaaccgttcgaacgtaacgca

SEQ ID NO: 3640 - protein, 529 aa, synthetic construct
  REGION 1..529: note = Variant of terminal deoxynucleotidyltransferase
MHHHHHHGGSGSHGIRTIDSDFGKKQQKKGDNHDSSATYEIKFHEFVLFILEEKMGATRRTFLTDLARKKGFRVENELTDEVTHIVAENLSRSEVLAWLKEHKMEKTKQFELLDISWLIESMKVGKPVDTKGKYQLAESVEVSANPDPTEGRVNELPPTMKTVSPYACQRRTTLNNRNQRFTDSLEILRENYEFKRNDDTALEFRRAISVLKSLPFEVRSLKDTEGLPWIGDEVKGIMEEIIEVGESREVQAVLNDEWYQSFHAFTSVFGVGVKTADKWYRMGLRTLEDVRSSKTLKLTPMQKVGLLYYEDLARGVTRAEADAIWLLVQDAVATFDPDAIVEIVGGFRRGKPQGHDVDLLISSPAAEREQEDQLLQKVMNLWKKQGLLLYGRLYWTQWEDGGSPSGKADEGDAEAKCFLILKLYDHLVRKSKRNMPTGSNMGESKPWKAIRVDLLRCPYGSFAFAMLQWTGSRMFRRDLRWYATDEKNMMLDNHSLYDLTKGIFLPAKSEEEIFEHLGLDYLEPFERNA

SEQ ID NO: 3641 - DNA, 1587 bp, synthetic construct
  misc_feature 1..1587: note = Variant of terminal deoxynucleotidyltransferase
  source 1..1587: mol_type = other DNA
atgcaccatcatcatcatcatggcggtagcggcagccacggcattcgtaccatcgattcggacttcgggaagaaacagcagaaaaaaggcgataaccacgatagttccgccacttatgaaatcaaatttcacgagtttgtgctgttcattctcgaagaaaaaatgggtgcgacgcgtcgtacttttctgacagatttagcccgcaagaaagggttccgcgtcgagaatgaactgaccgacgaagttacccacatcgtggcagaaaatctgtcacgctctgaagtattggcttggctgaaagaacacaagatggagaagaccaagcaattcgaactgctggatattagctggcttatcgaaagcatgaaagttggtaaaccggtggacaccaaggggaaataccagttggcggaatcggttgaggtgagtgcgaacccagatccgacagaaggtcgtgtaaacgagctgcctcctactatgaaaaccgtttctccgtatgcgtgtcaacgccgcaccaccctgaacaaccgtaatcaacgttttacggactcgctggacattcttcgtgaaaattacgagttcaaacgcaacgaggatactgcgctggaatttcgtcgtgctatctccgtgctgaaaagccttccgtttgaggtacgtagcctgaaagacacggaaggattgccctggatcggtgatgaagtcaaagggattatggaagaaatcatctcggtcggggagtcgaaggaagtgcaggccgtgctcaatgatgagtggtatcaaagcttccacgcatttacgagtgtctttggagtgggggtgaagacagcagacaagtggtaccgtatgggtctgcgcaccctcgaggatgttcgttccagcaagaccctgaagttgaccccgatgcagaaagtaggtctgctgtattatgaagatcttgctcgcggcgttacgcgtgccgaagctgacgcgatttggctgctggttcaggatgcagtcgcaactttcgacccggatgcgatcgtggagattgtcggtggatttcgtcgtgggaaacctcagggtcacgacgttgatctgcttatcagttctccgggcgtggagcgtgagcaagaagaccaactcctgcagaaagtgatgaatctgtggaagaaacaagggttgttgctgtacggtcgtctgtactggagtcagtgggaagatgggggttcgccttccggtaaggctgacgagggtgacgcggaggcgaaatgctttctgatcctcaaactttatgatcatctggtgcgtaaaagtaaacgcaatatgccgactggttcgaacatgggcgagtccaaaccgtggaaagcaattcgcgtagatctgctgcgttgcccctatggcagttttgcgtttgcgatgttgcagtggaccggaagccgcatgttccgtcgtgatctgcgttggtacgccactgacgagaagaacatgatgctggacaatcattcgctgtatgacctgacccgcggtatcttcctccctgctaaatcggaagaggaaattttcgaacatctggggcttgaatacctggaaccgttcgaacgtaacgca

SEQ ID NO: 3642 - protein, 529 aa, synthetic construct
  REGION 1..529: note = Variant of terminal deoxynucleotidyltransferase
MHHHHHHGGSGSHGIRTIDSDFGKKQQKKGDNHDSSATYEIKFHEFVLFILEEKMGATRRTFLTDLARKKGFRVENELTDEVTHIVAENLSRSEVLAWLKEHKMEKTKQFELLDISWLIESMKVGKPVDTKGKYQLAESVEVSANPDPTEGRVNELPPTMKTVSPYACQRRTTLNNRNQRFTDSLDILRENYEFKRNEDTALEFRRAISVLKSLPFEVRSLKDTEGLPWIGDEVKGIMEEIISVGESKEVQAVLNDEWYQSFHAFTSVFGVGVKTADKWYRMGLRTLEDVRSSKTLKLTPMQKVGLLYYEDLARGVTRAEADAIWLLVQDAVATFDPDAIVEIVGGFRRGKPQGHDVDLLISSPGVEREQEDQLLQKVMNLWKKQGLLLYGRLYWSQWEDGGSPSGKADEGDAEAKCFLILKLYDHLVRKSKRNMPTGSNMGESKPWKAIRVDLLRCPYGSFAFAMLQWTGSRMFRRDLRWYATDEKNMMLDNHSLYDLTRGIFLPAKSEEEIFEHLGLEYLEPFERNA

SEQ ID NO: 3643 - DNA, 1587 bp, synthetic construct
  misc_feature 1..1587: note = Variant of terminal deoxynucleotidyltransferase
  source 1..1587: mol_type = other DNA
atgcaccatcatcatcatcatggcggtagcggcagccacggcattcgtaccatcgattcggacttcgggaagaaacagcagaaaaaaggcgataaccacgatagttccgccacttatgaaatcaaatttcacgagtttgtgctgttcattctcgaagaaaaaatgggtgcgacgcgtcgtacttttctgacagatttagcccgcaagaaagggttccgcgtcgagaatgaactgaccgacgaagttacccacatcgtggcagaaaatctgtcacgctctgaagtattggcttggctgaaagaacacaagatggagaagaccaagcaattcgaactgctggatattagctggcttatcgaaagcatgaaagttggtaaaccggtggacaccaaggggaaataccagttggcggaatcggttgaggtgagtgcgaacccagatccgacagaaggtcgtgtaaacgagctgcctcctactatgaaaaccgtttctccgtatgcgtgtcaacgccgcaccaccctgaacaaccgtaatcaacgttttacggactcgctggagattcttcgtgaaaattacgagttcaaacgcaacgaggatactgcgctggaatttcgtcgtgctatctccgtgctgaaaagccttccgtttgaggtacgtagcctgaaagacacggaaggattgccctggatcggtgatgaagtcaaagggattatggaagaaatcatcgaagtcggggagtcgcgtgaagtgcaggccgtgctcaatgatgagtggtatcaaagcttccacgcatttacgagtgtctttggagtgggggtgaagacagcagacaagtggtaccgtatgggtctgcgcaccctcgaggatgttcgttccagcaagaccctgaagttgaccccgatgcagaaagtaggtctgctgtattatgaagatcttgctcgcggcgttacgcgtgccgaagctgacgcgatttggctgctggttcaggatgcagtcgcaactttcgacccggatgcgatcgtggagattgtcggtggatttcgtcgtgggaaacctcagggtcacgacgttgatctgcttatcagttctccgggagctgagaaagagcaagaagaccaactcctgcagaaagtgatgaatctgtggaagaaacaagggttgttgctgtacggtcgtctgtactggactcagtgggaagatgggggttcgccttccggtaaggctgacgagggtgacgcggaggcgaaatgctttctgatcctcaaactttatgatcatctggtgcgtaaaagtaaacgcaatatgccgactggttcgaacatgggcgagtccaaaccgtggaaagcaattcgcgtagatctgctgcgttgcccctatggcagttttgcgtttgcgatgttgcagtggaccggaagccgcatgttccgtcgtgatctgcgttggtacgccactgacgagaagaacatgatgctggacaatcattcgctgtatgacatgaccaaaggtatcttcctccctgctaaatcggaagaggaaattttcgcgcatctggggcttgactacctggaaccgttcgaacgtaacgca

SEQ ID NO: 3644 - protein, 529 aa, synthetic construct
  REGION 1..529: note = Variant of terminal deoxynucleotidyltransferase
MHHHHHHGGSGSHGIRTIDSDFGKKQQKKGDNHDSSATYEIKFHEFVLFILEEKMGATRRTFLTDLARKKGFRVENELTDEVTHIVAENLSRSEVLAWLKEHKMEKTKQFELLDISWLIESMKVGKPVDTKGKYQLAESVEVSANPDPTEGRVNELPPTMKTVSPYACQRRTTLNNRNQRFTDSLEILRENYEFKRNEDTALEFRRAISVLKSLPFEVRSLKDTEGLPWIGDEVKGIMEEIIEVGESREVQAVLNDEWYQSFHAFTSVFGVGVKTADKWYRMGLRTLEDVRSSKTLKLTPMQKVGLLYYEDLARGVTRAEADAIWLLVQDAVATFDPDAIVEIVGGFRRGKPQGHDVDLLISSPGAEKEQEDQLLQKVMNLWKKQGLLLYGRLYWTQWEDGGSPSGKADEGDAEAKCFLILKLYDHLVRKSKRNMPTGSNMGESKPWKAIRVDLLRCPYGSFAFAMLQWTGSRMFRRDLRWYATDEKNMMLDNHSLYDMTKGIFLPAKSEEEIFAHLGLDYLEPFERNA

SEQ ID NO: 3645 - DNA, 1587 bp, synthetic construct
  misc_feature 1..1587: note = Variant of terminal deoxynucleotidyltransferase
  source 1..1587: mol_type = other DNA
atgcaccatcatcatcatcatggcggtagcggcagccacggcattcgtaccatcgattcggacttcgggaagaaacagcagaaaaaaggcgataaccacgatagttccgccacttatgaaatcaaatttcacgagtttgtgctgttcattctcgaagaaaaaatgggtgcgacgcgtcgtacttttctgacagatttagcccgcaagaaagggttccgcgtcgagaatgaactgaccgacgaagttacccacatcgtggcagaaaatctgtcacgctctgaagtattggcttggctgaaagaacacaagatggagaagaccaagcaattcgaactgctggatattagctggcttatcgaaagcatgaaagttggtaaaccggtggacaccaaggggaaataccagttggcggaatcggttgaggtgagtgcgaacccagatccgacagaaggtcgtgtaaacgagctgcctcctactatgaaaaccgtttctccgtatgcgtgtcaacgccgcaccaccctgaacaaccgtaatcaacgttttacggactcgctggagattcttcgtgaaaattacgagttcaaacgcaacgatgatactgcgctggaatttcgtcgtgctatctccgtgctgaaaagccttccgtttgaggtacgtagcctgaaagacacggaaggattgccctggatcggtgatgaagtcaaagggattatggaagaaatcatctcggtcggggagtcgaaggaagtgcaggccgtgctcaatgatgagtggtatcaaagcttccacgcatttacgagtgtctttggagtgggggtgaagacagcagacaagtggtaccgtatgggtctgcgcaccctcgaggatgttcgttccagcaagaccctgaagttgaccccgatgcagaaagtaggtctgctgtattatgaagatcttgctcgcggcgttacgcgtgccgaagctgacgcgatttggctgctggttcaggatgcagtcgcaactttcgacccggatgcgatcgtggagattgtcggtggatttcgtcgtgggaaacctcagggtcacgacgttgatctgcttatcagttctccgggagcggagaaggagcaagaagaccaactcctgcagaaagtgatgaatctgtggaagaaacaagggttgttgctgtacggtcgtctgtactggactcagtgggaagatgggggttcgccttccggtaaggctgacgagggtgacgcggaggcgaaatgctttctgatcctcaaactttatgatcatctggtgcgtaaaagtaaacgcaatatgccgactggttcgaacatgggcgagtccaaaccgtggaaagcaattcgcgtagatctgctgcgttgcccctatggcagttttgcgtttgcgatgttgcagtggaccggaagccgcatgttccgtcgtgatctgcgttggtacgccctggaagagaagaacatgatgctggacaatcattcgctgtatgacctgaccaaaggcatcttcctccctgctaaatcggaagaggaaattttcgagcatctggggcttgaatacctggaaccgttcgaacgtaacgca

SEQ ID NO: 3646 - protein, 529 aa, synthetic construct
  REGION 1..529: note = Variant of terminal deoxynucleotidyltransferase
MHHHHHHGGSGSHGIRTIDSDFGKKQQKKGDNHDSSATYEIKFHEFVLFILEEKMGATRRTFLTDLARKKGFRVENELTDEVTHIVAENLSRSEVLAWLKEHKMEKTKQFELLDISWLIESMKVGKPVDTKGKYQLAESVEVSANPDPTEGRVNELPPTMKTVSPYACQRRTTLNNRNQRFTDSLEILRENYEFKRNDDTALEFRRAISVLKSLPFEVRSLKDTEGLPWIGDEVKGIMEEIISVGESKEVQAVLNDEWYQSFHAFTSVFGVGVKTADKWYRMGLRTLEDVRSSKTLKLTPMQKVGLLYYEDLARGVTRAEADAIWLLVQDAVATFDPDAIVEIVGGFRRGKPQGHDVDLLISSPGAEKEQEDQLLQKVMNLWKKQGLLLYGRLYWTQWEDGGSPSGKADEGDAEAKCFLILKLYDHLVRKSKRNMPTGSNMGESKPWKAIRVDLLRCPYGSFAFAMLQWTGSRMFRRDLRWYALEEKNMMLDNHSLYDLTKGIFLPAKSEEEIFEHLGLEYLEPFERNA

SEQ ID NO: 3647 - DNA, 1587 bp, synthetic construct
  misc_feature 1..1587: note = Variant of terminal deoxynucleotidyltransferase
  source 1..1587: mol_type = other DNA
atgcaccatcatcatcatcatggcggtagcggcagccacggcattcgtaccatcgattcggacttcgggaagaaacagcagaaaaaaggcgataaccacgatagttccgccacttatgaaatcaaatttcacgagtttgtgctgttcattctcgaagaaaaaatgggtgcgacgcgtcgtacttttctgacagatttagcccgcaagaaagggttccgcgtcgagaatgaactgaccgacgaagttacccacatcgtggcagaaaatctgtcacgctctgaagtattggcttggctgaaagaacacaagatggagaagaccaagcaattcgaactgctggatattagctggcttatcgaaagcatgaaagttggtaaaccggtggacaccaaggggaaataccagttggcggaatcggttgaggtgagtgcgaacccagatccgacagaaggtcgtgtaaacgagctgcctcctactatgaaaaccgtttctccgtatgcgtgtcaacgccgcaccaccctgaacaaccgtaatcaacgttttacggactcgctggagattcttcgtgaaaattacgagctgaaacgcaacgaggatactgcgctggaatttcgtcgtgctatctccgtgctgaaaagccttccgtttgaggtacgtagcctgaaagacacggaaggattgccctggatcggtgatgaagtcaaagggattatggaagaaatcatctcggtcggggagtcgcgtgaagtgcaggccgtgctcaatgatgagtggtatcaaagcttccacgcatttacgagtgtctttggagtgggggtgaagacagcagacaagtggtaccgtatgggtctgcgcaccctcgaggatgttcgttccagcaagaccctgaagttgaccccgatgcagaaagtaggtctgctgtattatgaagatcttgctcgcggcgttacgcgtgccgaagctgacgcgatttggctgctggttcaggatgcagtcgcaactttcgacccggatgcgatcgtggagattgtcggtggatttcgtcgtgggaaacctcagggtcacgacgttgatctgcttatcagttctccgggcgtggagcgtgagcaagaagaccaactcctgcagaaagtgatgaatctgtggaagaaacaagggttgttgctgtacggtcgtctggagtggagtcagtgggaagatgggggttcgccttccggtaaggctgacgagggtgacgcggaggcgaaatgctttctgatcctcaaactttatgatcatctggtgcgtaaaagtaaacgcaatatgccgactggttcgaacatgggcgagtccaaaccgtggaaagcaattcgcgtagatctgctgcgttgcccctatggcagttttgcgtttgcgatgttgcagtggaccggaagccgcatgttccgtcgtgatctgcgttggtacgccactgacgagaagaacatgatgctggacaatcattcgctgtatgacatgaccaaaggtatcttcctccctgctaaatcggaagaggaaattttcgaacatctggggcttgaatacctggaaccgttcgaacgtaacgca

SEQ ID NO: 3648 - protein, 529 aa, synthetic construct
  REGION 1..529: note = Variant of terminal deoxynucleotidyltransferase
MHHHHHHGGSGSHGIRTIDSDFGKKQQKKGDNHDSSATYEIKFHEFVLFILEEKMGATRRTFLTDLARKKGFRVENELTDEVTHIVAENLSRSEVLAWLKEHKMEKTKQFELLDISWLIESMKVGKPVDTKGKYQLAESVEVSANPDPTEGRVNELPPTMKTVSPYACQRRTTLNNRNQRFTDSLEILRENYELKRNEDTALEFRRAISVLKSLPFEVRSLKDTEGLPWIGDEVKGIMEEIISVGESREVQAVLNDEWYQSFHAFTSVFGVGVKTADKWYRMGLRTLEDVRSSKTLKLTPMQKVGLLYYEDLARGVTRAEADAIWLLVQDAVATFDPDAIVEIVGGFRRGKPQGHDVDLLISSPGVEREQEDQLLQKVMNLWKKQGLLLYGRLEWSQWEDGGSPSGKADEGDAEAKCFLILKLYDHLVRKSKRNMPTGSNMGESKPWKAIRVDLLRCPYGSFAFAMLQWTGSRMFRRDLRWYATDEKNMMLDNHSLYDMTKGIFLPAKSEEEIFEHLGLEYLEPFERNA

SEQ ID NO: 3649 - DNA, 1587 bp, synthetic construct
  misc_feature 1..1587: note = Variant of terminal deoxynucleotidyltransferase
  source 1..1587: mol_type = other DNA
atgcaccatcatcatcatcatggcggtagcggcagccacggcattcgtaccatcgattcggacttcgggaagaaacagcagaaaaaaggcgataaccacgatagttccgccacttatgaaatcaaatttcacgagtttgtgctgttcattctcgaagaaaaaatgggtgcgacgcgtcgtacttttctgacagatttagcccgcaagaaagggttccgcgtcgagaatgaactgaccgacgaagttacccacatcgtggcagaaaatctgtcacgctctgaagtattggcttggctgaaagaacacaagatggagaagaccaagcaattcgaactgctggatattagctggcttatcgaaagcatgaaagttggtaaaccggtggacaccaaggggaaataccagttggcggaatcggttgaggtgagtgcgaacccagatccgacagaaggtcgtgtaaacgagctgcctcctactatgaaaaccgtttctccgtatgcgtgtcaacgccgcaccaccctgaacaaccgtaatcaacgttttacggactcgctggagattcttcgtgaaaattacgagttcaaacgcaacgatgatactgcgctggaatttcgtcgtgctatctccgtgctgaaaagccttccgtttgaggtacgtagcctgaaagacacggaaggattgccctggatcagtgatgaagtcaaagggattatggaagaaatcatcgaagtcggggagtcgcgtgaagtgcaggccgtgctcaatgatgagtggtatcaaagcttccacgcatttacgagtgtctttggagtgggggtgaagacagcagacaagtggtaccgtatgggtctgcgcaccctcgaggatgttcgttccagcaagaccctgaagttgaccccgatgcagaaagtaggtctgctgtattatgaagatcttgctcgcggcgttacgcgtgccgaagctgacgcgatttggctgctggttcaggatgcagtcgcaactttcgacccggatgcgatcgtggagattgtcggtggatttcgtcgtgggaaacctcagggtcacgacgttgatctgcttatcagttctccggccgcggagcgtgagcaagaagaccaactcctgcagaaagtgatgaatctgtggaagaaacaagggttgttgctgtacggtcgtctgtactggagtcagtgggaagatgggggttcgccttccggtaaggctgacgagggtgacgcggaggcgaaatgctttctgatcctcaaactttatgatcatctggtgcgtaaaagtaaacgcaatatgccgactggttcgaacatgggcgagtccaaaccgtggaaagcaattcgcgtagatctgctgcgttgcccctatggcagttttgcgtttgcgatgttgcagtggaccggaagccgcatgttccgtcgtgatctgcgttggtacgccactgacgagaagaacatgatgctggacaatcattcgctgtatgacatgaccaaaggtatcttcctccctgctaaatcggaagaggaaattttcgaacatctggggcttgactacctggaaccgttcgaacgtaacgca

SEQ ID NO: 3650 - protein, 529 aa, synthetic construct
  REGION 1..529: note = Variant of terminal deoxynucleotidyltransferase
MHHHHHHGGSGSHGIRTIDSDFGKKQQKKGDNHDSSATYEIKFHEFVLFILEEKMGATRRTFLTDLARKKGFRVENELTDEVTHIVAENLSRSEVLAWLKEHKMEKTKQFELLDISWLIESMKVGKPVDTKGKYQLAESVEVSANPDPTEGRVNELPPTMKTVSPYACQRRTTLNNRNQRFTDSLEILRENYEFKRNDDTALEFRRAISVLKSLPFEVRSLKDTEGLPWISDEVKGIMEEIIEVGESREVQAVLNDEWYQSFHAFTSVFGVGVKTADKWYRMGLRTLEDVRSSKTLKLTPMQKVGLLYYEDLARGVTRAEADAIWLLVQDAVATFDPDAIVEIVGGFRRGKPQGHDVDLLISSPAAEREQEDQLLQKVMNLWKKQGLLLYGRLYWSQWEDGGSPSGKADEGDAEAKCFLILKLYDHLVRKSKRNMPTGSNMGESKPWKAIRVDLLRCPYGSFAFAMLQWTGSRMFRRDLRWYATDEKNMMLDNHSLYDMTKGIFLPAKSEEEIFEHLGLDYLEPFERNA

SEQ ID NO: 3651 - DNA, 1587 bp, synthetic construct
  misc_feature 1..1587: note = Variant of terminal deoxynucleotidyltransferase
  source 1..1587: mol_type = other DNA
atgcaccatcatcatcatcatggcggtagcggcagccacggcattcgtaccatcgattcggacttcgggaagaaacagcagaaaaaaggcgataaccacgatagttccgccacttatgaaatcaaatttcacgagtttgtgctgttcattctcgaagaaaaaatgggtgcgacgcgtcgtacttttctgacagatttagcccgcaagaaagggttccgcgtcgagaatgaactgaccgacgaagttacccacatcgtggcagaaaatctgtcacgctctgaagtattggcttggctgaaagaacacaagatggagaagaccaagcaattcgaactgctggatattagctggcttatcgaaagcatgaaagttggtaaaccggtggacaccaaggggaaataccagttggcggaatcggttgaggtgagtgcgaacccagatccgacagaaggtcgtgtaaacgagctgcctcctactatgaaaaccgtttctccgtatgcgtgtcaacgccgcaccaccctgaacaaccgtaatcaacgttttacggactcgctggagattcttcgtgaaaattacgagttcaaacgcaacgaggatactgcgctggaatttcgtcgtgctatctccgtgctgaaaagccttccgtttgaggtacgtagcctgaaagacacggaaggattgccctggatcggtgatgaagtcaaagggattatggaagaaatcatcgaagtcggggagtcgcgtgaagtgcaggccgtgctcaatgatgagtggtatcaaagcttccacgcatttacgagtgtctttggagtgggggtgaagacagcagacaagtggtaccgtatgggtctgcgcaccctcgaggatgttcgttccagcaagaccctgaagttgaccccgatgcagaaagtaggtctgctgtattatgaagatcttgctcgcggcgttacgcgtgccgaagctgacgcgatttggctgctggttcaggatgcagtcgcaactttcgacccggatgcgatcgtggagattgtcggtggatttcgtcgtgggaaacctcagggtcacgacgttgatctgcttatcagttctccgggagctgagaaagagcaagaagaccaactcctgcagaaagtgatgaatctgtggaagaaacaagggttgttgctgtacggtcgtctgtactggagtcagtgggaagatgggggttcgccttccggtaaggctgacgagggtgacgcggaggcgaaatgctttctgatcctcaaactttatgatcatctggtgcgtaaaagtaaacgcaatatgccgactggttcgaacatgggcgagtccaaaccgtggaaagcaattcgcgtagatctgctgcgttgcccctatggcagttttgcgtttgcgatgttgcagtggaccggaagccgcatgttccgtcgtgatctgcgttggtacgccactgacgagaagaacatgatgctggacaatcattcgctgtatgacatgacccgcggtatcttcctccctgctaaatcggaagaggaaattttcgagcatctggggcttgaatacctggaaccgttcgaacgtaacgca

SEQ ID NO: 3652 - protein, 529 aa, synthetic construct
  REGION 1..529: note = Variant of terminal deoxynucleotidyltransferase
MHHHHHHGGSGSHGIRTIDSDFGKKQQKKGDNHDSSATYEIKFHEFVLFILEEKMGATRRTFLTDLARKKGFRVENELTDEVTHIVAENLSRSEVLAWLKEHKMEKTKQFELLDISWLIESMKVGKPVDTKGKYQLAESVEVSANPDPTEGRVNELPPTMKTVSPYACQRRTTLNNRNQRFTDSLEILRENYEFKRNEDTALEFRRAISVLKSLPFEVRSLKDTEGLPWIGDEVKGIMEEIIEVGESREVQAVLNDEWYQSFHAFTSVFGVGVKTADKWYRMGLRTLEDVRSSKTLKLTPMQKVGLLYYEDLARGVTRAEADAIWLLVQDAVATFDPDAIVEIVGGFRRGKPQGHDVDLLISSPGAEKEQEDQLLQKVMNLWKKQGLLLYGRLYWSQWEDGGSPSGKADEGDAEAKCFLILKLYDHLVRKSKRNMPTGSNMGESKPWKAIRVDLLRCPYGSFAFAMLQWTGSRMFRRDLRWYATDEKNMMLDNHSLYDMTRGIFLPAKSEEEIFEHLGLEYLEPFERNA

SEQ ID NO: 3653 - DNA, 1587 bp, synthetic construct
  misc_feature 1..1587: note = Variant of terminal deoxynucleotidyltransferase
  source 1..1587: mol_type = other DNA
atgcaccatcatcatcatcatggcggtagcggcagccacggcattcgtaccatcgattcggacttcgggaagaaacagcagaaaaaaggcgataaccacgatagttccgccacttatgaaatcaaatttcacgagtttgtgctgttcattctcgaagaaaaaatgggtgcgacgcgtcgtacttttctgacagatttagcccgcaagaaagggttccgcgtcgagaatgaactgaccgacgaagttacccacatcgtggcagaaaatctgtcacgctctgaagtattggcttggctgaaagaacacaagatggagaagaccaagcaattcgaactgctggatattagctggcttatcgaaagcatgaaagttggtaaaccggtggacaccaaggggaaataccagttggcggaatcggttgaggtgagtgcgaacccagatccgacagaaggtcgtgtaaacgagctgcctcctactatgaaaaccgtttctccgtatgcgtgtcaacgccgcaccaccctgaacaaccgtaatcaacgttttacggactcgctggacattcttcgtgaaaattacgagttcaaacgcaacgatgatactgcgctggaatttcgtcgtgctatctccgtgctgaaaagccttccgtttgaggtacgtagcctgaaagacacggaaggattgccctggatcggtgatgaagtcaaagggattatggaagaaatcatcgaagtcggggagtcgcgtgaagtgcaggccgtgctcaatgatgagtggtatcaaagcttccacgcatttacgagtgtctttggagtgggggtgaagacagcagacaagtggtaccgtatgggtctgcgcaccctcgaggatgttcgttccagcaagaccctgaagttgaccccgatgcagaaagtaggtctgctgtattatgaagatcttgctcgcggcgttacgcgtgccgaagctgacgcgatttggctgctggttcaggatgcagtcgcaactttcgacccggatgcgatcgtggagattgtcggtggatttcgtcgtgggaaacctcagggtcacgacgttgatctgcttatcagttctccggccgtggagcgtgagcaagaagaccaactcctgcagaaagtgatgaatctgtggaagaaacaagggttgttgctgtacggtcgtctgtactggagtcagtgggaagatgggggttcgccttccggtaaggctgacgagggtgacgcggaggcgaaatgctttctgatcctcaaactttatgatcatctggtgcgtaaaagtaaacgcaatatgccgactggttcgaacatgggcgagtccaaaccgtggaaagcaattcgcgtagatctgctgcgttgcccctatggcagttttgcgtttgcgatgttgcagtggaccggaagccgcatgttccgtcgtgatctgcgttggtacgccactgacgagaagaacatgatgctggacaatcattcgctgtatgacatgaccaaaggtatcttcctccctgctaaatcggaagaggaaattttcgaacatctggggcttgaatacctggaaccgttcgaacgtaacgca

SEQ ID NO: 3654 - protein, 529 aa, synthetic construct
  REGION 1..529: note = Variant of terminal deoxynucleotidyltransferase
MHHHHHHGGSGSHGIRTIDSDFGKKQQKKGDNHDSSATYEIKFHEFVLFILEEKMGATRRTFLTDLARKKGFRVENELTDEVTHIVAENLSRSEVLAWLKEHKMEKTKQFELLDISWLIESMKVGKPVDTKGKYQLAESVEVSANPDPTEGRVNELPPTMKTVSPYACQRRTTLNNRNQRFTDSLDILRENYEFKRNDDTALEFRRAISVLKSLPFEVRSLKDTEGLPWIGDEVKGIMEEIIEVGESREVQAVLNDEWYQSFHAFTSVFGVGVKTADKWYRMGLRTLEDVRSSKTLKLTPMQKVGLLYYEDLARGVTRAEADAIWLLVQDAVATFDPDAIVEIVGGFRRGKPQGHDVDLLISSPAVEREQEDQLLQKVMNLWKKQGLLLYGRLYWSQWEDGGSPSGKADEGDAEAKCFLILKLYDHLVRKSKRNMPTGSNMGESKPWKAIRVDLLRCPYGSFAFAMLQWTGSRMFRRDLRWYATDEKNMMLDNHSLYDMTKGIFLPAKSEEEIFEHLGLEYLEPFERNA

SEQ ID NO: 3655 - DNA, 1587 bp, synthetic construct
  misc_feature 1..1587: note = Variant of terminal deoxynucleotidyltransferase
  source 1..1587: mol_type = other DNA
atgcaccatcatcatcatcatggcggtagcggcagccacggcattcgtaccatcgattcggacttcgggaagaaacagcagaaaaaaggcgataaccacgatagttccgccacttatgaaatcaaatttcacgagtttgtgctgttcattctcgaagaaaaaatgggtgcgacgcgtcgtacttttctgacagatttagcccgcaagaaagggttccgcgtcgagaatgaactgaccgacgaagttacccacatcgtggcagaaaatctgtcacgctctgaagtattggcttggctgaaagaacacaagatggagaagaccaagcaattcgaactgctggatattagctggcttatcgaaagcatgaaagttggtaaaccggtggacaccaaggggaaataccagttggcggaatcggttgaggtgagtgcgaacccagatccgacagaaggtcgtgtaaacgagctgcctcctactatgaaaaccgtttctccgtatgcgtgtcaacgccgcaccaccctgaacaaccgtaatcaacgttttacggactcgctggacattcttcgtgaaaattacgagttcaaacgcaacgatgatactgcgctggaatttcgtcgtgctatctccgtgctgaaaagccttccgtttgaggtacgtagcctgaaagacacggaaggattgccctggatcggtgatgaagtcaaagggattatggaagaaatcatcgaagtcggggagtcgcgtgaagtgcaggccgtgctcaatgatgagtggtatcaaagcttccacgcatttacgagtgtctttggagtgggggtgaagacagcagacaagtggtaccgtatgggtctgcgcaccctcgaggatgttcgttccagcaagaccctgaagttgaccccgatgcagaaagtaggtctgctgtattatgaagatcttgctcgcggcgttacgcgtgccgaagctgacgcgatttggctgctggttcaggatgcagtcgcaactttcgacccggatgcgatcgtggagattgtcggtggatttcgtcgtgggaaacctcagggtcacgacgttgatctgcttatcagttctccggccgcggagaaggagcaagaagaccaactcctgcagaaagtgatgaatctgtggaagaaacaagggttgttgctgtacggtcgtctggaatggagccagtgggaagatgggggttcgccttccggtaaggctgacgagggtgacgcggaggcgaaatgctttctgatcctcaaactttatgatcatctggtgcgtaaaagtaaacgcaatatgccgactggttcgaacatgggcgagtccaaaccgtggaaagcaattcgcgtagatctgctgcgttgcccctatggcagttttgcgtttgcgatgttgcagtggaccggaagccgcatgttccgtcgtgatctgcgttggtacgccactgacgagaagaacatgatgctggacaatcattcgctgtatgacctgaccaaaggcatcttcctccctgctaaatcggaagaggaaattttcgaacatctggggcttgaatacctggaaccgttcgaacgtaacgca

SEQ ID NO: 3656 - protein, 529 aa, synthetic construct
  REGION 1..529: note = Variant of terminal deoxynucleotidyltransferase
MHHHHHHGGSGSHGIRTIDSDFGKKQQKKGDNHDSSATYEIKFHEFVLFILEEKMGATRRTFLTDLARKKGFRVENELTDEVTHIVAENLSRSEVLAWLKEHKMEKTKQFELLDISWLIESMKVGKPVDTKGKYQLAESVEVSANPDPTEGRVNELPPTMKTVSPYACQRRTTLNNRNQRFTDSLDILRENYEFKRNDDTALEFRRAISVLKSLPFEVRSLKDTEGLPWIGDEVKGIMEEIIEVGESREVQAVLNDEWYQSFHAFTSVFGVGVKTADKWYRMGLRTLEDVRSSKTLKLTPMQKVGLLYYEDLARGVTRAEADAIWLLVQDAVATFDPDAIVEIVGGFRRGKPQGHDVDLLISSPAAEKEQEDQLLQKVMNLWKKQGLLLYGRLEWSQWEDGGSPSGKADEGDAEAKCFLILKLYDHLVRKSKRNMPTGSNMGESKPWKAIRVDLLRCPYGSFAFAMLQWTGSRMFRRDLRWYATDEKNMMLDNHSLYDLTKGIFLPAKSEEEIFEHLGLEYLEPFERNA

SEQ ID NO: 3657 - DNA, 1587 bp, synthetic construct
  misc_feature 1..1587: note = Variant of terminal deoxynucleotidyltransferase
  source 1..1587: mol_type = other DNA
atgcaccatcatcatcatcatggcggtagcggcagccacggcattcgtaccatcgattcggacttcgggaagaaacagcagaaaaaaggcgataaccacgatagttccgccacttatgaaatcaaatttcacgagtttgtgctgttcattctcgaagaaaaaatgggtgcgacgcgtcgtacttttctgacagatttagcccgcaagaaagggttccgcgtcgagaatgaactgaccgacgaagttacccacatcgtggcagaaaatctgtcacgctctgaagtattggcttggctgaaagaacacaagatggagaagaccaagcaattcgaactgctggatattagctggcttatcgaaagcatgaaagttggtaaaccggtggacaccaaggggaaataccagttggcggaatcggttgaggtgagtgcgaacccagatccgacagaaggtcgtgtaaacgagctgcctcctactatgaaaaccgtttctccgtatgcgtgtcaacgccgcaccaccctgaacaaccgtaatcaacgttttacggactcgctggagattcttcgtgaaaattacgagttcaaacgcaacgatgatactgcgctggaatttcgtcgtgctatctccgtgctgaaaagccttccgtttgaggtacgtagcctgaaagacacggaaggattgccctggatcggtgatgaagtcaaagggattatggaagaaatcatctcggtcggggagtcgcgtgaagtgcaggccgtgctcaatgatgagtggtatcaaagcttccacgcatttacgagtgtctttggagtgggggtgaagacagcagacaagtggtaccgtatgggtctgcgcaccctcgaggatgttcgttccagcaagaccctgaagttgaccccgatgcagaaagtaggtctgctgtattatgaagatcttgctcgcggcgttacgcgtgccgaagctgacgcgatttggctgctggttcaggatgcagtcgcaactttcgacccggatgcgatcgtggagattgtcggtggatttcgtcgtgggaaacctcagggtcacgacgttgatctgcttatcagttctccgggagctgagaaggagcaagaagaccaactcctgcagaaagtgatgaatctgtggaagaaacaagggttgttgctgtacggtcgtctggaatggagccagtgggaagatgggggttcgccttccggtaaggctgacgagggtgacgcggaggcgaaatgctttctgatcctcaaactttatgatcatctggtgcgtaaaagtaaacgcaatatgccgactggttcgaacatgggcgagtccaaaccgtggaaagcaattcgcgtagatctgctgcgttgcccctatggcagttttgcgtttgcgatgttgcagtggaccggaagccgcatgttccgtcgtgatctgcgttggtacgccctggaagagaagaacatgatgctggacaatcattcgctgtatgacatgaccaaaggtatcttcctccctgctaaatcggaagaggaaattttcgaacatctggggcttgaatacctggaaccgttcgaacgtaacgca

SEQ ID NO: 3658 - protein, 529 aa, synthetic construct
  REGION 1..529: note = Variant of terminal deoxynucleotidyltransferase
MHHHHHHGGSGSHGIRTIDSDFGKKQQKKGDNHDSSATYEIKFHEFVLFILEEKMGATRRTFLTDLARKKGFRVENELTDEVTHIVAENLSRSEVLAWLKEHKMEKTKQFELLDISWLIESMKVGKPVDTKGKYQLAESVEVSANPDPTEGRVNELPPTMKTVSPYACQRRTTLNNRNQRFTDSLEILRENYEFKRNDDTALEFRRAISVLKSLPFEVRSLKDTEGLPWIGDEVKGIMEEIISVGESREVQAVLNDEWYQSFHAFTSVFGVGVKTADKWYRMGLRTLEDVRSSKTLKLTPMQKVGLLYYEDLARGVTRAEADAIWLLVQDAVATFDPDAIVEIVGGFRRGKPQGHDVDLLISSPGAEKEQEDQLLQKVMNLWKKQGLLLYGRLEWSQWEDGGSPSGKADEGDAEAKCFLILKLYDHLVRKSKRNMPTGSNMGESKPWKAIRVDLLRCPYGSFAFAMLQWTGSRMFRRDLRWYALEEKNMMLDNHSLYDMTKGIFLPAKSEEEIFEHLGLEYLEPFERNA

SEQ ID NO: 3659 - DNA, 1587 bp, synthetic construct
  misc_feature 1..1587: note = Variant of terminal deoxynucleotidyltransferase
  source 1..1587: mol_type = other DNA
atgcaccatcatcatcatcatggcggtagcggcagccacggcattcgtaccatcgattcggacttcgggaagaaacagcagaaaaaaggcgataaccacgatagttccgccacttatgaaatcaaatttcacgagtttgtgctgttcattctcgaagaaaaaatgggtgcgacgcgtcgtacttttctgacagatttagcccgcaagaaagggttccgcgtcgagaatgaactgaccgacgaagttacccacatcgtggcagaaaatctgtcacgctctgaagtattggcttggctgaaagaacacaagatggagaagaccaagcaattcgaactgctggatattagctggcttatcgaaagcatgaaagttggtaaaccggtggacaccaaggggaaataccagttggcggaatcggttgaggtgagtgcgaacccagatccgacagaaggtcgtgtaaacgagctgcctcctactatgaaaaccgtttctccgtatgcgtgtcaacgccgcaccaccctgaacaaccgtaatcaacgttttacggactcgctggagattcttcgtgaaaattacgagttcaaacgcaacgaggatactgcgctggaatttcgtcgtgctatctccgtgctgaaaagccttccgtttgaggtacgtagcctgaaagacacggaaggattgccctggatcggtgatgaagtcaaagggattatggaagaaatcatctcggtcggggagtcgaaggaagtgcaggccgtgctcaatgatgagtggtatcaaagcttccacgcatttacgagtgtctttggagtgggggtgaagacagcagacaagtggtaccgtatgggtctgcgcaccctcgaggatgttcgttccagcaagaccctgaagttgaccccgatgcagaaagtaggtctgctgtattatgaagatcttgctcgcggcgttacgcgtgccgaagctgacgcgatttggctgctggttcaggatgcagtcgcaactttcgacccggatgcgatcgtggagattgtcggtggatttcgtcgtgggaaacctcagggtcacgacgttgatctgcttatcagttctccggccgcggagaaggagcaagaagaccaactcctgcagaaagtgatgaatctgtggaagaaacaagggttgttgctgtacggtcgtctgtactggagtcagtgggaagatgggggttcgccttccggtaaggctgacgagggtgacgcggaggcgaaatgctttctgatcctcaaactttatgatcatctggtgcgtaaaagtaaacgcaatatgccgactggttcgaacatgggcgagtccaaaccgtggaaagcaattcgcgtagatctgctgcgttgcccctatggcagttttgcgtttgcgatgttgcagtggaccggaagccgcatgttccgtcgtgatctgcgttggtacgccactgacgagaagaacatgatgctggacaatcattcgctgtatgacctgacccgcggtatcttcctccctgctaaatcggaagaggaaattttcgaacatctggggcttgaatacctggaaccgttcgaacgtaacgca

SEQ ID NO: 3660 - protein, 529 aa, synthetic construct
  REGION 1..529: note = Variant of terminal deoxynucleotidyltransferase
MHHHHHHGGSGSHGIRTIDSDFGKKQQKKGDNHDSSATYEIKFHEFVLFILEEKMGATRRTFLTDLARKKGFRVENELTDEVTHIVAENLSRSEVLAWLKEHKMEKTKQFELLDISWLIESMKVGKPVDTKGKYQLAESVEVSANPDPTEGRVNELPPTMKTVSPYACQRRTTLNNRNQRFTDSLEILRENYEFKRNEDTALEFRRAISVLKSLPFEVRSLKDTEGLPWIGDEVKGIMEEIISVGESKEVQAVLNDEWYQSFHAFTSVFGVGVKTADKWYRMGLRTLEDVRSSKTLKLTPMQKVGLLYYEDLARGVTRAEADAIWLLVQDAVATFDPDAIVEIVGGFRRGKPQGHDVDLLISSPAAEKEQEDQLLQKVMNLWKKQGLLLYGRLYWSQWEDGGSPSGKADEGDAEAKCFLILKLYDHLVRKSKRNMPTGSNMGESKPWKAIRVDLLRCPYGSFAFAMLQWTGSRMFRRDLRWYATDEKNMMLDNHSLYDLTRGIFLPAKSEEEIFEHLGLEYLEPFERNA

SEQ ID NO: 3661 - DNA, 1587 bp, synthetic construct
  misc_feature 1..1587: note = Variant of terminal deoxynucleotidyltransferase
  source 1..1587: mol_type = other DNA
atgcaccatcatcatcatcatggcggtagcggcagccacggcattcgtaccatcgattcggacttcgggaagaaacagcagaaaaaaggcgataaccacgatagttccgccacttatgaaatcaaatttcacgagtttgtgctgttcattctcgaagaaaaaatgggtgcgacgcgtcgtacttttctgacagatttagcccgcaagaaagggttccgcgtcgagaatgaactgaccgacgaagttacccacatcgtggcagaaaatctgtcacgctctgaagtattggcttggctgaaagaacacaagatggagaagaccaagcaattcgaactgctggatattagctggcttatcgaaagcatgaaagttggtaaaccggtggacaccaaggggaaataccagttggcggaatcggttgaggtgagtgcgaacccagatccgacagaaggtcgtgtaaacgagctgcctcctactatgaaaaccgtttctccgtatgcgtgtcaacgccgcaccaccctgaacaaccgtaatcaacgttttacggactcgctggacattcttcgtgaaaattacgagttcaaacgcaacgatgatactgcgctggaatttcgtcgtgctatctccgtgctgaaaagccttccgtttgaggtacgtagcctgaaagacacggaaggattgccctggatcggtgatgaagtcaaagggattatggaagaaatcatctcggtcggggagtcgcgtgaagtgcaggccgtgctcaatgatgagtggtatcaaagcttccacgcatttacgagtgtctttggagtgggggtgaagacagcagacaagtggtaccgtatgggtctgcgcaccctcgaggatgttcgttccagcaagaccctgaagttgaccccgatgcagaaagtaggtctgctgtattatgaagatcttgctcgcggcgttacgcgtgccgaagctgacgcgatttggctgctggttcaggatgcagtcgcaactttcgacccggatgcgatcgtggagattgtcggtggatttcgtcgtgggaaacctcagggtcacgacgttgatctgcttatcagttctccgggagctgagaaagagcaagaagaccaactcctgcagaaagtgatgaatctgtggaagaaacaagggttgttgctgtacggtcgtctggagtggagtcagtgggaagatgggggttcgccttccggtaaggctgacgagggtgacgcggaggcgaaatgctttctgatcctcaaactttatgatcatctggtgcgtaaaagtaaacgcaatatgccgactggttcgaacatgggcgagtccaaaccgtggaaagcaattcgcgtagatctgctgcgttgcccctatggcagttttgcgtttgcgatgttgcagtggaccggaagccgcatgttccgtcgtgatctgcgttggtacgccctggacgagaagaacatgatgctggacaatcattcgctgtatgacctgaccaaaggcatcttcctccctgctaaatcggaagaggaaattttcgaacatctggggcttgactacctggaaccgttcgaacgtaacgca

SEQ ID NO: 3662 - protein, 529 aa, synthetic construct
  REGION 1..529: note = Variant of terminal deoxynucleotidyltransferase
MHHHHHHGGSGSHGIRTIDSDFGKKQQKKGDNHDSSATYEIKFHEFVLFILEEKMGATRRTFLTDLARKKGFRVENELTDEVTHIVAENLSRSEVLAWLKEHKMEKTKQFELLDISWLIESMKVGKPVDTKGKYQLAESVEVSANPDPTEGRVNELPPTMKTVSPYACQRRTTLNNRNQRFTDSLDILRENYEFKRNDDTALEFRRAISVLKSLPFEVRSLKDTEGLPWIGDEVKGIMEEIISVGESREVQAVLNDEWYQSFHAFTSVFGVGVKTADKWYRMGLRTLEDVRSSKTLKLTPMQKVGLLYYEDLARGVTRAEADAIWLLVQDAVATFDPDAIVEIVGGFRRGKPQGHDVDLLISSPGAEKEQEDQLLQKVMNLWKKQGLLLYGRLEWSQWEDGGSPSGKADEGDAEAKCFLILKLYDHLVRKSKRNMPTGSNMGESKPWKAIRVDLLRCPYGSFAFAMLQWTGSRMFRRDLRWYALDEKNMMLDNHSLYDLTKGIFLPAKSEEEIFEHLGLDYLEPFERNA

SEQ ID NO: 3663 - DNA, 1587 bp, synthetic construct
  misc_feature 1..1587: note = Variant of terminal deoxynucleotidyltransferase
  source 1..1587: mol_type = other DNA
atgcaccatcatcatcatcatggcggtagcggcagccacggcattcgtaccatcgattcggacttcgggaagaaacagcagaaaaaaggcgataaccacgatagttccgccacttatgaaatcaaatttcacgagtttgtgctgttcattctcgaagaaaaaatgggtgcgacgcgtcgtacttttctgacagatttagcccgcaagaaagggttccgcgtcgagaatgaactgaccgacgaagttacccacatcgtggcagaaaatctgtcacgctctgaagtattggcttggctgaaagaacacaagatggagaagaccaagcaattcgaactgctggatattagctggcttatcgaaagcatgaaagttggtaaaccggtggacaccaaggggaaataccagttggcggaatcggttgaggtgagtgcgaacccagatccgacagaaggtcgtgtaaacgagctgcctcctactatgaaaaccgtttctccgtatgcgtgtcaacgccgcaccaccctgaacaaccgtaatcaacgttttacggactcgctggacattcttcgtgaaaattacgagttcaaacgcaacgatgatactgcgctggaatttcgtcgtgctatctccgtgctgaaaagccttccgtttgaggtacgtagcctgaaagacacggaaggattgccctggatcggtgatgaagtcaaagggattatggaagaaatcatctcggtcggggagtcgcgtgaagtgcaggccgtgctcaatgatgagtggtatcaaagcttccacgcatttacgagtgtctttggagtgggggtgaagacagcagacaagtggtaccgtatgggtctgcgcaccctcgaggatgttcgttccagcaagaccctgaagttgaccccgatgcagaaagtaggtctgctgtattatgaagatcttgctcgcggcgttacgcgtgccgaagctgacgcgatttggctgctggttcaggatgcagtcgcaactttcgacccggatgcgatcgtggagattgtcggtggatttcgtcgtgggaaacctcagggtcacgacgttgatctgcttatcagttctccgggagctgagaaagagcaagaagaccaactcctgcagaaagtgatgaatctgtggaagaaacaagggttgttgctgtacggtcgtctggaatggagtcagtgggaagatgggggttcgccttccggtaaggctgacgagggtgacgcggaggcgaaatgctttctgatcctcaaactttatgatcatctggtgcgtaaaagtaaacgcaatatgccgactggttcgaacatgggcgagtccaaaccgtggaaagcaattcgcgtagatctgctgcgttgcccctatggcagttttgcgtttgcgatgttgcagtggaccggaagccgcatgttccgtcgtgatctgcgttggtacgccactgacgagaagaacatgatgctggacaatcattcgctgtatgacctgaccaaaggcatcttcctccctgctaaatcggaagaggaaattttcgaacatctggggcttgaatacctggaaccgttcgaacgtaacgca

SEQ ID NO: 3664 - protein, 529 aa, synthetic construct
  REGION 1..529: note = Variant of terminal deoxynucleotidyltransferase
MHHHHHHGGSGSHGIRTIDSDFGKKQQKKGDNHDSSATYEIKFHEFVLFILEEKMGATRRTFLTDLARKKGFRVENELTDEVTHIVAENLSRSEVLAWLKEHKMEKTKQFELLDISWLIESMKVGKPVDTKGKYQLAESVEVSANPDPTEGRVNELPPTMKTVSPYACQRRTTLNNRNQRFTDSLDILRENYEFKRNDDTALEFRRAISVLKSLPFEVRSLKDTEGLPWIGDEVKGIMEEIISVGESREVQAVLNDEWYQSFHAFTSVFGVGVKTADKWYRMGLRTLEDVRSSKTLKLTPMQKVGLLYYEDLARGVTRAEADAIWLLVQDAVATFDPDAIVEIVGGFRRGKPQGHDVDLLISSPGAEKEQEDQLLQKVMNLWKKQGLLLYGRLEWSQWEDGGSPSGKADEGDAEAKCFLILKLYDHLVRKSKRNMPTGSNMGESKPWKAIRVDLLRCPYGSFAFAMLQWTGSRMFRRDLRWYATDEKNMMLDNHSLYDLTKGIFLPAKSEEEIFEHLGLEYLEPFERNA

SEQ ID NO: 3665 - DNA, 1587 bp, synthetic construct
  misc_feature 1..1587: note = Variant of terminal deoxynucleotidyltransferase
  source 1..1587: mol_type = other DNA
atgcaccatcatcatcatcatggcggtagcggcagccacggcattcgtaccatcgattcggacttcgggaagaaacagcagaaaaaaggcgataaccacgatagttccgccacttatgaaatcaaatttcacgagtttgtgctgttcattctcgaagaaaaaatgggtgcgacgcgtcgtacttttctgacagatttagcccgcaagaaagggttccgcgtcgagaatgaactgaccgacgaagttacccacatcgtggcagaaaatctgtcacgctctgaagtattggcttggctgaaagaacacaagatggagaagaccaagcaattcgaactgctggatattagctggcttatcgaaagcatgaaagttggtaaaccggtggacaccaaggggaaataccagttggcggaatcggttgaggtgagtgcgaacccagatccgacagaaggtcgtgtaaacgagctgcctcctactatgaaaaccgtttctccgtatgcgtgtcaacgccgcaccaccctgaacaaccgtaatcaacgttttacggactcgctggagattcttcgtgaaaattacgagttcaaacgcaacgaggatactgcgctggaatttcgtcgtgctatctccgtgctgaaaagccttccgtttgaggtacgtagcctgaaagacacggaaggattgccctggatcagtgatgaagtcaaagggattatggaagaaatcatctcggtcggggagtcgaaggaagtgcaggccgtgctcaatgatgagtggtatcaaagcttccacgcatttacgagtgtctttggagtgggggtgaagacagcagacaagtggtaccgtatgggtctgcgcaccctcgaggatgttcgttccagcaagaccctgaagttgaccccgatgcagaaagtaggtctgctgtattatgaagatcttgctcgcggcgttacgcgtgccgaagctgacgcgatttggctgctggttcaggatgcagtcgcaactttcgacccggatgcgatcgtggagattgtcggtggatttcgtcgtgggaaacctcagggtcacgacgttgatctgcttatcagttctccgggagctgagaaagagcaagaagaccaactcctgcagaaagtgatgaatctgtggaagaaacaagggttgttgctgtacggtcgtctggagtggagtcagtgggaagatgggggttcgccttccggtaaggctgacgagggtgacgcggaggcgaaatgctttctgatcctcaaactttatgatcatctggtgcgtaaaagtaaacgcaatatgccgactggttcgaacatgggcgagtccaaaccgtggaaagcaattcgcgtagatctgctgcgttgcccctatggcagttttgcgtttgcgatgttgcagtggaccggaagccgcatgttccgtcgtgatctgcgttggtacgccactgaagagaagaacatgatgctggacaatcattcgctgtatgacctgaccaaaggcatcttcctccctgctaaatcggaagaggaaattttcgaacatctggggcttgaatacctggaaccgttcgaacgtaacgca

SEQ ID NO: 3666 - protein, 529 aa, synthetic construct
  REGION 1..529: note = Variant of terminal deoxynucleotidyltransferase
MHHHHHHGGSGSHGIRTIDSDFGKKQQKKGDNHDSSATYEIKFHEFVLFILEEKMGATRRTFLTDLARKKGFRVENELTDEVTHIVAENLSRSEVLAWLKEHKMEKTKQFELLDISWLIESMKVGKPVDTKGKYQLAESVEVSANPDPTEGRVNELPPTMKTVSPYACQRRTTLNNRNQRFTDSLEILRENYEFKRNEDTALEFRRAISVLKSLPFEVRSLKDTEGLPWISDEVKGIMEEIISVGESKEVQAVLNDEWYQSFHAFTSVFGVGVKTADKWYRMGLRTLEDVRSSKTLKLTPMQKVGLLYYEDLARGVTRAEADAIWLLVQDAVATFDPDAIVEIVGGFRRGKPQGHDVDLLISSPGAEKEQEDQLLQKVMNLWKKQGLLLYGRLEWSQWEDGGSPSGKADEGDAEAKCFLILKLYDHLVRKSKRNMPTGSNMGESKPWKAIRVDLLRCPYGSFAFAMLQWTGSRMFRRDLRWYATEEKNMMLDNHSLYDLTKGIFLPAKSEEEIFEHLGLEYLEPFERNA

SEQ ID NO: 3667 - DNA, 1587 bp, synthetic construct
  misc_feature 1..1587: note = Variant of terminal deoxynucleotidyltransferase
  source 1..1587: mol_type = other DNA
atgcaccatcatcatcatcatggcggtagcggcagccacggcattcgtaccatcgattcggacttcgggaagaaacagcagaaaaaaggcgataaccacgatagttccgccacttatgaaatcaaatttcacgagtttgtgctgttcattctcgaagaaaaaatgggtgcgacgcgtcgtacttttctgacagatttagcccgcaagaaagggttccgcgtcgagaatgaactgaccgacgaagttacccacatcgtggcagaaaatctgtcacgctctgaagtattggcttggctgaaagaacacaagatggagaagaccaagcaattcgaactgctggatattagctggcttatcgaaagcatgaaagttggtaaaccggtggacaccaaggggaaataccagttggcggaatcggttgaggtgagtgcgaacccagatccgacagaaggtcgtgtaaacgagctgcctcctactatgaaaaccgtttctccgtatgcgtgtcaacgccgcaccaccctgaacaaccgtaatcaacgttttacggactcgctggacattcttcgtgaaaattacgagttcaaacgcaacgatgatactgcgctggaatttcgtcgtgctatctccgtgctgaaaagccttccgtttgaggtacgtagcctgaaagacacggaaggattgccctggatcagtgatgaagtcaaagggattatggaagaaatcatcgaagtcggggagtcgaaggaagtgcaggccgtgctcaatgatgagtggtatcaaagcttccacgcatttacgagtgtctttggagtgggggtgaagacagcagacaagtggtaccgtatgggtctgcgcaccctcgaggatgttcgttccagcaagaccctgaagttgaccccgatgcagaaagtaggtctgctgtattatgaagatcttgctcgcggcgttacgcgtgccgaagctgacgcgatttggctgctggttcaggatgcagtcgcaactttcgacccggatgcgatcgtggagattgtcggtggatttcgtcgtgggaaacctcagggtcacgacgttgatctgcttatcagttctccgggagctgagaaggagcaagaagaccaactcctgcagaaagtgatgaatctgtggaagaaacaagggttgttgctgtacggtcgtctggagtggagtcagtgggaagatgggggttcgccttccggtaaggctgacgagggtgacgcggaggcgaaatgctttctgatcctcaaactttatgatcatctggtgcgtaaaagtaaacgcaatatgccgactggttcgaacatgggcgagtccaaaccgtggaaagcaattcgcgtagatctgctgcgttgcccctatggcagttttgcgtttgcgatgttgcagtggaccggaagccgcatgttccgtcgtgatctgcgttggtacgccactgaagagaagaacatgatgctggacaatcattcgctgtatgacctgaccaaaggcatcttcctccctgctaaatcggaagaggaaattttcgaacatctggggcttgaatacctggaaccgttcgaacgtaacgca

SEQ ID NO: 3668 - protein, 529 aa, synthetic construct
  REGION 1..529: note = Variant of terminal deoxynucleotidyltransferase
MHHHHHHGGSGSHGIRTIDSDFGKKQQKKGDNHDSSATYEIKFHEFVLFILEEKMGATRRTFLTDLARKKGFRVENELTDEVTHIVAENLSRSEVLAWLKEHKMEKTKQFELLDISWLIESMKVGKPVDTKGKYQLAESVEVSANPDPTEGRVNELPPTMKTVSPYACQRRTTLNNRNQRFTDSLDILRENYEFKRNDDTALEFRRAISVLKSLPFEVRSLKDTEGLPWISDEVKGIMEEIIEVGESKEVQAVLNDEWYQSFHAFTSVFGVGVKTADKWYRMGLRTLEDVRSSKTLKLTPMQKVGLLYYEDLARGVTRAEADAIWLLVQDAVATFDPDAIVEIVGGFRRGKPQGHDVDLLISSPGAEKEQEDQLLQKVMNLWKKQGLLLYGRLEWSQWEDGGSPSGKADEGDAEAKCFLILKLYDHLVRKSKRNMPTGSNMGESKPWKAIRVDLLRCPYGSFAFAMLQWTGSRMFRRDLRWYATEEKNMMLDNHSLYDLTKGIFLPAKSEEEIFEHLGLEYLEPFERNA

SEQ ID NO: 3669 - DNA, 1587 bp, synthetic construct
  misc_feature 1..1587: note = Variant of terminal deoxynucleotidyltransferase
  source 1..1587: mol_type = other DNA
atgcaccatcatcatcatcatggcggtagcggcagccacggcattcgtaccatcgattcggacttcgggaagaaacagcagaaaaaaggcgataaccacgatagttccgccacttatgaaatcaaatttcacgagtttgtgctgttcattctcgaagaaaaaatgggtgcgacgcgtcgtacttttctgacagatttagcccgcaagaaagggttccgcgtcgagaatgaactgaccgacgaagttacccacatcgtggcagaaaatctgtcacgctctgaagtattggcttggctgaaagaacacaagatggagaagaccaagcaattcgaactgctggatattagctggcttatcgaaagcatgaaagttggtaaaccggtggacaccaaggggaaataccagttggcggaatcggttgaggtgagtgcgaacccagatccgacagaaggtcgtgtaaacgagctgcctcctactatgaaaaccgtttctccgtatgcgtgtcaacgccgcaccaccctgaacaaccgtaatcaacgttttacggactcgctggagattcttcgtgaaaattacgagttcaaacgcaacgatgatactgcgctggaatttcgtcgtgctatctccgtgctgaaaagccttccgtttgaggtacgtagcctgaaagacacggaaggattgccctggatcagtgatgaagtcaaagggattatggaagaaatcatcgaagtcggggagtcgcgtgaagtgcaggccgtgctcaatgatgagtggtatcaaagcttccacgcatttacgagtgtctttggagtgggggtgaagacagcagacaagtggtaccgtatgggtctgcgcaccctcgaggatgttcgttccagcaagaccctgaagttgaccccgatgcagaaagtaggtctgctgtattatgaagatcttgctcgcggcgttacgcgtgccgaagctgacgcgatttggctgctggttcaggatgcagtcgcaactttcgacccggatgcgatcgtggagattgtcggtggatttcgtcgtgggaaacctcagggtcacgacgttgatctgcttatcagttctccgggagctgagaaagagcaagaagaccaactcctgcagaaagtgatgaatctgtggaagaaacaagggttgttgctgtacggtcgtctggagtggagtcagtgggaagatgggggttcgccttccggtaaggctgacgagggtgacgcggaggcgaaatgctttctgatcctcaaactttatgatcatctggtgcgtaaaagtaaacgcaatatgccgactggttcgaacatgggcgagtccaaaccgtggaaagcaattcgcgtagatctgctgcgttgcccctatggcagttttgcgtttgcgatgttgcagtggaccggaagccgcatgttccgtcgtgatctgcgttggtacgccctggaagagaagaacatgatgctggacaatcattcgctgtatgacatgacccgcggtatcttcctccctgctaaatcggaagaggaaattttcgaacatctggggcttgaatacctggaaccgttcgaacgtaacgca

SEQ ID NO: 3670 - protein, 529 aa, synthetic construct
  REGION 1..529: note = Variant of terminal deoxynucleotidyltransferase
MHHHHHHGGSGSHGIRTIDSDFGKKQQKKGDNHDSSATYEIKFHEFVLFILEEKMGATRRTFLTDLARKKGFRVENELTDEVTHIVAENLSRSEVLAWLKEHKMEKTKQFELLDISWLIESMKVGKPVDTKGKYQLAESVEVSANPDPTEGRVNELPPTMKTVSPYACQRRTTLNNRNQRFTDSLEILRENYEFKRNDDTALEFRRAISVLKSLPFEVRSLKDTEGLPWISDEVKGIMEEIIEVGESREVQAVLNDEWYQSFHAFTSVFGVGVKTADKWYRMGLRTLEDVRSSKTLKLTPMQKVGLLYYEDLARGVTRAEADAIWLLVQDAVATFDPDAIVEIVGGFRRGKPQGHDVDLLISSPGAEKEQEDQLLQKVMNLWKKQGLLLYGRLEWSQWEDGGSPSGKADEGDAEAKCFLILKLYDHLVRKSKRNMPTGSNMGESKPWKAIRVDLLRCPYGSFAFAMLQWTGSRMFRRDLRWYALEEKNMMLDNHSLYDMTRGIFLPAKSEEEIFEHLGLEYLEPFERNA

SEQ ID NO: 3671 - DNA, 1587 bp, synthetic construct
  misc_feature 1..1587: note = Variant of terminal deoxynucleotidyltransferase
  source 1..1587: mol_type = other DNA
atgcaccatcatcatcatcatggcggtagcggcagccacggcattcgtaccatcgattcggacttcgggaagaaacagcagaaaaaaggcgataaccacgatagttccgccacttatgaaatcaaatttcacgagtttgtgctgttcattctcgaagaaaaaatgggtgcgacgcgtcgtacttttctgacagatttagcccgcaagaaagggttccgcgtcgagaatgaactgaccgacgaagttacccacatcgtggcagaaaatctgtcacgctctgaagtattggcttggctgaaagaacacaagatggagaagaccaagcaattcgaactgctggatattagctggcttatcgaaagcatgaaagttggtaaaccggtggacaccaaggggaaataccagttggcggaatcggttgaggtgagtgcgaacccagatccgacagaaggtcgtgtaaacgagctgcctcctactatgaaaaccgtttctccgtatgcgtgtcaacgccgcaccaccctgaacaaccgtaatcaacgttttacggactcgctggagattcttcgtgaaaattacgagttcaaacgcaacgatgatactgcgctggaatttcgtcgtgctatctccgtgctgaaaagccttccgtttgaggtacgtagcctgaaagacacggaaggattgccctggatcagtgatgaagtcaaagggattatggaagaaatcatcgaagtcggggagtcgcgtgaagtgcaggccgtgctcaatgatgagtggtatcaaagcttccacgcatttacgagtgtctttggagtgggggtgattacagcagacaagtggtaccgtatgggtctgcgcaccctcgaggatgttcgttccagcaagaccctgaagctgaccccgatgcagaaagtaggtctgctgtattatgaagatcttgctcgcggcgttacgcgtgccgaagctgacgcgatttggctgctggttcaggatgcagtcgcaactttcgacccggatgcgatcgtggagattgtcggtggatttcgtcgtgggaaacctcagggtcacgacgttgatctgcttatcagttctccgggagctgagaaagagcaagaagaccaactcctgcagaaagtgatgaatctgtggaagaaacaagggttgttgctgtacggtcgtctggagtggagtcagtgggaagatgggggttcgccttccggtaaggcggacgagggtgacgcggaggcgtcgtgctttctgatcctcaaactttatgatcatctggtgcgtaaaagtaaacgcaatatgccgactggttcgaacatgggcgagtccaaaccgtggaaagcaattcgcgtagatctgctgcgttgcccctatggcagttttgcgtttgcgatgttgcagtggaccggaagccgcatgttccgtcgtgatctgcgttggtacgccctggaagagaagaacatgatgctggacaatcattcgctgtatgacatgacccgcggtatcttcctccctgctaaatcggaagaggaaattttcgaacatctggggcttgaatacctggaaccgttcgaacgtaacgca

SEQ ID NO: 3672 - protein, 529 aa, synthetic construct
  REGION 1..529: note = Variant of terminal deoxynucleotidyltransferase
MHHHHHHGGSGSHGIRTIDSDFGKKQQKKGDNHDSSATYEIKFHEFVLFILEEKMGATRRTFLTDLARKKGFRVENELTDEVTHIVAENLSRSEVLAWLKEHKMEKTKQFELLDISWLIESMKVGKPVDTKGKYQLAESVEVSANPDPTEGRVNELPPTMKTVSPYACQRRTTLNNRNQRFTDSLEILRENYEFKRNDDTALEFRRAISVLKSLPFEVRSLKDTEGLPWISDEVKGIMEEIIEVGESREVQAVLNDEWYQSFHAFTSVFGVGVITADKWYRMGLRTLEDVRSSKTLKLTPMQKVGLLYYEDLARGVTRAEADAIWLLVQDAVATFDPDAIVEIVGGFRRGKPQGHDVDLLISSPGAEKEQEDQLLQKVMNLWKKQGLLLYGRLEWSQWEDGGSPSGKADEGDAEASCFLILKLYDHLVRKSKRNMPTGSNMGESKPWKAIRVDLLRCPYGSFAFAMLQWTGSRMFRRDLRWYALEEKNMMLDNHSLYDMTRGIFLPAKSEEEIFEHLGLEYLEPFERNA

SEQ ID NO: 3673 - DNA, 1587 bp, synthetic construct
  misc_feature 1..1587: note = Variant of terminal deoxynucleotidyltransferase
  source 1..1587: mol_type = other DNA
atgcaccatcatcatcatcatggcggtagcggcagccacggcattcgtaccatcgattcggacttcgggaagaaacagcagaaaaaaggcgataaccacgatagttccgccacttatgaaatcaaatttcacgagtttgtgctgttcattctcgaagaaaaaatgggtgcgacgcgtcgtacttttctgacagatttagcccgcaagaaagggttccgcgtcgagaatgaactgaccgacgaagttacccacatcgtggcagaaaatctgtcacgctctgaagtattggcttggctgaaagaacacaagatggagaagaccaagcaattcgaactgctggatattagctggcttatcgaaagcatgaaagttggtaaaccggtggacaccaaggggaaataccagttggcggaatcggttgaggtgagtgcgaacccagatccgacagaaggtcgtgtaaacgagctgcctcctactatgaaaaccgtttctccgtatgcgtgtcaacgccgcaccaccctgaacaaccgtaatcaacgttttacggactcgctggagattcttcgtgaaaattacgagttcaaacgcaacgatgatactgcgctggaatttcgtcgtgctatctccgtgctgaaaagccttccgtttgaggtacgtagcctgaaagacacggaaggattgccctggatcagtgatgaagtcaaagggattatggaagaaatcatcgaagtcggggagtcgcgtgaagtgcaggccgtgctcaatgatgagtggtatcaaagcttccacgcatttacgagtgtctttggagtgggggtgaagacagcagacaagtggtaccgtatgggtctgcgcaccctcgaggatgttcgttccagcaagaccctgaagttgaccccgatgcagaaagtaggtctgctgtattatgaagatcttgctcgcggcgttacgcgtgccgaagctgacgcgatttggctgctggttcaggatgcagtcgcaactttcgacccggatgcgatcgtggagattgtcggtggatttcgtcgtgggaaacctcagggtcacgacgttgatctgcttatcagttctccgggagctgagaaagagcaagaagaccaactcctgcagaaagtgatgaatctgtggaagaaacaagggttgttgctgtacggtcgtctggagtggagtcagtgggaagatgggggttcgccttccggtaaggctgacgagggtgacgcggaggcgtcgtgctttctgatcctcaaactttatgatcatctggtgcgtaaaagtaaacgcaatatgccgactggttcgaacatgggcgagtccaaaccgtggaaagcaattcgcgtagatctgctgcgttgcccctatggcagttttgcgtttgcgatgttgcagtggaccggaagccgcatgttccgtcgtgatctgcgttggtacgccctggaagagaagaacatgatgctggacaatcattcgctgtatgacatgacccgcggtatcttcctccctgctaaatcggaagaggaaattttcgaacatctggggcttgaatacctggaaccgttcgaacgtaacgca

SEQ ID NO: 3674 - protein, 529 aa, synthetic construct
  REGION 1..529: note = Variant of terminal deoxynucleotidyltransferase
MHHHHHHGGSGSHGIRTIDSDFGKKQQKKGDNHDSSATYEIKFHEFVLFILEEKMGATRRTFLTDLARKKGFRVENELTDEVTHIVAENLSRSEVLAWLKEHKMEKTKQFELLDISWLIESMKVGKPVDTKGKYQLAESVEVSANPDPTEGRVNELPPTMKTVSPYACQRRTTLNNRNQRFTDSLEILRENYEFKRNDDTALEFRRAISVLKSLPFEVRSLKDTEGLPWISDEVKGIMEEIIEVGESREVQAVLNDEWYQSFHAFTSVFGVGVKTADKWYRMGLRTLEDVRSSKTLKLTPMQKVGLLYYEDLARGVTRAEADAIWLLVQDAVATFDPDAIVEIVGGFRRGKPQGHDVDLLISSPGAEKEQEDQLLQKVMNLWKKQGLLLYGRLEWSQWEDGGSPSGKADEGDAEASCFLILKLYDHLVRKSKRNMPTGSNMGESKPWKAIRVDLLRCPYGSFAFAMLQWTGSRMFRRDLRWYALEEKNMMLDNHSLYDMTRGIFLPAKSEEEIFEHLGLEYLEPFERNA

SEQ ID NO: 3675 - DNA, 1587 bp, synthetic construct
  misc_feature 1..1587: note = Variant of terminal deoxynucleotidyltransferase
  source 1..1587: mol_type = other DNA
atgcaccatcatcatcatcatggcggtagcggcagccacggcattcgtaccatcgattcggacttcgggaagaaacagcagaaaaaaggcgataaccacgatagttccgccacttatgaaatcaaatttcacgagtttgtgctgttcattctcgaagaaaaaatgggtgcgacgcgtcgtacttttctgacagatttagcccgcaagaaagggttccgcgtcgagaatgaactgaccgacgaagttacccacatcgtggcagaaaatctgtcacgctctgaagtattggcttggctgaaagaacacaagatggagaagaccaagcaattcgaactgctggatattagctggcttatcgaaagcatgaaagttggtaaaccggtggacaccaaggggaaataccagttggcggaatcggttgaggtgagtgcgaacccagatccgacagaaggtcgtgtaaacgagctgcctcctactatgaaaaccgtttctccgtatgcgtgtcaacgccgcaccaccctgaacaaccgtaatcaacgttttacggactcgctggagattcttcgtgaaaattacgagttcaaacgcaacgatgatactgcgctggaatttcgtcgtgctatctccgtgctgaaaagccttccgtttgaggtacgtagcctgaaagacacggaaggattgccctggatcagtgatgaagtcaaagggattatggaagaaatcatcgaagtcggggagtcgcgtgaagtgcaggccgtgctcaatgatgagtggtatcaaagcttccacgcatttacgagtgtctttggagtgggggtggcgacagcagacaagtggtaccgtatgggtctgcgcaccctcgaggatgttcgttccagcaagaccctgaagctgaccccgatgcagaaagtaggtctgctgtattatgaagatcttgctcgcggcgttacgcgtgccgaagctgacgcgatttggctgctggttcaggatgcagtcgcaactttcgacccggatgcgatcgtggagattgtcggtggatttcgtcgtgggaaacctcagggtcacgacgttgatctgcttatcagttctccgggagctgagaaagagcaagaagaccaactcctgcagaaagtgatgaatctgtggaagaaacaagggttgttgctgtacggtcgtctggagtggagtcagtgggaagatgggggttcgccttccggtaagatcgacgagggtgacgcggaggcgtcgtgctttctgatcctcaaactttatgatcatctggtgcgtaaaagtaaacgcaatatgccgactggttcgaacatgggcgagtccaaaccgtggaaagcaattcgcgtagatctgctgcgttgcccctatggcagttttgcgtttgcgatgttgcagtggaccggaagccgcatgttccgtcgtgatctgcgttggtacgccctggaagagaagaacatgatgctggacaatcattcgctgtatgacatgacccgcggtatcttcctccctgctaaatcggaagaggaaattttcgaacatctggggcttgaatacctggaaccgttcgaacgtaacgca

SEQ ID NO: 3676 - protein, 529 aa, synthetic construct
  REGION 1..529: note = Variant of terminal deoxynucleotidyltransferase
MHHHHHHGGSGSHGIRTIDSDFGKKQQKKGDNHDSSATYEIKFHEFVLFILEEKMGATRRTFLTDLARKKGFRVENELTDEVTHIVAENLSRSEVLAWLKEHKMEKTKQFELLDISWLIESMKVGKPVDTKGKYQLAESVEVSANPDPTEGRVNELPPTMKTVSPYACQRRTTLNNRNQRFTDSLEILRENYEFKRNDDTALEFRRAISVLKSLPFEVRSLKDTEGLPWISDEVKGIMEEIIEVGESREVQAVLNDEWYQSFHAFTSVFGVGVATADKWYRMGLRTLEDVRSSKTLKLTPMQKVGLLYYEDLARGVTRAEADAIWLLVQDAVATFDPDAIVEIVGGFRRGKPQGHDVDLLISSPGAEKEQEDQLLQKVMNLWKKQGLLLYGRLEWSQWEDGGSPSGKIDEGDAEASCFLILKLYDHLVRKSKRNMPTGSNMGESKPWKAIRVDLLRCPYGSFAFAMLQWTGSRMFRRDLRWYALEEKNMMLDNHSLYDMTRGIFLPAKSEEEIFEHLGLEYLEPFERNA

SEQ ID NO: 3677 - DNA, 1587 bp, synthetic construct
  misc_feature 1..1587: note = Variant of terminal deoxynucleotidyltransferase
  source 1..1587: mol_type = other DNA
atgcaccatcatcatcatcatggcggtagcggcagccacggcattcgtaccatcgattcggacttcgggaagaaacagcagaaaaaaggcgataaccacgatagttccgccacttatgaaatcaaatttcacgagtttgtgctgttcattctcgaagaaaaaatgggtgcgacgcgtcgtacttttctgacagatttagcccgcaagaaagggttccgcgtcgagaatgaactgaccgacgaagttacccacatcgtggcagaaaatctgtcacgctctgaagtattggcttggctgaaagaacacaagatggagaagaccaagcaattcgaactgctggatattagctggcttatcgaaagcatgaaagttggtaaaccggtggacaccaaggggaaataccagttggcggaatcggttgaggtgagtgcgaacccagatccgacagaaggtcgtgtaaacgagctgcctcctactatgaaaaccgtttctccgtatgcgtgtcaacgccgcaccaccctgaacaaccgtaatcaacgttttacggactcgctggagattcttcgtgaaaattacgagttcaaacgcaacgatgatactgcgctggaatttcgtcgtgctatctccgtgctgaaaagccttccgtttgaggtacgtagcctgaaagacacggaaggattgccctggatcagtgatgaagtcaaagggattatggaagaaatcatcgaagtcggggagtcgcgtgaagtgcaggccgtgctcaatgatgagtggtatcaaagcttccacgcatttacgagtgtctttggagtgggggtggcgacagcagacaagtggtaccgtatgggtctgcgcaccctcgaggatgttcgttccagcaagaccctgaagctgaacccgatgcagaaagtaggtctgctgtattatgaagatcttgctcgcggcgttacgcgtgccgaagctgacgcgatttggctgctggttcaggatgcagtcgcaactttcgacccggatgcgatcgtggagattgtcggtggatttcgtcgtgggaaacctcagggtcacgacgttgatctgcttatcagttctccgggagctgagaaagagcaagaagaccaactcctgcagaaagtgatgaatctgtggaagaaacaagggttgttgctgtacggtcgtctggagtggagtcagtgggaagatgggggttcgccttccggtaagatcgacgagggtgacgcggaggcgtcgtgctttctgatcctcaaactttatgatcatctggtgcgtaaaagtaaacgcaatatgccgactggttcgaacatgggcgagtccaaaccgtggaaagcaattcgcgtagatctgctgcgttgcccctatggcagttttgcgtttgcgatgttgcagtggaccggaagccgcatgttccgtcgtgatctgcgttggtacgccctggaagagaagaacatgatgctggacaatcattcgctgtatgacatgacccgcggtatcttcctccctgctaaatcggaagaggaaattttcgaacatctggggcttgaatacctggaaccgttcgaacgtaacgca

SEQ ID NO: 3678 - protein, 529 aa, synthetic construct
  REGION 1..529: note = Variant of terminal deoxynucleotidyltransferase
MHHHHHHGGSGSHGIRTIDSDFGKKQQKKGDNHDSSATYEIKFHEFVLFILEEKMGATRRTFLTDLARKKGFRVENELTDEVTHIVAENLSRSEVLAWLKEHKMEKTKQFELLDISWLIESMKVGKPVDTKGKYQLAESVEVSANPDPTEGRVNELPPTMKTVSPYACQRRTTLNNRNQRFTDSLEILRENYEFKRNDDTALEFRRAISVLKSLPFEVRSLKDTEGLPWISDEVKGIMEEIIEVGESREVQAVLNDEWYQSFHAFTSVFGVGVATADKWYRMGLRTLEDVRSSKTLKLNPMQKVGLLYYEDLARGVTRAEADAIWLLVQDAVATFDPDAIVEIVGGFRRGKPQGHDVDLLISSPGAEKEQEDQLLQKVMNLWKKQGLLLYGRLEWSQWEDGGSPSGKIDEGDAEASCFLILKLYDHLVRKSKRNMPTGSNMGESKPWKAIRVDLLRCPYGSFAFAMLQWTGSRMFRRDLRWYALEEKNMMLDNHSLYDMTRGIFLPAKSEEEIFEHLGLEYLEPFERNA

SEQ ID NO: 3679 - DNA, 1587 bp, synthetic construct
  misc_feature 1..1587: note = Variant of terminal deoxynucleotidyltransferase
  source 1..1587: mol_type = other DNA
atgcaccatcatcatcatcatggcggtagcggcagccacggcattcgtaccatcgattcggacttcgggaagaaacagcagaaaaaaggcgataaccacgatagttccgccacttatgaaatcaaatttcacgagtttgtgctgttcattctcgaagaaaaaatgggtgcgacgcgtcgtacttttctgacagatttagcccgcaagaaagggttccgcgtcgagaatgaactgaccgacgaagttacccacatcgtggcagaaaatctgtcacgctctgaagtattggcttggctgaaagaacacaagatggagaagaccaagcaattcgaactgctggatattagctggcttatcgaaagcatgaaagttggtaaaccggtggacaccaaggggaaataccagttggcggaatcggttgaggtgagtgcgaacccagatccgacagaaggtcgtgtaaacgagctgcctcctactatgaaaaccgtttctccgtatgcgtgtcaacgccgcaccaccctgaacaaccgtaatcaacgttttacggactcgctggagattcttcgtgaaaattacgagttcaaacgcaacgatgatactgcgctggaatttcgtcgtgctatctccgtgctgaaaagccttccgtttgaggtacgtagcctgaaagacacggaaggattgccctggatcagtgatgaagtcaaagggattatggaagaaatcatcgaagtcggggagtcgcgtgaagtgcaggccgtgctcaatgatgagtggtatcaaagcttccacgcatttacgagtgtctttggagtgggggtgaaaacagcagacaagtggtaccgtatgggtctgcgcaccctcgtcgatgttcgttccagcaagaccctgaagctgaacccgatgcagaaagtaggtctgctgtattatgaagatcttgctcgcggcgttacgcgtgccgaagctgacgcgatttggctgctggttcaggatgcagtcgcaactttcgacccggatgcgatcgtggagattgtcggtggatttcgtcgtgggaaacctcagggtcacgacgttgatctgcttatcagttctccgggagctgagaaagagcaagaagaccaactcctgcagaaagtgatgaatctgtggaagaaacaagggttgttgctgtacggtcgtctggagtggagtcagtgggaagatgggggttcgccttccggtaaggcggacgagggtgacgcggaggcgtcgtgctttctgatcctcaaactttatgatcatctggtgcgtaaaagtaaacgcaatatgccgactggttcgaacatgggcgagtccaaaccgtggaaagcaattcgcgtagatctgctgcgttgcccctatggcagttttgcgtttgcgatgttgcagtggaccggaagccgcatgttccgtcgtgatctgcgttggtacgccctggaagagaagaacatgatgctggacaatcattcgctgtatgacatgacccgcggtatcttcctccctgctaaatcggaagaggaaattttcgaacatctggggcttgaatacctggaaccgttcgaacgtaacgca

SEQ ID NO: 3680 - protein, 529 aa, synthetic construct
  REGION 1..529: note = Variant of terminal deoxynucleotidyltransferase
MHHHHHHGGSGSHGIRTIDSDFGKKQQKKGDNHDSSATYEIKFHEFVLFILEEKMGATRRTFLTDLARKKGFRVENELTDEVTHIVAENLSRSEVLAWLKEHKMEKTKQFELLDISWLIESMKVGKPVDTKGKYQLAESVEVSANPDPTEGRVNELPPTMKTVSPYACQRRTTLNNRNQRFTDSLEILRENYEFKRNDDTALEFRRAISVLKSLPFEVRSLKDTEGLPWISDEVKGIMEEIIEVGESREVQAVLNDEWYQSFHAFTSVFGVGVKTADKWYRMGLRTLVDVRSSKTLKLNPMQKVGLLYYEDLARGVTRAEADAIWLLVQDAVATFDPDAIVEIVGGFRRGKPQGHDVDLLISSPGAEKEQEDQLLQKVMNLWKKQGLLLYGRLEWSQWEDGGSPSGKADEGDAEASCFLILKLYDHLVRKSKRNMPTGSNMGESKPWKAIRVDLLRCPYGSFAFAMLQWTGSRMFRRDLRWYALEEKNMMLDNHSLYDMTRGIFLPAKSEEEIFEHLGLEYLEPFERNA

SEQ ID NO: 3681 - DNA, 1587 bp, synthetic construct
  misc_feature 1..1587: note = Variant of terminal deoxynucleotidyltransferase
  source 1..1587: mol_type = other DNA
atgcaccatcatcatcatcatggcggtagcggcagccacggcattcgtaccatcgattcggacttcgggaagaaacagcagaaaaaaggcgataaccacgatagttccgccacttatgaaatcaaatttcacgagtttgtgctgttcattctcgaagaaaaaatgggtgcgacgcgtcgtacttttctgacagatttagcccgcaagaaagggttccgcgtcgagaatgaactgaccgacgaagttacccacatcgtggcagaaaatctgtcacgctctgaagtattggcttggctgaaagaacacaagatggagaagaccaagcaattcgaactgctggatattagctggcttatcgaaagcatgaaagttggtaaaccggtggacaccaaggggaaataccagttggcggaatcggttgaggtgagtgcgaacccagatccgacagaaggtcgtgtaaacgagctgcctcctactatgaaaaccgtttctccgtatgcgtgtcaacgccgcaccaccctgaacaaccgtaatcaacgttttacggactcgctggagattcttcgtgaaaattacgagttcaaacgcaacgatgatactgcgctggaatttcgtcgtgctatctccgtgctgaaaagccttccgtttgaggtacgtagcctgaaagacacggaaggattgccctggatcagtgatgaagtcaaagggattatggaagaaatcatcgaagtcggggagtcgcgtgaagtgcaggccgtgctcaatgatgagtggtatcaaagcttccacgcatttacgagtgtctttggagtggggatcaagacagcagacaagtggtaccgtatgggtctgcgcaccctcgaggatgttcgttccagcaagaccctgaagttgaccccgatgcagaaagtaggtctgctgtattatgaagatcttgctcgcggcgttacgcgtgccgaagctgacgcgatttggctgctggttcaggatgcagtcgcaactttcgacccggatgcgatcgtggagattgtcggtggatttcgtcgtgggaaacctcagggtcacgacgttgatctgcttatcagttctccgggagctgagaaagagcaagaagaccaactcctgcagaaagtgatgaatctgtggaagaaacaagggttgttgctgtacggtcgtctggagtggagtcagtgggaagatgggggttcgccttccggtaaggctgacgagggtgacgcggaggcgaaatgctttctgatcctcaaactttatgatcatctggtgcgtaaaagtaaacgcaatatgccgactggttcgaacatgggcgagtccaaaccgtggaaagcaattcgcgtagatctgctgcgttgcccctatggcagttttgcgtttgcgatgttgcagtggaccggaagccgcatgttccgtcgtgatctgcgttggtacgccctggaagagaagaacatgatgctggacaatcattcgctgtatgacatgacccgcggtatcttcctccctgctaaatcggaagaggaaattttcgaacatctggggcttgaatacctggaaccgttcgaacgtaacgca

SEQ ID NO: 3682 - protein, 529 aa, synthetic construct
  REGION 1..529: note = Variant of terminal deoxynucleotidyltransferase
MHHHHHHGGSGSHGIRTIDSDFGKKQQKKGDNHDSSATYEIKFHEFVLFILEEKMGATRRTFLTDLARKKGFRVENELTDEVTHIVAENLSRSEVLAWLKEHKMEKTKQFELLDISWLIESMKVGKPVDTKGKYQLAESVEVSANPDPTEGRVNELPPTMKTVSPYACQRRTTLNNRNQRFTDSLEILRENYEFKRNDDTALEFRRAISVLKSLPFEVRSLKDTEGLPWISDEVKGIMEEIIEVGESREVQAVLNDEWYQSFHAFTSVFGVGIKTADKWYRMGLRTLEDVRSSKTLKLTPMQKVGLLYYEDLARGVTRAEADAIWLLVQDAVATFDPDAIVEIVGGFRRGKPQGHDVDLLISSPGAEKEQEDQLLQKVMNLWKKQGLLLYGRLEWSQWEDGGSPSGKADEGDAEAKCFLILKLYDHLVRKSKRNMPTGSNMGESKPWKAIRVDLLRCPYGSFAFAMLQWTGSRMFRRDLRWYALEEKNMMLDNHSLYDMTRGIFLPAKSEEEIFEHLGLEYLEPFERNA

SEQ ID NO: 3683 - DNA, 1587 bp, synthetic construct
  misc_feature 1..1587: note = Variant of terminal deoxynucleotidyltransferase
  source 1..1587: mol_type = other DNA
atgcaccatcatcatcatcatggcggtagcggcagccacggcattcgtaccatcgattcggacttcgggaagaaacagcagaaaaaaggcgataaccacgatagttccgccacttatgaaatcaaatttcacgagtttgtgctgttcattctcgaagaaaaaatgggtgcgacgcgtcgtacttttctgacagatttagcccgcaagaaagggttccgcgtcgagaatgaactgaccgacgaagttacccacatcgtggcagaaaatctgtcacgctctgaagtattggcttggctgaaagaacacaagatggagaagaccaagcaattcgaactgctggatattagctggcttatcgaaagcatgaaagttggtaaaccggtggacaccaaggggaaataccagttggcggaatcggttgaggtgagtgcgaacccagatccgacagaaggtcgtgtaaacgagctgcctcctactatgaaaaccgtttctccgtatgcgtgtcaacgccgcaccaccctgaacaaccgtaatcaacgttttacggactcgctggagattcttcgtgaaaattacgagttcaaacgcaacgatgatactgcgctggaatttcgtcgtgctatctccgtgctgaaaagccttccgtttgaggtacgtagcctgaaagacacggaaggattgccctggatcagtgatgaagtcaaagggattatggaagaaatcatcgaagtcggggagtcgcgtgaagtgcaggccgtgctcaatgatgagtggtatcaaagcttccacgcatttacgagtgtctttggagtgggggtgaaaacagcagacaagtggtaccgtatgggtctgcgcaccctcgaggatgttcgttccagcaagaccctgaagatgaacccgatgcagaaagtaggtctgctgtattatgaagatcttgctcgcggcgttacgcgtgccgaagctgacgcgatttggctgctggttcaggatgcagtcgcaactttcgacccggatgcgatcgtggagattgtcggtggatttcgtcgtgggaaacctcagggtcacgacgttgatctgcttatcagttctccgggagctgagaaagagcaagaagaccaactcctgcagaaagtgatgaatctgtggaagaaacaagggttgttgctgtacggtcgtctggagtggagtcagtgggaagatgggggttcgccttccggtaaggcggacgagggtgacgcggaggcgtcgtgctttctgatcctcaaactttatgatcatctggtgcgtaaaagtaaacgcaatatgccgactggttcgaacatgggcgagtccaaaccgtggaaagcaattcgcgtagatctgctgcgttgcccctatggcagttttgcgtttgcgatgttgcagtggaccggaagccgcatgttccgtcgtgatctgcgttggtacgccctggaagagaagaacatgatgctggacaatcattcgctgtatgacatgacccgcggtatcttcctccctgctaaatcggaagaggaaattttcgaacatctggggcttgaatacctggaaccgttcgaacgtaacgca

SEQ ID NO: 3684 - protein, 529 aa, synthetic construct
  REGION 1..529: note = Variant of terminal deoxynucleotidyltransferase
MHHHHHHGGSGSHGIRTIDSDFGKKQQKKGDNHDSSATYEIKFHEFVLFILEEKMGATRRTFLTDLARKKGFRVENELTDEVTHIVAENLSRSEVLAWLKEHKMEKTKQFELLDISWLIESMKVGKPVDTKGKYQLAESVEVSANPDPTEGRVNELPPTMKTVSPYACQRRTTLNNRNQRFTDSLEILRENYEFKRNDDTALEFRRAISVLKSLPFEVRSLKDTEGLPWISDEVKGIMEEIIEVGESREVQAVLNDEWYQSFHAFTSVFGVGVKTADKWYRMGLRTLEDVRSSKTLKMNPMQKVGLLYYEDLARGVTRAEADAIWLLVQDAVATFDPDAIVEIVGGFRRGKPQGHDVDLLISSPGAEKEQEDQLLQKVMNLWKKQGLLLYGRLEWSQWEDGGSPSGKADEGDAEASCFLILKLYDHLVRKSKRNMPTGSNMGESKPWKAIRVDLLRCPYGSFAFAMLQWTGSRMFRRDLRWYALEEKNMMLDNHSLYDMTRGIFLPAKSEEEIFEHLGLEYLEPFERNA

SEQ ID NO: 3685 - DNA, 1587 bp, synthetic construct
  misc_feature 1..1587: note = Variant of terminal deoxynucleotidyltransferase
  source 1..1587: mol_type = other DNA
atgcaccatcatcatcatcatggcggtagcggcagccacggcattcgtaccatcgattcggacttcgggaagaaacagcagaaaaaaggcgataaccacgatagttccgccacttatgaaatcaaatttcacgagtttgtgctgttcattctcgaagaaaaaatgggtgcgacgcgtcgtacttttctgacagatttagcccgcaagaaagggttccgcgtcgagaatgaactgaccgacgaagttacccacatcgtggcagaaaatctgtcacgctctgaagtattggcttggctgaaagaacacaagatggagaagaccaagcaattcgaactgctggatattagctggcttatcgaaagcatgaaagttggtaaaccggtggacaccaaggggaaataccagttggcggaatcggttgaggtgagtgcgaacccagatccgacagaaggtcgtgtaaacgagctgcctcctactatgaaaaccgtttctccgtatgcgtgtcaacgccgcaccaccctgaacaaccgtaatcaacgttttacggactcgctggagattcttcgtgaaaattacgagttcaaacgcaacgatgatactgcgctggaatttcgtcgtgctatctccgtgctgaaaagccttccgtttgaggtacgtagcctgaaagacacggaaggattgccctggatcagtgatgaagtcaaagggattatggaagaaatcatcgaagtcggggagtcgcgtgaagtgcaggccgtgctcaatgatgagtggtatcaaagcttccacgcatttacgagtgtctttggagtggggatcaagacagcagacaagtggtaccgtatgggtctgcgcaccctcgaggatgttcgttccagcaagaccctgaagttgaccccgatgcagaaagtaggtctgctgtattatgaagatcttgctcgcggcgttacgcgtgccgaagctgacgcgatttggctgctggttcaggatgcagtcgcaactttcgacccggatgcgatcgtggagattgtcggtggatttcgtcgtgggaaacctcagggtcacgacgttgatctgcttatcagttctccgggagctgagaaagagcaagaagaccaactcctgcagaaagtgatgaatctgtggaagaaacaagggttgttgctgtacggtcgtctggagtggagtcagtgggaagatgggggttcgccttccggtaaggctgacgagggtgacgcggaggcgaaatgctttctgatcctcaaactttatgatcatctggtgcgtaaaagtaaacgcaatatgccgactggttcgaacatgggcgagtccaaaccgtggaaagcaattcgcgtagatctgctgcgttgcccctatggcagttttgcgtttgcgatgttgcagtggaccggaagccgcatgttccgtcgtgatctgcgttggtacgccctggaagagaagaacatgatgctggacaatcattcgctgtatgacctgacccgcggtatcttcctccctgctaaatcggaagaggaaattttcgaacatctggggcttgaatacctggaaccgttcgaacgtaacgca

SEQ ID NO: 3686 - protein, 529 aa, synthetic construct
  REGION 1..529: note = Variant of terminal deoxynucleotidyltransferase
MHHHHHHGGSGSHGIRTIDSDFGKKQQKKGDNHDSSATYEIKFHEFVLFILEEKMGATRRTFLTDLARKKGFRVENELTDEVTHIVAENLSRSEVLAWLKEHKMEKTKQFELLDISWLIESMKVGKPVDTKGKYQLAESVEVSANPDPTEGRVNELPPTMKTVSPYACQRRTTLNNRNQRFTDSLEILRENYEFKRNDDTALEFRRAISVLKSLPFEVRSLKDTEGLPWISDEVKGIMEEIIEVGESREVQAVLNDEWYQSFHAFTSVFGVGIKTADKWYRMGLRTLEDVRSSKTLKLTPMQKVGLLYYEDLARGVTRAEADAIWLLVQDAVATFDPDAIVEIVGGFRRGKPQGHDVDLLISSPGAEKEQEDQLLQKVMNLWKKQGLLLYGRLEWSQWEDGGSPSGKADEGDAEAKCFLILKLYDHLVRKSKRNMPTGSNMGESKPWKAIRVDLLRCPYGSFAFAMLQWTGSRMFRRDLRWYALEEKNMMLDNHSLYDLTRGIFLPAKSEEEIFEHLGLEYLEPFERNA

SEQ ID NO: 3687 - DNA, 1587 bp, synthetic construct
  misc_feature 1..1587: note = Variant of terminal deoxynucleotidyltransferase
  source 1..1587: mol_type = other DNA
atgcaccatcatcatcatcatggcggtagcggcagccacggcattcgtaccatcgattcggacttcgggaagaaacagcagaaaaaaggcgataaccacgatagttccgccacttatgaaatcaaatttcacgagtttgtgctgttcattctcgaagaaaaaatgggtgcgacgcgtcgtacttttctgacagatttagcccgcaagaaagggttccgcgtcgagaatgaactgaccgacgaagttacccacatcgtggcagaaaatctgtcacgctctgaagtattggcttggctgaaagaacacaagatggagaagaccaagcaattcgaactgctggatattagctggcttatcgaaagcatgaaagttggtaaaccggtggacaccaaggggaaataccagttggcggaatcggttgaggtgagtgcgaacccagatccgacagaaggtcgtgtaaacgagctgcctcctactatgaaaaccgtttctccgtatgcgtgtcaacgccgcaccaccctgaacaaccgtaatcaacgttttacggactcgctggagattcttcgtgaaaattacgagttcaaacgcaacgatgatactgcgctggaatttcgtcgtgctatctccgtgctgaaaagccttccgtttgaggtacgtagcctgaaagacacggaaggattgccctggatcagtgatgaagtcaaagggattatggaagaaatcatcgaagtcggggagtcgcgtgaagtgcaggccgtgctcaatgatgagtggtatcaaagcttccacgcatttacgagtgtctttggagtggggatcaagacagcagacaagtggtaccgcatgggtctgcgcaccctcgaggatgttcgttccagcaagaccctgaagttgaccccgatgcagaaagtaggtctgctgtattatgaagatcttgctcgcggcgttacgcgtgccgaagctgacgcgatttggctgctggttcaggatgcagtcgcaactttcgacccggatgcgatcgtggagattgtcggtggatttcgtcgtgggaaacctcagggtcacgacgttgatctgcttatcagttctccgggagctgagaaagagcaagaagaccaactcctgcagaaagtgatgaatctgtggaagaaacaagggttgttgctgtacggtcgtctggagtggagtcagtgggaagatgggggttcgccttccggtaaggctgacgagggtgacgcggaggcgaaatgctttctgatcctcaaactttatgatcatctggtgcgtaaaagtaaacgcaatatgccgactggttcgaacatgggcgagtccaaaccgtggaaagcaattcgcgtagatctgctgcgttgcccctatggcagttttgcgtttgcgatgttgcagtggaccggaagccgcatgttccgtcgtgatctgcgttggtacgccctggaagagaagaacatgatgctggacgtacattcgctgtatgacctgacccgcggtatcttcctccctgctaaatcggaagaggaaattttcgaacatctggggcttgaatacctggaaccgttcgaacgtaacgca

SEQ ID NO: 3688 - protein, 529 aa, synthetic construct
  REGION 1..529: note = Variant of terminal deoxynucleotidyltransferase
MHHHHHHGGSGSHGIRTIDSDFGKKQQKKGDNHDSSATYEIKFHEFVLFILEEKMGATRRTFLTDLARKKGFRVENELTDEVTHIVAENLSRSEVLAWLKEHKMEKTKQFELLDISWLIESMKVGKPVDTKGKYQLAESVEVSANPDPTEGRVNELPPTMKTVSPYACQRRTTLNNRNQRFTDSLEILRENYEFKRNDDTALEFRRAISVLKSLPFEVRSLKDTEGLPWISDEVKGIMEEIIEVGESREVQAVLNDEWYQSFHAFTSVFGVGIKTADKWYRMGLRTLEDVRSSKTLKLTPMQKVGLLYYEDLARGVTRAEADAIWLLVQDAVATFDPDAIVEIVGGFRRGKPQGHDVDLLISSPGAEKEQEDQLLQKVMNLWKKQGLLLYGRLEWSQWEDGGSPSGKADEGDAEAKCFLILKLYDHLVRKSKRNMPTGSNMGESKPWKAIRVDLLRCPYGSFAFAMLQWTGSRMFRRDLRWYALEEKNMMLDVHSLYDLTRGIFLPAKSEEEIFEHLGLEYLEPFERNA

SEQ ID NO: 3689 - DNA, 1587 bp, synthetic construct
  misc_feature 1..1587: note = Variant of terminal deoxynucleotidyltransferase
  source 1..1587: mol_type = other DNA
atgcaccatcatcatcatcatggcggtagcggcagccacggcattcgtaccatcgattcggacttcgggaagaaacagcagaaaaaaggcgataaccacgatagttccgccacttatgaaatcaaatttcacgagtttgtgctgttcattctcgaagaaaaaatgggtgcgacgcgtcgtacttttctgacagatttagcccgcaagaaagggttccgcgtcgagaatgaactgaccgacgaagttacccacatcgtggcagaaaatctgtcacgctctgaagtattggcttggctgaaagaacacaagatggagaagaccaagcaattcgaactgctggatattagctggcttatcgaaagcatgaaagttggtaaaccggtggacaccaaggggaaataccagttggcggaatcggttgaggtgagtgcgaacccagatccgacagaaggtcgtgtaaacgagctgcctcctactatgaaaaccgtttctccgtatgcgtgtcaacgccgcaccaccctgaacaaccgtaatcaacgttttacggactcgctggagattcttcgtgaaaattacgagttcaaacgcaacgatgatactgcgctggaatttcgtcgtgctatctccgtgctgaaaagccttccgtttgaggtacgtagcctgaaagacacggaaggattgccctggatcagtgatgaagtcaaagggattatggaagaaatcatcgaagtcggggagtcgcgtgaagtgcaggccgtgctcaatgatgagtggtatcaaagcttccacgcatttacgagtgtctttggagtggggatcaagacagcagacaagtggtaccgtatgggtctgcgcaccctcgaggatgttcgttccagcaagaccctgaagttgaccccgatgcagaaagtaggtctgctgtatatggaagatcttgctcgcggcgttacgcgtgccgaagctgacgcgatttggctgctggttcaggatgcagtcgcaactttcgacccggatgcgatcgtggagattgtcggtggatttcgtcgtgggaaacctcagggtcacgacgttgatctgcttatcagttctccgggagctgagaaagagcaagaagaccaactcctgcagaaagtgatgaatctgtggaagaaacaagggttgttgctgtacggtcgtctggagtggagtcagtgggaagatgggggttcgccttccggtaaggctgacgagggtgacgcggaggcgaaatgctttctgatcctcaaactttatgatcatctggtgcgtaaaagtaaacgcaatatgccgactggttcgaacatgggcgagtccaaaccgtggaaagcaattcgcgtagatctgctgcgttgcccctatggcagttttgcgtttgcgatgttgcagtggaccggaagccgcatgttccgtcgtgatctgcgttggtacgccctggaagagaagaacatgatgctggacgtacattcgctgtatgacctgacccgcggtatcttcctccctgctaaatcggaagaggaaattttcgaacatctggggcttgaatacctggaaccgttcgaacgtaacgca

SEQ ID NO: 3690 - protein, 529 aa, synthetic construct
  REGION 1..529: note = Variant of terminal deoxynucleotidyltransferase
MHHHHHHGGSGSHGIRTIDSDFGKKQQKKGDNHDSSATYEIKFHEFVLFILEEKMGATRRTFLTDLARKKGFRVENELTDEVTHIVAENLSRSEVLAWLKEHKMEKTKQFELLDISWLIESMKVGKPVDTKGKYQLAESVEVSANPDPTEGRVNELPPTMKTVSPYACQRRTTLNNRNQRFTDSLEILRENYEFKRNDDTALEFRRAISVLKSLPFEVRSLKDTEGLPWISDEVKGIMEEIIEVGESREVQAVLNDEWYQSFHAFTSVFGVGIKTADKWYRMGLRTLEDVRSSKTLKLTPMQKVGLLYMEDLARGVTRAEADAIWLLVQDAVATFDPDAIVEIVGGFRRGKPQGHDVDLLISSPGAEKEQEDQLLQKVMNLWKKQGLLLYGRLEWSQWEDGGSPSGKADEGDAEAKCFLILKLYDHLVRKSKRNMPTGSNMGESKPWKAIRVDLLRCPYGSFAFAMLQWTGSRMFRRDLRWYALEEKNMMLDVHSLYDLTRGIFLPAKSEEEIFEHLGLEYLEPFERNA

SEQ ID NO: 3691 - DNA, 1587 bp, synthetic construct
  misc_feature 1..1587: note = Variant of terminal deoxynucleotidyltransferase
  source 1..1587: mol_type = other DNA
atgcaccatcatcatcatcatggcggtagcggcagccacggcattcgtaccatcgattcggacttcgggaagaaacagcagaaaaaaggcgataaccacgatagttccgccacttatgaaatcaaatttcacgagtttgtgctgttcattctcgaagaaaaaatgggtgcgacgcgtcgtacttttctgacagatttagcccgcaagaaagggttccgcgtcgagaatgaactgaccgacgaagttacccacatcgtggcagaaaatctgtcacgctctgaagtattggcttggctgaaagaacacaagatggagaagaccaagcaattcgaactgctggatattagctggcttatcgaaagcatgaaagttggtaaaccggtggacaccaaggggaaataccagttggcggaatcggttgaggtgagtgcgaacccagatccgacagaaggtcgtgtaaacgagctgcctcctactatgaaaaccgtttctccgtatgcgtgtcaacgccgcaccaccctgaacaaccgtaatcaacgttttacggactcgctggagattcttcgtgaaaattacgagttcaaacgcaacgatgatactgcgctggaatttcgtcgtgctatctccgtgctgaaaagccttccgtttgaggtacgtagcctgaaagacacggaaggattgccctggatcagtgatgaagtcaaagggattatggaagaaatcatcgaagtcggggagtcgcgtgaagtgcaggccgtgctcaatgatgagtggtatcaaagcttccacgcatttacgagtgtctttggagtgggggtgaagacagcagacaagtggtaccgcatgggtctgcgcaccctcgaggatgttcgttccagcaagaccctgaagttgaccccgatgcagaaagtaggtctgctgtatatggaagatcttgctcgcggcgttacgcgtgccgaagctgacgcgatttggctgctggttcaggatgcagtcgcaactttcgacccggatgcgatcgtggagattgtcggtggatttcgtcgtgggaaacctcagggtcacgacgttgatctgcttatcagttctccgggagctgagaaagagcaagaagaccaactcctgcagaaagtgatgaatctgtggaagaaacaagggttgttgctgtacggtcgtctggagtggagtcagtgggaagatgggggttcgccttccggtaaggctgacgagggtgacgcggaggcgaaatgctttctgatcctcaaactttatgatcatctggtgcgtaaaagtaaacgcaatatgccgactggttcgaacatgggcgagtccaaaccgtggaaagcaattcgcgtagatctgctgcgttgcccctatggcagttttgcgtttgcgatgttgcagtggaccggaagccgcatgttccgtcgtgatctgcgttggtacgccctggaagagaagaacatgatgctggacaatcattcgctgtatgacatgacccgcggtatcttcctccctgctaaatcggaagaggaaattttcgaacatctggggcttgaatacctggaaccgttcgaacgtaacgca

SEQ ID NO: 3692 - protein, 529 aa, synthetic construct
  REGION 1..529: note = Variant of terminal deoxynucleotidyltransferase
MHHHHHHGGSGSHGIRTIDSDFGKKQQKKGDNHDSSATYEIKFHEFVLFILEEKMGATRRTFLTDLARKKGFRVENELTDEVTHIVAENLSRSEVLAWLKEHKMEKTKQFELLDISWLIESMKVGKPVDTKGKYQLAESVEVSANPDPTEGRVNELPPTMKTVSPYACQRRTTLNNRNQRFTDSLEILRENYEFKRNDDTALEFRRAISVLKSLPFEVRSLKDTEGLPWISDEVKGIMEEIIEVGESREVQAVLNDEWYQSFHAFTSVFGVGVKTADKWYRMGLRTLEDVRSSKTLKLTPMQKVGLLYMEDLARGVTRAEADAIWLLVQDAVATFDPDAIVEIVGGFRRGKPQGHDVDLLISSPGAEKEQEDQLLQKVMNLWKKQGLLLYGRLEWSQWEDGGSPSGKADEGDAEAKCFLILKLYDHLVRKSKRNMPTGSNMGESKPWKAIRVDLLRCPYGSFAFAMLQWTGSRMFRRDLRWYALEEKNMMLDNHSLYDMTRGIFLPAKSEEEIFEHLGLEYLEPFERNA

SEQ ID NO: 3693 - DNA, 1587 bp, synthetic construct
  misc_feature 1..1587: note = Variant of terminal deoxynucleotidyltransferase
  source 1..1587: mol_type = other DNA
atgcaccatcatcatcatcatggcggtagcggcagccacggcattcgtaccatcgattcggacttcgggaagaaacagcagaaaaaaggcgataaccacgatagttccgccacttatgaaatcaaatttcacgagtttgtgctgttcattctcgaagaaaaaatgggtgcgacgcgtcgtacttttctgacagatttagcccgcaagaaagggttccgcgtcgagaatgaactgaccgacgaagttacccacatcgtggcagaaaatctgtcacgctctgaagtattggcttggctgaaagaacacaagatggagaagaccaagcaattcgaactgctggatattagctggcttatcgaaagcatgaaagttggtaaaccggtggacaccaaggggaaataccagttggcggaatcggttgaggtgagtgcgaacccagatccgacagaaggtcgtgtaaacgagctgcctcctactatgaaaaccgtttctccgtatgcgtgtcaacgccgcaccaccctgaacaaccgtaatcaacgttttacggactcgctggagattcttcgtgaaaattacgagttcaaacgcaacgatgatactgcgctggaatttcgtcgtgctatctccgtgctgaaaagccttccgtttgaggtacgtagcctgaaagacacggaaggattgccctggatcagtgatgaagtcaaagggattatggaagaaatcatcgaagtcggggagtcgcgtgaagtgcaggccgtgctcaatgatgagtggtatcaaagcttccacgcatttacgagtgtctttggagtgggggtaaagacagcagacaagtggtaccgtatgggtctgcgcaccctcgaggatgttcgttccagcaagaccctgaagttgaccccgatgcagaaagtaggtctgctgtattatgaagatcttgctcgcggcgttacgcgtgccgaagctgacgcgatttggctgctggttcaggatgcagtcgcaactttcgacccggatgcgatcgtggagattgtcggtggatttcgtcgtgggaaacctcagggtcacgacgttgatctgcttatcagttctccgggagctgagaaagagcaagaagaccaactcctgcagaaagtgatgaatctgtggaagaaacaagggttgttgctgtacggtcgtctggagtggagtcagtgggaagatgggggttcgccttccggtaaggctgacgagggtgacgcggaggcgaaatgctttctgatcctcaaactttatgatcatctggtgcgtaaaagtaaacgcaatatgccgactggttcgaacatgggcgagtccaaaccgtggaaagcaattcgcgtagatctgctgcgttgcccctatggcagttttgcgtttgcgatgttgcagtggaccggaagccgcatgttccgtcgtgatctgcgttggtacgccctggaagagaagaacatgatgctggacgtacattcgctgtatgacctgacccgcggtatcttcctccctgctaaatcggaagaggaaattttcgaacatctggggcttgaatacctggaaccgttcgaacgtaacgca

SEQ ID NO: 3694 - protein, 529 aa, synthetic construct
  REGION 1..529: note = Variant of terminal deoxynucleotidyltransferase
MHHHHHHGGSGSHGIRTIDSDFGKKQQKKGDNHDSSATYEIKFHEFVLFILEEKMGATRRTFLTDLARKKGFRVENELTDEVTHIVAENLSRSEVLAWLKEHKMEKTKQFELLDISWLIESMKVGKPVDTKGKYQLAESVEVSANPDPTEGRVNELPPTMKTVSPYACQRRTTLNNRNQRFTDSLEILRENYEFKRNDDTALEFRRAISVLKSLPFEVRSLKDTEGLPWISDEVKGIMEEIIEVGESREVQAVLNDEWYQSFHAFTSVFGVGVKTADKWYRMGLRTLEDVRSSKTLKLTPMQKVGLLYYEDLARGVTRAEADAIWLLVQDAVATFDPDAIVEIVGGFRRGKPQGHDVDLLISSPGAEKEQEDQLLQKVMNLWKKQGLLLYGRLEWSQWEDGGSPSGKADEGDAEAKCFLILKLYDHLVRKSKRNMPTGSNMGESKPWKAIRVDLLRCPYGSFAFAMLQWTGSRMFRRDLRWYALEEKNMMLDVHSLYDLTRGIFLPAKSEEEIFEHLGLEYLEPFERNA

SEQ ID NO: 3695 - DNA, 1587 bp, synthetic construct
  misc_feature 1..1587: note = Variant of terminal deoxynucleotidyltransferase
  source 1..1587: mol_type = other DNA
atgcaccatcatcatcatcatggcggtagcggcagccacggcattcgtaccatcgattcggacttcgggaagaaacagcagaaaaaaggcgataaccacgatagttccgccacttatgaaatcaaatttcacgagtttgtgctgttcattctcgaagaaaaaatgggtgcgacgcgtcgtacttttctgacagatttagcccgcaagaaagggttccgcgtcgagaatgaactgaccgacgaagttacccacatcgtggcagaaaatctgtcacgctctgaagtattggcttggctgaaagaacacaagatggagaagaccaagcaattcgaactgctggatattagctggcttatcgaaagcatgaaagttggtaaaccggtggacaccaaggggaaataccagttggcggaatcggttgaggtgagtgcgaacccagatccgacagaaggtcgtgtaaacgagctgcctcctactatgaaaaccgtttctccgtatgcgtgtcaacgccgcaccaccctgaacaaccgtaatcaacgttttacggactcgctggagattcttcgtgaaaattacgagttcaaacgcaacgatgatactgcgctggaatttcgtcgtgctatctccgtgctgaaaagccttccgtttgaggtacgtagcctgaaagacacggaaggattgccctggatcagtgatgaagtcaaagggattatggaagaaatcatcgaagtcggggagtcgcgtgaagtgcaggccgtgctcaatgatgagtggtatcaaagcttccacgcatttacgagtgtctttggagtgggggtaaagacagcagacaagtggtaccgcatgggtctgcgcaccctcgaggatgttcgttccagcaagaccctgaagttgaccccgatgcagaaagtaggtctgctgtatatggaagatcttgctcgcggcgttacgcgtgccgaagctgacgcgatttggctgctggttcaggatgcagtcgcaactttcgacccggatgcgatcgtggagattgtcggtggatttcgtcgtgggaaacctcagggtcacgacgttgatctgcttatcagttctccgggagctgagaaagagcaagaagaccaactcctgcagaaagtgatgaatctgtggaagaaacaagggttgttgctgtacggtcgtctggagtggagtcagtgggaagatgggggttcgccttccggtaaggctgacgagggtgacgcggaggcgaaatgctttctgatcctcaaactttatgatcatctggtgcgtaaaagtaaacgcaatatgccgactggttcgaacatgggcgagtccaaaccgtggaaagcaattcgcgtagatctgctgcgttgcccctatggcagttttgcgtttgcgatgttgcagtggaccggaagccgcatgttccgtcgtgatctgcgttggtacgccctggaagagaagaacatgatgctggacaatcattcgctgtatgacctgacccgcggtatcttcctccctgctaaatcggaagaggaaattttcgaacatctggggcttgaatacctggaaccgttcgaacgtaacgca

SEQ ID NO: 3696 - protein, 529 aa, synthetic construct
  REGION 1..529: note = Variant of terminal deoxynucleotidyltransferase
MHHHHHHGGSGSHGIRTIDSDFGKKQQKKGDNHDSSATYEIKFHEFVLFILEEKMGATRRTFLTDLARKKGFRVENELTDEVTHIVAENLSRSEVLAWLKEHKMEKTKQFELLDISWLIESMKVGKPVDTKGKYQLAESVEVSANPDPTEGRVNELPPTMKTVSPYACQRRTTLNNRNQRFTDSLEILRENYEFKRNDDTALEFRRAISVLKSLPFEVRSLKDTEGLPWISDEVKGIMEEIIEVGESREVQAVLNDEWYQSFHAFTSVFGVGVKTADKWYRMGLRTLEDVRSSKTLKLTPMQKVGLLYMEDLARGVTRAEADAIWLLVQDAVATFDPDAIVEIVGGFRRGKPQGHDVDLLISSPGAEKEQEDQLLQKVMNLWKKQGLLLYGRLEWSQWEDGGSPSGKADEGDAEAKCFLILKLYDHLVRKSKRNMPTGSNMGESKPWKAIRVDLLRCPYGSFAFAMLQWTGSRMFRRDLRWYALEEKNMMLDNHSLYDLTRGIFLPAKSEEEIFEHLGLEYLEPFERNA

SEQ ID NO: 3697 - DNA, 1587 bp, synthetic construct
  misc_feature 1..1587: note = Variant of terminal deoxynucleotidyltransferase
  source 1..1587: mol_type = other DNA
atgcaccatcatcatcatcatggcggtagcggcagccacggcattcgtaccatcgattcggacttcgggaagaaacagcagaaaaaaggcgataaccacgatagttccgccacttatgaaatcaaatttcacgagtttgtgctgttcattctcgaagaaaaaatgggtgcgacgcgtcgtacttttctgacagatttagcccgcaagaaagggttccgcgtcgagaatgaactgaccgacgaagttacccacatcgtggcagaaaatctgtcacgctctgaagtattggcttggctgaaagaacacaagatggagaagaccaagcaattcgaactgctggatattagctggcttatcgaaagcatgaaagttggtaaaccggtggacaccaaggggaaataccagttggcggaatcggttgaggtgagtgcgaacccagatccgacagaaggtcgtgtaaacgagctgcctcctactatgaaaaccgtttctccgtatgcgtgtcaacgccgcaccaccctgaacaaccgtaatcaacgttttacggactcgctggagattcttcgtgaaaattacgagttcaaacgcaacgatgatactgcgctggaatttcgtcgtgctatctccgtgctgaaaagccttccgtttgaggtacgtagcctgaaagacacggaaggattgccctggatcagtgatgaagtcaaagggattatggaagaaatcatcgaagtcggggagtcgcgtgaagtgcaggccgtgctcaatgatgagtggtatcaaagcttccacgcatttacgagtgtctttggagtgggggtgaagacagcagacaagtggtaccgtatgggtctgcgcaccctcgaggatgttcgttccagcaagaccctgaagttgaccccgatgcagaaagtaggtctgctgtattatgaagatcttgctcgcggcgttacgcgtgccgaagctgacgcgatttggctgctggttcaggatgcagtcgcaactttcgacccggatgcgatcgtggagattgtcggtggatttcgtcgtgggaaacctcagggtcacgacgttgatctgcttatcagttctccgggagctgagaaagagcaagaagaccaactcctgcagaaagtgatgaatctgtggaagaaacaagggttgttgctgtacggtcgtctggagtggagtcagtgggaagatgggggttcgccttccggtaaggctgacgagggtgacgcggaggcgaaatgctttctgatcctcaaactttatgatcatctggtgcgtaaaagtaaacgcaatatgccgactggttcgaacatgggcgagtccaaaccgtggaaagcaattcgcgtagatctgctgcgttgcccctatggcagttttgcgtttgcgatgttgcagtggaccggaagctcgatgttccgtcgtgatctgcgttggtacgccctggaagagaagaacatgatgctggacaatcattcgctgtatgacatgacccgcggtatcttcctccctgctaaatcggaagaggaaattttcgaacatctggggcttgaatacctggaaccgttcgaacgtaacgca

SEQ ID NO: 3698 - protein, 529 aa, synthetic construct
  REGION 1..529: note = Variant of terminal deoxynucleotidyltransferase
MHHHHHHGGSGSHGIRTIDSDFGKKQQKKGDNHDSSATYEIKFHEFVLFILEEKMGATRRTFLTDLARKKGFRVENELTDEVTHIVAENLSRSEVLAWLKEHKMEKTKQFELLDISWLIESMKVGKPVDTKGKYQLAESVEVSANPDPTEGRVNELPPTMKTVSPYACQRRTTLNNRNQRFTDSLEILRENYEFKRNDDTALEFRRAISVLKSLPFEVRSLKDTEGLPWISDEVKGIMEEIIEVGESREVQAVLNDEWYQSFHAFTSVFGVGVKTADKWYRMGLRTLEDVRSSKTLKLTPMQKVGLLYYEDLARGVTRAEADAIWLLVQDAVATFDPDAIVEIVGGFRRGKPQGHDVDLLISSPGAEKEQEDQLLQKVMNLWKKQGLLLYGRLEWSQWEDGGSPSGKADEGDAEAKCFLILKLYDHLVRKSKRNMPTGSNMGESKPWKAIRVDLLRCPYGSFAFAMLQWTGSSMFRRDLRWYALEEKNMMLDNHSLYDMTRGIFLPAKSEEEIFEHLGLEYLEPFERNA

SEQ ID NO: 3699 - DNA, 1587 bp, synthetic construct
  misc_feature 1..1587: note = Variant of terminal deoxynucleotidyltransferase
  source 1..1587: mol_type = other DNA
atgcaccatcatcatcatcatggcggtagcggcagccacggcattcgtaccatcgattcggacttcgggaagaaacagcagaaaaaaggcgataaccacgatagttccgccacttatgaaatcaaatttcacgagtttgtgctgttcattctcgaagaaaaaatgggtgcgacgcgtcgtacttttctgacagatttagcccgcaagaaagggttccgcgtcgagaatgaactgaccgacgaagttacccacatcgtggcagaaaatctgtcacgctctgaagtattggcttggctgaaagaacacaagatggagaagaccaagcaattcgaactgctggatattagctggcttatcgaaagcatgaaagttggtaaaccggtggacaccaaggggaaataccagttggcggaatcggttgaggtgagtgcgaacccagatccgacagaaggtcgtgtaaacgagctgcctcctactatgaaaaccgtttctccgtatgcgtgtcaacgccgcaccaccctgaacaaccgtaatcaacgttttacggactcgctggagattcttcgtgaaaattacgagttcaaacgcaacgatgatactgcgctggaatttcgtcgtgctatctccgtgctgaaaagccttccgtttgaggtacgtagcctgaaagacacggaaggattgccctggatcagtgatgaagtcaaagggattatggaagaaatcatcgaagtcggggagtcgcgtgaagtgcaggccgtgctcaatgatgagtggtatcaaagcttccacgcatttacgagtgtctttggagtgggggtgaagacagcagacaagtggtaccgtatgggtctgcgcaccctcgaggatgttcgttccagcaagaccctgaagttgaccccgatgcagaaagtaggtctgctggtgtatgaagatcttgctcgcggcgttacgcgtgccgaagctgacgcgatttggctgctggttcaggatgcagtcgcaactttcgacccggatgcgatcgtggagattgtcggtggatttcgtcgtgggaaacctcagggtcacgacgttgatctgcttatcagttctccgggagctgagaaagagcaagaagaccaactcctgcagaaagtgatgaatctgtggaagaaacaagggttgttgctgtacggtcgtctggagtggagtcagtgggaagatgggggttcgccttccggtaaggctgacgagggtgacgcggaggcgaaatgctttctgatcctcaaactttatgatcatctggtgcgtaaaagtaaacgcaatatgccgactggttcgaacatgggcgagtccaaaccgtggaaagcaattcgcgtagatctgctgcgttgcccctatggcagttttgcgtttgcgatgttgcagtggaccggaagccgcatgttccgtcgtgatctgcgttggtacgccctggaagagaagaacatgatgctggacaatcattcgctgtatgacatgacccgcggtatcttcctccctgctaaatcggaagaggaaattttcgaacatctggggcttgaatacctggaaccgttcgaacgtaacgca

SEQ ID NO: 3700 - protein, 529 aa, synthetic construct
  REGION 1..529: note = Variant of terminal deoxynucleotidyltransferase
MHHHHHHGGSGSHGIRTIDSDFGKKQQKKGDNHDSSATYEIKFHEFVLFILEEKMGATRRTFLTDLARKKGFRVENELTDEVTHIVAENLSRSEVLAWLKEHKMEKTKQFELLDISWLIESMKVGKPVDTKGKYQLAESVEVSANPDPTEGRVNELPPTMKTVSPYACQRRTTLNNRNQRFTDSLEILRENYEFKRNDDTALEFRRAISVLKSLPFEVRSLKDTEGLPWISDEVKGIMEEIIEVGESREVQAVLNDEWYQSFHAFTSVFGVGVKTADKWYRMGLRTLEDVRSSKTLKLTPMQKVGLLVYEDLARGVTRAEADAIWLLVQDAVATFDPDAIVEIVGGFRRGKPQGHDVDLLISSPGAEKEQEDQLLQKVMNLWKKQGLLLYGRLEWSQWEDGGSPSGKADEGDAEAKCFLILKLYDHLVRKSKRNMPTGSNMGESKPWKAIRVDLLRCPYGSFAFAMLQWTGSRMFRRDLRWYALEEKNMMLDNHSLYDMTRGIFLPAKSEEEIFEHLGLEYLEPFERNA

SEQ ID NO: 3701 - DNA, 1587 bp, synthetic construct
  misc_feature 1..1587: note = Variant of terminal deoxynucleotidyltransferase
  source 1..1587: mol_type = other DNA
atgcaccatcatcatcatcatggcggtagcggcagccacggcattcgtaccatcgattcggacttcgggaagaaacagcagaaaaaaggcgataaccacgatagttccgccacttatgaaatcaaatttcacgagtttgtgctgttcattctcgaagaaaaaatgggtgcgacgcgtcgtacttttctgacagatttagcccgcaagaaagggttccgcgtcgagaatgaactgaccgacgaagttacccacatcgtggcagaaaatctgtcacgctctgaagtattggcttggctgaaagaacacaagatggagaagaccaagcaattcgaactgctggatattagctggcttatcgaaagcatgaaagttggtaaaccggtggacaccaaggggaaataccagttggcggaatcggttgaggtgagtgcgaacccagatccgacagaaggtcgtgtaaacgagctgcctcctactatgaaaaccgtttctccgtatgcgtgtcaacgccgcaccaccctgaacaaccgtaatcaacgttttacggactcgctggagattcttcgtgaaaattacgagttcaaacgcaacgatgatactgcgctggaatttcgtcgtgctatctccgtgctgaaaagccttccgtttgaggtacgtagcctgaaagacacggaaggattgccctggatcagtgatgaagtcaaagggattatggaagaaatcatcgaagtcggggagtcgcgtgaagtgcaggccgtgctcaatgatgagtggtatcaaagcttccacgcatttacgagtgtctttggagtgggggtgaagacagcagacaagtggtaccgtatgggtctgcgcaccctcgaggatgttcgttccagcaagaccctgaagttgaccccgatgcagaaagtaggtctgctgtcttatgaagatcttgctcgcggcgttacgcgtgccgaagctgacgcgatttggctgctggttcaggatgcagtcgcaactttcgacccggatgcgatcgtggagattgtcggtggatttcgtcgtgggaaacctcagggtcacgacgttgatctgcttatcagttctccgggagctgagaaagagcaagaagaccaactcctgcagaaagtgatgaatctgtggaagaaacaagggttgttgctgtacggtcgtctggagtggagtcagtgggaagatgggggttcgccttccggtaaggctgacgagggtgacgcggaggcgaaatgctttctgatcctcaaactttatgatcatctggtgcgtaaaagtaaacgcaatatgccgactggttcgaacatgggcgagtccaaaccgtggaaagcaattcgcgtagatctgctgcgttgcccctatggcagttttgcgtttgcgatgttgcagtggaccggaagccgcatgttccgtcgtgatctgcgttggtacgccctggaagagaagaacatgatgctggacaatcattcgctgtatgacatgacccgcggtatcttcctccctgctaaatcggaagaggaaattttcgaacatctggggcttgaatacctggaaccgttcgaacgtaacgca

SEQ ID NO: 3702 - protein, 529 aa, synthetic construct
  REGION 1..529: note = Variant of terminal deoxynucleotidyltransferase
MHHHHHHGGSGSHGIRTIDSDFGKKQQKKGDNHDSSATYEIKFHEFVLFILEEKMGATRRTFLTDLARKKGFRVENELTDEVTHIVAENLSRSEVLAWLKEHKMEKTKQFELLDISWLIESMKVGKPVDTKGKYQLAESVEVSANPDPTEGRVNELPPTMKTVSPYACQRRTTLNNRNQRFTDSLEILRENYEFKRNDDTALEFRRAISVLKSLPFEVRSLKDTEGLPWISDEVKGIMEEIIEVGESREVQAVLNDEWYQSFHAFTSVFGVGVKTADKWYRMGLRTLEDVRSSKTLKLTPMQKVGLLSYEDLARGVTRAEADAIWLLVQDAVATFDPDAIVEIVGGFRRGKPQGHDVDLLISSPGAEKEQEDQLLQKVMNLWKKQGLLLYGRLEWSQWEDGGSPSGKADEGDAEAKCFLILKLYDHLVRKSKRNMPTGSNMGESKPWKAIRVDLLRCPYGSFAFAMLQWTGSRMFRRDLRWYALEEKNMMLDNHSLYDMTRGIFLPAKSEEEIFEHLGLEYLEPFERNA

SEQ ID NO: 3703 - DNA, 1587 bp, synthetic construct
  misc_feature 1..1587: note = Variant of terminal deoxynucleotidyltransferase
  source 1..1587: mol_type = other DNA
atgcaccatcatcatcatcatggcggtagcggcagccacggcattcgtaccatcgattcggacttcgggaagaaacagcagaaaaaaggcgataaccacgatagttccgccacttatgaaatcaaatttcacgagtttgtgctgttcattctcgaagaaaaaatgggtgcgacgcgtcgtacttttctgacagatttagcccgcaagaaagggttccgcgtcgagaatgaactgaccgacgaagttacccacatcgtggcagaaaatctgtcacgctctgaagtattggcttggctgaaagaacacaagatggagaagaccaagcaattcgaactgctggatattagctggcttatcgaaagcatgaaagttggtaaaccggtggacaccaaggggaaataccagttggcggaatcggttgaggtgagtgcgaacccagatccgacagaaggtcgtgtaaacgagctgcctcctactatgaaaaccgtttctccgtatgcgtgtcaacgccgcaccaccctgaacaaccgtaatcaacgttttacggactcgctggagattcttcgtgaaaattacgagttcaaacgcaacgatgatactgcgctggaatttcgtcgtgctatctccgtgctgaaaagccttccgtttgaggtacgtagcctgaaagacacggaaggattgccctggatcagtgatgaagtcaaagggattatggaagaaatcatcgaagtcggggagtcgcgtgaagtgcaggccgtgctcaatgatgagtggtatcaaagcttccacgcatttacgagtgtctttggagtgggggtgaagacagcagacaagtggtaccgtatgggtctgcgcaccctcgaggatgttcgttccagcaagaccctgaagttgaccccgagtcagaaagtaggtctgctgtattatgaagatcttgctcgcggcgttacgcgtgccgaagctgacgcgatttggctgctggttcaggatgcagtcgcaactttcgacccggatgcgatcgtggagattgtcggtggatttcgtcgtgggaaacctcagggtcacgacgttgatctgcttatcagttctccgggagctgagaaagagcaagaagaccaactcctgcagaaagtgatgaatctgtggaagaaacaagggttgttgctgtacggtcgtctggagtggagtcagtgggaagatgggggttcgccttccggtaaggctgacgagggtgacgcggaggcgaaatgctttctgatcctcaaactttatgatcatctggtgcgtaaaagtaaacgcaatatgccgactggttcgaacatgggcgagtccaaaccgtggaaagcaattcgcgtagatctgctgcgttgcccctatggcagttttgcgtttgcgatgttgcagtggaccggaagccgcatgttccgtcgtgatctgcgttggtacgccctggaagagaagaacatgatgctggacaatcattcgctgtatgacatgacccgcggtatcttcctccctgctaaatcggaagaggaaattttcgaacatctggggcttgaatacctggaaccgttcgaacgtaacgca

SEQ ID NO: 3704 - protein, 529 aa, synthetic construct
  REGION 1..529: note = Variant of terminal deoxynucleotidyltransferase
MHHHHHHGGSGSHGIRTIDSDFGKKQQKKGDNHDSSATYEIKFHEFVLFILEEKMGATRRTFLTDLARKKGFRVENELTDEVTHIVAENLSRSEVLAWLKEHKMEKTKQFELLDISWLIESMKVGKPVDTKGKYQLAESVEVSANPDPTEGRVNELPPTMKTVSPYACQRRTTLNNRNQRFTDSLEILRENYEFKRNDDTALEFRRAISVLKSLPFEVRSLKDTEGLPWISDEVKGIMEEIIEVGESREVQAVLNDEWYQSFHAFTSVFGVGVKTADKWYRMGLRTLEDVRSSKTLKLTPSQKVGLLYYEDLARGVTRAEADAIWLLVQDAVATFDPDAIVEIVGGFRRGKPQGHDVDLLISSPGAEKEQEDQLLQKVMNLWKKQGLLLYGRLEWSQWEDGGSPSGKADEGDAEAKCFLILKLYDHLVRKSKRNMPTGSNMGESKPWKAIRVDLLRCPYGSFAFAMLQWTGSRMFRRDLRWYALEEKNMMLDNHSLYDMTRGIFLPAKSEEEIFEHLGLEYLEPFERNA

SEQ ID NO: 3705 - DNA, 1587 bp, synthetic construct
  misc_feature 1..1587: note = Variant of terminal deoxynucleotidyltransferase
  source 1..1587: mol_type = other DNA
atgcaccatcatcatcatcatggcggtagcggcagccacggcattcgtaccatcgattcggacttcgggaagaaacagcagaaaaaaggcgataaccacgatagttccgccacttatgaaatcaaatttcacgagtttgtgctgttcattctcgaagaaaaaatgggtgcgacgcgtcgtacttttctgacagatttagcccgcaagaaagggttccgcgtcgagaatgaactgaccgacgaagttacccacatcgtggcagaaaatctgtcacgctctgaagtattggcttggctgaaagaacacaagatggagaagaccaagcaattcgaactgctggatattagctggcttatcgaaagcatgaaagttggtaaaccggtggacaccaaggggaaataccagttggcggaatcggttgaggtgagtgcgaacccagatccgacagaaggtcgtgtaaacgagctgcctcctactatgaaaaccgtttctccgtatgcgtgtcaacgccgcaccaccctgaacaaccgtaatcaacgttttacggactcgctggagattcttcgtgaaaattacgagttcaaacgcaacgatgatactgcgctggaatttcgtcgtgctatctccgtgctgaaaagccttccgtttgaggtacgtagcctgaaagacacggaaggattgccctggatcagtgatgaagtcaaagggattatggaagaaatcatcgaagtcggggagtcgcgtgaagtgcaggccgtgctcaatgatgagtggtatcaaagcttccacgcatttacgagtgtctttggagtgggggtgaagacagcagacaagtggtaccgtatgggtctgcgcaccctcgaggatgttcgttccagcaagaccctgaagttgaccccgatgcagaaagtaggtctgctggcttatgaagatcttgctcgcggcgttacgcgtgccgaagctgacgcgatttggctgctggttcaggatgcagtcgcaactttcgacccggatgcgatcgtggagattgtcggtggatttcgtcgtgggaaacctcagggtcacgacgttgatctgcttacgagttctccgggagctgagaaagagcaagaagaccaactcctgcagaaagtgatgaatctgtggaagaaacaagggttgttgctgtacggtcgtctggagtggagtcagtgggaagatgggggttcgccttccggtaaggctgacgagggtgacgcggaggcgaaatgctttctgatcctcaaactttatgatcatctggtgcgtaaaagtaaacgcaatatgccgactggttcgaacatgggcgagtccaaaccgtggaaagcaattcgcgtagatctgctgcgttgcccctatggcagttttgcgtttgcgatgttgcagtggaccggaagccgcatgttccgtcgtgatctgcgttggtacgccctggaagagaagaacatgatgctggacaatcattcgctgtatgacatgacccgcggtatcttcctccctgctaaatcggaagaggaaattttcgaacatctggggcttgaatacctggaaccgttcgaacgtaacgca

SEQ ID NO: 3706 - protein, 529 aa, synthetic construct
  REGION 1..529: note = Variant of terminal deoxynucleotidyltransferase
MHHHHHHGGSGSHGIRTIDSDFGKKQQKKGDNHDSSATYEIKFHEFVLFILEEKMGATRRTFLTDLARKKGFRVENELTDEVTHIVAENLSRSEVLAWLKEHKMEKTKQFELLDISWLIESMKVGKPVDTKGKYQLAESVEVSANPDPTEGRVNELPPTMKTVSPYACQRRTTLNNRNQRFTDSLEILRENYEFKRNDDTALEFRRAISVLKSLPFEVRSLKDTEGLPWISDEVKGIMEEIIEVGESREVQAVLNDEWYQSFHAFTSVFGVGVKTADKWYRMGLRTLEDVRSSKTLKLTPMQKVGLLAYEDLARGVTRAEADAIWLLVQDAVATFDPDAIVEIVGGFRRGKPQGHDVDLLTSSPGAEKEQEDQLLQKVMNLWKKQGLLLYGRLEWSQWEDGGSPSGKADEGDAEAKCFLILKLYDHLVRKSKRNMPTGSNMGESKPWKAIRVDLLRCPYGSFAFAMLQWTGSRMFRRDLRWYALEEKNMMLDNHSLYDMTRGIFLPAKSEEEIFEHLGLEYLEPFERNA

SEQ ID NO: 3707 - DNA, 1587 bp, synthetic construct
  misc_feature 1..1587: note = Variant of terminal deoxynucleotidyltransferase
  source 1..1587: mol_type = other DNA
atgcaccatcatcatcatcatggcggtagcggcagccacggcattcgtaccatcgattcggacttcgggaagaaacagcagaaaaaaggcgataaccacgatagttccgccacttatgaaatcaaatttcacgagtttgtgctgttcattctcgaagaaaaaatgggtgcgacgcgtcgtacttttctgacagatttagcccgcaagaaagggttccgcgtcgagaatgaactgaccgacgaagttacccacatcgtggcagaaaatctgtcacgctctgaagtattggcttggctgaaagaacacaagatggagaagaccaagcaattcgaactgctggatattagctggcttatcgaaagcatgaaagttggtaaaccggtggacaccaaggggaaataccagttggcggaatcggttgaggtgagtgcgaacccagatccgacagaaggtcgtgtaaacgagctgcctcctactatgaaaaccgtttctccgtatgcgtgtcaacgccgcaccaccctgaacaaccgtaatcaacgttttacggactcgctggagattcttcgtgaaaattacgagttcaaacgcaacgatgatactgcgctggaatttcgtcgtgctatctccgtgctgaaaagccttccgtttgaggtacgtagcctgaaagacacggaaggattgccctggatcagtgatgaagtcaaagggattatggaagaaatcatcgaagtcggggagtcgcgtgaagtgcaggccgtgctcaatgatgagtggtatcaaagcttccacgcatttacgagtgtctttggagtgggggtgaagacagcagacaagtggtaccgtatgggtctgcgcaccctcgaggatgttcgttccagcaagaccctgaagttgaccccgatgcagaaagtaggtctgctggggtatgaagatcttgctcgcggcgttacgcgtgccgaagctgacgcgatttggctgctggttcaggatgcagtcgcaactttcgacccggatgcgatcgtggagattgtcggtggatttcgtcgtgggaaacctcagggtcacgacgttgatctgcttatcagttctccgggagctgagaaagagcaagaagaccaactcctgcagaaagtgatgaatctgtggaagaaacaagggttgttgctgtacggtcgtctggagtggagtcagtgggaagatgggggttcgccttccggtaaggctgacgagggtgacgcggaggcgaaatgctttctgatcctcaaactttatgatcatctggtgcgtaaaagtaaacgcaatatgccgactggttcgaacatgggcgagtccaaaccgtggaaagcaattcgcgtagatctgctgcgttgcccctatggcagttttgcgtttgcgatgttgcagtggaccggaagccgcatgttccgtcgtgatctgcgttggtacgccctggaagagaagaacatgatgctggacaatcattcgctgtatgacatgacccgcggtatcttcctccctgctaaatcggaagaggaaattttcgaacatctggggcttgaatacctggaaccgttcgaacgtaacgca

SEQ ID NO: 3708 - protein, 529 aa, synthetic construct
  REGION 1..529: note = Variant of terminal deoxynucleotidyltransferase
MHHHHHHGGSGSHGIRTIDSDFGKKQQKKGDNHDSSATYEIKFHEFVLFILEEKMGATRRTFLTDLARKKGFRVENELTDEVTHIVAENLSRSEVLAWLKEHKMEKTKQFELLDISWLIESMKVGKPVDTKGKYQLAESVEVSANPDPTEGRVNELPPTMKTVSPYACQRRTTLNNRNQRFTDSLEILRENYEFKRNDDTALEFRRAISVLKSLPFEVRSLKDTEGLPWISDEVKGIMEEIIEVGESREVQAVLNDEWYQSFHAFTSVFGVGVKTADKWYRMGLRTLEDVRSSKTLKLTPMQKVGLLGYEDLARGVTRAEADAIWLLVQDAVATFDPDAIVEIVGGFRRGKPQGHDVDLLISSPGAEKEQEDQLLQKVMNLWKKQGLLLYGRLEWSQWEDGGSPSGKADEGDAEAKCFLILKLYDHLVRKSKRNMPTGSNMGESKPWKAIRVDLLRCPYGSFAFAMLQWTGSRMFRRDLRWYALEEKNMMLDNHSLYDMTRGIFLPAKSEEEIFEHLGLEYLEPFERNA

SEQ ID NO: 3709 - DNA, 1587 bp, synthetic construct
  misc_feature 1..1587: note = Variant of terminal deoxynucleotidyltransferase
  source 1..1587: mol_type = other DNA
atgcaccatcatcatcatcatggcggtagcggcagccacggcattcgtaccatcgattcggacttcgggaagaaacagcagaaaaaaggcgataaccacgatagttccgccacttatgaaatcaaatttcacgagtttgtgctgttcattctcgaagaaaaaatgggtgcgacgcgtcgtacttttctgacagatttagcccgcaagaaagggttccgcgtcgagaatgaactgaccgacgaagttacccacatcgtggcagaaaatctgtcacgctctgaagtattggcttggctgaaagaacacaagatggagaagaccaagcaattcgaactgctggatattagctggcttatcgaaagcatgaaagttggtaaaccggtggacaccaaggggaaataccagttggcggaatcggttgaggtgagtgcgaacccagatccgacagaaggtcgtgtaaacgagctgcctcctactatgaaaaccgtttctccgtatgcgtgtcaacgccgcaccaccctgaacaaccgtaatcaacgttttacggactcgctggagattcttcgtgaaaattacgagttcaaacgcaacgatgatactgcgctggaatttcgtcgtgctatctccgtgctgaaaagccttccgtttgaggtacgtagcctgaaagacacggaaggattgccctggatcagtgatgaagtcaaagggattatggaagaaatcatcgaagtcggggagtcgcgtgaagtgcaggccgtgctcaatgatgagtggtatcaaagcttccacgcatttacgagtgtctttggagtgggggtgaagacagcagacaagtggtaccgtatgggtctgcgcaccctcgaggatgttcgttccagcaagaccctgaagttgaccccgatgcagaaagtaggtctgctggcgtatgaagatcttgctcgcggcgttacgcgtgccgaagctgacgcgatttggctgctggttcaggatgcagtcgcaactttcgacccggatgcgatcgtggagattgtcggtggatttcgtcgtgggaaacctcagggtcacgacgttgatctgcttatcagttctccgggagctgagaaagagcaagaagaccaactcctgcagaaagtgatgaatctgtggaagaaacaagggttgttgctgtacggtcgtctggagtggagtcagtgggaagatgggggttcgccttccggtaaggctgacgagggtgacgcggaggcgaaatgctttctgatcctcaaactttatgatcatctggtgcgtaaaagtaaacgcaatatgccgactggttcgaacatgggcgagtccaaaccgtggaaagcaattcgcgtagatctgctgcgttgcccctatggcagttttgcgtttgcgatgttgcagtggaccggaagccgcatgttccgtcgtgatctgcgttggtacgccctggaagagaagaacatgatgctggacaatcattcgctgtatgacatgacccgcggtatcttcctccctgctaaatcggaagaggaaattttcgaacatctggggcttgaatacctggaaccgttcgaacgtaacgca

SEQ ID NO: 3710 - protein, 529 aa, synthetic construct
  REGION 1..529: note = Variant of terminal deoxynucleotidyltransferase
MHHHHHHGGSGSHGIRTIDSDFGKKQQKKGDNHDSSATYEIKFHEFVLFILEEKMGATRRTFLTDLARKKGFRVENELTDEVTHIVAENLSRSEVLAWLKEHKMEKTKQFELLDISWLIESMKVGKPVDTKGKYQLAESVEVSANPDPTEGRVNELPPTMKTVSPYACQRRTTLNNRNQRFTDSLEILRENYEFKRNDDTALEFRRAISVLKSLPFEVRSLKDTEGLPWISDEVKGIMEEIIEVGESREVQAVLNDEWYQSFHAFTSVFGVGVKTADKWYRMGLRTLEDVRSSKTLKLTPMQKVGLLAYEDLARGVTRAEADAIWLLVQDAVATFDPDAIVEIVGGFRRGKPQGHDVDLLISSPGAEKEQEDQLLQKVMNLWKKQGLLLYGRLEWSQWEDGGSPSGKADEGDAEAKCFLILKLYDHLVRKSKRNMPTGSNMGESKPWKAIRVDLLRCPYGSFAFAMLQWTGSRMFRRDLRWYALEEKNMMLDNHSLYDMTRGIFLPAKSEEEIFEHLGLEYLEPFERNA

SEQ ID NO: 3711 - DNA, 1587 bp, synthetic construct
  misc_feature 1..1587: note = Variant of terminal deoxynucleotidyltransferase
  source 1..1587: mol_type = other DNA
atgcaccatcatcatcatcatggcggtagcggcagccacggcattcgtaccatcgattcggacttcgggaagaaacagcagaaaaaaggcgataaccacgatagttccgccacttatgaaatcaaatttcacgagtttgtgctgttcattctcgaagaaaaaatgggtgcgacgcgtcgtacttttctgacagatttagcccgcaagaaagggttccgcgtcgagaatgaactgaccgacgaagttacccacatcgtggcagaaaatctgtcacgctctgaagtattggcttggctgaaagaacacaagatggagaagaccaagcaattcgaactgctggatattagctggcttatcgaaagcatgaaagttggtaaaccggtggacaccaaggggaaataccagttggcggaatcggttgaggtgagtgcgaacccagatccgacagaaggtcgtgtaaacgagctgcctcctactatgaaaaccgtttctccgtatgcgtgtcaacgccgcaccaccctgaacaaccgtaatcaacgttttacggactcgctggagattcttcgtgaaaattacgagttcaaacgcaacgatgatactgcgctggaatttcgtcgtgctatctccgtgctgaaaagccttccgtttgaggtacgtagcctgaaagacacggaaggattgccctggatcagtgatgaagtcaaagggattatggaagaaatcatcgaagtcggggagtcgcgtgaagtgcaggccgtgctcaatgatgagtggtatcaaagcttccacgcatttacgagtgtctttggagtgggggtgaagacagcagacaagtggtaccgtatgggtctgcgcaccctcgaggatgttcgttccagcaagaccctgaagttgaccccggggcagaaagtaggtctgctgtattatgaagatcttgctcgcggcgttacgcgtgccgaagctgacgcgatttggctgctggttcaggatgcagtcgcaactttcgacccggatgcgatcgtggagattgtcggtggatttcgtcgtgggaaacctcagggtcacgacgttgatctgcttatcagttctccgggagctgagaaagagcaagaagaccaactcctgcagaaagtgatgaatctgtggaagaaacaagggttgttgctgtacggtcgtctggagtggagtcagtgggaagatgggggttcgccttccggtaaggctgacgagggtgacgcggaggcgaaatgctttctgatcctcaaactttatgatcatctggtgcgtaaaagtaaacgcaatatgccgactggttcgaacatgggcgagtccaaaccgtggaaagcaattcgcgtagatctgctgcgttgcccctatggcagttttgcgtttgcgatgttgcagtggaccggaagccgcatgttccgtcgtgatctgcgttggtacgccctggaagagaagaacatgatgctggacaatcattcgctgtatgacatgacccgcggtatcttcctccctgctaaatcggaagaggaaattttcgaacatctggggcttgaatacctggaaccgttcgaacgtaacgca

SEQ ID NO: 3712 - protein, 529 aa, synthetic construct
  REGION 1..529: note = Variant of terminal deoxynucleotidyltransferase
MHHHHHHGGSGSHGIRTIDSDFGKKQQKKGDNHDSSATYEIKFHEFVLFILEEKMGATRRTFLTDLARKKGFRVENELTDEVTHIVAENLSRSEVLAWLKEHKMEKTKQFELLDISWLIESMKVGKPVDTKGKYQLAESVEVSANPDPTEGRVNELPPTMKTVSPYACQRRTTLNNRNQRFTDSLEILRENYEFKRNDDTALEFRRAISVLKSLPFEVRSLKDTEGLPWISDEVKGIMEEIIEVGESREVQAVLNDEWYQSFHAFTSVFGVGVKTADKWYRMGLRTLEDVRSSKTLKLTPGQKVGLLYYEDLARGVTRAEADAIWLLVQDAVATFDPDAIVEIVGGFRRGKPQGHDVDLLISSPGAEKEQEDQLLQKVMNLWKKQGLLLYGRLEWSQWEDGGSPSGKADEGDAEAKCFLILKLYDHLVRKSKRNMPTGSNMGESKPWKAIRVDLLRCPYGSFAFAMLQWTGSRMFRRDLRWYALEEKNMMLDNHSLYDMTRGIFLPAKSEEEIFEHLGLEYLEPFERNA

SEQ ID NO: 3713 - DNA, 1587 bp, synthetic construct
  misc_feature 1..1587: note = Variant of terminal deoxynucleotidyltransferase
  source 1..1587: mol_type = other DNA
atgcaccatcatcatcatcatggcggtagcggcagccacggcattcgtaccatcgattcggacttcgggaagaaacagcagaaaaaaggcgataaccacgatagttccgccacttatgaaatcaaatttcacgagtttgtgctgttcattctcgaagaaaaaatgggtgcgacgcgtcgtacttttctgacagatttagcccgcaagaaagggttccgcgtcgagaatgaactgaccgacgaagttacccacatcgtggcagaaaatctgtcacgctctgaagtattggcttggctgaaagaacacaagatggagaagaccaagcaattcgaactgctggatattagctggcttatcgaaagcatgaaagttggtaaaccggtggacaccaaggggaaataccagttggcggaatcggttgaggtgagtgcgaacccagatccgacagaaggtcgtgtaaacgagctgcctcctactatgaaaaccgtttctccgtatgcgtgtcaacgccgcaccaccctgaacaaccgtaatcaacgttttacggactcgctggagattcttcgtgaaaattacgagttcaaacgcaacgatgatactgcgctggaatttcgtcgtgctatctccgtgctgaaaagccttccgtttgaggtacgtagcctgaaagacacggaaggattgccctggatcagtgatgaagtcaaagggattatggaagaaatcatcgaagtcggggagtcgcgtgaagtgcaggccgtgctcaatgatgagtggtatcaaagcttccacgcatttacgagtgtctttggagtgggggtgaagacagcagacaagtggtaccgtatgggtctgcgcaccctcgaggatgttcgttccagcaagaccctgaagttgaccccgatgcagaaagtaggtctgctgtattatgaagatcttgctcgcggcgttacgcgtgccgaagctgacgcgatttggctgctggttcaggatgcagtcgcaactttcgacccggatgcgatcgtggagattgtcggtggatttcgtcgtgggaaacctcagggtcacgacgttgatctgcttatcagttctccgggagctgagaaagagcaagaagaccaactcctgcagaaagtgatgaatctgtggaagaaacaagggttgttgctgtacggtcgtctggagtggagtcagtgggaagatgggggttcgccttccggtaaggctgacgagggtgacgcggaggcgaaatgctttgggatcctcaaactttatgatcatctggtgcgtaaaagtaaacgcaatatgccgactggttcgaacatgggcgagtccaaaccgtggaaagcaattcgcgtagatctgctgcgttgcccctatggcagttttgcgtttgcgatgttgcagtggaccggaagccgcatgttccgtcgtgatctgcgttggtacgccctggaagagaagaacatgatgctggacaatcattcgctgtatgacatgacccgcggtatcttcctccctgctaaatcggaagaggaaattttcgaacatctggggcttgaatacctggaaccgttcgaacgtaacgca

SEQ ID NO: 3714 - protein, 529 aa, synthetic construct
  REGION 1..529: note = Variant of terminal deoxynucleotidyltransferase
MHHHHHHGGSGSHGIRTIDSDFGKKQQKKGDNHDSSATYEIKFHEFVLFILEEKMGATRRTFLTDLARKKGFRVENELTDEVTHIVAENLSRSEVLAWLKEHKMEKTKQFELLDISWLIESMKVGKPVDTKGKYQLAESVEVSANPDPTEGRVNELPPTMKTVSPYACQRRTTLNNRNQRFTDSLEILRENYEFKRNDDTALEFRRAISVLKSLPFEVRSLKDTEGLPWISDEVKGIMEEIIEVGESREVQAVLNDEWYQSFHAFTSVFGVGVKTADKWYRMGLRTLEDVRSSKTLKLTPMQKVGLLYYEDLARGVTRAEADAIWLLVQDAVATFDPDAIVEIVGGFRRGKPQGHDVDLLISSPGAEKEQEDQLLQKVMNLWKKQGLLLYGRLEWSQWEDGGSPSGKADEGDAEAKCFGILKLYDHLVRKSKRNMPTGSNMGESKPWKAIRVDLLRCPYGSFAFAMLQWTGSRMFRRDLRWYALEEKNMMLDNHSLYDMTRGIFLPAKSEEEIFEHLGLEYLEPFERNA

SEQ ID NO: 3715 - DNA, 1587 bp, synthetic construct
  misc_feature 1..1587: note = Variant of terminal deoxynucleotidyltransferase
  source 1..1587: mol_type = other DNA
atgcaccatcatcatcatcatggcggtagcggcagccacggcattcgtaccatcgattcggacttcgggaagaaacagcagaaaaaaggcgataaccacgatagttccgccacttatgaaatcaaatttcacgagtttgtgctgttcattctcgaagaaaaaatgggtgcgacgcgtcgtacttttctgacagatttagcccgcaagaaagggttccgcgtcgagaatgaactgaccgacgaagttacccacatcgtggcagaaaatctgtcacgctctgaagtattggcttggctgaaagaacacaagatggagaagaccaagcaattcgaactgctggatattagctggcttatcgaaagcatgaaagttggtaaaccggtggacaccaaggggaaataccagttggcggaatcggttgaggtgagtgcgaacccagatccgacagaaggtcgtgtaaacgagctgcctcctactatgaaaaccgtttctccgtatgcgtgtcaacgccgcaccaccctgaacaaccgtaatcaacgttttacggactcgctggagattcttcgtgaaaattacgagttcaaacgcaacgatgatactgcgctggaatttcgtcgtgctatctccgtgctgaaaagccttccgtttgaggtacgtagcctgaaagacacggaaggattgccctggatcagtgatgaagtcaaagggattatggaagaaatcatcgaagtcggggagtcgcgtgaagtgcaggccgtgctcaatgatgagtggtatcaaagcttccacgcatttacgagtgtctttggagtgggggtgaagacagcagacaagtggtaccgtatgggtctgcgcaccctcgaggatgttcgttccagcaagaccctgaagttgaccccgatgcagaaagtaggtctgctgtattatgaagatcttgctcgcggcgttacgcgtgccgaagctgacgcgatttggctgctggttcaggatgcagtcgcaactttcgacccggatgcgatcgtggagattgtcggtggatttcgtcgtgggaaacctcagggtcacgacgttgatctgcttatcagttctccgggagctgagaaagagcaagaagaccaactcctgcagaaagtgatgaatctgtggaagaaacaagggttgttgctgtacggtcgtctggagtggagtcagtgggaagatgggggttcgccttccggtaaggctgacgagggtgacgcggaggcgaaatgctttctgatcctcaaactttatgatcatctggtgcgtaaaagtaaacgcaatatgccgactggttcgaacatgggcgagtccaaaccgtggaaagcaattcgcgtagatctgctgacttgcccctatggcagttttgcgtttgcgatgttgcagtggaccggaagccgcatgttccgtcgtgatctgcgttggtacgccctggaagagaagaacatgatgctggacaatcattcgctgtatgacatgacccgcggtatcttcctccctgctaaatcggaagaggaaattttcgaacatctggggcttgaatacctggaaccgttcgaacgtaacgca

SEQ ID NO: 3716 - protein, 529 aa, synthetic construct
  REGION 1..529: note = Variant of terminal deoxynucleotidyltransferase
MHHHHHHGGSGSHGIRTIDSDFGKKQQKKGDNHDSSATYEIKFHEFVLFILEEKMGATRRTFLTDLARKKGFRVENELTDEVTHIVAENLSRSEVLAWLKEHKMEKTKQFELLDISWLIESMKVGKPVDTKGKYQLAESVEVSANPDPTEGRVNELPPTMKTVSPYACQRRTTLNNRNQRFTDSLEILRENYEFKRNDDTALEFRRAISVLKSLPFEVRSLKDTEGLPWISDEVKGIMEEIIEVGESREVQAVLNDEWYQSFHAFTSVFGVGVKTADKWYRMGLRTLEDVRSSKTLKLTPMQKVGLLYYEDLARGVTRAEADAIWLLVQDAVATFDPDAIVEIVGGFRRGKPQGHDVDLLISSPGAEKEQEDQLLQKVMNLWKKQGLLLYGRLEWSQWEDGGSPSGKADEGDAEAKCFLILKLYDHLVRKSKRNMPTGSNMGESKPWKAIRVDLLTCPYGSFAFAMLQWTGSRMFRRDLRWYALEEKNMMLDNHSLYDMTRGIFLPAKSEEEIFEHLGLEYLEPFERNA

SEQ ID NO: 3717 - DNA, 1587 bp, synthetic construct
  misc_feature 1..1587: note = Variant of terminal deoxynucleotidyltransferase
  source 1..1587: mol_type = other DNA
atgcaccatcatcatcatcatggcggtagcggcagccacggcattcgtaccatcgattcggacttcgggaagaaacagcagaaaaaaggcgataaccacgatagttccgccacttatgaaatcaaatttcacgagtttgtgctgttcattctcgaagaaaaaatgggtgcgacgcgtcgtacttttctgacagatttagcccgcaagaaagggttccgcgtcgagaatgaactgaccgacgaagttacccacatcgtggcagaaaatctgtcacgctctgaagtattggcttggctgaaagaacacaagatggagaagaccaagcaattcgaactgctggatattagctggcttatcgaaagcatgaaagttggtaaaccggtggacaccaaggggaaataccagttggcggaatcggttgaggtgagtgcgaacccagatccgacagaaggtcgtgtaaacgagctgcctcctactatgaaaaccgtttctccgtatgcgtgtcaacgccgcaccaccctgaacaaccgtaatcaacgttttacggactcgctggagattcttcgtgaaaattacgagttcaaacgcaacgatgatactgcgctggaatttcgtcgtgctatctccgtgctgaaaagccttccgtttgaggtacgtagcctgaaagacacggaaggattgccctggatcagtgatgaagtcaaagggattatggaagaaatcatcgaagtcggggagtcgcgtgaagtgcaggccgtgctcaatgatgagtggtatcaaagcttccacgcatttacgagtgtctttggagtgggggtgaagacagcagacaagtggtaccgtatgggtctgcgcaccctcgaggatgttcgttccagcaagaccctgaagttgaccccgatgcagaaagtaggtctgctgtattatgaagatcttgctcgcggcgttacgcgtgccgaagctgacgcgatttggctgctggttcaggatgcagtcgcaactttcgacccggatgcgatcgtggagattgtcggtggatttcgtcgtgggaaacctcagggtcacgacgttgatctgcttatcagttctccgggagctgagaaagagcaagaagaccaactcctgcagaaagtgatgaatctgtggaagaaacaagggttgttgctgtacggtcgtctggagtggagtcagtgggaagatgggggttcgccttccggtaaggctgacgagggtgacgcggagctgaaatgctttctgatcctcaaactttatgatcatctggtgcgtaaaagtaaacgcaatatgccgactggttcgaacatgggcgagtccaaaccgtggaaagcaattcgcgtagatctgctgcgttgcccctatggcagttttgcgtttgcgatgttgcagtggaccggaagccgcatgttccgtcgtgatctgcgttggtacgccctggaagagaagaacatgatgctggacaatcattcgctgtatgacatgacccgcggtatcttcctccctgctaaatcggaagaggaaattttcgaacatctggggcttgaatacctggaaccgttcgaacgtaacgca

SEQ ID NO: 3718 - protein, 529 aa, synthetic construct
  REGION 1..529: note = Variant of terminal deoxynucleotidyltransferase
MHHHHHHGGSGSHGIRTIDSDFGKKQQKKGDNHDSSATYEIKFHEFVLFILEEKMGATRRTFLTDLARKKGFRVENELTDEVTHIVAENLSRSEVLAWLKEHKMEKTKQFELLDISWLIESMKVGKPVDTKGKYQLAESVEVSANPDPTEGRVNELPPTMKTVSPYACQRRTTLNNRNQRFTDSLEILRENYEFKRNDDTALEFRRAISVLKSLPFEVRSLKDTEGLPWISDEVKGIMEEIIEVGESREVQAVLNDEWYQSFHAFTSVFGVGVKTADKWYRMGLRTLEDVRSSKTLKLTPMQKVGLLYYEDLARGVTRAEADAIWLLVQDAVATFDPDAIVEIVGGFRRGKPQGHDVDLLISSPGAEKEQEDQLLQKVMNLWKKQGLLLYGRLEWSQWEDGGSPSGKADEGDAELKCFLILKLYDHLVRKSKRNMPTGSNMGESKPWKAIRVDLLRCPYGSFAFAMLQWTGSRMFRRDLRWYALEEKNMMLDNHSLYDMTRGIFLPAKSEEEIFEHLGLEYLEPFERNA

SEQ ID NO: 3719 - DNA, 1587 bp, synthetic construct
  misc_feature 1..1587: note = Variant of terminal deoxynucleotidyltransferase
  source 1..1587: mol_type = other DNA
atgcaccatcatcatcatcatggcggtagcggcagccacggcattcgtaccatcgattcggacttcgggaagaaacagcagaaaaaaggcgataaccacgatagttccgccacttatgaaatcaaatttcacgagtttgtgctgttcattctcgaagaaaaaatgggtgcgacgcgtcgtacttttctgacagatttagcccgcaagaaagggttccgcgtcgagaatgaactgaccgacgaagttacccacatcgtggcagaaaatctgtcacgctctgaagtattggcttggctgaaagaacacaagatggagaagaccaagcaattcgaactgctggatattagctggcttatcgaaagcatgaaagttggtaaaccggtggacaccaaggggaaataccagttggcggaatcggttgaggtgagtgcgaacccagatccgacagaaggtcgtgtaaacgagctgcctcctactatgaaaaccgtttctccgtatgcgtgtcaacgccgcaccaccctgaacaaccgtaatcaacgttttacggactcgctggagattcttcgtgaaaattacgagttcaaacgcaacgatgatactgcgctggaatttcgtcgtgctatctccgtgctgaaaagccttccgtttgaggtacgtagcctgaaagacacggaaggattgccctggatcagtgatgaagtcaaagggattatggaagaaatcatcgaagtcggggagtcgcgtgaagtgcaggccgtgctcaatgatgagtggtatcaaagcttccacgcatttacgagtgtctttggagtgggggtgaagacagcagacaagtggtaccgtatgggtctgcgcaccctcgaggatgttcgttccagcaagaccctgaagttgaccccgatgcagaaagtaggtctgctgtattatgaagatcttgctcgcggcgttacgcgtgccgaagctgacgcgatttggctgctggttcaggatgcagtcgcaactttcgacccggatgcgatcgtggagattgtcggtggatttcgtcgtgggaaacctcagggtcacgacgttgatctgcttatcagttctccgggagctgagaaagagcaagaagaccaactcctgcagaaagtgatgaatctgtggaagaaacaagggttgttgctgtacggtcgtctggagtggagtcagtgggaagatgggggttcgccttccggtaaggctgacgagggtgacgcggaggcgaaatgctttctgatcctcaaactttatgatcatctggtgcgtaaaagtaaacgcaatatgccgactggttcgaacatgggcgagtccaaaccgtggaaagcaattaaggtagatctgctgcgttgcccctatggcagttttgcgtttgcgatgttgcagtggaccggaagccgcatgttccgtcgtgatctgcgttggtacgccctggaagagaagaacatgatgctggacaatcattcgctgtatgacatgacccgcggtatcttcctccctgctaaatcggaagaggaaattttcgaacatctggggcttgaatacctggaaccgttcgaacgtaacgca

SEQ ID NO: 3720 - protein, 529 aa, synthetic construct
  REGION 1..529: note = Variant of terminal deoxynucleotidyltransferase
MHHHHHHGGSGSHGIRTIDSDFGKKQQKKGDNHDSSATYEIKFHEFVLFILEEKMGATRRTFLTDLARKKGFRVENELTDEVTHIVAENLSRSEVLAWLKEHKMEKTKQFELLDISWLIESMKVGKPVDTKGKYQLAESVEVSANPDPTEGRVNELPPTMKTVSPYACQRRTTLNNRNQRFTDSLEILRENYEFKRNDDTALEFRRAISVLKSLPFEVRSLKDTEGLPWISDEVKGIMEEIIEVGESREVQAVLNDEWYQSFHAFTSVFGVGVKTADKWYRMGLRTLEDVRSSKTLKLTPMQKVGLLYYEDLARGVTRAEADAIWLLVQDAVATFDPDAIVEIVGGFRRGKPQGHDVDLLISSPGAEKEQEDQLLQKVMNLWKKQGLLLYGRLEWSQWEDGGSPSGKADEGDAEAKCFLILKLYDHLVRKSKRNMPTGSNMGESKPWKAIKVDLLRCPYGSFAFAMLQWTGSRMFRRDLRWYALEEKNMMLDNHSLYDMTRGIFLPAKSEEEIFEHLGLEYLEPFERNA

SEQ ID NO: 3721 - DNA, 1587 bp, synthetic construct
  misc_feature 1..1587: note = Variant of terminal deoxynucleotidyltransferase
  source 1..1587: mol_type = other DNA
atgcaccatcatcatcatcatggcggtagcggcagccacggcattcgtaccatcgattcggacttcgggaagaaacagcagaaaaaaggcgataaccacgatagttccgccacttatgaaatcaaatttcacgagtttgtgctgttcattctcgaagaaaaaatgggtgcgacgcgtcgtacttttctgacagatttagcccgcaagaaagggttccgcgtcgagaatgaactgaccgacgaagttacccacatcgtggcagaaaatctgtcacgctctgaagtattggcttggctgaaagaacacaagatggagaagaccaagcaattcgaactgctggatattagctggcttatcgaaagcatgaaagttggtaaaccggtggacaccaaggggaaataccagttggcggaatcggttgaggtgagtgcgaacccagatccgacagaaggtcgtgtaaacgagctgcctcctactatgaaaaccgtttctccgtatgcgtgtcaacgccgcaccaccctgaacaaccgtaatcaacgttttacggactcgctggagattcttcgtgaaaattacgagttcaaacgcaacgatgatactgcgctggaatttcgtcgtgctatctccgtgctgaaaagccttccgtttgaggtacgtagcctgaaagacacggaaggattgccctggatcagtgatgaagtcaaagggattatggaagaaatcatcgaagtcggggagtcgcgtgaagtgcaggccgtgctcaatgatgagtggtatcaaagcttccacgcatttacgagtgtctttggagtgggggtgaagacagcagacaagtggtaccgtatgggtctgcgcaccctcgaggatgttcgttccagcaagaccctgaagttgaccccgatgcagaaagtaggtctgctgtattatgaagatcttgctcgcggcgttacgcgtgccgaagctgacgcgatttggctgctggttcaggatgcagtcgcaactttcgacccggatgcgatcgtggagattgtcggtggatttcgtcgtgggaaacctcagggtcacgacgttgatctgcttatcagttctccgggagctgagaaagagcaagaagaccaactcctgcagaaagtgatgaatctgtggaagaaacaagggttgttgctgtacggtcgtctggaatggagcttttgggaagatgggggttcgccttccggtaaggctgacgagggtgacgcggaggcgaaatgctttctgatcctcaaactttatgatcatctggtgcgtaaaagtaaacgcaatatgccgactggttcgaacatgggcgagtccaaaccgtggaaagcaattcgcgtagatctgctgcgttgcccctatggcagttttgcgtttgcgatgttgcagtggaccggaagccgcatgttccgtcgtgatctgcgttggtacgccctggaagagaagaacatgatgctggacaatcattcgctgtatgacatgacccgcggtatcttcctccctgctaaatcggaagaggaaattttcgaacatctggggcttgaatacctggaaccgttcgaacgtaacgca

SEQ ID NO: 3722 - protein, 529 aa, synthetic construct
  REGION 1..529: note = Variant of terminal deoxynucleotidyltransferase
MHHHHHHGGSGSHGIRTIDSDFGKKQQKKGDNHDSSATYEIKFHEFVLFILEEKMGATRRTFLTDLARKKGFRVENELTDEVTHIVAENLSRSEVLAWLKEHKMEKTKQFELLDISWLIESMKVGKPVDTKGKYQLAESVEVSANPDPTEGRVNELPPTMKTVSPYACQRRTTLNNRNQRFTDSLEILRENYEFKRNDDTALEFRRAISVLKSLPFEVRSLKDTEGLPWISDEVKGIMEEIIEVGESREVQAVLNDEWYQSFHAFTSVFGVGVKTADKWYRMGLRTLEDVRSSKTLKLTPMQKVGLLYYEDLARGVTRAEADAIWLLVQDAVATFDPDAIVEIVGGFRRGKPQGHDVDLLISSPGAEKEQEDQLLQKVMNLWKKQGLLLYGRLEWSFWEDGGSPSGKADEGDAEAKCFLILKLYDHLVRKSKRNMPTGSNMGESKPWKAIRVDLLRCPYGSFAFAMLQWTGSRMFRRDLRWYALEEKNMMLDNHSLYDMTRGIFLPAKSEEEIFEHLGLEYLEPFERNA

SEQ ID NO: 3723 - DNA, 1587 bp, synthetic construct
  misc_feature 1..1587: note = Variant of terminal deoxynucleotidyltransferase
  source 1..1587: mol_type = other DNA
atgcaccatcatcatcatcatggcggtagcggcagccacggcattcgtaccatcgattcggacttcgggaagaaacagcagaaaaaaggcgataaccacgatagttccgccacttatgaaatcaaatttcacgagtttgtgctgttcattctcgaagaaaaaatgggtgcgacgcgtcgtacttttctgacagatttagcccgcaagaaagggttccgcgtcgagaatgaactgaccgacgaagttacccacatcgtggcagaaaatctgtcacgctctgaagtattggcttggctgaaagaacacaagatggagaagaccaagcaattcgaactgctggatattagctggcttatcgaaagcatgaaagttggtaaaccggtggacaccaaggggaaataccagttggcggaatcggttgaggtgagtgcgaacccagatccgacagaaggtcgtgtaaacgagctgcctcctactatgaaaaccgtttctccgtatgcgtgtcaacgccgcaccaccctgaacaaccgtaatcaacgttttacggactcgctggagattcttcgtgaaaattacgagttcaaacgcaacgatgatactgcgctggaatttcgtcgtgctatctccgtgctgaaaagccttccgtttgaggtacgtagcctgaaagacacggaaggattgccctggatcagtgatgaagtcaaagggattatggaagaaatcatcgaagtcggggagtcgcgtgaagtgcaggccgtgctcaatgatgagtggtatcaaagcttccacgcatttacgagtgtctttggagtgggggtgaagacagcagacaagtggtaccgtatgggtctgcgcaccctcgaggatgttcgttccagcaagaccctgaagttgaccccgcagcagaaagtaggtctgctgtattatgaagatcttgctcgcggcgttacgcgtgccgaagctgacgcgatttggctgctggttcaggatgcagtcgcaactttcgacccggatgcgatcgtggagattgtcggtggatttcgtcgtgggaaacctcagggtcacgacgttgatctgcttatcagttctccgggagctgagaaagagcaagaagaccaactcctgcagaaagtgatgaatctgtggaagaaacaagggttgttgctgtacggtcgtctggagtggagtcagtgggaagatgggggttcgccttccggtaaggctgacgagggtgacgcggaggcgaaatgctttctgatcctcaaactttatgatcatctggtgcgtaaaagtaaacgcaatatgccgactggttcgaacatgggcgagtccaaaccgtggaaagcaattcgcgtagatctgctgcgttgcccctatggcagttttgcgtttgcgatgttgcagtggaccggaagccgcatgttccgtcgtgatctgcgttggtacgccctggaagagaagaacatgatgctggacaatcattcgctgtatgacatgacccgcggtatcttcctccctgctaaatcggaagaggaaattttcgaacatctggggcttgaatacctggaaccgttcgaacgtaacgca

SEQ ID NO: 3724 - protein, 529 aa, synthetic construct
  REGION 1..529: note = Variant of terminal deoxynucleotidyltransferase
MHHHHHHGGSGSHGIRTIDSDFGKKQQKKGDNHDSSATYEIKFHEFVLFILEEKMGATRRTFLTDLARKKGFRVENELTDEVTHIVAENLSRSEVLAWLKEHKMEKTKQFELLDISWLIESMKVGKPVDTKGKYQLAESVEVSANPDPTEGRVNELPPTMKTVSPYACQRRTTLNNRNQRFTDSLEILRENYEFKRNDDTALEFRRAISVLKSLPFEVRSLKDTEGLPWISDEVKGIMEEIIEVGESREVQAVLNDEWYQSFHAFTSVFGVGVKTADKWYRMGLRTLEDVRSSKTLKLTPQQKVGLLYYEDLARGVTRAEADAIWLLVQDAVATFDPDAIVEIVGGFRRGKPQGHDVDLLISSPGAEKEQEDQLLQKVMNLWKKQGLLLYGRLEWSQWEDGGSPSGKADEGDAEAKCFLILKLYDHLVRKSKRNMPTGSNMGESKPWKAIRVDLLRCPYGSFAFAMLQWTGSRMFRRDLRWYALEEKNMMLDNHSLYDMTRGIFLPAKSEEEIFEHLGLEYLEPFERNA

SEQ ID NO: 3725 - DNA, 1587 bp, synthetic construct
  misc_feature 1..1587: note = Variant of terminal deoxynucleotidyltransferase
  source 1..1587: mol_type = other DNA
atgcaccatcatcatcatcatggcggtagcggcagccacggcattcgtaccatcgattcggacttcgggaagaaacagcagaaaaaaggcgataaccacgatagttccgccacttatgaaatcaaatttcacgagtttgtgctgttcattctcgaagaaaaaatgggtgcgacgcgtcgtacttttctgacagatttagcccgcaagaaagggttccgcgtcgagaatgaactgaccgacgaagttacccacatcgtggcagaaaatctgtcacgctctgaagtattggcttggctgaaagaacacaagatggagaagaccaagcaattcgaactgctggatattagctggcttatcgaaagcatgaaagttggtaaaccggtggacaccaaggggaaataccagttggcggaatcggttgaggtgagtgcgaacccagatccgacagaaggtcgtgtaaacgagctgcctcctactatgaaaaccgtttctccgtatgcgtgtcaacgccgcaccaccctgaacaaccgtaatcaacgttttacggactcgctggagattcttcgtgaaaattacgagttcaaacgcaacgatgatactgcgctggaatttcgtcgtgctatctccgtgctgaaaagccttccgtttgaggtacgtagcctgaaagacacggaaggattgccctggatcagtgatgaagtcaaagggattatggaagaaatcatcgaagtcggggagtcgcgtgaagtgcaggccgtgctcaatgatgagtggtatcaaagcttccacgcatttacgagtgtctttggagtgggggtgaagacagcagacaagtggtaccgtatgggtctgcgcaccctcgaggatgttcgttccagcaagaccctgaagttgaccccgatgcagaaagtaggtctgctgtattatgaagatcttgctcgcggcgttacgcgtgccgaagctgacgcgatttggctgctggttcaggatgcagtcgcaactttcgacccggatgcgatcgtggagattgtcggtggatttcgtcgtgggaaacctcagggtcacgacgttgatctgcttatcagttctccgggagctgagaaagagcaagaagaccaactcctgcagaaagtgatgaatctgtggaagaaacaagggttgttgctgtacggtcgtctggagtggagtcagtgggaagatgggggttcgccttccggtaaggctgacgagggtgacgcggagtggaaatgctttctgatcctcaaactttatgatcatctggtgcgtaaaagtaaacgcaatatgccgactggttcgaacatgggcgagtccaaaccgtggaaagcaattcgcgtagatctgctgcgttgcccctatggcagttttgcgtttgcgatgttgcagtggaccggaagccgcatgttccgtcgtgatctgcgttggtacgccctggaagagaagaacatgatgctggacaatcattcgctgtatgacatgacccgcggtatcttcctccctgctaaatcggaagaggaaattttcgaacatctggggcttgaatacctggaaccgttcgaacgtaacgca

SEQ ID NO: 3726 - protein, 529 aa, synthetic construct
  REGION 1..529: note = Variant of terminal deoxynucleotidyltransferase
MHHHHHHGGSGSHGIRTIDSDFGKKQQKKGDNHDSSATYEIKFHEFVLFILEEKMGATRRTFLTDLARKKGFRVENELTDEVTHIVAENLSRSEVLAWLKEHKMEKTKQFELLDISWLIESMKVGKPVDTKGKYQLAESVEVSANPDPTEGRVNELPPTMKTVSPYACQRRTTLNNRNQRFTDSLEILRENYEFKRNDDTALEFRRAISVLKSLPFEVRSLKDTEGLPWISDEVKGIMEEIIEVGESREVQAVLNDEWYQSFHAFTSVFGVGVKTADKWYRMGLRTLEDVRSSKTLKLTPMQKVGLLYYEDLARGVTRAEADAIWLLVQDAVATFDPDAIVEIVGGFRRGKPQGHDVDLLISSPGAEKEQEDQLLQKVMNLWKKQGLLLYGRLEWSQWEDGGSPSGKADEGDAEWKCFLILKLYDHLVRKSKRNMPTGSNMGESKPWKAIRVDLLRCPYGSFAFAMLQWTGSRMFRRDLRWYALEEKNMMLDNHSLYDMTRGIFLPAKSEEEIFEHLGLEYLEPFERNA

SEQ ID NO: 3727 - DNA, 1587 bp, synthetic construct
  misc_feature 1..1587: note = Variant of terminal deoxynucleotidyltransferase
  source 1..1587: mol_type = other DNA
atgcaccatcatcatcatcatggcggtagcggcagccacggcattcgtaccatcgattcggacttcgggaagaaacagcagaaaaaaggcgataaccacgatagttccgccacttatgaaatcaaatttcacgagtttgtgctgttcattctcgaagaaaaaatgggtgcgacgcgtcgtacttttctgacagatttagcccgcaagaaagggttccgcgtcgagaatgaactgaccgacgaagttacccacatcgtggcagaaaatctgtcacgctctgaagtattggcttggctgaaagaacacaagatggagaagaccaagcaattcgaactgctggatattagctggcttatcgaaagcatgaaagttggtaaaccggtggacaccaaggggaaataccagttggcggaatcggttgaggtgagtgcgaacccagatccgacagaaggtcgtgtaaacgagctgcctcctactatgaaaaccgtttctccgtatgcgtgtcaacgccgcaccaccctgaacaaccgtaatcaacgttttacggactcgctggagattcttcgtgaaaattacgagttcaaacgcaacgatgatactgcgctggaatttcgtcgtgctatctccgtgctgaaaagccttccgtttgaggtacgtagcctgaaagacacggaaggattgccctggatcagtgatgaagtcaaagggattatggaagaaatcatcgaagtcggggagtcgcgtgaagtgcaggccgtgctcaatgatgagtggtatcaaagcttccacgcatttacgagtgtctttggagtgggggtgaagacagcagacaagtggtaccgtatgggtctgcgcaccctcgaggatgttcgttccagcaagaccctgaagttgaccccgatgcagaaagtaggtctgctgtattatgaagatcttgctcgcggcgttacgcgtgccgaagctgacgcgatttggctgctggttcaggatgcagtcgcaactttcgacccggatgcgatcgtggagattgtcggtggatttcgtcgtgggaaacctcagggtcacgacgttgatctgcttatcagttctccgggagctgagaaagagcaagaagaccaactcctgcagaaagtgatgaatctgtggaagaaacaagggttgttgctgtacggtcgtctggagtggagtcagtgggaagatgggggttcgccttccggtaaggctgacgagggtgacgcggaggcgaaatgctttctgatcctcaaactttatgatcatctggtgcgtaaaagtaaacgcaatatgccgactggttcgaacatgggcgagtccaaaccgtggaaagcaattcgcgtagatctgctgccttgcccctatggcagttttgcgtttgcgatgttgcagtggaccggaagccgcatgttccgtcgtgatctgcgttggtacgccctggaagagaagaacatgatgctggacaatcattcgctgtatgacatgacccgcggtatcttcctccctgctaaatcggaagaggaaattttcgaacatctggggcttgaatacctggaaccgttcgaacgtaacgca

SEQ ID NO: 3728 - protein, 529 aa, synthetic construct
  REGION 1..529: note = Variant of terminal deoxynucleotidyltransferase
MHHHHHHGGSGSHGIRTIDSDFGKKQQKKGDNHDSSATYEIKFHEFVLFILEEKMGATRRTFLTDLARKKGFRVENELTDEVTHIVAENLSRSEVLAWLKEHKMEKTKQFELLDISWLIESMKVGKPVDTKGKYQLAESVEVSANPDPTEGRVNELPPTMKTVSPYACQRRTTLNNRNQRFTDSLEILRENYEFKRNDDTALEFRRAISVLKSLPFEVRSLKDTEGLPWISDEVKGIMEEIIEVGESREVQAVLNDEWYQSFHAFTSVFGVGVKTADKWYRMGLRTLEDVRSSKTLKLTPMQKVGLLYYEDLARGVTRAEADAIWLLVQDAVATFDPDAIVEIVGGFRRGKPQGHDVDLLISSPGAEKEQEDQLLQKVMNLWKKQGLLLYGRLEWSQWEDGGSPSGKADEGDAEAKCFLILKLYDHLVRKSKRNMPTGSNMGESKPWKAIRVDLLPCPYGSFAFAMLQWTGSRMFRRDLRWYALEEKNMMLDNHSLYDMTRGIFLPAKSEEEIFEHLGLEYLEPFERNA

SEQ ID NO: 3729 - DNA, 1587 bp, synthetic construct
  misc_feature 1..1587: note = Variant of terminal deoxynucleotidyltransferase
  source 1..1587: mol_type = other DNA
atgcaccatcatcatcatcatggcggtagcggcagccacggcattcgtaccatcgattcggacttcgggaagaaacagcagaaaaaaggcgataaccacgatagttccgccacttatgaaatcaaatttcacgagtttgtgctgttcattctcgaagaaaaaatgggtgcgacgcgtcgtacttttctgacagatttagcccgcaagaaagggttccgcgtcgagaatgaactgaccgacgaagttacccacatcgtggcagaaaatctgtcacgctctgaagtattggcttggctgaaagaacacaagatggagaagaccaagcaattcgaactgctggatattagctggcttatcgaaagcatgaaagttggtaaaccggtggacaccaaggggaaataccagttggcggaatcggttgaggtgagtgcgaacccagatccgacagaaggtcgtgtaaacgagctgcctcctactatgaaaaccgtttctccgtatgcgtgtcaacgccgcaccaccctgaacaaccgtaatcaacgttttacggactcgctggagattcttcgtgaaaattacgagttcaaacgcaacgatgatactgcgctggaatttcgtcgtgctatctccgtgctgaaaagccttccgtttgaggtacgtagcctgaaagacacggaaggattgccctggatcagtgatgaagtcaaagggattatggaagaaatcatcgaagtcggggagtcgcgtgaagtgcaggccgtgctcaatgatgagtggtatcaaagcttccacgcatttacgagtgtctttggagtgggggtgaagacagcagacaagtggtaccgtatgggtctgcgcaccctcgaggatgttcgttccagcaagaccctgaagttgaccccgatgcagaaagtaggtctgctgtattatgaagatcttgctcgcggcgttacgcgtgccgaagctgacgcgatttggctgctggttcaggatgcagtcgcaactttcgacccggatgcgatcgtggagattgtcggtggatttcgtcgtgggaaacctcagggtcacgacgttgatctgcttatcagttctccgggagctgagaaagagcaagaagaccaactcctgcagaaagtgatgaatctgtggaagaaacaagggttgttgctgtacggtcgtctggagtggagtcagtgggaagatgggggttcgccttccggtaaggctgacgagggtgacgcggaggcgaaatgctttctgatcctcaaactttatgatcatctggtgcgtaaaagtaaacgcaatatgccgactggttcgaacatgggcgagtccaaaccgtggaaagcaattcgcgtagatctgctgcgttgcccctatggcagttttgcgtttgcgatgttgcagtggaccggaagcgcgatgttccgtcgtgatctgcgttggtacgccctggaagagaagaacatgatgctggacaatcattcgctgtatgacatgacccgcggtatcttcctccctgctaaatcggaagaggaaattttcgaacatctggggcttgaatacctggaaccgttcgaacgtaacgca

SEQ ID NO: 3730 - protein, 529 aa, synthetic construct
  REGION 1..529: note = Variant of terminal deoxynucleotidyltransferase
MHHHHHHGGSGSHGIRTIDSDFGKKQQKKGDNHDSSATYEIKFHEFVLFILEEKMGATRRTFLTDLARKKGFRVENELTDEVTHIVAENLSRSEVLAWLKEHKMEKTKQFELLDISWLIESMKVGKPVDTKGKYQLAESVEVSANPDPTEGRVNELPPTMKTVSPYACQRRTTLNNRNQRFTDSLEILRENYEFKRNDDTALEFRRAISVLKSLPFEVRSLKDTEGLPWISDEVKGIMEEIIEVGESREVQAVLNDEWYQSFHAFTSVFGVGVKTADKWYRMGLRTLEDVRSSKTLKLTPMQKVGLLYYEDLARGVTRAEADAIWLLVQDAVATFDPDAIVEIVGGFRRGKPQGHDVDLLISSPGAEKEQEDQLLQKVMNLWKKQGLLLYGRLEWSQWEDGGSPSGKADEGDAEAKCFLILKLYDHLVRKSKRNMPTGSNMGESKPWKAIRVDLLRCPYGSFAFAMLQWTGSAMFRRDLRWYALEEKNMMLDNHSLYDMTRGIFLPAKSEEEIFEHLGLEYLEPFERNA

SEQ ID NO: 3731 - DNA, 1587 bp, synthetic construct
  misc_feature 1..1587: note = Variant of terminal deoxynucleotidyltransferase
  source 1..1587: mol_type = other DNA
atgcaccatcatcatcatcatggcggtagcggcagccacggcattcgtaccatcgattcggacttcgggaagaaacagcagaaaaaaggcgataaccacgatagttccgccacttatgaaatcaaatttcacgagtttgtgctgttcattctcgaagaaaaaatgggtgcgacgcgtcgtacttttctgacagatttagcccgcaagaaagggttccgcgtcgagaatgaactgaccgacgaagttacccacatcgtggcagaaaatctgtcacgctctgaagtattggcttggctgaaagaacacaagatggagaagaccaagcaattcgaactgctggatattagctggcttatcgaaagcatgaaagttggtaaaccggtggacaccaaggggaaataccagttggcggaatcggttgaggtgagtgcgaacccagatccgacagaaggtcgtgtaaacgagctgcctcctactatgaaaaccgtttctccgtatgcgtgtcaacgccgcaccaccctgaacaaccgtaatcaacgttttacggactcgctggagattcttcgtgaaaattacgagttcaaacgcaacgatgatactgcgctggaatttcgtcgtgctatctccgtgctgaaaagccttccgtttgaggtacgtagcctgaaagacacggaaggattgccctggatcagtgatgaagtcaaagggattatggaagaaatcatcgaagtcggggagtcgcgtgaagtgcaggccgtgctcaatgatgagtggtatcaaagcttccacgcatttacgagggtctttggagtgggggtgaagacagcagacaagtggtaccgtatgggtctgcgcaccctcgaggatgttcgttccagcaagaccctgaagttgaccccgatgcagaaagtaggtctgctgtattatgaagatcttgctcgcggcgttacgcgtgccgaagctgacgcgatttggctgctggttcaggatgcagtcgcaactttcgacccggatgcgatcgtggagattgtcggtggatttcgtcgtgggaaacctcagggtcacgacgttgatctgcttatcagttctccgggagctgagaaagagcaagaagaccaactcctgcagaaagtgatgaatctgtggaagaaacaagggttgttgctgtacggtcgtctggagtggagtcagtgggaagatgggggttcgccttccggtaaggctgacgagggtgacgcggaggcgaaatgctttctgatcctcaaactttatgatcatctggtgcgtaaaagtaaacgcaatatgccgactggttcgaacatgggcgagtccaaaccgtggaaagcaattcgcgtagatctgctgcgttgcccctatggcagttttgcgtttgcgatgttgcagtggaccggaagccgcatgttccgtcgtgatctgcgttggtacgccctggaagagaagaacatgatgctggacaatcattcgctgtatgacatgacccgcggtatcttcctccctgctaaatcggaagaggaaattttcgaacatctggggcttgaatacctggaaccgttcgaacgtaacgca

SEQ ID NO: 3732 - protein, 529 aa, synthetic construct
  REGION 1..529: note = Variant of terminal deoxynucleotidyltransferase
MHHHHHHGGSGSHGIRTIDSDFGKKQQKKGDNHDSSATYEIKFHEFVLFILEEKMGATRRTFLTDLARKKGFRVENELTDEVTHIVAENLSRSEVLAWLKEHKMEKTKQFELLDISWLIESMKVGKPVDTKGKYQLAESVEVSANPDPTEGRVNELPPTMKTVSPYACQRRTTLNNRNQRFTDSLEILRENYEFKRNDDTALEFRRAISVLKSLPFEVRSLKDTEGLPWISDEVKGIMEEIIEVGESREVQAVLNDEWYQSFHAFTRVFGVGVKTADKWYRMGLRTLEDVRSSKTLKLTPMQKVGLLYYEDLARGVTRAEADAIWLLVQDAVATFDPDAIVEIVGGFRRGKPQGHDVDLLISSPGAEKEQEDQLLQKVMNLWKKQGLLLYGRLEWSQWEDGGSPSGKADEGDAEAKCFLILKLYDHLVRKSKRNMPTGSNMGESKPWKAIRVDLLRCPYGSFAFAMLQWTGSRMFRRDLRWYALEEKNMMLDNHSLYDMTRGIFLPAKSEEEIFEHLGLEYLEPFERNA

SEQ ID NO: 3733 - DNA, 1587 bp, synthetic construct
  misc_feature 1..1587: note = Variant of terminal deoxynucleotidyltransferase
  source 1..1587: mol_type = other DNA
atgcaccatcatcatcatcatggcggtagcggcagccacggcattcgtaccatcgattcggacttcgggaagaaacagcagaaaaaaggcgataaccacgatagttccgccacttatgaaatcaaatttcacgagtttgtgctgttcattctcgaagaaaaaatgggtgcgacgcgtcgtacttttctgacagatttagcccgcaagaaagggttccgcgtcgagaatgaactgaccgacgaagttacccacatcgtggcagaaaatctgtcacgctctgaagtattggcttggctgaaagaacacaagatggagaagaccaagcaattcgaactgctggatattagctggcttatcgaaagcatgaaagttggtaaaccggtggacaccaaggggaaataccagttggcggaatcggttgaggtgagtgcgaacccagatccgacagaaggtcgtgtaaacgagctgcctcctactatgaaaaccgtttctccgtatgcgtgtcaacgccgcaccaccctgaacaaccgtaatcaacgttttacggactcgctggagattcttcgtgaaaattacgagttcaaacgcaacgatgatactgcgctggaatttcgtcgtgctatctccgtgctgaaaagccttccgtttgaggtacgtagcctgaaagacacggaaggattgccctggatcagtgatgaagtcaaagggattatggaagaaatcatcgaagtcggggagtcgcgtgaagtgcaggccgtgctcaatgatgagtggtatcaaagcttccacgcatttacgagtgtctttggagtgggggtgaagacagcagacaagtggtaccgtatgggtctgcgcaccctcgaggatgttcgttccagcaagaccctgaagttgaccccgatgcagaaagtaggtctgctgtattatgaagatcttgctcgcggcgttacgcgtgccgaagctgacgcgatttggctgctggttcaggatgcagtcgcaactttcgacccggatgcgatcgtggagattgtcggtggatttcgtcgtgggaaacctcagggtcacgacgttgatctgcttatcagttctccgggagctgagaaagagcaagaagaccaactcctgcagaaagtgatgaatctgtggaagaaacaagggttgttgctgtacggtcgtctggagtggagtcagtgggaagatgggggttcgccttccggtaaggctgacgagggtgacgcggaggcgaaatgctttctgatcctcaaactttatgatcatctggtgcgtaaaagtaaacgcaatatgccgactggttcgaacatgggcgagtccaaaccgtggaaagcaattcgcgtagatctgctgcgttgcccctatggcagttttgcgtttgcgatgttgcagtggaccggagcgcgcatgttccgtcgtgatctgcgttggtacgccctggaagagaagaacatgatgctggacaatcattcgctgtatgacatgacccgcggtatcttcctccctgctaaatcggaagaggaaattttcgaacatctggggcttgaatacctggaaccgttcgaacgtaacgca

SEQ ID NO: 3734 - protein, 529 aa, synthetic construct
  REGION 1..529: note = Variant of terminal deoxynucleotidyltransferase
MHHHHHHGGSGSHGIRTIDSDFGKKQQKKGDNHDSSATYEIKFHEFVLFILEEKMGATRRTFLTDLARKKGFRVENELTDEVTHIVAENLSRSEVLAWLKEHKMEKTKQFELLDISWLIESMKVGKPVDTKGKYQLAESVEVSANPDPTEGRVNELPPTMKTVSPYACQRRTTLNNRNQRFTDSLEILRENYEFKRNDDTALEFRRAISVLKSLPFEVRSLKDTEGLPWISDEVKGIMEEIIEVGESREVQAVLNDEWYQSFHAFTSVFGVGVKTADKWYRMGLRTLEDVRSSKTLKLTPMQKVGLLYYEDLARGVTRAEADAIWLLVQDAVATFDPDAIVEIVGGFRRGKPQGHDVDLLISSPGAEKEQEDQLLQKVMNLWKKQGLLLYGRLEWSQWEDGGSPSGKADEGDAEAKCFLILKLYDHLVRKSKRNMPTGSNMGESKPWKAIRVDLLRCPYGSFAFAMLQWTGARMFRRDLRWYALEEKNMMLDNHSLYDMTRGIFLPAKSEEEIFEHLGLEYLEPFERNA

SEQ ID NO: 3735 - DNA, 1587 bp, synthetic construct
  misc_feature 1..1587: note = Variant of terminal deoxynucleotidyltransferase
  source 1..1587: mol_type = other DNA
atgcaccatcatcatcatcatggcggtagcggcagccacggcattcgtaccatcgattcggacttcgggaagaaacagcagaaaaaaggcgataaccacgatagttccgccacttatgaaatcaaatttcacgagtttgtgctgttcattctcgaagaaaaaatgggtgcgacgcgtcgtacttttctgacagatttagcccgcaagaaagggttccgcgtcgagaatgaactgaccgacgaagttacccacatcgtggcagaaaatctgtcacgctctgaagtattggcttggctgaaagaacacaagatggagaagaccaagcaattcgaactgctggatattagctggcttatcgaaagcatgaaagttggtaaaccggtggacaccaaggggaaataccagttggcggaatcggttgaggtgagtgcgaacccagatccgacagaaggtcgtgtaaacgagctgcctcctactatgaaaaccgtttctccgtatgcgtgtcaacgccgcaccaccctgaacaaccgtaatcaacgttttacggactcgctggagattcttcgtgaaaattacgagttcaaacgcaacgatgatactgcgctggaatttcgtcgtgctatctccgtgctgaaaagccttccgtttgaggtacgtagcctgaaagacacggaaggattgccctggatcagtgatgaagtcaaagggattatggaagaaatcatcgaagtcggggagtcgcgtgaagtgcaggccgtgctcaatgatgagtggtatcaaagcttccacgcatttacgagtgtctttggagtgggggtgaagacagcagacaagtggtaccgtatgggtctgcgcaccctcgaggatgttcgttccagcaagaccctgaagttgaccccgatgcagaaagtaggtctgctgtattatgaagatcttatgcgcggcgttacgcgtgccgaagctgacgcgatttggctgctggttcaggatgcagtcgcaactttcgacccggatgcgatcgtggagattgtcggtggatttcgtcgtgggaaacctcagggtcacgacgttgatctgcttatcagttctccgggagctgagaaagagcaagaagaccaactcctgcagaaagtgatgaatctgtggaagaaacaagggttgttgctgtacggtcgtctggagtggagtcagtgggaagatgggggttcgccttccggtaaggctgacgagggtgacgcggaggcgaaatgctttctgatcctcaaactttatgatcatctggtgcgtaaaagtaaacgcaatatgccgactggttcgaacatgggcgagtccaaaccgtggaaagcaattcgcgtagatctgctgcgttgcccctatggcagttttgcgtttgcgatgttgcagtggaccggaagccgcatgttccgtcgtgatctgcgttggtacgccctggaagagaagaacatgatgctggacaatcattcgctgtatgacatgacccgcggtatcttcctccctgctaaatcggaagaggaaattttcgaacatctggggcttgaatacctggaaccgttcgaacgtaacgca

SEQ ID NO: 3736 - protein, 529 aa, synthetic construct
  REGION 1..529: note = Variant of terminal deoxynucleotidyltransferase
MHHHHHHGGSGSHGIRTIDSDFGKKQQKKGDNHDSSATYEIKFHEFVLFILEEKMGATRRTFLTDLARKKGFRVENELTDEVTHIVAENLSRSEVLAWLKEHKMEKTKQFELLDISWLIESMKVGKPVDTKGKYQLAESVEVSANPDPTEGRVNELPPTMKTVSPYACQRRTTLNNRNQRFTDSLEILRENYEFKRNDDTALEFRRAISVLKSLPFEVRSLKDTEGLPWISDEVKGIMEEIIEVGESREVQAVLNDEWYQSFHAFTSVFGVGVKTADKWYRMGLRTLEDVRSSKTLKLTPMQKVGLLYYEDLMRGVTRAEADAIWLLVQDAVATFDPDAIVEIVGGFRRGKPQGHDVDLLISSPGAEKEQEDQLLQKVMNLWKKQGLLLYGRLEWSQWEDGGSPSGKADEGDAEAKCFLILKLYDHLVRKSKRNMPTGSNMGESKPWKAIRVDLLRCPYGSFAFAMLQWTGSRMFRRDLRWYALEEKNMMLDNHSLYDMTRGIFLPAKSEEEIFEHLGLEYLEPFERNA

SEQ ID NO: 3737 - DNA, 1587 bp, synthetic construct
  misc_feature 1..1587: note = Variant of terminal deoxynucleotidyltransferase
  source 1..1587: mol_type = other DNA
atgcaccatcatcatcatcatggcggtagcggcagccacggcattcgtaccatcgattcggacttcgggaagaaacagcagaaaaaaggcgataaccacgatagttccgccacttatgaaatcaaatttcacgagtttgtgctgttcattctcgaagaaaaaatgggtgcgacgcgtcgtacttttctgacagatttagcccgcaagaaagggttccgcgtcgagaatgaactgaccgacgaagttacccacatcgtggcagaaaatctgtcacgctctgaagtattggcttggctgaaagaacacaagatggagaagaccaagcaattcgaactgctggatattagctggcttatcgaaagcatgaaagttggtaaaccggtggacaccaaggggaaataccagttggcggaatcggttgaggtgagtgcgaacccagatccgacagaaggtcgtgtaaacgagctgcctcctactatgaaaaccgtttctccgtatgcgtgtcaacgccgcaccaccctgaacaaccgtaatcaacgttttacggactcgctggagattcttcgtgaaaattacgagttcaaacgcaacgatgatactgcgctggaatttcgtcgtgctatctccgtgctgaaaagccttccgtttgaggtacgtagcctgaaagacacggaaggattgccctggatcagtgatgaagtcaaagggattatggaagaaatcatcgaagtcggggagtcgcgtgaagtgcaggccgtgctcaatgatgagtggtatcaaagcttccacgcatttacgagtgtctttggagtgggggtgaagacagcagacaagtggtaccgtatgggtctgcgcaccctcgaggatgttcgttccagcaagaccctgaagttgaccccgatgcagaaagtaggtctgctgtattatgaagatcttgctcgcggcgttacgcgtgccgaagctgacgcgatttggctgctggttcaggatgcagtcgcaactttcgacccggatgcgatcgtggagattgtcggtggatttcgtcgtgggaaacctcagggtcacgacgttgatctgcttatcagttctccgggagctgagaaagagcaagaagaccaactcctgcagaaagtgatgaatctgtggaagaaacaagggttgttgctgtacggtcgtctggagtggagtcagtgggaagatgggggttcgccttccggtaaggctgacgagggtgacgcggaggcgaaatgctttctgatcctcaaactttatgatcatctggtgcgtaaaagtaaacgcaatatgccgactggttcgaacatgggcgagtccaaaccgtggaaagcaattcgcgtagatctgctgcgttgcccctatggcagttttgcgtttgcgatgttgcagtggaccggaagccgcatgttccgtcgtgatctgcgttggtacgccctggaagagaagaacatgatgctggaccggcattcgctgtatgacctgacccgcggtatcttcctccctgctaaatcggaagaggaaattttcgaacatctggggcttgaatacctggaaccgttcgaacgtaacgca

SEQ ID NO: 3738 - protein, 529 aa, synthetic construct
  REGION 1..529: note = Variant of terminal deoxynucleotidyltransferase
MHHHHHHGGSGSHGIRTIDSDFGKKQQKKGDNHDSSATYEIKFHEFVLFILEEKMGATRRTFLTDLARKKGFRVENELTDEVTHIVAENLSRSEVLAWLKEHKMEKTKQFELLDISWLIESMKVGKPVDTKGKYQLAESVEVSANPDPTEGRVNELPPTMKTVSPYACQRRTTLNNRNQRFTDSLEILRENYEFKRNDDTALEFRRAISVLKSLPFEVRSLKDTEGLPWISDEVKGIMEEIIEVGESREVQAVLNDEWYQSFHAFTSVFGVGVKTADKWYRMGLRTLEDVRSSKTLKLTPMQKVGLLYYEDLARGVTRAEADAIWLLVQDAVATFDPDAIVEIVGGFRRGKPQGHDVDLLISSPGAEKEQEDQLLQKVMNLWKKQGLLLYGRLEWSQWEDGGSPSGKADEGDAEAKCFLILKLYDHLVRKSKRNMPTGSNMGESKPWKAIRVDLLRCPYGSFAFAMLQWTGSRMFRRDLRWYALEEKNMMLDRHSLYDLTRGIFLPAKSEEEIFEHLGLEYLEPFERNA

SEQ ID NO: 3739 - DNA, 1587 bp, synthetic construct
  misc_feature 1..1587: note = Variant of terminal deoxynucleotidyltransferase
  source 1..1587: mol_type = other DNA
atgcaccatcatcatcatcatggcggtagcggcagccacggcattcgtaccatcgattcggacttcgggaagaaacagcagaaaaaaggcgataaccacgatagttccgccacttatgaaatcaaatttcacgagtttgtgctgttcattctcgaagaaaaaatgggtgcgacgcgtcgtacttttctgacagatttagcccgcaagaaagggttccgcgtcgagaatgaactgaccgacgaagttacccacatcgtggcagaaaatctgtcacgctctgaagtattggcttggctgaaagaacacaagatggagaagaccaagcaattcgaactgctggatattagctggcttatcgaaagcatgaaagttggtaaaccggtggacaccaaggggaaataccagttggcggaatcggttgaggtgagtgcgaacccagatccgacagaaggtcgtgtaaacgagctgcctcctactatgaaaaccgtttctccgtatgcgtgtcaacgccgcaccaccctgaacaaccgtaatcaacgttttacggactcgctggagattcttcgtgaaaattacgagttcaaacgcaacgatgatactgcgctggaatttcgtcgtgctatctccgtgctgaaaagccttccgtttgaggtacgtagcctgaaagacacggaaggattgccctggatcagtgatgaagtcaaagggattatggaagaaatcatcgaagtcggggagtcgcgtgaagtgcaggccgtgctcaatgatgagtggtatcaaagcttccacgcatttacgagtgtctttggagtgggggtgaagacagcagacaagtggtaccgtatgggtctgcgcaccctcgaggatgttcgttccagcaagaccctgaagttgaccccgatgcagaaagtaggtctggggtattatgaagatcttgctcgcggcgttacgcgtgccgaagctgacgcgatttggctgctggttcaggatgcagtcgcaactttcgacccggatgcgatcgtggagattgtcggtggatttcgtcgtgggaaacctcagggtcacgacgttgatctgcttatcagttctccgggagctgagaaagagcaagaagaccaactcctgcagaaagtgatgaatctgtggaagaaacaagggttgttgctgtacggtcgtctggagtggagtcagtgggaagatgggggttcgccttccggtaaggctgacgagggtgacgcggaggcgaaatgctttctgatcctcaaactttatgatcatctggtgcgtaaaagtaaacgcaatatgccgactggttcgaacatgggcgagtccaaaccgtggaaagcaattcgcgtagatctgctgcgttgcccctatggcagttttgcgtttgcgatgttgcagtggaccggaagccgcatgttccgtcgtgatctgcgttggtacgccctggaagagaagaacatgatgctggacaatcattcgctgtatgacatgacccgcggtatcttcctccctgctaaatcggaagaggaaattttcgaacatctggggcttgaatacctggaaccgttcgaacgtaacgca

SEQ ID NO: 3740 - protein, 529 aa, synthetic construct
  REGION 1..529: note = Variant of terminal deoxynucleotidyltransferase
MHHHHHHGGSGSHGIRTIDSDFGKKQQKKGDNHDSSATYEIKFHEFVLFILEEKMGATRRTFLTDLARKKGFRVENELTDEVTHIVAENLSRSEVLAWLKEHKMEKTKQFELLDISWLIESMKVGKPVDTKGKYQLAESVEVSANPDPTEGRVNELPPTMKTVSPYACQRRTTLNNRNQRFTDSLEILRENYEFKRNDDTALEFRRAISVLKSLPFEVRSLKDTEGLPWISDEVKGIMEEIIEVGESREVQAVLNDEWYQSFHAFTSVFGVGVKTADKWYRMGLRTLEDVRSSKTLKLTPMQKVGLGYYEDLARGVTRAEADAIWLLVQDAVATFDPDAIVEIVGGFRRGKPQGHDVDLLISSPGAEKEQEDQLLQKVMNLWKKQGLLLYGRLEWSQWEDGGSPSGKADEGDAEAKCFLILKLYDHLVRKSKRNMPTGSNMGESKPWKAIRVDLLRCPYGSFAFAMLQWTGSRMFRRDLRWYALEEKNMMLDNHSLYDMTRGIFLPAKSEEEIFEHLGLEYLEPFERNA

SEQ ID NO: 3741 - DNA, 1587 bp, synthetic construct
  misc_feature 1..1587: note = Variant of terminal deoxynucleotidyltransferase
  source 1..1587: mol_type = other DNA
atgcaccatcatcatcatcatggcggtagcggcagccacggcattcgtaccatcgattcggacttcgggaagaaacagcagaaaaaaggcgataaccacgatagttccgccacttatgaaatcaaatttcacgagtttgtgctgttcattctcgaagaaaaaatgggtgcgacgcgtcgtacttttctgacagatttagcccgcaagaaagggttccgcgtcgagaatgaactgaccgacgaagttacccacatcgtggcagaaaatctgtcacgctctgaagtattggcttggctgaaagaacacaagatggagaagaccaagcaattcgaactgctggatattagctggcttatcgaaagcatgaaagttggtaaaccggtggacaccaaggggaaataccagttggcggaatcggttgaggtgagtgcgaacccagatccgacagaaggtcgtgtaaacgagctgcctcctactatgaaaaccgtttctccgtatgcgtgtcaacgccgcaccaccctgaacaaccgtaatcaacgttttacggactcgctggagattcttcgtgaaaattacgagttcaaacgcaacgatgatactgcgctggaatttcgtcgtgctatctccgtgctgaaaagccttccgtttgaggtacgtagcctgaaagacacggaaggattgccctggatcagtgatgaagtcaaagggattatggaagaaatcatcgaagtcggggagtcgcgtgaagtgcaggccgtgctcaatgatgagtggtatcaaagcttccacgcatttacgagtgtctttggagtgggggtgaagacagcagacaagtggtaccgtatgggtctgcgcaccctcgaggatgttcgttccagcaagaccctgaagttgaccccgatgcagaaagtaggtctgctgtattatgaagatcttgctcgcggcgttacgcgtgccgaagctgacgcgatttggctgctggttcaggatgcagtcgcaactttcgacccggatgcgatcgtggagattgtcggtggatttcgtcgtgggaaacctcagggtcacgacgttgatctgcttatcagttctccgggagctgagaaagagcaagaagaccaactcctgcagaaagtgatgaatctgtggaagaaacaagggttgttgctgtacggtcgtctggagtggagtcagtgggaagatgggggttcgccttccggtaaggctgacgagggtgacgcggaggcgaaatgctttatgatcctcaaactttatgatcatctggtgcgtaaaagtaaacgcaatatgccgactggttcgaacatgggcgagtccaaaccgtggaaagcaattcgcgtagatctgctgcgttgcccctatggcagttttgcgtttgcgatgttgcagtggaccggaagccgcatgttccgtcgtgatctgcgttggtacgccctggaagagaagaacatgatgctggacaatcattcgctgtatgacatgacccgcggtatcttcctccctgctaaatcggaagaggaaattttcgaacatctggggcttgaatacctggaaccgttcgaacgtaacgca

SEQ ID NO: 3742 - protein, 529 aa, synthetic construct
  REGION 1..529: note = Variant of terminal deoxynucleotidyltransferase
MHHHHHHGGSGSHGIRTIDSDFGKKQQKKGDNHDSSATYEIKFHEFVLFILEEKMGATRRTFLTDLARKKGFRVENELTDEVTHIVAENLSRSEVLAWLKEHKMEKTKQFELLDISWLIESMKVGKPVDTKGKYQLAESVEVSANPDPTEGRVNELPPTMKTVSPYACQRRTTLNNRNQRFTDSLEILRENYEFKRNDDTALEFRRAISVLKSLPFEVRSLKDTEGLPWISDEVKGIMEEIIEVGESREVQAVLNDEWYQSFHAFTSVFGVGVKTADKWYRMGLRTLEDVRSSKTLKLTPMQKVGLLYYEDLARGVTRAEADAIWLLVQDAVATFDPDAIVEIVGGFRRGKPQGHDVDLLISSPGAEKEQEDQLLQKVMNLWKKQGLLLYGRLEWSQWEDGGSPSGKADEGDAEAKCFMILKLYDHLVRKSKRNMPTGSNMGESKPWKAIRVDLLRCPYGSFAFAMLQWTGSRMFRRDLRWYALEEKNMMLDNHSLYDMTRGIFLPAKSEEEIFEHLGLEYLEPFERNA

SEQ ID NO: 3743 - DNA, 1587 bp, synthetic construct
  misc_feature 1..1587: note = Variant of terminal deoxynucleotidyltransferase
  source 1..1587: mol_type = other DNA
atgcaccatcatcatcatcatggcggtagcggcagccacggcattcgtaccatcgattcggacttcgggaagaaacagcagaaaaaaggcgataaccacgatagttccgccacttatgaaatcaaatttcacgagtttgtgctgttcattctcgaagaaaaaatgggtgcgacgcgtcgtacttttctgacagatttagcccgcaagaaagggttccgcgtcgagaatgaactgaccgacgaagttacccacatcgtggcagaaaatctgtcacgctctgaagtattggcttggctgaaagaacacaagatggagaagaccaagcaattcgaactgctggatattagctggcttatcgaaagcatgaaagttggtaaaccggtggacaccaaggggaaataccagttggcggaatcggttgaggtgagtgcgaacccagatccgacagaaggtcgtgtaaacgagctgcctcctactatgaaaaccgtttctccgtatgcgtgtcaacgccgcaccaccctgaacaaccgtaatcaacgttttacggactcgctggagattcttcgtgaaaattacgagttcaaacgcaacgatgatactgcgctggaatttcgtcgtgctatctccgtgctgaaaagccttccgtttgaggtacgtagcctgaaagacacggaaggattgccctggatcagtgatgaagtcaaagggattatggaagaaatcatcgaagtcggggagtcgcgtgaagtgcaggccgtgctcaatgatgagtggtatcaaagcttccacgcatttacgagtgtctttggagtgggggtgaagacagcagacaagtggtaccgtatgggtctgcgcaccctcgaggatgttcgttccagcaagaccctgaagttgaccccgatgcagaaagtaggtctggcttattatgaagatcttgctcgcggcgttacgcgtgccgaagctgacgcgatttggctgctggttcaggatgcagtcgcaactttcgacccggatgcgatcgtggagattgtcggtggatttcgtcgtgggaaacctcagggtcacgacgttgatctgcttatcagttctccgggagctgagaaagagcaagaagaccaactcctgcagaaagtgatgaatctgtggaagaaacaagggttgttgctgtacggtcgtctggagtggagtcagtgggaagatgggggttcgccttccggtaaggctgacgagggtgacgcggaggcgaaatgctttctgatcctcaaactttatgatcatctggtgcgtaaaagtaaacgcaatatgccgactggttcgaacatgggcgagtccaaaccgtggaaagcaattcgcgtagatctgctgcgttgcccctatggcagttttgcgtttgcgatgttgcagtggaccggaagccgcatgttccgtcgtgatctgcgttggtacgccctggaagagaagaacatgatgctggacaatcattcgctgtatgacatgacccgcggtatcttcctccctgctaaatcggaagaggaaattttcgaacatctggggcttgaatacctggaaccgttcgaacgtaacgca

SEQ ID NO: 3744 - protein, 529 aa, synthetic construct
  REGION 1..529: note = Variant of terminal deoxynucleotidyltransferase
MHHHHHHGGSGSHGIRTIDSDFGKKQQKKGDNHDSSATYEIKFHEFVLFILEEKMGATRRTFLTDLARKKGFRVENELTDEVTHIVAENLSRSEVLAWLKEHKMEKTKQFELLDISWLIESMKVGKPVDTKGKYQLAESVEVSANPDPTEGRVNELPPTMKTVSPYACQRRTTLNNRNQRFTDSLEILRENYEFKRNDDTALEFRRAISVLKSLPFEVRSLKDTEGLPWISDEVKGIMEEIIEVGESREVQAVLNDEWYQSFHAFTSVFGVGVKTADKWYRMGLRTLEDVRSSKTLKLTPMQKVGLAYYEDLARGVTRAEADAIWLLVQDAVATFDPDAIVEIVGGFRRGKPQGHDVDLLISSPGAEKEQEDQLLQKVMNLWKKQGLLLYGRLEWSQWEDGGSPSGKADEGDAEAKCFLILKLYDHLVRKSKRNMPTGSNMGESKPWKAIRVDLLRCPYGSFAFAMLQWTGSRMFRRDLRWYALEEKNMMLDNHSLYDMTRGIFLPAKSEEEIFEHLGLEYLEPFERNA

SEQ ID NO: 3745 - DNA, 1587 bp, synthetic construct
  misc_feature 1..1587: note = Variant of terminal deoxynucleotidyltransferase
  source 1..1587: mol_type = other DNA
atgcaccatcatcatcatcatggcggtagcggcagccacggcattcgtaccatcgattcggacttcgggaagaaacagcagaaaaaaggcgataaccacgatagttccgccacttatgaaatcaaatttcacgagtttgtgctgttcattctcgaagaaaaaatgggtgcgacgcgtcgtacttttctgacagatttagcccgcaagaaagggttccgcgtcgagaatgaactgaccgacgaagttacccacatcgtggcagaaaatctgtcacgctctgaagtattggcttggctgaaagaacacaagatggagaagaccaagcaattcgaactgctggatattagctggcttatcgaaagcatgaaagttggtaaaccggtggacaccaaggggaaataccagttggcggaatcggttgaggtgagtgcgaacccagatccgacagaaggtcgtgtaaacgagctgcctcctactatgaaaaccgtttctccgtatgcgtgtcaacgccgcaccaccctgaacaaccgtaatcaacgttttacggactcgctggagattcttcgtgaaaattacgagttcaaacgcaacgatgatactgcgctggaatttcgtcgtgctatctccgtgctgaaaagccttccgtttgaggtacgtagcctgaaagacacggaaggattgccctggatcagtgatgaagtcaaagggattatggaagaaatcatcgaagtcggggagtcgcgtgaagtgcaggccgtgctcaatgatgagtggtatcaaagcttccacgcatttacgagtgtctttggagtgggggtgaagacagcagacaagtggtaccgtatgggtctgcgcaccctcgaggatgttcgttccagcaagaccctgaagttgaccccgatgcagaaagtaggtctgctgtattatgaagatcttgctcgcggcgttacgcgtgccgaagctgacgcgatttggctgctggttcaggatgcagtcgcaactttcgacccggatgcgatcgtggagattgtcggtggatttcgtcgtgggaaacctcagggtcacgacgttgatctgcttatcagttctccgggagctgagaaagagcaagaagaccaactcctgcagaaagtgatgaatctgtggaagaaacaagggttgttgctgtacggtcgtctggagtggagtcagtgggaagatgggggttcgccttccggtaaggctgacgagggtgacgcggaggcgaaatgctttctgatcctcaaactttatgatcatctggtgcgtaaaagtaaacgcaatatgccgactggttcgaacatgggcgagtccaaaccgtggaaagcaattcgcgtagatctgctgcgttgcccctatggcagttttgcgtttgcgatgttgcagtggaccggaagccgcatggtgcgtcgtgatctgcgttggtacgccctggaagagaagaacatgatgctggacaatcattcgctgtatgacatgacccgcggtatcttcctccctgctaaatcggaagaggaaattttcgaacatctggggcttgaatacctggaaccgttcgaacgtaacgca

SEQ ID NO: 3746 - protein, 529 aa, synthetic construct
  REGION 1..529: note = Variant of terminal deoxynucleotidyltransferase
MHHHHHHGGSGSHGIRTIDSDFGKKQQKKGDNHDSSATYEIKFHEFVLFILEEKMGATRRTFLTDLARKKGFRVENELTDEVTHIVAENLSRSEVLAWLKEHKMEKTKQFELLDISWLIESMKVGKPVDTKGKYQLAESVEVSANPDPTEGRVNELPPTMKTVSPYACQRRTTLNNRNQRFTDSLEILRENYEFKRNDDTALEFRRAISVLKSLPFEVRSLKDTEGLPWISDEVKGIMEEIIEVGESREVQAVLNDEWYQSFHAFTSVFGVGVKTADKWYRMGLRTLEDVRSSKTLKLTPMQKVGLLYYEDLARGVTRAEADAIWLLVQDAVATFDPDAIVEIVGGFRRGKPQGHDVDLLISSPGAEKEQEDQLLQKVMNLWKKQGLLLYGRLEWSQWEDGGSPSGKADEGDAEAKCFLILKLYDHLVRKSKRNMPTGSNMGESKPWKAIRVDLLRCPYGSFAFAMLQWTGSRMVRRDLRWYALEEKNMMLDNHSLYDMTRGIFLPAKSEEEIFEHLGLEYLEPFERNA

SEQ ID NO: 3747 - DNA, 1587 bp, synthetic construct
  misc_feature 1..1587: note = Variant of terminal deoxynucleotidyltransferase
  source 1..1587: mol_type = other DNA
atgcaccatcatcatcatcatggcggtagcggcagccacggcattcgtaccatcgattcggacttcgggaagaaacagcagaaaaaaggcgataaccacgatagttccgccacttatgaaatcaaatttcacgagtttgtgctgttcattctcgaagaaaaaatgggtgcgacgcgtcgtacttttctgacagatttagcccgcaagaaagggttccgcgtcgagaatgaactgaccgacgaagttacccacatcgtggcagaaaatctgtcacgctctgaagtattggcttggctgaaagaacacaagatggagaagaccaagcaattcgaactgctggatattagctggcttatcgaaagcatgaaagttggtaaaccggtggacaccaaggggaaataccagttggcggaatcggttgaggtgagtgcgaacccagatccgacagaaggtcgtgtaaacgagctgcctcctactatgaaaaccgtttctccgtatgcgtgtcaacgccgcaccaccctgaacaaccgtaatcaacgttttacggactcgctggagattcttcgtgaaaattacgagttcaaacgcaacgatgatactgcgctggaatttcgtcgtgctatctccgtgctgaaaagccttccgtttgaggtacgtagcctgaaagacacggaaggattgccctggatcagtgatgaagtcaaagggattatggaagaaatcatcgaagtcggggagtcgcgtgaagtgcaggccgtgctcaatgatgagtggtatcaaagcttccacgcatttacgagtgtctttggagtgggggtgaagacagcagacaagtggtaccgtatgggtctgcgcaccctcgaggatgttcgttccagcaagaccctgaagttgaccccgatgcagaaagtaggtctgctgtattatgaagatcttgctcgcggcgttacgcgtgccgaagctgacgcgatttggctgctggttcaggatgcagtcgcaactttcgacccggatgcgatcgtggagattgtcggtggatttcgtcgtgggaaacctcagggtcacgacgttgatctgcttatcagttctccgggagctgagaaagagcaagaagaccaactcctgcagaaagtgatgaatctgtggaagaaacaagggttgttgctgtacggtcgtctggagtggagtcagtgggaagatgggggttcgccttccggtaaggctgacgagggtgacgcggaggcgaaatgctttctgatcctcaaactttatgatcatctggtgcgtaaaagtaaacgcaatatgccgactggttcgaacatgggcgagtccaaaccgtggaaagcaattcgcttggatctgctgcgttgcccctatggcagttttgcgtttgcgatgttgcagtggaccggaagccgcatgttccgtcgtgatctgcgttggtacgccctggaagagaagaacatgatgctggacaatcattcgctgtatgacatgacccgcggtatcttcctccctgctaaatcggaagaggaaattttcgaacatctggggcttgaatacctggaaccgttcgaacgtaacgca

SEQ ID NO: 3748 - protein, 529 aa, synthetic construct
  REGION 1..529: note = Variant of terminal deoxynucleotidyltransferase
MHHHHHHGGSGSHGIRTIDSDFGKKQQKKGDNHDSSATYEIKFHEFVLFILEEKMGATRRTFLTDLARKKGFRVENELTDEVTHIVAENLSRSEVLAWLKEHKMEKTKQFELLDISWLIESMKVGKPVDTKGKYQLAESVEVSANPDPTEGRVNELPPTMKTVSPYACQRRTTLNNRNQRFTDSLEILRENYEFKRNDDTALEFRRAISVLKSLPFEVRSLKDTEGLPWISDEVKGIMEEIIEVGESREVQAVLNDEWYQSFHAFTSVFGVGVKTADKWYRMGLRTLEDVRSSKTLKLTPMQKVGLLYYEDLARGVTRAEADAIWLLVQDAVATFDPDAIVEIVGGFRRGKPQGHDVDLLISSPGAEKEQEDQLLQKVMNLWKKQGLLLYGRLEWSQWEDGGSPSGKADEGDAEAKCFLILKLYDHLVRKSKRNMPTGSNMGESKPWKAIRLDLLRCPYGSFAFAMLQWTGSRMFRRDLRWYALEEKNMMLDNHSLYDMTRGIFLPAKSEEEIFEHLGLEYLEPFERNA

SEQ ID NO: 3749 - DNA, 1587 bp, synthetic construct
  misc_feature 1..1587: note = Variant of terminal deoxynucleotidyltransferase
  source 1..1587: mol_type = other DNA
atgcaccatcatcatcatcatggcggtagcggcagccacggcattcgtaccatcgattcggacttcgggaagaaacagcagaaaaaaggcgataaccacgatagttccgccacttatgaaatcaaatttcacgagtttgtgctgttcattctcgaagaaaaaatgggtgcgacgcgtcgtacttttctgacagatttagcccgcaagaaagggttccgcgtcgagaatgaactgaccgacgaagttacccacatcgtggcagaaaatctgtcacgctctgaagtattggcttggctgaaagaacacaagatggagaagaccaagcaattcgaactgctggatattagctggcttatcgaaagcatgaaagttggtaaaccggtggacaccaaggggaaataccagttggcggaatcggttgaggtgagtgcgaacccagatccgacagaaggtcgtgtaaacgagctgcctcctactatgaaaaccgtttctccgtatgcgtgtcaacgccgcaccaccctgaacaaccgtaatcaacgttttacggactcgctggagattcttcgtgaaaattacgagttcaaacgcaacgatgatactgcgctggaatttcgtcgtgctatctccgtgctgaaaagccttccgtttgaggtacgtagcctgaaagacacggaaggattgccctggatcagtgatgaagtcaaagggattatggaagaaatcatcgaagtcggggagtcgcgtgaagtgcaggccgtgctcaatgatgagtggtatcaaagcttccacgcatttacgagtgtctttggagtgggggtgaagacagcagacaagtggtaccgtatgggtctgcgcaccctcgaggatgttcgttccagcaagaccctgaagttgaccccgatgcagaaagtaggtctgctgaagtatgaagatcttgctcgcggcgttacgcgtgccgaagctgacgcgatttggctgctggttcaggatgcagtcgcaactttcgacccggatgcgatcgtggagattgtcggtggatttcgtcgtgggaaacctcagggtcacgacgttgatctgcttatcagttctccgggagctgagaaagagcaagaagaccaactcctgcagaaagtgatgaatctgtggaagaaacaagggttgttgctgtacggtcgtctggagtggagtcagtgggaagatgggggttcgccttccggtaaggctgacgagggtgacgcggaggcgaaatgctttctgatcctcaaactttatgatcatctggtgcgtaaaagtaaacgcaatatgccgactggttcgaacatgggcgagtccaaaccgtggaaagcaattcgcgtagatctgctgcgttgcccctatggcagttttgcgtttgcgatgttgcagtggaccggaagccgcatgttccgtcgtgatctgcgttggtacgccctggaagagaagaacatgatgctggacaatcattcgctgtatgacatgacccgcggtatcttcctccctgctaaatcggaagaggaaattttcgaacatctggggcttgaatacctggaaccgttcgaacgtaacgca

SEQ ID NO: 3750 - protein, 529 aa, synthetic construct
  REGION 1..529: note = Variant of terminal deoxynucleotidyltransferase
MHHHHHHGGSGSHGIRTIDSDFGKKQQKKGDNHDSSATYEIKFHEFVLFILEEKMGATRRTFLTDLARKKGFRVENELTDEVTHIVAENLSRSEVLAWLKEHKMEKTKQFELLDISWLIESMKVGKPVDTKGKYQLAESVEVSANPDPTEGRVNELPPTMKTVSPYACQRRTTLNNRNQRFTDSLEILRENYEFKRNDDTALEFRRAISVLKSLPFEVRSLKDTEGLPWISDEVKGIMEEIIEVGESREVQAVLNDEWYQSFHAFTSVFGVGVKTADKWYRMGLRTLEDVRSSKTLKLTPMQKVGLLKYEDLARGVTRAEADAIWLLVQDAVATFDPDAIVEIVGGFRRGKPQGHDVDLLISSPGAEKEQEDQLLQKVMNLWKKQGLLLYGRLEWSQWEDGGSPSGKADEGDAEAKCFLILKLYDHLVRKSKRNMPTGSNMGESKPWKAIRVDLLRCPYGSFAFAMLQWTGSRMFRRDLRWYALEEKNMMLDNHSLYDMTRGIFLPAKSEEEIFEHLGLEYLEPFERNA

SEQ ID NO: 3751 - DNA, 1587 bp, synthetic construct
  misc_feature 1..1587: note = Variant of terminal deoxynucleotidyltransferase
  source 1..1587: mol_type = other DNA
atgcaccatcatcatcatcatggcggtagcggcagccacggcattcgtaccatcgattcggacttcgggaagaaacagcagaaaaaaggcgataaccacgatagttccgccacttatgaaatcaaatttcacgagtttgtgctgttcattctcgaagaaaaaatgggtgcgacgcgtcgtacttttctgacagatttagcccgcaagaaagggttccgcgtcgagaatgaactgaccgacgaagttacccacatcgtggcagaaaatctgtcacgctctgaagtattggcttggctgaaagaacacaagatggagaagaccaagcaattcgaactgctggatattagctggcttatcgaaagcatgaaagttggtaaaccggtggacaccaaggggaaataccagttggcggaatcggttgaggtgagtgcgaacccagatccgacagaaggtcgtgtaaacgagctgcctcctactatgaaaaccgtttctccgtatgcgtgtcaacgccgcaccaccctgaacaaccgtaatcaacgttttacggactcgctggagattcttcgtgaaaattacgagttcaaacgcaacgatgatactgcgctggaatttcgtcgtgctatctccgtgctgaaaagccttccgtttgaggtacgtagcctgaaagacacggaaggattgccctggatcagtgatgaagtcaaagggattatggaagaaatcatcgaagtcggggagtcgcgtgaagtgcaggccgtgctcaatgatgagtggtatcaaagcttccacgcatttacgagtgtctttggagtgggggtgaagacagcagacaagtggtaccgtatgggtctgcgcaccctcgaggatgttcgttccagcaagaccctgaagttgaccccgatgcagaaagtaggtctgctgtattatgaagatcttgctcgcggcgttacgcgtgccgaagctgacgcgatttggctgctggttcaggatgcagtcgcaactttcgacccggatgcgatcgtggagattgtcggtggatttcgtcgtgggaaacctcagggtcacgacgttgatctgcttatcagttctccgggagctgagaaagagcaagaagaccaactcctgcagaaagtgatgaatctgtggaagaaacaagggttgttgctgtacggtgttctggaatggagccagtgggaagatgggggttcgccttccggtaaggctgacgagggtgacgcggaggcgaaatgctttctgatcctcaaactttatgatcatctggtgcgtaaaagtaaacgcaatatgccgactggttcgaacatgggcgagtccaaaccgtggaaagcaattcgcgtagatctgctgcgttgcccctatggcagttttgcgtttgcgatgttgcagtggaccggaagccgcatgttccgtcgtgatctgcgttggtacgccctggaagagaagaacatgatgctggacaatcattcgctgtatgacatgacccgcggtatcttcctccctgctaaatcggaagaggaaattttcgaacatctggggcttgaatacctggaaccgttcgaacgtaacgca

SEQ ID NO: 3752 - protein, 529 aa, synthetic construct
  REGION 1..529: note = Variant of terminal deoxynucleotidyltransferase
MHHHHHHGGSGSHGIRTIDSDFGKKQQKKGDNHDSSATYEIKFHEFVLFILEEKMGATRRTFLTDLARKKGFRVENELTDEVTHIVAENLSRSEVLAWLKEHKMEKTKQFELLDISWLIESMKVGKPVDTKGKYQLAESVEVSANPDPTEGRVNELPPTMKTVSPYACQRRTTLNNRNQRFTDSLEILRENYEFKRNDDTALEFRRAISVLKSLPFEVRSLKDTEGLPWISDEVKGIMEEIIEVGESREVQAVLNDEWYQSFHAFTSVFGVGVKTADKWYRMGLRTLEDVRSSKTLKLTPMQKVGLLYYEDLARGVTRAEADAIWLLVQDAVATFDPDAIVEIVGGFRRGKPQGHDVDLLISSPGAEKEQEDQLLQKVMNLWKKQGLLLYGVLEWSQWEDGGSPSGKADEGDAEAKCFLILKLYDHLVRKSKRNMPTGSNMGESKPWKAIRVDLLRCPYGSFAFAMLQWTGSRMFRRDLRWYALEEKNMMLDNHSLYDMTRGIFLPAKSEEEIFEHLGLEYLEPFERNA

SEQ ID NO: 3753 - DNA, 1587 bp, synthetic construct
  misc_feature 1..1587: note = Variant of terminal deoxynucleotidyltransferase
  source 1..1587: mol_type = other DNA
atgcaccatcatcatcatcatggcggtagcggcagccacggcattcgtaccatcgattcggacttcgggaagaaacagcagaaaaaaggcgataaccacgatagttccgccacttatgaaatcaaatttcacgagtttgtgctgttcattctcgaagaaaaaatgggtgcgacgcgtcgtacttttctgacagatttagcccgcaagaaagggttccgcgtcgagaatgaactgaccgacgaagttacccacatcgtggcagaaaatctgtcacgctctgaagtattggcttggctgaaagaacacaagatggagaagaccaagcaattcgaactgctggatattagctggcttatcgaaagcatgaaagttggtaaaccggtggacaccaaggggaaataccagttggcggaatcggttgaggtgagtgcgaacccagatccgacagaaggtcgtgtaaacgagctgcctcctactatgaaaaccgtttctccgtatgcgtgtcaacgccgcaccaccctgaacaaccgtaatcaacgttttacggactcgctggagattcttcgtgaaaattacgagttcaaacgcaacgatgatactgcgctggaatttcgtcgtgctatctccgtgctgaaaagccttccgtttgaggtacgtagcctgaaagacacggaaggattgccctggatcagtgatgaagtcaaagggattatggaagaaatcatcgaagtcggggagtcgcgtgaagtgcaggccgtgctcaatgatgagtggtatcaaagcttccacgcatttacgagtgtctttggagtgggggtgaagacagcagacaagtggtaccgtatgggtctgcgcaccctcgaggatgttcgttccagcaagaccctgaagttgaccccgatgcagaaagtaggtctgctgtattatgaagatcttgctcgcggcgttacgcgtgccgaagctgacgcgatttggctgctggttcaggatgcagtcgcaactttcgacccggatgcgatcgtggagattgtcggtggatttcgtcgtgggaaacctcagggtcacgacgttgatctgcttatcagttctccgggagctgagaaagagcaagaagagcaactcctgcagaaagtgatgaatctgtggaagaaacaagggttgttgctgtacggtcgtctggagtggagtcagtgggaagatgggggttcgccttccggtaaggctgacgagggtgacgcggaggcgaaatgctttctgatcctcaaactttatgatcatctggtgcgtaaaagtaaacgcaatatgccgactggttcgaacatgggcgagtccaaaccgtggaaagcaattcgcgtagatctgctgcgttgcccctatggcagttttgcgtttgcgatgttgcagtggaccggaagccgcatgttccgtcgtgatctgcgttggtacgccctggaagagaagaacatgatgctggacaatcattcgctgtatgacatgacccgcggtatcttcctccctgctaaatcggaagaggaaattttcgaacatctggggcttgaatacctggaaccgttcgaacgtaacgca

SEQ ID NO: 3754 - protein, 529 aa, synthetic construct
  REGION 1..529: note = Variant of terminal deoxynucleotidyltransferase
MHHHHHHGGSGSHGIRTIDSDFGKKQQKKGDNHDSSATYEIKFHEFVLFILEEKMGATRRTFLTDLARKKGFRVENELTDEVTHIVAENLSRSEVLAWLKEHKMEKTKQFELLDISWLIESMKVGKPVDTKGKYQLAESVEVSANPDPTEGRVNELPPTMKTVSPYACQRRTTLNNRNQRFTDSLEILRENYEFKRNDDTALEFRRAISVLKSLPFEVRSLKDTEGLPWISDEVKGIMEEIIEVGESREVQAVLNDEWYQSFHAFTSVFGVGVKTADKWYRMGLRTLEDVRSSKTLKLTPMQKVGLLYYEDLARGVTRAEADAIWLLVQDAVATFDPDAIVEIVGGFRRGKPQGHDVDLLISSPGAEKEQEEQLLQKVMNLWKKQGLLLYGRLEWSQWEDGGSPSGKADEGDAEAKCFLILKLYDHLVRKSKRNMPTGSNMGESKPWKAIRVDLLRCPYGSFAFAMLQWTGSRMFRRDLRWYALEEKNMMLDNHSLYDMTRGIFLPAKSEEEIFEHLGLEYLEPFERNA

SEQ ID NO: 3755 - DNA, 1587 bp, synthetic construct
  misc_feature 1..1587: note = Variant of terminal deoxynucleotidyltransferase
  source 1..1587: mol_type = other DNA
atgcaccatcatcatcatcatggcggtagcggcagccacggcattcgtaccatcgattcggacttcgggaagaaacagcagaaaaaaggcgataaccacgatagttccgccacttatgaaatcaaatttcacgagtttgtgctgttcattctcgaagaaaaaatgggtgcgacgcgtcgtacttttctgacagatttagcccgcaagaaagggttccgcgtcgagaatgaactgaccgacgaagttacccacatcgtggcagaaaatctgtcacgctctgaagtattggcttggctgaaagaacacaagatggagaagaccaagcaattcgaactgctggatattagctggcttatcgaaagcatgaaagttggtaaaccggtggacaccaaggggaaataccagttggcggaatcggttgaggtgagtgcgaacccagatccgacagaaggtcgtgtaaacgagctgcctcctactatgaaaaccgtttctccgtatgcgtgtcaacgccgcaccaccctgaacaaccgtaatcaacgttttacggactcgctggagattcttcgtgaaaattacgagttcaaacgcaacagtgatactgcgctggaatttcgtcgtgctatctccgtgctgaaaagccttccgtttgaggtacgtagcctgaaagacacggaaggattgccctggatcagtgatgaagtcaaagggattatggaagaaatcatcgaagtcggggagtcgcgtgaagtgcaggccgtgctcaatgatgagtggtatcaaagcttccacgcatttacgagtgtctttggagtgggggtgaagacagcagacaagtggtaccgtatgggtctgcgcaccctcgaggatgttcgttccagcaagaccctgaagttgaccccgatgcagaaagtaggtctgctgtattatgaagatcttgctcgcggcgttacgcgtgccgaagctgacgcgatttggctgctggttcaggatgcagtcgcaactttcgacccggatgcgatcgtggagattgtcggtggatttcgtcgtgggaaacctcagggtcacgacgttgatctgcttatcagttctccgggagctgagaaagagcaagaagaccaactcctgcagaaagtgatgaatctgtggaagaaacaagggttgttgctgtacggtcgtctggagtggagtcagtgggaagatgggggttcgccttccggtaaggctgacgagggtgacgcggaggcgaaatgctttctgatcctcaaactttatgatcatctggtgcgtaaaagtaaacgcaatatgccgactggttcgaacatgggcgagtccaaaccgtggaaagcaattcgcgtagatctgctgcgttgcccctatggcagttttgcgtttgcgatgttgcagtggaccggaagccgcatgttccgtcgtgatctgcgttggtacgccctggaagagaagaacatgatgctggacaatcattcgctgtatgacatgacccgcggtatcttcctccctgctaaatcggaagaggaaattttcgaacatctggggcttgaatacctggaaccgttcgaacgtaacgca

SEQ ID NO: 3756 - protein, 529 aa, synthetic construct
  REGION 1..529: note = Variant of terminal deoxynucleotidyltransferase
MHHHHHHGGSGSHGIRTIDSDFGKKQQKKGDNHDSSATYEIKFHEFVLFILEEKMGATRRTFLTDLARKKGFRVENELTDEVTHIVAENLSRSEVLAWLKEHKMEKTKQFELLDISWLIESMKVGKPVDTKGKYQLAESVEVSANPDPTEGRVNELPPTMKTVSPYACQRRTTLNNRNQRFTDSLEILRENYEFKRNSDTALEFRRAISVLKSLPFEVRSLKDTEGLPWISDEVKGIMEEIIEVGESREVQAVLNDEWYQSFHAFTSVFGVGVKTADKWYRMGLRTLEDVRSSKTLKLTPMQKVGLLYYEDLARGVTRAEADAIWLLVQDAVATFDPDAIVEIVGGFRRGKPQGHDVDLLISSPGAEKEQEDQLLQKVMNLWKKQGLLLYGRLEWSQWEDGGSPSGKADEGDAEAKCFLILKLYDHLVRKSKRNMPTGSNMGESKPWKAIRVDLLRCPYGSFAFAMLQWTGSRMFRRDLRWYALEEKNMMLDNHSLYDMTRGIFLPAKSEEEIFEHLGLEYLEPFERNA

SEQ ID NO: 3757 - DNA, 1587 bp, synthetic construct
  misc_feature 1..1587: note = Variant of terminal deoxynucleotidyltransferase
  source 1..1587: mol_type = other DNA
atgcaccatcatcatcatcatggcggtagcggcagccacggcattcgtaccatcgattcggacttcgggaagaaacagcagaaaaaaggcgataaccacgatagttccgccacttatgaaatcaaatttcacgagtttgtgctgttcattctcgaagaaaaaatgggtgcgacgcgtcgtacttttctgacagatttagcccgcaagaaagggttccgcgtcgagaatgaactgaccgacgaagttacccacatcgtggcagaaaatctgtcacgctctgaagtattggcttggctgaaagaacacaagatggagaagaccaagcaattcgaactgctggatattagctggcttatcgaaagcatgaaagttggtaaaccggtggacaccaaggggaaataccagttggcggaatcggttgaggtgagtgcgaacccagatccgacagaaggtcgtgtaaacgagctgcctcctactatgaaaaccgtttctccgtatgcgtgtcaacgccgcaccaccctgaacaaccgtaatcaacgttttacggactcgctggagattcttcgtgaaaattacgagttcaaacgcaacgatgatactgcgctggaatttcgtcgtgctatctccgtgctgaaaagccttccgtttgaggtacgtagcctgaaagacacggaaggattgccctggatcagtgatgaagtcaaagggattatggaagaaatcatcgaagtcggggagtcgcgtgaagtgcaggccgtgctcaatgatgagtggtatcaaagcttccacgcatttacgatggtctttggagtgggggtgaagacagcagacaagtggtaccgtatgggtctgcgcaccctcgaggatgttcgttccagcaagaccctgaagttgaccccgatgcagaaagtaggtctgctgtattatgaagatcttgctcgcggcgttacgcgtgccgaagctgacgcgatttggctgctggttcaggatgcagtcgcaactttcgacccggatgcgatcgtggagattgtcggtggatttcgtcgtgggaaacctcagggtcacgacgttgatctgcttatcagttctccgggagctgagaaagagcaagaagaccaactcctgcagaaagtgatgaatctgtggaagaaacaagggttgttgctgtacggtcgtctggagtggagtcagtgggaagatgggggttcgccttccggtaaggctgacgagggtgacgcggaggcgaaatgctttctgatcctcaaactttatgatcatctggtgcgtaaaagtaaacgcaatatgccgactggttcgaacatgggcgagtccaaaccgtggaaagcaattcgcgtagatctgctgcgttgcccctatggcagttttgcgtttgcgatgttgcagtggaccggaagccgcatgttccgtcgtgatctgcgttggtacgccctggaagagaagaacatgatgctggacaatcattcgctgtatgacatgacccgcggtatcttcctccctgctaaatcggaagaggaaattttcgaacatctggggcttgaatacctggaaccgttcgaacgtaacgca

SEQ ID NO: 3758 - protein, 529 aa, synthetic construct
  REGION 1..529: note = Variant of terminal deoxynucleotidyltransferase
MHHHHHHGGSGSHGIRTIDSDFGKKQQKKGDNHDSSATYEIKFHEFVLFILEEKMGATRRTFLTDLARKKGFRVENELTDEVTHIVAENLSRSEVLAWLKEHKMEKTKQFELLDISWLIESMKVGKPVDTKGKYQLAESVEVSANPDPTEGRVNELPPTMKTVSPYACQRRTTLNNRNQRFTDSLEILRENYEFKRNDDTALEFRRAISVLKSLPFEVRSLKDTEGLPWISDEVKGIMEEIIEVGESREVQAVLNDEWYQSFHAFTMVFGVGVKTADKWYRMGLRTLEDVRSSKTLKLTPMQKVGLLYYEDLARGVTRAEADAIWLLVQDAVATFDPDAIVEIVGGFRRGKPQGHDVDLLISSPGAEKEQEDQLLQKVMNLWKKQGLLLYGRLEWSQWEDGGSPSGKADEGDAEAKCFLILKLYDHLVRKSKRNMPTGSNMGESKPWKAIRVDLLRCPYGSFAFAMLQWTGSRMFRRDLRWYALEEKNMMLDNHSLYDMTRGIFLPAKSEEEIFEHLGLEYLEPFERNA

SEQ ID NO: 3759 - DNA, 1587 bp, synthetic construct
  misc_feature 1..1587: note = Variant of terminal deoxynucleotidyltransferase
  source 1..1587: mol_type = other DNA
atgcaccatcatcatcatcatggcggtagcggcagccacggcattcgtaccatcgattcggacttcgggaagaaacagcagaaaaaaggcgataaccacgatagttccgccacttatgaaatcaaatttcacgagtttgtgctgttcattctcgaagaaaaaatgggtgcgacgcgtcgtacttttctgacagatttagcccgcaagaaagggttccgcgtcgagaatgaactgaccgacgaagttacccacatcgtggcagaaaatctgtcacgctctgaagtattggcttggctgaaagaacacaagatggagaagaccaagcaattcgaactgctggatattagctggcttatcgaaagcatgaaagttggtaaaccggtggacaccaaggggaaataccagttggcggaatcggttgaggtgagtgcgaacccagatccgacagaaggtcgtgtaaacgagctgcctcctactatgaaaaccgtttctccgtatgcgtgtcaacgccgcaccaccctgaacaaccgtaatcaacgttttacggactcgctggagattcttcgtgaaaattacgagttcaaacgcaacgatgatactgcgctggaatttcgtcgtgctatctccgtgctgaaaagccttccgtttgaggtacgtagcctgaaagacacggaaggattgccctggatcagtgatgaagtcaaagggattatggaagaaatcatcgaagtcggggagtcgcgtgaagtgcaggccgtgctcaatgatgagtggtatcaaagcttccacgcatttacgagtgtctttggagtgggggtgaagacagcagacaagtggtaccgtatgggtctgcgcaccctcgaggatgttcgttccagcaagaccctgaagttgaccccgatgcagaaagtaggtctgctgtattatgaagatcttgctcgcggcgttacgcgtgccgaagctgacgcgatttggctgctggttcaggatgcagtcgcaactttcgacccggatgcgatcgtggagattgtcggtggatttcgtcgtgggaaacctcagggtcacgacgttgatctgcttatcagttctccgggagctgagaaagagcaagaagaccaactcctgcagaaagtgatgaatctgtggaagaaacaagggttgttgctgtacggtcgtctggagtggagtcagtgggaagatgggggttcgccttccggtaaggctgacgagggtgacgcggaggcgaaatgctttctgatcctcaaactttatgatcatctggtgcgtaaaagtaaacgcaatatgccgactggttcgaacatgggcgagtccaaaccgtggaaagcaattcgcgtagatctgctgcgttgcccctatggcagttttgcgtttgcgatgttgcagtggaccggaagccgcatgttccgtcgtgatctgcgttggtacgccctggaagagaagaacatgatgctggacaatcattcgctgtatgacatgacccgcggtatcttcctccctgctaaatcggaagaggaaattttcgaacatctggggcttgaatacctggaaccgttcgaacgtctggca

SEQ ID NO: 3760 - protein, 529 aa, synthetic construct
  REGION 1..529: note = Variant of terminal deoxynucleotidyltransferase
MHHHHHHGGSGSHGIRTIDSDFGKKQQKKGDNHDSSATYEIKFHEFVLFILEEKMGATRRTFLTDLARKKGFRVENELTDEVTHIVAENLSRSEVLAWLKEHKMEKTKQFELLDISWLIESMKVGKPVDTKGKYQLAESVEVSANPDPTEGRVNELPPTMKTVSPYACQRRTTLNNRNQRFTDSLEILRENYEFKRNDDTALEFRRAISVLKSLPFEVRSLKDTEGLPWISDEVKGIMEEIIEVGESREVQAVLNDEWYQSFHAFTSVFGVGVKTADKWYRMGLRTLEDVRSSKTLKLTPMQKVGLLYYEDLARGVTRAEADAIWLLVQDAVATFDPDAIVEIVGGFRRGKPQGHDVDLLISSPGAEKEQEDQLLQKVMNLWKKQGLLLYGRLEWSQWEDGGSPSGKADEGDAEAKCFLILKLYDHLVRKSKRNMPTGSNMGESKPWKAIRVDLLRCPYGSFAFAMLQWTGSRMFRRDLRWYALEEKNMMLDNHSLYDMTRGIFLPAKSEEEIFEHLGLEYLEPFERLA

SEQ ID NO: 3761 - DNA, 1587 bp, synthetic construct
  misc_feature 1..1587: note = Variant of terminal deoxynucleotidyltransferase
  source 1..1587: mol_type = other DNA
atgcaccatcatcatcatcatggcggtagcggcagccacggcattcgtaccatcgattcggacttcgggaagaaacagcagaaaaaaggcgataaccacgatagttccgccacttatgaaatcaaatttcacgagtttgtgctgttcattctcgaagaaaaaatgggtgcgacgcgtcgtacttttctgacagatttagcccgcaagaaagggttccgcgtcgagaatgaactgaccgacgaagttacccacatcgtggcagaaaatctgtcacgctctgaagtattggcttggctgaaagaacacaagatggagaagaccaagcaattcgaactgctggatattagctggcttatcgaaagcatgaaagttggtaaaccggtggacaccaaggggaaataccagttggcggaatcggttgaggtgagtgcgaacccagatccgacagaaggtcgtgtaaacgagctgcctcctactatgaaaaccgtttctccgtatgcgtgtcaacgccgcaccaccctgaacaaccgtaatcaacgttttacggactcgctggagattcttcgtgaaaattacgagttcaaacgcaacgatgatactgcgctggaatttcgtcgtgctatctccgtgctgaaaagccttccgtttgaggtacgtagcctgaaagacacggaaggattgccctggatcagtgatgaagtcaaagggattatggaagaaatcatcgaagtcggggagtcgcgtgaagtgcaggccgtgctcaatgatgagtggtatcaaagcttccacgcatttacgagtgtctttggagtgggggtgaagacagcagacaagtggtaccgtatgggtctgcgcaccctcgaggatgttcgttccagcaagaccctgaagttgaccccgatgcagaaagtaggtctgagttattatgaagatcttgctcgcggcgttacgcgtgccgaagctgacgcgatttggctgctggttcaggatgcagtcgcaactttcgacccggatgcgatcgtggagattgtcggtggatttcgtcgtgggaaacctcagggtcacgacgttgatctgcttatcagttctccgggagctgagaaagagcaagaagaccaactcctgcagaaagtgatgaatctgtggaagaaacaagggttgttgctgtacggtcgtctggagtggagtcagtgggaagatgggggttcgccttccggtaaggctgacgagggtgacgcggaggcgaaatgctttctgatcctcaaactttatgatcatctggtgcgtaaaagtaaacgcaatatgccgactggttcgaacatgggcgagtccaaaccgtggaaagcaattcgcgtagatctgctgcgttgcccctatggcagttttgcgtttgcgatgttgcagtggaccggaagccgcatgttccgtcgtgatctgcgttggtacgccctggaagagaagaacatgatgctggacaatcattcgctgtatgacatgacccgcggtatcttcctccctgctaaatcggaagaggaaattttcgaacatctggggcttgaatacctggaaccgttcgaacgtaacgca

SEQ ID NO: 3762 - protein, 529 aa, synthetic construct
  REGION 1..529: note = Variant of terminal deoxynucleotidyltransferase
MHHHHHHGGSGSHGIRTIDSDFGKKQQKKGDNHDSSATYEIKFHEFVLFILEEKMGATRRTFLTDLARKKGFRVENELTDEVTHIVAENLSRSEVLAWLKEHKMEKTKQFELLDISWLIESMKVGKPVDTKGKYQLAESVEVSANPDPTEGRVNELPPTMKTVSPYACQRRTTLNNRNQRFTDSLEILRENYEFKRNDDTALEFRRAISVLKSLPFEVRSLKDTEGLPWISDEVKGIMEEIIEVGESREVQAVLNDEWYQSFHAFTSVFGVGVKTADKWYRMGLRTLEDVRSSKTLKLTPMQKVGLSYYEDLARGVTRAEADAIWLLVQDAVATFDPDAIVEIVGGFRRGKPQGHDVDLLISSPGAEKEQEDQLLQKVMNLWKKQGLLLYGRLEWSQWEDGGSPSGKADEGDAEAKCFLILKLYDHLVRKSKRNMPTGSNMGESKPWKAIRVDLLRCPYGSFAFAMLQWTGSRMFRRDLRWYALEEKNMMLDNHSLYDMTRGIFLPAKSEEEIFEHLGLEYLEPFERNA

SEQ ID NO: 3763 - DNA, 1587 bp, synthetic construct
  misc_feature 1..1587: note = Variant of terminal deoxynucleotidyltransferase
  source 1..1587: mol_type = other DNA
atgcaccatcatcatcatcatggcggtagcggcagccacggcattcgtaccatcgattcggacttcgggaagaaacagcagaaaaaaggcgataaccacgatagttccgccacttatgaaatcaaatttcacgagtttgtgctgttcattctcgaagaaaaaatgggtgcgacgcgtcgtacttttctgacagatttagcccgcaagaaagggttccgcgtcgagaatgaactgaccgacgaagttacccacatcgtggcagaaaatctgtcacgctctgaagtattggcttggctgaaagaacacaagatggagaagaccaagcaattcgaactgctggatattagctggcttatcgaaagcatgaaagttggtaaaccggtggacaccaaggggaaataccagttggcggaatcggttgaggtgagtgcgaacccagatccgacagaaggtcgtgtaaacgagctgcctcctactatgaaaaccgtttctccgtatgcgtgtcaacgccgcaccaccctgaacaaccgtaatcaacgttttacggactcgctggagattcttcgtgaaaattacgagttcaaacgcaacgatgatactgcgctggaatttcgtcgtgctatctccgtgctgaaaagccttccgtttgaggtacgtagcctgaaagacacggaaggattgccctggatcagtgatgaagtcaaagggattatggaagaaatcatcgaagtcggggagtcgcgtgaagtgcaggccgtgctcaatgatgagtggtatcaaagcttccacgcatttacgagtgtctttggagtgggggtgaagacagcagacaagtggtaccgtatgggtctgcgcaccctcgaggatgttcgttccagcaagaccctgaagttgaccccgatgcagaaagtaggtctgctgtattatgaagatcttgctcgcggcgttacgcgtgccgaagctgacgcgatttggctgctggttcaggatgcagtcgcaactttcgacccggatgcgatcgtggagattgtcggtggatttcgtcgtgggaaacctcagggtcacgacgttgatctgcttatcagttctccgggagctgagaaagagcaagaagaccaactcctgcagaaagtgatgaatctgtggaagaaacaagggttgttgctgtacggtcgtctggaatggagctggtgggaagatgggggttcgccttccggtaaggctgacgagggtgacgcggaggcgaaatgctttctgatcctcaaactttatgatcatctggtgcgtaaaagtaaacgcaatatgccgactggttcgaacatgggcgagtccaaaccgtggaaagcaattcgcgtagatctgctgcgttgcccctatggcagttttgcgtttgcgatgttgcagtggaccggaagccgcatgttccgtcgtgatctgcgttggtacgccctggaagagaagaacatgatgctggacaatcattcgctgtatgacatgacccgcggtatcttcctccctgctaaatcggaagaggaaattttcgaacatctggggcttgaatacctggaaccgttcgaacgtaacgca

SEQ ID NO: 3764 - protein, 529 aa, synthetic construct
  REGION 1..529: note = Variant of terminal deoxynucleotidyltransferase
MHHHHHHGGSGSHGIRTIDSDFGKKQQKKGDNHDSSATYEIKFHEFVLFILEEKMGATRRTFLTDLARKKGFRVENELTDEVTHIVAENLSRSEVLAWLKEHKMEKTKQFELLDISWLIESMKVGKPVDTKGKYQLAESVEVSANPDPTEGRVNELPPTMKTVSPYACQRRTTLNNRNQRFTDSLEILRENYEFKRNDDTALEFRRAISVLKSLPFEVRSLKDTEGLPWISDEVKGIMEEIIEVGESREVQAVLNDEWYQSFHAFTSVFGVGVKTADKWYRMGLRTLEDVRSSKTLKLTPMQKVGLLYYEDLARGVTRAEADAIWLLVQDAVATFDPDAIVEIVGGFRRGKPQGHDVDLLISSPGAEKEQEDQLLQKVMNLWKKQGLLLYGRLEWSWWEDGGSPSGKADEGDAEAKCFLILKLYDHLVRKSKRNMPTGSNMGESKPWKAIRVDLLRCPYGSFAFAMLQWTGSRMFRRDLRWYALEEKNMMLDNHSLYDMTRGIFLPAKSEEEIFEHLGLEYLEPFERNA

SEQ ID NO: 3765 - DNA, 1587 bp, synthetic construct
  misc_feature 1..1587: note = Variant of terminal deoxynucleotidyltransferase
  source 1..1587: mol_type = other DNA
atgcaccatcatcatcatcatggcggtagcggcagccacggcattcgtaccatcgattcggacttcgggaagaaacagcagaaaaaaggcgataaccacgatagttccgccacttatgaaatcaaatttcacgagtttgtgctgttcattctcgaagaaaaaatgggtgcgacgcgtcgtacttttctgacagatttagcccgcaagaaagggttccgcgtcgagaatgaactgaccgacgaagttacccacatcgtggcagaaaatctgtcacgctctgaagtattggcttggctgaaagaacacaagatggagaagaccaagcaattcgaactgctggatattagctggcttatcgaaagcatgaaagttggtaaaccggtggacaccaaggggaaataccagttggcggaatcggttgaggtgagtgcgaacccagatccgacagaaggtcgtgtaaacgagctgcctcctactatgaaaaccgtttctccgtatgcgtgtcaacgccgcaccaccctgaacaaccgtaatcaacgttttacggactcgctggagattcttcgtgaaaattacgagttcaaacgcaacgatgatactgcgctggaatttcgtcgtgctatctccgtgctgaaaagccttccgtttgaggtacgtagcctgaaagacacggaaggattgccctggatcagtgatgaagtcaaagggattatggaagaaatcatcgaagtcggggagtcgcgtgaagtgcaggccgtgctcaatgatgagtggtatcaaagcttccacgcatttacgagtgtctttggagtgggggtgaagacagcagacaagtggtaccgtatgggtctgcgcaccctcgaggatgttcgttccagcaagaccctgaagttgaccccgatgcagaaagtaggtctgctgcattatgaagatcttgctcgcggcgttacgcgtgccgaagctgacgcgatttggctgctggttcaggatgcagtcgcaactttcgacccggatgcgatcgtggagattgtcggtggatttcgtcgtgggaaacctcagggtcacgacgttgatctgcttatcagttctccgggagctgagaaagagcaagaagaccaactcctgcagaaagtgatgaatctgtggaagaaacaagggttgttgctgtacggtcgtctggagtggagtcagtgggaagatgggggttcgccttccggtaaggctgacgagggtgacgcggaggcgaaatgctttctgatcctcaaactttatgatcatctggtgcgtaaaagtaaacgcaatatgccgactggttcgaacatgggcgagtccaaaccgtggaaagcaattcgcgtagatctgctgcgttgcccctatggcagttttgcgtttgcgatgttgcagtggaccggaagccgcatgttccgtcgtgatctgcgttggtacgccctggaagagaagaacatgatgctggacaatcattcgctgtatgacatgacccgcggtatcttcctccctgctaaatcggaagaggaaattttcgaacatctggggcttgaatacctggaaccgttcgaacgtaacgca

SEQ ID NO: 3766 - protein, 529 aa, synthetic construct
  REGION 1..529: note = Variant of terminal deoxynucleotidyltransferase
MHHHHHHGGSGSHGIRTIDSDFGKKQQKKGDNHDSSATYEIKFHEFVLFILEEKMGATRRTFLTDLARKKGFRVENELTDEVTHIVAENLSRSEVLAWLKEHKMEKTKQFELLDISWLIESMKVGKPVDTKGKYQLAESVEVSANPDPTEGRVNELPPTMKTVSPYACQRRTTLNNRNQRFTDSLEILRENYEFKRNDDTALEFRRAISVLKSLPFEVRSLKDTEGLPWISDEVKGIMEEIIEVGESREVQAVLNDEWYQSFHAFTSVFGVGVKTADKWYRMGLRTLEDVRSSKTLKLTPMQKVGLLHYEDLARGVTRAEADAIWLLVQDAVATFDPDAIVEIVGGFRRGKPQGHDVDLLISSPGAEKEQEDQLLQKVMNLWKKQGLLLYGRLEWSQWEDGGSPSGKADEGDAEAKCFLILKLYDHLVRKSKRNMPTGSNMGESKPWKAIRVDLLRCPYGSFAFAMLQWTGSRMFRRDLRWYALEEKNMMLDNHSLYDMTRGIFLPAKSEEEIFEHLGLEYLEPFERNA

SEQ ID NO: 3767 - DNA, 1587 bp, synthetic construct
  misc_feature 1..1587: note = Variant of terminal deoxynucleotidyltransferase
  source 1..1587: mol_type = other DNA
atgcaccatcatcatcatcatggcggtagcggcagccacggcattcgtaccatcgattcggacttcgggaagaaacagcagaaaaaaggcgataaccacgatagttccgccacttatgaaatcaaatttcacgagtttgtgctgttcattctcgaagaaaaaatgggtgcgacgcgtcgtacttttctgacagatttagcccgcaagaaagggttccgcgtcgagaatgaactgaccgacgaagttacccacatcgtggcagaaaatctgtcacgctctgaagtattggcttggctgaaagaacacaagatggagaagaccaagcaattcgaactgctggatattagctggcttatcgaaagcatgaaagttggtaaaccggtggacaccaaggggaaataccagttggcggaatcggttgaggtgagtgcgaacccagatccgacagaaggtcgtgtaaacgagctgcctcctactatgaaaaccgtttctccgtatgcgtcgcaacgccgcaccaccctgaacaaccgtaatcaacgttttacggactcgctggagattcttcgtgaaaattacgagttcaaacgcaacgatgatactgcgctggaatttcgtcgtgctatctccgtgctgaaaagccttccgtttgaggtacgtagcctgaaagacacggaaggattgccctggatcagtgatgaagtcaaagggattatggaagaaatcatcgaagtcggggagtcgcgtgaagtgcaggccgtgctcaatgatgagtggtatcaaagcttccacgcatttacgagtgtctttggagtgggggtgaagacagcagacaagtggtaccgtatgggtctgcgcaccctcgaggatgttcgttccagcaagaccctgaagttgaccccgatgcagaaagtaggtctgctgtattatgaagatcttgctcgcggcgttacgcgtgccgaagctgacgcgatttggctgctggttcaggatgcagtcgcaactttcgacccggatgcgatcgtggagattgtcggtggatttcgtcgtgggaaacctcagggtcacgacgttgatctgcttatcagttctccgggagctgagaaagagcaagaagaccaactcctgcagaaagtgatgaatctgtggaagaaacaagggttgttgctgtacggtcgtctggagtggagtcagtgggaagatgggggttcgccttccggtaaggctgacgagggtgacgcggaggcgaaatgctttctgatcctcaaactttatgatcatctggtgcgtaaaagtaaacgcaatatgccgactggttcgaacatgggcgagtccaaaccgtggaaagcaattcgcgtagatctgctgcgttgcccctatggcagttttgcgtttgcgatgttgcagtggaccggaagccgcatgttccgtcgtgatctgcgttggtacgccctggaagagaagaacatgatgctggacaatcattcgctgtatgacatgacccgcggtatcttcctccctgctaaatcggaagaggaaattttcgaacatctggggcttgaatacctggaaccgttcgaacgtaacgca

SEQ ID NO: 3768 - protein, 529 aa, synthetic construct
  REGION 1..529: note = Variant of terminal deoxynucleotidyltransferase
MHHHHHHGGSGSHGIRTIDSDFGKKQQKKGDNHDSSATYEIKFHEFVLFILEEKMGATRRTFLTDLARKKGFRVENELTDEVTHIVAENLSRSEVLAWLKEHKMEKTKQFELLDISWLIESMKVGKPVDTKGKYQLAESVEVSANPDPTEGRVNELPPTMKTVSPYASQRRTTLNNRNQRFTDSLEILRENYEFKRNDDTALEFRRAISVLKSLPFEVRSLKDTEGLPWISDEVKGIMEEIIEVGESREVQAVLNDEWYQSFHAFTSVFGVGVKTADKWYRMGLRTLEDVRSSKTLKLTPMQKVGLLYYEDLARGVTRAEADAIWLLVQDAVATFDPDAIVEIVGGFRRGKPQGHDVDLLISSPGAEKEQEDQLLQKVMNLWKKQGLLLYGRLEWSQWEDGGSPSGKADEGDAEAKCFLILKLYDHLVRKSKRNMPTGSNMGESKPWKAIRVDLLRCPYGSFAFAMLQWTGSRMFRRDLRWYALEEKNMMLDNHSLYDMTRGIFLPAKSEEEIFEHLGLEYLEPFERNA

SEQ ID NO: 3769 - DNA, 1587 bp, synthetic construct; identical to SEQ ID NO: 3729
  misc_feature 1..1587: note = Variant of terminal deoxynucleotidyltransferase
  source 1..1587: mol_type = other DNA

SEQ ID NO: 3770 - protein, 529 aa, synthetic construct; identical to SEQ ID NO: 3730
  REGION 1..529: note = Variant of terminal deoxynucleotidyltransferase

SEQ ID NO: 3771 - DNA, 1587 bp, synthetic construct
  misc_feature 1..1587: note = Variant of terminal deoxynucleotidyltransferase
  source 1..1587: mol_type = other DNA
atgcaccatcatcatcatcatggcggtagcggcagccacggcattcgtaccatcgattcggacttcgggaagaaacagcagaaaaaaggcgataaccacgatagttccgccacttatgaaatcaaatttcacgagtttgtgctgttcattctcgaagaaaaaatgggtgcgacgcgtcgtacttttctgacagatttagcccgcaagaaagggttccgcgtcgagaatgaactgaccgacgaagttacccacatcgtggcagaaaatctgtcacgctctgaagtattggcttggctgaaagaacacaagatggagaagaccaagcaattcgaactgctggatattagctggcttatcgaaagcatgaaagttggtaaaccggtggacaccaaggggaaataccagttggcggaatcggttgaggtgagtgcgaacccagatccgacagaaggtcgtgtaaacgagctgcctcctactatgaaaaccgtttctccgtatgcgtgtcaacgccgcaccaccctgaacaaccgtaatcaacgttttacggactcgctggagattcttcgtgaaaattacgagttcaaacgcaacgatgatactgcgctggaatttcgtcgtgctatctccgtgctgaaaagccttccgtttgaggtacgtagcctgaaagacacggaaggattgccctggatcagtgatgaagtcaaagggattatggaagaaatcatcgaagtcggggagtcgcgtgaagtgcaggccgtgctcaatgatgagtggtatcaaagcttccacgcatttacgagtgtctttggagtgggggtgaagacagcagacaagtggtaccgtatgggtctgcgcaccctcgaggatgttcgttccagcaagaccctgaagttgaccccgatgcagaaagtaggtctgctgtattatgaagatcttgctcgcggcgttacgcgtgccgaagctgacgcgatttggctgctggttcaggatgcagtcgcaactttcgacccggatgcgatcgtggagattgtcggtggatttcgtcgtgggaaacctcagggtcacgacgttgatctgcttatcagttctccgggagctgagaaagagcaagaagaccaactcctgcagaaagtgatgaatctgtggaagaaacaagggttgttgctgtacggtcgtctggagtggagtcagtgggaagatgggggttcgccttccggtaaggctgacgagggtgacgcggaggcgaaatgctttctgatcctcaaactttatgatcatctggtgcgtaaaagtaaacgcaatatgccgactggttcgaacatgggcgagtccaaaccgtggaaagcaattcgcgtagatctgctgcgttgcccctatggcagttttgcgtttgcgatgttgcagtggaccggaagccgcatgttccgtcgtgatctgcgttggtacgccctggaagagaagaacatgatgctggacgttcattcgctgtatgacctgacccgcggtatcttcctccctgctaaatcggaagaggaaattttcgaacatctggggcttgaatacctggaaccgttcgaacgtaacgca

SEQ ID NO: 3772 - protein, 529 aa, synthetic construct; identical to SEQ ID NO: 3694
  REGION 1..529: note = Variant of terminal deoxynucleotidyltransferase

SEQ ID NO: 3773 - DNA, 1587 bp, synthetic construct
  misc_feature 1..1587: note = Variant of terminal deoxynucleotidyltransferase
  source 1..1587: mol_type = other DNA
atgcaccatcatcatcatcatggcggtagcggcagccacggcattcgtaccatcgattcggacttcgggaagaaacagcagaaaaaaggcgataaccacgatagttccgccacttatgaaatcaaatttcacgagtttgtgctgttcattctcgaagaaaaaatgggtgcgacgcgtcgtacttttctgacagatttagcccgcaagaaagggttccgcgtcgagaatgaactgaccgacgaagttacccacatcgtggcagaaaatctgtcacgctctgaagtattggcttggctgaaagaacacaagatggagaagaccaagcaattcgaactgctggatattagctggcttatcgaaagcatgaaagttggtaaaccggtggacaccaaggggaaataccagttggcggaatcggttgaggtgagtgcgaacccagatccgacagaaggtcgtgtaaacgagctgcctcctactatgaaaaccgtttctccgtatgcgtgtcaacgccgcaccaccctgaacaaccgtaatcaacgttttacggactcgctggagattcttcgtgaaaattacgagttcaaacgcaacgatgatactgcgctggaatttcgtcgtgctatctccgtgctgaaaagccttccgtttgaggtacgtagcctgaaagacacggaaggattgccctggatcagtgatgaagtcaaagggattatggaagaaatcatcgaagtcggggagtcgcgtgaagtgcaggccgtgctcaatgatgagtggtatcaaagcttccacgcatttacgagtgtctttggagtgggggtgaagacagcagacaagtggtaccgtatgggtctgcgcaccctcgaggatgttcgttccagcaagaccctgaagttgaccccgatgcagaaagtaggtctgctgctgtatgaagatcttgctcgcggcgttacgcgtgccgaagctgacgcgatttggctgctggttcaggatgcagtcgcaactttcgacccggatgcgatcgtggagattgtcggtggatttcgtcgtgggaaacctcagggtcacgacgttgatctgcttatcagttctccgggagctgagaaagagcaagaagaccaactcctgcagaaagtgatgaatctgtggaagaaacaagggttgttgctgtacggtcgtctggagtggagtcagtgggaagatgggggttcgccttccggtaaggctgacgagggtgacgcggaggcgaaatgctttctgatcctcaaactttatgatcatctggtgcgtaaaagtaaacgcaatatgccgactggttcgaacatgggcgagtccaaaccgtggaaagcaattcgcgtagatctgctgcgttgcccctatggcagttttgcgtttgcgatgttgcagtggaccggaagccgcatgttccgtcgtgatctgcgttggtacgccctggaagagaagaacatgatgctggacaatcattcgctgtatgacatgacccgcggtatcttcctccctgctaaatcggaagaggaaattttcgaacatctggggcttgaatacctggaaccgttcgaacgtaacgca

SEQ ID NO: 3774 - protein, 529 aa, synthetic construct
  REGION 1..529: note = Variant of terminal deoxynucleotidyltransferase
MHHHHHHGGSGSHGIRTIDSDFGKKQQKKGDNHDSSATYEIKFHEFVLFILEEKMGATRRTFLTDLARKKGFRVENELTDEVTHIVAENLSRSEVLAWLKEHKMEKTKQFELLDISWLIESMKVGKPVDTKGKYQLAESVEVSANPDPTEGRVNELPPTMKTVSPYACQRRTTLNNRNQRFTDSLEILRENYEFKRNDDTALEFRRAISVLKSLPFEVRSLKDTEGLPWISDEVKGIMEEIIEVGESREVQAVLNDEWYQSFHAFTSVFGVGVKTADKWYRMGLRTLEDVRSSKTLKLTPMQKVGLLLYEDLARGVTRAEADAIWLLVQDAVATFDPDAIVEIVGGFRRGKPQGHDVDLLISSPGAEKEQEDQLLQKVMNLWKKQGLLLYGRLEWSQWEDGGSPSGKADEGDAEAKCFLILKLYDHLVRKSKRNMPTGSNMGESKPWKAIRVDLLRCPYGSFAFAMLQWTGSRMFRRDLRWYALEEKNMMLDNHSLYDMTRGIFLPAKSEEEIFEHLGLEYLEPFERNA

SEQ ID NO: 3775 - DNA, 1587 bp, synthetic construct
  misc_feature 1..1587: note = Variant of terminal deoxynucleotidyltransferase
  source 1..1587: mol_type = other DNA
atgcaccatcatcatcatcatggcggtagcggcagccacggcattcgtaccatcgattcggacttcgggaagaaacagcagaaaaaaggcgataaccacgatagttccgccacttatgaaatcaaatttcacgagtttgtgctgttcattctcgaagaaaaaatgggtgcgacgcgtcgtacttttctgacagatttagcccgcaagaaagggttccgcgtcgagaatgaactgaccgacgaagttacccacatcgtggcagaaaatctgtcacgctctgaagtattggcttggctgaaagaacacaagatggagaagaccaagcaattcgaactgctggatattagctggcttatcgaaagcatgaaagttggtaaaccggtggacaccaaggggaaataccagttggcggaatcggttgaggtgagtgcgaacccagatccgacagaaggtcgtgtaaacgagctgcctcctactatgaaaaccgtttctccgtatgcgtgtcaacgccgcaccaccctgaacaaccgtaatcaacgttttacggactcgctggagattcttcgtgaaaattacgagttcaaacgcaacgatgatactgcgctggaatttcgtcgtgctatctccgtgctgaaaagccttccgtttgaggtacgtagcctgaaagacacggaaggattgccctggatcagtgatgaagtcaaagggattatggaagaaatcatcgaagtcggggagtcgcgtgaagtgcaggccgtgctcaatgatgagtggtatcaaagcttccacgcatttacgagtgtctttggagtgggggtgaagacagcagacaagtggtaccgtatgggtctgcgcaccctcgaggatgttcgttccagcaagaccctgaagttgaccccgatgcagaaagtaggtctgctgtattatgaagatcttgctcgcggcgttacgcgtgccgaagctgacgcgatttggctgctggttcaggatgcagtcgcaactttcgacccggatgcgatcgtggagattgtcggtggatttcgtcgtgggaaacctcagggtcacgacgttgatctgcttatcagttctccgggagctgagaaagagcaagaagaccaactcctgcagaaagtgatgaatctgtggaagaaacaagggttgttgctgtacggtcgtctggagtggagtcagtgggaagatgggggttcgccttccggtaaggctgacgagggtgacgcggaggcgaaatgctttctgatcctcaaactttatgatcatctggtgcgtaaaagtaaacgcaatatgccgactggttcgaacatgggcgagtccaaaccgtggaaagcaattcgcgtagatctgctgcgttgcccctatggcagttttgcgtttgcgatgttgcagtggaccggaagcatgatgttccgtcgtgatctgcgttggtacgccctggaagagaagaacatgatgctggacaatcattcgctgtatgacatgacccgcggtatcttcctccctgctaaatcggaagaggaaattttcgaacatctggggcttgaatacctggaaccgttcgaacgtaacgca

SEQ ID NO: 3776 - protein, 529 aa, synthetic construct
  REGION 1..529: note = Variant of terminal deoxynucleotidyltransferase
MHHHHHHGGSGSHGIRTIDSDFGKKQQKKGDNHDSSATYEIKFHEFVLFILEEKMGATRRTFLTDLARKKGFRVENELTDEVTHIVAENLSRSEVLAWLKEHKMEKTKQFELLDISWLIESMKVGKPVDTKGKYQLAESVEVSANPDPTEGRVNELPPTMKTVSPYACQRRTTLNNRNQRFTDSLEILRENYEFKRNDDTALEFRRAISVLKSLPFEVRSLKDTEGLPWISDEVKGIMEEIIEVGESREVQAVLNDEWYQSFHAFTSVFGVGVKTADKWYRMGLRTLEDVRSSKTLKLTPMQKVGLLYYEDLARGVTRAEADAIWLLVQDAVATFDPDAIVEIVGGFRRGKPQGHDVDLLISSPGAEKEQEDQLLQKVMNLWKKQGLLLYGRLEWSQWEDGGSPSGKADEGDAEAKCFLILKLYDHLVRKSKRNMPTGSNMGESKPWKAIRVDLLRCPYGSFAFAMLQWTGSMMFRRDLRWYALEEKNMMLDNHSLYDMTRGIFLPAKSEEEIFEHLGLEYLEPFERNA

SEQ ID NO: 3777 - DNA, 1587 bp, synthetic construct
  misc_feature 1..1587: note = Variant of terminal deoxynucleotidyltransferase
  source 1..1587: mol_type = other DNA
atgcaccatcatcatcatcatggcggtagcggcagccacggcattcgtaccatcgattcggacttcgggaagaaacagcagaaaaaaggcgataaccacgatagttccgccacttatgaaatcaaatttcacgagtttgtgctgttcattctcgaagaaaaaatgggtgcgacgcgtcgtacttttctgacagatttagcccgcaagaaagggttccgcgtcgagaatgaactgaccgacgaagttacccacatcgtggcagaaaatctgtcacgctctgaagtattggcttggctgaaagaacacaagatggagaagaccaagcaattcgaactgctggatattagctggcttatcgaaagcatgaaagttggtaaaccggtggacaccaaggggaaataccagttggcggaatcggttgaggtgagtgcgaacccagatccgacagaaggtcgtgtaaacgagctgcctcctactatgaaaaccgtttctccgtatgcgtgtcaacgccgcaccaccctgaacaaccgtaatcaacgttttacggactcgctggagattcttcgtgaaaattacgagttcaaacgcaacgatgatactgcgctggaatttcgtcgtgctatctccgtgctgaaaagccttccgtttgaggtacgtagcctgaaagacacggaaggattgccctggatcagtgatgaagtcaaagggattatggaagaaatcatcgaagtcggggagtcgcgtgaagtgcaggccgtgctcaatgatgagtggtatcaaagcttccacgcatttacgagtgtctttggagtgggggtgaagacagcagacaagtggtaccgtatgggtctgcgcaccctcgaggatgttcgttccagcaagaccctgaagttgaccccgatgcagcatgtaggtctgctgtattatgaagatcttgctcgcggcgttacgcgtgccgaagctgacgcgatttggctgctggttcaggatgcagtcgcaactttcgacccggatgcgatcgtggagattgtcggtggatttcgtcgtgggaaacctcagggtcacgacgttgatctgcttatcagttctccgggagctgagaaagagcaagaagaccaactcctgcagaaagtgatgaatctgtggaagaaacaagggttgttgctgtacggtcgtctggaatgggctcagtgggaagatgggggttcgccttccggtaaggctgacgagggtgacgcggaggcgaaatgctttctgatcctcaaactttatgatcatctggtgcgtaaaagtaaacgcaatatgccgactggttcgaacatgggcgagtccaaaccgtggaaagcaattcgcgtagatctgctgcgttgcccctatggcagttttgcgtttgcgatgttgcagtggaccggaagccgcatgttccgtcgtgatctgcgttggtacgccctggaagagaagaacatgatgctggacaatcattcgctgtatgacatgacccgcggtatcttcctccctgctaaatcggaagaggaaattttcgaacatctggggcttgaatacctggaaccgttcgaacgtaacgca

SEQ ID NO: 3778 - protein, 529 aa, synthetic construct
  REGION 1..529: note = Variant of terminal deoxynucleotidyltransferase
MHHHHHHGGSGSHGIRTIDSDFGKKQQKKGDNHDSSATYEIKFHEFVLFILEEKMGATRRTFLTDLARKKGFRVENELTDEVTHIVAENLSRSEVLAWLKEHKMEKTKQFELLDISWLIESMKVGKPVDTKGKYQLAESVEVSANPDPTEGRVNELPPTMKTVSPYACQRRTTLNNRNQRFTDSLEILRENYEFKRNDDTALEFRRAISVLKSLPFEVRSLKDTEGLPWISDEVKGIMEEIIEVGESREVQAVLNDEWYQSFHAFTSVFGVGVKTADKWYRMGLRTLEDVRSSKTLKLTPMQHVGLLYYEDLARGVTRAEADAIWLLVQDAVATFDPDAIVEIVGGFRRGKPQGHDVDLLISSPGAEKEQEDQLLQKVMNLWKKQGLLLYGRLEWAQWEDGGSPSGKADEGDAEAKCFLILKLYDHLVRKSKRNMPTGSNMGESKPWKAIRVDLLRCPYGSFAFAMLQWTGSRMFRRDLRWYALEEKNMMLDNHSLYDMTRGIFLPAKSEEEIFEHLGLEYLEPFERNA

SEQ ID NO: 3779 - DNA, 1587 bp, synthetic construct
  misc_feature 1..1587: note = Variant of terminal deoxynucleotidyltransferase
  source 1..1587: mol_type = other DNA
atgcaccatcatcatcatcatggcggtagcggcagccacggcattcgtaccatcgattcggacttcgggaagaaacagcagaaaaaaggcgataaccacgatagttccgccacttatgaaatcaaatttcacgagtttgtgctgttcattctcgaagaaaaaatgggtgcgacgcgtcgtacttttctgacagatttagcccgcaagaaagggttccgcgtcgagaatgaactgaccgacgaagttacccacatcgtggcagaaaatctgtcacgctctgaagtattggcttggctgaaagaacacaagatggagaagaccaagcaattcgaactgctggatattagctggcttatcgaaagcatgaaagttggtaaaccggtggacaccaaggggaaataccagttggcggaatcggttgaggtgagtgcgaacccagatccgacagaaggtcgtgtaaacgagctgcctcctactatgaaaaccgtttctccgtatgcgtgtcaacgccgcaccaccctgaacaaccgtaatcaacgttttacggactcgctggagattcttcgtgaaaattacgagttcaaacgcaacgatgatactgcgctggaatttcgtcgtgctatctccgtgctgaaaagccttccgtttgaggtacgtagcctgaaagacacggaaggattgccctggatcagtgatgaagtcaaagggattatggaagaaatcatcgaagtcggggagtcgcgtgaagtgcaggccgtgctcaatgatgagtggtatcaaagcttccacgcatttacgagtgtctttggagtgggggaaaagacagcagacaagtggtaccgtatgggtctgcgcaccctcgaggatgttcgttccagcaagaccctgaagttgaccccgatgcagaaagtaggtctgctgtattatgaagatcttgctcgcggcgttacgcgtgccgaagctgacgcgatttggctgctggttcaggatgcagtcgcaactttcgacccggatgcgatcgtggagattgtcggtggatttcgtcgtgggaaacctcagggtcacgacgttgatctgcttatcagttctccgggagctgagaaagagcaagaagaccaactcctgcagaaagtgatgaatctgtggaagaaacaagggttgttgctgtacggtcgtctggagtggagtcagtgggaagatgggggttcgccttccggtaaggctgacgagggtgacgcggaggcgaaatgctttctgatcctcaaactttatgatcatctggtgcgtaaaagtaaacgcaatatgccgactggttcgaacatgggcgagtccaaaccgtggaaagcaattcgcgtagatctgctgcgttgcccctatggcagttttgcgtttgcgatgttgcagtggaccggaagccgcatgttccgtcgtgatctgcgttggtacgccctggaagagaagaacatgatgctggacgtacattcgctgtatgacatgacccgcggtatcttcctccctgctaaatcggaagaggaaattttcgaacatctggggcttgaatacctggaaccgttcgaacgtaacgca

SEQ ID NO: 3780 - protein, 529 aa, synthetic construct
  REGION 1..529: note = Variant of terminal deoxynucleotidyltransferase
MHHHHHHGGSGSHGIRTIDSDFGKKQQKKGDNHDSSATYEIKFHEFVLFILEEKMGATRRTFLTDLARKKGFRVENELTDEVTHIVAENLSRSEVLAWLKEHKMEKTKQFELLDISWLIESMKVGKPVDTKGKYQLAESVEVSANPDPTEGRVNELPPTMKTVSPYACQRRTTLNNRNQRFTDSLEILRENYEFKRNDDTALEFRRAISVLKSLPFEVRSLKDTEGLPWISDEVKGIMEEIIEVGESREVQAVLNDEWYQSFHAFTSVFGVGEKTADKWYRMGLRTLEDVRSSKTLKLTPMQKVGLLYYEDLARGVTRAEADAIWLLVQDAVATFDPDAIVEIVGGFRRGKPQGHDVDLLISSPGAEKEQEDQLLQKVMNLWKKQGLLLYGRLEWSQWEDGGSPSGKADEGDAEAKCFLILKLYDHLVRKSKRNMPTGSNMGESKPWKAIRVDLLRCPYGSFAFAMLQWTGSRMFRRDLRWYALEEKNMMLDVHSLYDMTRGIFLPAKSEEEIFEHLGLEYLEPFERNA

SEQ ID NO: 3781 - DNA, 1587 bp, synthetic construct
  misc_feature 1..1587: note = Variant of terminal deoxynucleotidyltransferase
  source 1..1587: mol_type = other DNA
atgcaccatcatcatcatcatggcggtagcggcagccacggcattcgtaccatcgattcggacttcgggaagaaacagcagaaaaaaggcgataaccacgatagttccgccacttatgaaatcaaatttcacgagtttgtgctgttcattctcgaagaaaaaatgggtgcgacgcgtcgtacttttctgacagatttagcccgcaagaaagggttccgcgtcgagaatgaactgaccgacgaagttacccacatcgtggcagaaaatctgtcacgctctgaagtattggcttggctgaaagaacacaagatggagaagaccaagcaattcgaactgctggatattagctggcttatcgaaagcatgaaagttggtaaaccggtggacaccaaggggaaataccagttggcggaatcggttgaggtgagtgcgaacccagatccgacagaaggtcgtgtaaacgagctgcctcctactatgaaaaccgtttctccgtatgcgtgtcaacgccgcaccaccctgaacaaccgtaatcaacgttttacggactcgctggagattcttcgtgaaaattacgagttcaaacgcaacgatgatactgcgctggaatttcgtcgtgctatctccgtgctgaaaagccttccgtttgaggtacgtagcctgaaagacacggaaggattgccctggatcagtgatgaagtcaaagggattatggaagaaatcatcgaagtcggggagtcgcgtgaagtgcaggccgtgctcaatgatgagtggtatcaaagcttccacgcatttacgagtgtctttggagtggggatcaagacagcagacaagtggtaccgtatgggtctgcgcaccctcgaggatgttcgttccagcaagaccctgaagttgaccccgatgcagaaagtaggtctgctgtatatggaagatcttgctcgcggcgttacgcgtgccgaagctgacgcgatttggctgctggttcaggatgcagtcgcaactttcgacccggatgcgatcgtggagattgtcggtggatttcgtcgtgggaaacctcagggtcacgacgttgatctgcttatcagttctccgggagctgagaaagagcaagaagaccaactcctgcagaaagtgatgaatctgtggaagaaacaagggttgttgctgtacggtcgtctggagtggagtcagtgggaagatgggggttcgccttccggtaaggctgacgagggtgactcggaggcgaaatgctttctgatcctcaaactttatgatcatctggtgcgtaaaagtaaacgcaatatgccgactggttcgaacatgggcgagtccaaaccgtggaaagcaattcgcgtagatctgctgcgttgcccctatggcagttttgcgtttgcgatgttgcagtggaccggaagccgcatgttccgtcgtgatctgcgttggtacgccctggaagagaagaacatgatgctggacaatcattcgctgtatgacctgacccgcggtatcttcctccctgctaaatcggaagaggaaattttcgaacatctggggcttgaatacctggaaccgttcgaacgtaacgca

SEQ ID NO: 3782 - protein, 529 aa, synthetic construct
  REGION 1..529: note = Variant of terminal deoxynucleotidyltransferase
MHHHHHHGGSGSHGIRTIDSDFGKKQQKKGDNHDSSATYEIKFHEFVLFILEEKMGATRRTFLTDLARKKGFRVENELTDEVTHIVAENLSRSEVLAWLKEHKMEKTKQFELLDISWLIESMKVGKPVDTKGKYQLAESVEVSANPDPTEGRVNELPPTMKTVSPYACQRRTTLNNRNQRFTDSLEILRENYEFKRNDDTALEFRRAISVLKSLPFEVRSLKDTEGLPWISDEVKGIMEEIIEVGESREVQAVLNDEWYQSFHAFTSVFGVGIKTADKWYRMGLRTLEDVRSSKTLKLTPMQKVGLLYMEDLARGVTRAEADAIWLLVQDAVATFDPDAIVEIVGGFRRGKPQGHDVDLLISSPGAEKEQEDQLLQKVMNLWKKQGLLLYGRLEWSQWEDGGSPSGKADEGDSEAKCFLILKLYDHLVRKSKRNMPTGSNMGESKPWKAIRVDLLRCPYGSFAFAMLQWTGSRMFRRDLRWYALEEKNMMLDNHSLYDLTRGIFLPAKSEEEIFEHLGLEYLEPFERNA

SEQ ID NO: 3783 - DNA, 1587 bp, synthetic construct
  misc_feature 1..1587: note = Variant of terminal deoxynucleotidyltransferase
  source 1..1587: mol_type = other DNA
atgcaccatcatcatcatcatggcggtagcggcagccacggcattcgtaccatcgattcggacttcgggaagaaacagcagaaaaaaggcgataaccacgatagttccgccacttatgaaatcaaatttcacgagtttgtgctgttcattctcgaagaaaaaatgggtgcgacgcgtcgtacttttctgacagatttagcccgcaagaaagggttccgcgtcgagaatgaactgaccgacgaagttacccacatcgtggcagaaaatctgtcacgctctgaagtattggcttggctgaaagaacacaagatggagaagaccaagcaattcgaactgctggatattagctggcttatcgaaagcatgaaagttggtaaaccggtggacaccaaggggaaataccagttggcggaatcggttgaggtgagtgcgaacccagatccgacagaaggtcgtgtaaacgagctgcctcctactatgaaaaccgtttctccgtatgcgtgtcaacgccgcaccaccctgaacaaccgtaatcaacgttttacggactcgctggagattcttcgtgaaaattacgagttcaaacgcaacgatgatactgcgctggaatttcgtcgtgctatctccgtgctgaaaagccttccgtttgaggtacgtagcctgaaagacacggaaggattgccctggatcagtgatgaagtcaaagggattatggaagaaatcatcgaagtcggggagtcgcgtgaagtgcaggccgtgctcaatgatgagtggtatcaaagcttccacgcatttacgagtgtctttggagtgggggtaaagacagcagacaagtggtaccgtatgggtctgcgcaccctcgaggatgttcgttccagcaagaccctgaagttgaccccgatgcagaaagtaggtctgctgtattatgaagatcttgctcgcggcgttacgcgtgccgaagctgacgcgatttggctgctggttcaggatgcagtcgcaactttcgacccggatgcgatcgtggagattgtcggtggatttcgtcgtgggaaacctcagggtcacgacgttgatctgcttatcagttctccgggagctgagaaagagcaagaagaccaactcctgcagaaagtgatgaatctgtggaagaaacaagggttgttgctgtacggtcgtctggagtggagtcagtgggaagatgggggttcgccttccggtaaggctgacgagggtgactcggaggcgaaatgctttctgatcctcaaactttatgatcatctggtgcgtaaaagtaaacgcaatatgccgactggttcgaacatgggcgagtccaaaccgtggaaagcaattcgcgtagatctgctgcgttgcccctatggcagttttgcgtttgcgatgttgcagtggaccggaagccgcatgttccgtcgtgatctgcgttggtacgccctggaagagaagaacatgatgctggacaatcattcgctgtatgacatgacccgcggtatcttcctccctgctaaatcggaagaggaaattttcgaacatctggggcttgaatacctggaaccgttcgaacgtaacgca

SEQ ID NO: 3784 - protein, 529 aa, synthetic construct
  REGION 1..529: note = Variant of terminal deoxynucleotidyltransferase
MHHHHHHGGSGSHGIRTIDSDFGKKQQKKGDNHDSSATYEIKFHEFVLFILEEKMGATRRTFLTDLARKKGFRVENELTDEVTHIVAENLSRSEVLAWLKEHKMEKTKQFELLDISWLIESMKVGKPVDTKGKYQLAESVEVSANPDPTEGRVNELPPTMKTVSPYACQRRTTLNNRNQRFTDSLEILRENYEFKRNDDTALEFRRAISVLKSLPFEVRSLKDTEGLPWISDEVKGIMEEIIEVGESREVQAVLNDEWYQSFHAFTSVFGVGVKTADKWYRMGLRTLEDVRSSKTLKLTPMQKVGLLYYEDLARGVTRAEADAIWLLVQDAVATFDPDAIVEIVGGFRRGKPQGHDVDLLISSPGAEKEQEDQLLQKVMNLWKKQGLLLYGRLEWSQWEDGGSPSGKADEGDSEAKCFLILKLYDHLVRKSKRNMPTGSNMGESKPWKAIRVDLLRCPYGSFAFAMLQWTGSRMFRRDLRWYALEEKNMMLDNHSLYDMTRGIFLPAKSEEEIFEHLGLEYLEPFERNA

SEQ ID NO: 3785 - DNA, 1587 bp, synthetic construct
  misc_feature 1..1587: note = Variant of terminal deoxynucleotidyltransferase
  source 1..1587: mol_type = other DNA
atgcaccatcatcatcatcatggcggtagcggcagccacggcattcgtaccatcgattcggacttcgggaagaaacagcagaaaaaaggcgataaccacgatagttccgccacttatgaaatcaaatttcacgagtttgtgctgttcattctcgaagaaaaaatgggtgcgacgcgtcgtacttttctgacagatttagcccgcaagaaagggttccgcgtcgagaatgaactgaccgacgaagttacccacatcgtggcagaaaatctgtcacgctctgaagtattggcttggctgaaagaacacaagatggagaagaccaagcaattcgaactgctggatattagctggcttatcgaaagcatgaaagttggtaaaccggtggacaccaaggggaaataccagttggcggaatcggttgaggtgagtgcgaacccagatccgacagaaggtcgtgtaaacgagctgcctcctactatgaaaaccgtttctccgtatgcgtgtcaacgccgcaccaccctgaacaaccgtaatcaacgttttacggactcgctggagattcttcgtgaaaattacgagttcaaacgcaacgatgatactgcgctggaatttcgtcgtgctatctccgtgctgaaaagccttccgtttgaggtacgtagcctgaaagacacggaaggattgccctggatcagtgatgaagtcaaagggattatggaagaaatcatcgaagtcggggagtcgcgtgaagtgcaggccgtgctcaatgatgagtggtatcaaagcttccacgcatttacgagtgtctttggagtgggggtaaagacagcagacaagtggtaccgtatgggtctgcgcaccctcgaggatgttcgttccagcaagaccctgaagttgaccccgatgcagaaagtaggtctgctgtatatggaagatcttgctcgcggcgttacgcgtgccgaagctgacgcgatttggctgctggttcaggatgcagtcgcaactttcgacccggatgcgatcgtggagattgtcggtggatttcgtcgtgggaaacctcagggtcacgacgttgatctgcttatcagttctccgggagctgagaaagagcaagaagaccaactcctgcagaaagtgatgaatctgtggaagaaacaagggttgttgctgtacggtcgtctggagtggagtcagtgggaagatgggggttcgccttccggtaaggctgacgagggtgactcggaggcgaaatgctttctgatcctcaaactttatgatcatctggtgcgtaaaagtaaacgcaatatgccgactggttcgaacatgggcgagtccaaaccgtggaaagcaattcgcgtagatctgctgcgttgcccctatggcagttttgcgtttgcgatgttgcagtggaccggaagccgcatgttccgtcgtgatctgcgttggtacgccctggaagagaagaacatgatgctggacaatcattcgctgtatgacatgacccgcggtatcttcctccctgctaaatcggaagaggaaattttcgaacatctggggcttgaatacctggaaccgttcgaacgtaacgca

SEQ ID NO: 3786 - protein, 529 aa, synthetic construct
  REGION 1..529: note = Variant of terminal deoxynucleotidyltransferase
MHHHHHHGGSGSHGIRTIDSDFGKKQQKKGDNHDSSATYEIKFHEFVLFILEEKMGATRRTFLTDLARKKGFRVENELTDEVTHIVAENLSRSEVLAWLKEHKMEKTKQFELLDISWLIESMKVGKPVDTKGKYQLAESVEVSANPDPTEGRVNELPPTMKTVSPYACQRRTTLNNRNQRFTDSLEILRENYEFKRNDDTALEFRRAISVLKSLPFEVRSLKDTEGLPWISDEVKGIMEEIIEVGESREVQAVLNDEWYQSFHAFTSVFGVGVKTADKWYRMGLRTLEDVRSSKTLKLTPMQKVGLLYMEDLARGVTRAEADAIWLLVQDAVATFDPDAIVEIVGGFRRGKPQGHDVDLLISSPGAEKEQEDQLLQKVMNLWKKQGLLLYGRLEWSQWEDGGSPSGKADEGDSEAKCFLILKLYDHLVRKSKRNMPTGSNMGESKPWKAIRVDLLRCPYGSFAFAMLQWTGSRMFRRDLRWYALEEKNMMLDNHSLYDMTRGIFLPAKSEEEIFEHLGLEYLEPFERNA

SEQ ID NO: 3787 - DNA, 1587 bp, synthetic construct
  misc_feature 1..1587: note = Variant of terminal deoxynucleotidyltransferase
  source 1..1587: mol_type = other DNA
atgcaccatcatcatcatcatggcggtagcggcagccacggcattcgtaccatcgattcggacttcgggaagaaacagcagaaaaaaggcgataaccacgatagttccgccacttatgaaatcaaatttcacgagtttgtgctgttcattctcgaagaaaaaatgggtgcgacgcgtcgtacttttctgacagatttagcccgcaagaaagggttccgcgtcgagaatgaactgaccgacgaagttacccacatcgtggcagaaaatctgtcacgctctgaagtattggcttggctgaaagaacacaagatggagaagaccaagcaattcgaactgctggatattagctggcttatcgaaagcatgaaagttggtaaaccggtggacaccaaggggaaataccagttggcggaatcggttgaggtgagtgcgaacccagatccgacagaaggtcgtgtaaacgagctgcctcctactatgaaaaccgtttctccgtatgcgtgtcaacgccgcaccaccctgaacaaccgtaatcaacgttttacggactcgctggagattcttcgtgaaaattacgagttcaaacgcaacgatgatactgcgctggaatttcgtcgtgctatctccgtgctgaaaagccttccgtttgaggtacgtagcctgaaagacacggaaggattgccctggatcagtgatgaagtcaaagggattatggaagaaatcatcgaagtcggggagtcgcgtgaagtgcaggccgtgctcaatgatgagtggtatcaaagcttccacgcatttacgagtgtctttggagtgggggtgaagacagcagacaagtggtacaaaatgggtctgcgcaccctcgaggatgttcgttccagcaagaccctgaagttgaccccgatgcagaaagtaggtctgctgtattatgaagatcttgctcgcggcgttacgcgtgccgaagctgacgcgatttggctgctggttcaggatgcagtcgcaactttcgacccggatgcgatcgtggagattgtcggtggatttcgtcgtgggaaacctcagggtcacgacgttgatctgcttatcagttctccgggagctgagaaagagcaagaagaccaactcctgcagaaagtgatgaatctgtggaagaaacaagggttgttgctgtacggtcgtctggagtggagtcagtgggaagatgggggttcgccttccggtaaggctgacgagggtgactcggaggcgaaatgctttctgatcctcaaactttatgatcatctggtgcgtaaaagtaaacgcaatatgccgactggttcgaacatgggcgagtccaaaccgtggaaagcaattcgcgtagatctgctgcgttgcccctatggcagttttgcgtttgcgatgttgcagtggaccggaagccgcatgttccgtcgtgatctgcgttggtacgccctggaagagaagaacatgatgctggacaatcattcgctgtatgacctgacccgcggtatcttcctccctgctaaatcggaagaggaaattttcgaacatctggggcttgaatacctggaaccgttcgaacgtaacgca

SEQ ID NO: 3788 - protein, 529 aa, synthetic construct
  REGION 1..529: note = Variant of terminal deoxynucleotidyltransferase
MHHHHHHGGSGSHGIRTIDSDFGKKQQKKGDNHDSSATYEIKFHEFVLFILEEKMGATRRTFLTDLARKKGFRVENELTDEVTHIVAENLSRSEVLAWLKEHKMEKTKQFELLDISWLIESMKVGKPVDTKGKYQLAESVEVSANPDPTEGRVNELPPTMKTVSPYACQRRTTLNNRNQRFTDSLEILRENYEFKRNDDTALEFRRAISVLKSLPFEVRSLKDTEGLPWISDEVKGIMEEIIEVGESREVQAVLNDEWYQSFHAFTSVFGVGVKTADKWYKMGLRTLEDVRSSKTLKLTPMQKVGLLYYEDLARGVTRAEADAIWLLVQDAVATFDPDAIVEIVGGFRRGKPQGHDVDLLISSPGAEKEQEDQLLQKVMNLWKKQGLLLYGRLEWSQWEDGGSPSGKADEGDSEAKCFLILKLYDHLVRKSKRNMPTGSNMGESKPWKAIRVDLLRCPYGSFAFAMLQWTGSRMFRRDLRWYALEEKNMMLDNHSLYDLTRGIFLPAKSEEEIFEHLGLEYLEPFERNA

SEQ ID NO: 3789 - DNA, 1587 bp, synthetic construct
  misc_feature 1..1587: note = Variant of terminal deoxynucleotidyltransferase
  source 1..1587: mol_type = other DNA
atgcaccatcatcatcatcatggcggtagcggcagccacggcattcgtaccatcgattcggacttcgggaagaaacagcagaaaaaaggcgataaccacgatagttccgccacttatgaaatcaaatttcacgagtttgtgctgttcattctcgaagaaaaaatgggtgcgacgcgtcgtacttttctgacagatttagcccgcaagaaagggttccgcgtcgagaatgaactgaccgacgaagttacccacatcgtggcagaaaatctgtcacgctctgaagtattggcttggctgaaagaacacaagatggagaagaccaagcaattcgaactgctggatattagctggcttatcgaaagcatgaaagttggtaaaccggtggacaccaaggggaaataccagttggcggaatcggttgaggtgagtgcgaacccagatccgacagaaggtcgtgtaaacgagctgcctcctactatgaaaaccgtttctccgtatgcgtgtcaacgccgcaccaccctgaacaaccgtaatcaacgttttacggactcgctggagattcttcgtgaaaattacgagttcaaacgcaacgatgatactgcgctggaatttcgtcgtgctatctccgtgctgaaaagccttccgtttgaggtacgtagcctgaaagacacggaaggattgccctggatcagtgatgaagtcaaagggattatggaagaaatcatcgaagtcggggagtcgcgtgaagtgcaggccgtgctcaatgatgagtggtatcaaagcttccacgcatttacgagtgtctttggagtgggggtaaagacagcagacaagtggtaccgtatgggtctgcgcaccctcgaggatgttcgttccagcaagaccctgaagttgaccccgatgcagaaagtaggtctgctgtattatgaagatcttgctcgcggcgttacgcgtgccgaagctgacgcgatttggctgctggttcaggatgcagtcgcaactttcgacccggatgcgatcgtggagattgtcggtggatttcgtcgtgggaaacctcagggtcacgacgttgatctgcttatcagttctccgggagctgagaaagagcaagaagaccaactcctgcagaaagtgatgaatctgtggaagaaacaagggttgttgctgtacggtcgtctggagtggagtcagtgggaagatgggggttcgccttccggtaaggctgacgagggtgactcggaggcgaaatgctttctgatcctcaaactttatgatcatctggtgcgtaaaagtaaacgcaatatgccgactggttcgaacatgggcgagtccaaaccgtggaaagcaattcgcgtagatctgctgcgttgcccctatggcagttttgcgtttgcgatgttgcagtggaccggaagccgcatgttccgtcgtgatctgcgttggtacgccctggaagagaagaacatgatgctggacgtacattcgctgtatgacctgacccgcggtatcttcctccctgctaaatcggaagaggaaattttcgaacatctggggcttgaatacctggaaccgttcgaacgtaacgca

SEQ ID NO: 3790 - protein, 529 aa, synthetic construct
  REGION 1..529: note = Variant of terminal deoxynucleotidyltransferase
MHHHHHHGGSGSHGIRTIDSDFGKKQQKKGDNHDSSATYEIKFHEFVLFILEEKMGATRRTFLTDLARKKGFRVENELTDEVTHIVAENLSRSEVLAWLKEHKMEKTKQFELLDISWLIESMKVGKPVDTKGKYQLAESVEVSANPDPTEGRVNELPPTMKTVSPYACQRRTTLNNRNQRFTDSLEILRENYEFKRNDDTALEFRRAISVLKSLPFEVRSLKDTEGLPWISDEVKGIMEEIIEVGESREVQAVLNDEWYQSFHAFTSVFGVGVKTADKWYRMGLRTLEDVRSSKTLKLTPMQKVGLLYYEDLARGVTRAEADAIWLLVQDAVATFDPDAIVEIVGGFRRGKPQGHDVDLLISSPGAEKEQEDQLLQKVMNLWKKQGLLLYGRLEWSQWEDGGSPSGKADEGDSEAKCFLILKLYDHLVRKSKRNMPTGSNMGESKPWKAIRVDLLRCPYGSFAFAMLQWTGSRMFRRDLRWYALEEKNMMLDVHSLYDLTRGIFLPAKSEEEIFEHLGLEYLEPFERNA

SEQ ID NO: 3791 - DNA, 1587 bp, synthetic construct
  misc_feature 1..1587: note = Variant of terminal deoxynucleotidyltransferase
  source 1..1587: mol_type = other DNA
atgcaccatcatcatcatcatggcggtagcggcagccacggcattcgtaccatcgattcggacttcgggaagaaacagcagaaaaaaggcgataaccacgatagttccgccacttatgaaatcaaatttcacgagtttgtgctgttcattctcgaagaaaaaatgggtgcgacgcgtcgtacttttctgacagatttagcccgcaagaaagggttccgcgtcgagaatgaactgaccgacgaagttacccacatcgtggcagaaaatctgtcacgctctgaagtattggcttggctgaaagaacacaagatggagaagaccaagcaattcgaactgctggatattagctggcttatcgaaagcatgaaagttggtaaaccggtggacaccaaggggaaataccagttggcggaatcggttgaggtgagtgcgaacccagatccgacagaaggtcgtgtaaacgagctgcctcctactatgaaaaccgtttctccgtatgcgtgtcaacgccgcaccaccctgaacaaccgtaatcaacgttttacggactcgctggagattcttcgtgaaaattacgagttcaaacgcaacgatgatactgcgctggaatttcgtcgtgctatctccgtgctgaaaagccttccgtttgaggtacgtagcctgaaagacacggaaggattgccctggatcagtgatgaagtcaaagggattatggaagaaatcatcgaagtcggggagtcgcgtgaagtgcaggccgtgctcaatgatgagtggtatcaaagcttccacgcatttacgagtgtctttggagtgggggtgaagacagcagacaagtggtaccgtatgggtctgcgcaccctcgaggatgttcgttccagcaagaccctgaagttgaccccgatgcagaaagtaggtctgctgtattatgaagatcttgctcgcggcgttacgcgtgccgaagctgacgcgatttggctgctggttcaggatgcagtcgcaactttcgacccggatgcgatcgtggagattgtcggtggatttcgtcgtgggaaacctcagggtcacgacgttgatctgcttatcagttctccgggagctgagaaagagcaagaagaccaactcctgcagaaagtgatgaatctgtggaagaaacaagggttgttgctgtacggtcgtctggagtggagtcagtgggaagatgggggttcgccttccggtaaggctgacgagggtgactcggaggcgaaatgctttctgatcctcaaactttatgatcatctggtgcgtaaaagtaaacgcaatatgccgactggttcgaacatgggcgagtccaaaccgtggaaagcaattcgcgtagatctgctgcgttgcccctatggcagttttgcgtttgcgatgttgcagtggaccggaagccgcatgttccgtcgtgatctgcgttggtacgccctggaagagaagaacatgatgctggacaatcattcgctgtatgacctgacccgcggtatcttcctccctgctaaatcggaagaggaaattttcgaacatctggggcttgaatacctggaaccgttcgaacgtaacgca

SEQ ID NO: 3792 - protein, 529 aa, synthetic construct
  REGION 1..529: note = Variant of terminal deoxynucleotidyltransferase
MHHHHHHGGSGSHGIRTIDSDFGKKQQKKGDNHDSSATYEIKFHEFVLFILEEKMGATRRTFLTDLARKKGFRVENELTDEVTHIVAENLSRSEVLAWLKEHKMEKTKQFELLDISWLIESMKVGKPVDTKGKYQLAESVEVSANPDPTEGRVNELPPTMKTVSPYACQRRTTLNNRNQRFTDSLEILRENYEFKRNDDTALEFRRAISVLKSLPFEVRSLKDTEGLPWISDEVKGIMEEIIEVGESREVQAVLNDEWYQSFHAFTSVFGVGVKTADKWYRMGLRTLEDVRSSKTLKLTPMQKVGLLYYEDLARGVTRAEADAIWLLVQDAVATFDPDAIVEIVGGFRRGKPQGHDVDLLISSPGAEKEQEDQLLQKVMNLWKKQGLLLYGRLEWSQWEDGGSPSGKADEGDSEAKCFLILKLYDHLVRKSKRNMPTGSNMGESKPWKAIRVDLLRCPYGSFAFAMLQWTGSRMFRRDLRWYALEEKNMMLDNHSLYDLTRGIFLPAKSEEEIFEHLGLEYLEPFERNA

SEQ ID NO: 3793 - DNA, 1587 bp, synthetic construct
  misc_feature 1..1587: note = Variant of terminal deoxynucleotidyltransferase
  source 1..1587: mol_type = other DNA
atgcaccatcatcatcatcatggcggtagcggcagccacggcattcgtaccatcgattcggacttcgggaagaaacagcagaaaaaaggcgataaccacgatagttccgccacttatgaaatcaaatttcacgagtttgtgctgttcattctcgaagaaaaaatgggtgcgacgcgtcgtacttttctgacagatttagcccgcaagaaagggttccgcgtcgagaatgaactgaccgacgaagttacccacatcgtggcagaaaatctgtcacgctctgaagtattggcttggctgaaagaacacaagatggagaagaccaagcaattcgaactgctggatattagctggcttatcgaaagcatgaaagttggtaaaccggtggacaccaaggggaaataccagttggcggaatcggttgaggtgagtgcgaacccagatccgacagaaggtcgtgtaaacgagctgcctcctactatgaaaaccgtttctccgtatgcgtgtcaacgccgcaccaccctgaacaaccgtaatcaacgttttacggactcgctggagattcttcgtgaaaattacgagttcaaacgcaacgatgatactgcgctggaatttcgtcgtgctatctccgtgctgaaaagccttccgtttgaggtacgtagcctgaaagacacggaaggattgccctggatcagtgatgaagtcaaagggattatggaagaaatcatcgaagtcggggagtcgcgtgaagtgcaggccgtgctcaatgatgagtggtatcaaagcttccacgcatttacgagtgtctttggagtggggagcaagacagcagacaagtggtaccgtatgggtctgcgcaccctcgaggatgttcgttccagcaagaccctgaagttgaccccgatgcagaaagtaggtctgctgtatatggaagatcttgctcgcggcgttacgcgtgccgaagctgacgcgatttggctgctggttcaggatgcagtcgcaactttcgacccggatgcgatcgtggagattgtcggtggatttcgtcgtgggaaacctcagggtcacgacgttgatctgcttatcagttctccgggagctgagaaagagcaagaagaccaactcctgcagaaagtgatgaatctgtggaagaaacaagggttgttgctgtacggtcgtctggagtggagtcagtgggaagatgggggttcgccttccggtaaggctgacgagggtgactcggaggcgaaatgctttctgatcctcaaactttatgatcatctggtgcgtaaaagtaaacgcaatatgccgactggttcgaacatgggcgagtccaaaccgtggaaagcaattcgcgtagatctgctgcgttgcccctatggcagttttgcgtttgcgatgttgcagtggaccggaagccgcatgttccgtcgtgatctgcgttggtacgccctggaagagaagaacatgatgctggacaatcattcgctgtatgacctgacccgcggtatcttcctccctgctaaatcggaagaggaaattttcgaacatctggggcttgaatacctggaaccgttcgaacgtaacgca

SEQ ID NO: 3794 - protein, 529 aa, synthetic construct
  REGION 1..529: note = Variant of terminal deoxynucleotidyltransferase
MHHHHHHGGSGSHGIRTIDSDFGKKQQKKGDNHDSSATYEIKFHEFVLFILEEKMGATRRTFLTDLARKKGFRVENELTDEVTHIVAENLSRSEVLAWLKEHKMEKTKQFELLDISWLIESMKVGKPVDTKGKYQLAESVEVSANPDPTEGRVNELPPTMKTVSPYACQRRTTLNNRNQRFTDSLEILRENYEFKRNDDTALEFRRAISVLKSLPFEVRSLKDTEGLPWISDEVKGIMEEIIEVGESREVQAVLNDEWYQSFHAFTSVFGVGSKTADKWYRMGLRTLEDVRSSKTLKLTPMQKVGLLYMEDLARGVTRAEADAIWLLVQDAVATFDPDAIVEIVGGFRRGKPQGHDVDLLISSPGAEKEQEDQLLQKVMNLWKKQGLLLYGRLEWSQWEDGGSPSGKADEGDSEAKCFLILKLYDHLVRKSKRNMPTGSNMGESKPWKAIRVDLLRCPYGSFAFAMLQWTGSRMFRRDLRWYALEEKNMMLDNHSLYDLTRGIFLPAKSEEEIFEHLGLEYLEPFERNA

SEQ ID NO: 3795 - DNA, 1587 bp, synthetic construct
  misc_feature 1..1587: note = Variant of terminal deoxynucleotidyltransferase
  source 1..1587: mol_type = other DNA
atgcaccatcatcatcatcatggcggtagcggcagccacggcattcgtaccatcgattcggacttcgggaagaaacagcagaaaaaaggcgataaccacgatagttccgccacttatgaaatcaaatttcacgagtttgtgctgttcattctcgaagaaaaaatgggtgcgacgcgtcgtacttttctgacagatttagcccgcaagaaagggttccgcgtcgagaatgaactgaccgacgaagttacccacatcgtggcagaaaatctgtcacgctctgaagtattggcttggctgaaagaacacaagatggagaagaccaagcaattcgaactgctggatattagctggcttatcgaaagcatgaaagttggtaaaccggtggacaccaaggggaaataccagttggcggaatcggttgaggtgagtgcgaacccagatccgacagaaggtcgtgtaaacgagctgcctcctactatgaaaaccgtttctccgtatgcgtgtcaacgccgcaccaccctgaacaaccgtaatcaacgttttacggactcgctggagattcttcgtgaaaattacgagctgaaaggcaacgatgatactgcgctggaatttcgtcgtgctatctccgtgctgaaaagccttccgtttgaggtacgtagcctgaaagacacggaaggattgccctggatcagtgatgaagtcaaagggattatggaagaaatcatcgaagtcggggagtcgcgtgaagtgcaggccgtgctcaatgatgagtggtatcaaagcttccacgcatttacgagtgtctttggagtgggggtgaagacagcagacaagtggtaccgtatgggtctgcgcaccctcgaggatgttcgttccagcaagaccctgaagttgaccccgatgcagaaagtaggtctgctgtattatgaagatcttgctcgcggcgttacgcgtgccgaagctgacgcgatttggctgctggttcaggatgcagtcgcaactttcgacccggatgcgatcgtggagattgtcggtggatttcgtcgtgggaaacctcagggtcacgacgttgatctgcttatcagttctccgggagctgagaaagagcaagaagaccaactcctgcagaaagtgatgaatctgtggaagaaacaagggttgttgctgtgtggtcgtctggaatggagtcagtgggaagatgggggttcgccttccggtaaggctgacgagggtgacgcggaggcgtcgtgctttctgatcctcaaactttatgatcatctggtgcgtaaaagtaaacgcaatatgccgactggttcgaacatgggcgagtccaaaccgtggaaagcaattcgcgtagatctgctgcgttgcccctatggcagttttgcgtttgcgatgttgcagtggaccggaagccgcatgttccgtcgtgatctgcgctggtacgccctggaagagaagaacatgatgctggacaatcattcgctgtatgacatgacccgcggtatcttcctccctgctaaatcggaagaggaaattttcgaacatctggggcttgaatacctggaaccgttcgaacgtaacgca

SEQ ID NO: 3796 - protein, 529 aa, synthetic construct
  REGION 1..529: note = Variant of terminal deoxynucleotidyltransferase
MHHHHHHGGSGSHGIRTIDSDFGKKQQKKGDNHDSSATYEIKFHEFVLFILEEKMGATRRTFLTDLARKKGFRVENELTDEVTHIVAENLSRSEVLAWLKEHKMEKTKQFELLDISWLIESMKVGKPVDTKGKYQLAESVEVSANPDPTEGRVNELPPTMKTVSPYACQRRTTLNNRNQRFTDSLEILRENYELKGNDDTALEFRRAISVLKSLPFEVRSLKDTEGLPWISDEVKGIMEEIIEVGESREVQAVLNDEWYQSFHAFTSVFGVGVKTADKWYRMGLRTLEDVRSSKTLKLTPMQKVGLLYYEDLARGVTRAEADAIWLLVQDAVATFDPDAIVEIVGGFRRGKPQGHDVDLLISSPGAEKEQEDQLLQKVMNLWKKQGLLLCGRLEWSQWEDGGSPSGKADEGDAEASCFLILKLYDHLVRKSKRNMPTGSNMGESKPWKAIRVDLLRCPYGSFAFAMLQWTGSRMFRRDLRWYALEEKNMMLDNHSLYDMTRGIFLPAKSEEEIFEHLGLEYLEPFERNA

SEQ ID NO: 3797 - DNA, 1587 bp, synthetic construct
  misc_feature 1..1587: note = Variant of terminal deoxynucleotidyltransferase
  source 1..1587: mol_type = other DNA
atgcaccatcatcatcatcatggcggtagcggcagccacggcattcgtaccatcgattcggacttcgggaagaaacagcagaaaaaaggcgataaccacgatagttccgccacttatgaaatcaaatttcacgagtttgtgctgttcattctcgaagaaaaaatgggtgcgacgcgtcgtacttttctgacagatttagcccgcaagaaagggttccgcgtcgagaatgaactgaccgacgaagttacccacatcgtggcagaaaatctgtcacgctctgaagtattggcttggctgaaagaacacaagatggagaagaccaagcaattcgaactgctggatattagctggcttatcgaaagcatgaaagttggtaaaccggtggacaccaaggggaaataccagttggcggaatcggttgaggtgagtgcgaacccagatccgacagaaggtcgtgtaaacgagctgcctcctactatgaaaaccgtttctccgtatgcgtgtcaacgccgcaccaccctgaacaaccgtaatcaacgttttacggactcgctggagattcttcgtgaaaattacgagtttaaacgtaacgatgatactgcgctggaatttcgtcgtgctatctccgtgctgaaaagccttccgtttgaggtacgtagcctgaaagacacggaaggattgccctggatcagtgatgaagtcaaagggattatggaagaaatcatcgaagtcggggagtcgcgtgaagtgcaggccgtgctcaatgatgagtggtatcaaagcttccacgcatttacgagtgtctttggagtgggggtgaagacagcagacaagtggtaccgtatgggtctgcgcaccctcgaggatgttcgttccagcaagaccctgaagttgaccccgatgcagaaagtaggtctgctgtattatgaagatcttgctcgcggcgttacgcgtgccgaagctgacgcgatttggctgctggttcaggatgcagtcgcaactttcgacccggatgcgatcgtggagattgtcggtggatttcgtcgtgggaaacctcagggtcacgacgttgatctgcttatcagttctccgggagctgagaaagagcaagaagaccaactcctgcagaaagtgatgaatctgtggaagaaacaagggttgttgctgtgtggtcgtctgttttggagtcagtgggaagatgggggttcgccttccggtaaggctgacgagggtgacgcggaggcgtcgtgctttctgatcctcaaactttatgatcatctggtgcgtaaaagtaaacgcaatatgccgactggttcgaacatgggcgagtccaaaccgtggaaagcaattcgcgtagatctgctgcgttgcccctatggcagttttgcgtttgcgatgttgcagtggaccggaagccgcatgttccgtcgtgatctgaaatggtacgccctggaagagaagaacatgatgctggacaatcattcgctgtatgacatgacccgcggtatcttcctccctgctaaatcggaagaggaaattttcgaacatctggggcttgaatacctggaaccgttcgaacgtaacgca

SEQ ID NO: 3798 - protein, 529 aa, synthetic construct
  REGION 1..529: note = Variant of terminal deoxynucleotidyltransferase
MHHHHHHGGSGSHGIRTIDSDFGKKQQKKGDNHDSSATYEIKFHEFVLFILEEKMGATRRTFLTDLARKKGFRVENELTDEVTHIVAENLSRSEVLAWLKEHKMEKTKQFELLDISWLIESMKVGKPVDTKGKYQLAESVEVSANPDPTEGRVNELPPTMKTVSPYACQRRTTLNNRNQRFTDSLEILRENYEFKRNDDTALEFRRAISVLKSLPFEVRSLKDTEGLPWISDEVKGIMEEIIEVGESREVQAVLNDEWYQSFHAFTSVFGVGVKTADKWYRMGLRTLEDVRSSKTLKLTPMQKVGLLYYEDLARGVTRAEADAIWLLVQDAVATFDPDAIVEIVGGFRRGKPQGHDVDLLISSPGAEKEQEDQLLQKVMNLWKKQGLLLCGRLFWSQWEDGGSPSGKADEGDAEASCFLILKLYDHLVRKSKRNMPTGSNMGESKPWKAIRVDLLRCPYGSFAFAMLQWTGSRMFRRDLKWYALEEKNMMLDNHSLYDMTRGIFLPAKSEEEIFEHLGLEYLEPFERNA

SEQ ID NO: 3799 - DNA, 1587 bp, synthetic construct
  misc_feature 1..1587: note = Variant of terminal deoxynucleotidyltransferase
  source 1..1587: mol_type = other DNA
atgcaccatcatcatcatcatggcggtagcggcagccacggcattcgtaccatcgattcggacttcgggaagaaacagcagaaaaaaggcgataaccacgatagttccgccacttatgaaatcaaatttcacgagtttgtgctgttcattctcgaagaaaaaatgggtgcgacgcgtcgtacttttctgacagatttagcccgcaagaaagggttccgcgtcgagaatgaactgaccgacgaagttacccacatcgtggcagaaaatctgtcacgctctgaagtattggcttggctgaaagaacacaagatggagaagaccaagcaattcgaactgctggatattagctggcttatcgaaagcatgaaagttggtaaaccggtggacaccaaggggaaataccagttggcggaatcggttgaggtgagtgcgaacccagatccgacagaaggtcgtgtaaacgagctgcctcctactatgaaaaccgtttctccgtatgcgtgtcaacgccgcaccaccctgaacaaccgtaatcaacgttttacggactcgctggagattcttcgtgaaaattacgagtttaaaggcaacgatgatactgcgctggaatttcgtcgtgctatctccgtgctgaaaagccttccgtttgaggtacgtagcctgaaagacacggaaggattgccctggatcagtgatgaagtcaaagggattatggaagaaatcatcgaagtcggggagtcgcgtgaagtgcaggccgtgctcaatgatgagtggtatcaaagcttccacgcatttacgagtgtctttggagtgggggtgaagacagcagacaagtggtaccgtatgggtctgcgcaccctcgaggatgttcgttccagcaagaccctgaagttgaccccgatgcagaaagtaggtctgctgtattatgaagatcttgctcgcggcgttacgcgtgccgaagctgacgcgatttggctgctggttcaggatgcagtcgcaactttcgacccggatgcgatcgtggagattgtcggtggatttcgtcgtgggaaacctcagggtcacgacgttgatctgcttatcagttctccgggagctgagaaagagcaagaagaccaactcctgcagaaagtgatgaatctgtggaagaaacaagggttgttgctgtgtggtcgtctgttttggagtcagtgggaagatgggggttcgccttccggtaaggctgacgagggtgacgcggaggcgtcgtgctttctgatcctcaaactttatgatcatctggtgcgtaaaagtaaacgcaatatgccgactggttcgaacatgggcgagtccaaaccgtggaaagcaattcgcgtagatctgctgcgttgcccctatggcagttttgcgtttgcgatgttgcagtggaccggaagccgcatgttccgtcgtgatctgcgctggtacgccctggaagagaagaacatgatgctggacaatcattcgctgtatgacatgacccgcggtatcttcctccctgctaaatcggaagaggaaattttcgaacatctggggcttgaatacctggaaccgttcgaacgtaacgca

SEQ ID NO: 3800 - protein, 529 aa, synthetic construct
  REGION 1..529: note = Variant of terminal deoxynucleotidyltransferase
MHHHHHHGGSGSHGIRTIDSDFGKKQQKKGDNHDSSATYEIKFHEFVLFILEEKMGATRRTFLTDLARKKGFRVENELTDEVTHIVAENLSRSEVLAWLKEHKMEKTKQFELLDISWLIESMKVGKPVDTKGKYQLAESVEVSANPDPTEGRVNELPPTMKTVSPYACQRRTTLNNRNQRFTDSLEILRENYEFKGNDDTALEFRRAISVLKSLPFEVRSLKDTEGLPWISDEVKGIMEEIIEVGESREVQAVLNDEWYQSFHAFTSVFGVGVKTADKWYRMGLRTLEDVRSSKTLKLTPMQKVGLLYYEDLARGVTRAEADAIWLLVQDAVATFDPDAIVEIVGGFRRGKPQGHDVDLLISSPGAEKEQEDQLLQKVMNLWKKQGLLLCGRLFWSQWEDGGSPSGKADEGDAEASCFLILKLYDHLVRKSKRNMPTGSNMGESKPWKAIRVDLLRCPYGSFAFAMLQWTGSRMFRRDLRWYALEEKNMMLDNHSLYDMTRGIFLPAKSEEEIFEHLGLEYLEPFERNA

SEQ ID NO: 3801 - DNA, 1587 bp, synthetic construct
  misc_feature 1..1587: note = Variant of terminal deoxynucleotidyltransferase
  source 1..1587: mol_type = other DNA
atgcaccatcatcatcatcatggcggtagcggcagccacggcattcgtaccatcgattcggacttcgggaagaaacagcagaaaaaaggcgataaccacgatagttccgccacttatgaaatcaaatttcacgagtttgtgctgttcattctcgaagaaaaaatgggtgcgacgcgtcgtacttttctgacagatttagcccgcaagaaagggttccgcgtcgagaatgaactgaccgacgaagttacccacatcgtggcagaaaatctgtcacgctctgaagtattggcttggctgaaagaacacaagatggagaagaccaagcaattcgaactgctggatattagctggcttatcgaaagcatgaaagttggtaaaccggtggacaccaaggggaaataccagttggcggaatcggttgaggtgagtgcgaacccagatccgacagaaggtcgtgtaaacgagctgcctcctactatgaaaaccgtttctccgtatgcgtgtcaacgccgcaccaccctgaacaaccgtaatcaacgttttacggactcgctggagattcttcgtgaaaattacgagctgaaaggcaacgatgatactgcgctggaatttcgtcgtgctatctccgtgctgaaaagccttccgtttgaggtacgtagcctgaaagacacggaaggattgccctggatcagtgatgaagtcaaagggattatggaagaaatcatcgaagtcggggagtcgcgtgaagtgcaggccgtgctcaatgatgagtggtatcaaagcttccacgcatttacgagtgtctttggagtgggggtgaagacagcagacaagtggtaccgtatgggtctgcgcaccctcgaggatgttcgttccagcaagaccctgaagttgaccccgatgcagaaagtaggtctgctgtattatgaagatcttgctcgcggcgttacgcgtgccgaagctgacgcgatttggctgctggttcaggatgcagtcgcaactttcgacccggatgcgatcgtggagattgtcggtggatttcgtcgtgggaaacctcagggtcacgacgttgatctgcttatcagttctccgggagctgagaaagagcaagaagaccaactcctgcagaaagtgatgaatctgtggaagaaacaagggttgttgctgtgtggtcgtctggaatggagtcagtgggaagatgggggttcgccttccggtaaggctgacgagggtgacgcggaggcgtcgtgctttctgatcctcaaactttatgatcatctggtgcgtaaaagtaaacgcaatatgccgactggttcgaacatgggcgagtccaaaccgtggaaagcaattcgcgtagatctgctgcgttgcccctatggcagttttgcgtttgcgatgttgcagtggaccggaagccgcatgttccgtcgtgatctgaaatggtacgccctggaagagaagaacatgatgctggacaatcattcgctgtatgacatgacccgcggtatcttcctccctgctaaatcggaagaggaaattttcgaacatctggggcttgaatacctggaaccgttcgaacgtaacgca

SEQ ID NO: 3802 - protein, 529 aa, synthetic construct
  REGION 1..529: note = Variant of terminal deoxynucleotidyltransferase
MHHHHHHGGSGSHGIRTIDSDFGKKQQKKGDNHDSSATYEIKFHEFVLFILEEKMGATRRTFLTDLARKKGFRVENELTDEVTHIVAENLSRSEVLAWLKEHKMEKTKQFELLDISWLIESMKVGKPVDTKGKYQLAESVEVSANPDPTEGRVNELPPTMKTVSPYACQRRTTLNNRNQRFTDSLEILRENYELKGNDDTALEFRRAISVLKSLPFEVRSLKDTEGLPWISDEVKGIMEEIIEVGESREVQAVLNDEWYQSFHAFTSVFGVGVKTADKWYRMGLRTLEDVRSSKTLKLTPMQKVGLLYYEDLARGVTRAEADAIWLLVQDAVATFDPDAIVEIVGGFRRGKPQGHDVDLLISSPGAEKEQEDQLLQKVMNLWKKQGLLLCGRLEWSQWEDGGSPSGKADEGDAEASCFLILKLYDHLVRKSKRNMPTGSNMGESKPWKAIRVDLLRCPYGSFAFAMLQWTGSRMFRRDLKWYALEEKNMMLDNHSLYDMTRGIFLPAKSEEEIFEHLGLEYLEPFERNA

SEQ ID NO: 3803 - DNA, 1587 bp, synthetic construct
  misc_feature 1..1587: note = Variant of terminal deoxynucleotidyltransferase
  source 1..1587: mol_type = other DNA
atgcaccatcatcatcatcatggcggtagcggcagccacggcattcgtaccatcgattcggacttcgggaagaaacagcagaaaaaaggcgataaccacgatagttccgccacttatgaaatcaaatttcacgagtttgtgctgttcattctcgaagaaaaaatgggtgcgacgcgtcgtacttttctgacagatttagcccgcaagaaagggttccgcgtcgagaatgaactgaccgacgaagttacccacatcgtggcagaaaatctgtcacgctctgaagtattggcttggctgaaagaacacaagatggagaagaccaagcaattcgaactgctggatattagctggcttatcgaaagcatgaaagttggtaaaccggtggacaccaaggggaaataccagttggcggaatcggttgaggtgagtgcgaacccagatccgacagaaggtcgtgtaaacgagctgcctcctactatgaaaaccgtttctccgtatgcgtgtcaacgccgcaccaccctgaacaaccgtaatcaacgttttacggactcgctggagattcttcgtgaaaattacgagctgaaaggcaacgatgatactgcgctggaatttcgtcgtgctatctccgtgctgaaaagccttccgtttgaggtacgtagcctgaaagacacggaaggattgccctggatcagtgatgaagtcaaagggattatggaagaaatcatcgaagtcggggagtcgcgtgaagtgcaggccgtgctcaatgatgagtggtatcaaagcttccacgcatttacgagtgtctttggagtgggggtgaagacagcagacaagtggtaccgtatgggtctgcgcaccctcgaggatgttcgttccagcaagaccctgaagttgaccccgatgcagaaagtaggtctgctgtattatgaagatcttgctcgcggcgttacgcgtgccgaagctgacgcgatttggctgctggttcaggatgcagtcgcaactttcgacccggatgcgatcgtggagattgtcggtggatttcgtcgtgggaaacctcagggtcacgacgttgatctgcttatcagttctccgggagctgagaaagagcaagaagaccaactcctgcagaaagtgatgaatctgtggaagaaacaagggttgttgctgtgtggtcgtctgttttggagtcagtgggaagatgggggttcgccttccggtaaggctgacgagggtgacgcggaggcgtcgtgctttctgatcctcaaactttatgatcatctggtgcgtaaaagtaaacgcaatatgccgactggttcgaacatgggcgagtccaaaccgtggaaagcaattcgcgtagatctgctgcgttgcccctatggcagttttgcgtttgcgatgttgcagtggaccggaagccgcatgttccgtcgtgatctgaaatggtacgccctggaagagaagaacatgatgctggacaatcattcgctgtatgacatgacccgcggtatcttcctccctgctaaatcggaagaggaaattttcgaacatctggggcttgaatacctggaaccgttcgaacgtaacgca

SEQ ID NO: 3804 - protein, 529 aa, synthetic construct
  REGION 1..529: note = Variant of terminal deoxynucleotidyltransferase
MHHHHHHGGSGSHGIRTIDSDFGKKQQKKGDNHDSSATYEIKFHEFVLFILEEKMGATRRTFLTDLARKKGFRVENELTDEVTHIVAENLSRSEVLAWLKEHKMEKTKQFELLDISWLIESMKVGKPVDTKGKYQLAESVEVSANPDPTEGRVNELPPTMKTVSPYACQRRTTLNNRNQRFTDSLEILRENYELKGNDDTALEFRRAISVLKSLPFEVRSLKDTEGLPWISDEVKGIMEEIIEVGESREVQAVLNDEWYQSFHAFTSVFGVGVKTADKWYRMGLRTLEDVRSSKTLKLTPMQKVGLLYYEDLARGVTRAEADAIWLLVQDAVATFDPDAIVEIVGGFRRGKPQGHDVDLLISSPGAEKEQEDQLLQKVMNLWKKQGLLLCGRLFWSQWEDGGSPSGKADEGDAEASCFLILKLYDHLVRKSKRNMPTGSNMGESKPWKAIRVDLLRCPYGSFAFAMLQWTGSRMFRRDLKWYALEEKNMMLDNHSLYDMTRGIFLPAKSEEEIFEHLGLEYLEPFERNA

SEQ ID NO: 3805 - DNA, 1587 bp, synthetic construct
  misc_feature 1..1587: note = Variant of terminal deoxynucleotidyltransferase
  source 1..1587: mol_type = other DNA
atgcaccatcatcatcatcatggcggtagcggcagccacggcattcgtaccatcgattcggacttcgggaagaaacagcagaaaaaaggcgataaccacgatagttccgccacttatgaaatcaaatttcacgagtttgtgctgttcattctcgaagaaaaaatgggtgcgacgcgtcgtacttttctgacagatttagcccgcaagaaagggttccgcgtcgagaatgaactgaccgacgaagttacccacatcgtggcagaaaatctgtcacgctctgaagtattggcttggctgaaagaacacaagatggagaagaccaagcaattcgaactgctggatattagctggcttatcgaaagcatgaaagttggtaaaccggtggacaccaaggggaaataccagttggcggaatcggttgaggtgagtgcgaacccagatccgacagaaggtcgtgtaaacgagctgcctcctactatgaaaaccgtttctccgtatgcgtgtcaacgccgcaccaccctgaacaaccgtaatcaacgttttacggactcgctggagattcttcgtgaaaattacgagctgaaaggcaacgatgatactgcgctggaatttcgtcgtgctatctccgtgctgaaaagccttccgtttgaggtacgtagcctgaaagacacggaaggattgccctggatcagtgatgaagtcaaagggattatggaagaaatcatcgaagtcggggagtcgcgtgaagtgcaggccgtgctcaatgatgagtggtatcaaagcttccacgcatttacgagtgtctttggagtgggggtgaagacagcagacaagtggtaccgtatgggtctgcgcaccctcgaggatgttcgttccagcaagaccctgaagttgaccccgatgcagaaagtaggtctgctgtattatgaagatcttgctcgcggcgttacgcgtgccgaagctgacgcgatttggctgctggttcaggatgcagtcgcaactttcgacccggatgcgatcgtggagattgtcggtggatttcgtcgtgggaaacctcagggtcacgacgttgatctgcttatcagttctccgggagctgagaaagagcaagaagaccaactcctgcagaaagtgatgaatctgtggaagaaacaagggttgttgctgtgtggtcgtctggaatggagtcagtgggaagatgggggttcgccttccggtaaggctgacgagggtgacgcggaggcgtcgtgctttctgatcctcaaactttatgatcatctggtgcgtaaaagtaaacgcaatatgccgactggttcgaacatgggcgagtccaaaccgtggaaagcaattcgcgtagatatgctgcgttgcccctatggcagttttgcgtttgcgatgttgcagtggaccggaagccgcatgttccgtcgtgatctgaaatggtacgccctggaagagaagaacatgatgctggacaatcattcgctgtatgacatgacccgcggtatcttcctccctgctaaatcggaagaggaaattttcgaacatctggggcttgaatacctggaaccgttcgaacgtaacgca

SEQ ID NO: 3806 - protein, 529 aa, synthetic construct
  REGION 1..529: note = Variant of terminal deoxynucleotidyltransferase
MHHHHHHGGSGSHGIRTIDSDFGKKQQKKGDNHDSSATYEIKFHEFVLFILEEKMGATRRTFLTDLARKKGFRVENELTDEVTHIVAENLSRSEVLAWLKEHKMEKTKQFELLDISWLIESMKVGKPVDTKGKYQLAESVEVSANPDPTEGRVNELPPTMKTVSPYACQRRTTLNNRNQRFTDSLEILRENYELKGNDDTALEFRRAISVLKSLPFEVRSLKDTEGLPWISDEVKGIMEEIIEVGESREVQAVLNDEWYQSFHAFTSVFGVGVKTADKWYRMGLRTLEDVRSSKTLKLTPMQKVGLLYYEDLARGVTRAEADAIWLLVQDAVATFDPDAIVEIVGGFRRGKPQGHDVDLLISSPGAEKEQEDQLLQKVMNLWKKQGLLLCGRLEWSQWEDGGSPSGKADEGDAEASCFLILKLYDHLVRKSKRNMPTGSNMGESKPWKAIRVDMLRCPYGSFAFAMLQWTGSRMFRRDLKWYALEEKNMMLDNHSLYDMTRGIFLPAKSEEEIFEHLGLEYLEPFERNA

SEQ ID NO: 3807 - DNA, 1587 bp, synthetic construct
  misc_feature 1..1587: note = Variant of terminal deoxynucleotidyltransferase
  source 1..1587: mol_type = other DNA
atgcaccatcatcatcatcatggcggtagcggcagccacggcattcgtaccatcgattcggacttcgggaagaaacagcagaaaaaaggcgataaccacgatagttccgccacttatgaaatcaaatttcacgagtttgtgctgttcattctcgaagaaaaaatgggtgcgacgcgtcgtacttttctgacagatttagcccgcaagaaagggttccgcgtcgagaatgaactgaccgacgaagttacccacatcgtggcagaaaatctgtcacgctctgaagtattggcttggctgaaagaacacaagatggagaagaccaagcaattcgaactgctggatattagctggcttatcgaaagcatgaaagttggtaaaccggtggacaccaaggggaaataccagttggcggaatcggttgaggtgagtgcgaacccagatccgacagaaggtcgtgtaaacgagctgcctcctactatgaaaaccgtttctccgtatgcgtgtcaacgccgcaccaccctgaacaaccgtaatcaacgttttacggactcgctggagattcttcgtgaaaattacgagttcaaacgcaacgatgatactgcgctggaatttcgtcgtgctatctccgtgctgaaaagccttccgtttgaggtacgtagcctgaaagacacggaaggattgccctggatcagtgatgaagtcaaagggattatggaagaaatcatcgaagtcggggagtcgcgtgaagtgcaggccgtgctcaatgatgagtggtatcaaagcttccacgcatttacgagtgtctttggagtgggggtgaagacagcagacaagtggtaccgtatgggtctgcgcaccctcgaggatgttcgttccagcaagaccctgaagttgaccccgatgcagaaagtaggtctgctgtattatgaagatcttgctcgcggcgttacgcgtgccgaagctgacgcgatttggctgctggttcaggatgcagtcgcaactttcgacccggatgcgatcgtggagattgtcggtggatttcgtcgtgggaaacctcagggtcacgacgttgatctgcttatcagttctccgggagctgagaaagagcaagaagaccaactcctgcagaaagtgatgaatctgtggaagaaacaagggttgttgctgtgtggtcgtctgttttggagtcagtgggaagatgggggttcgccttccggtaaggctgacgagggtgacgcggaggcgtcgtgctttctgatcctcaaactttatgatcatctggtgcgtaaaagtaaacgcaatatgccgactggttcgaacatgggcgagtccaaaccgtggaaagcaattcgcgtagatctgctgcgttgcccctatggcagttttgcgtttgcgatgttgcagtggaccggaagccgcatgttccgtcgtgatctgcgttggtacgccctggaagagaagaacatgatgctggacaatcattcgctgtatgacatgacccgcggtatcttcctccctgctaaatcggaagaggaaattttcgaacatctggggcttgaatacctggaaccgttcgaacgtaacgca

SEQ ID NO: 3808 - protein, 529 aa, synthetic construct
  REGION 1..529: note = Variant of terminal deoxynucleotidyltransferase
MHHHHHHGGSGSHGIRTIDSDFGKKQQKKGDNHDSSATYEIKFHEFVLFILEEKMGATRRTFLTDLARKKGFRVENELTDEVTHIVAENLSRSEVLAWLKEHKMEKTKQFELLDISWLIESMKVGKPVDTKGKYQLAESVEVSANPDPTEGRVNELPPTMKTVSPYACQRRTTLNNRNQRFTDSLEILRENYEFKRNDDTALEFRRAISVLKSLPFEVRSLKDTEGLPWISDEVKGIMEEIIEVGESREVQAVLNDEWYQSFHAFTSVFGVGVKTADKWYRMGLRTLEDVRSSKTLKLTPMQKVGLLYYEDLARGVTRAEADAIWLLVQDAVATFDPDAIVEIVGGFRRGKPQGHDVDLLISSPGAEKEQEDQLLQKVMNLWKKQGLLLCGRLFWSQWEDGGSPSGKADEGDAEASCFLILKLYDHLVRKSKRNMPTGSNMGESKPWKAIRVDLLRCPYGSFAFAMLQWTGSRMFRRDLRWYALEEKNMMLDNHSLYDMTRGIFLPAKSEEEIFEHLGLEYLEPFERNA

SEQ ID NO: 3809 - DNA, 1587 bp, synthetic construct
  misc_feature 1..1587: note = Variant of terminal deoxynucleotidyltransferase
  source 1..1587: mol_type = other DNA
atgcaccatcatcatcatcatggcggtagcggcagccacggcattcgtaccatcgattcggacttcgggaagaaacagcagaaaaaaggcgataaccacgatagttccgccacttatgaaatcaaatttcacgagtttgtgctgttcattctcgaagaaaaaatgggtgcgacgcgtcgtacttttctgacagatttagcccgcaagaaagggttccgcgtcgagaatgaactgaccgacgaagttacccacatcgtggcagaaaatctgtcacgctctgaagtattggcttggctgaaagaacacaagatggagaagaccaagcaattcgaactgctggatattagctggcttatcgaaagcatgaaagttggtaaaccggtggacaccaaggggaaataccagttggcggaatcggttgaggtgagtgcgaacccagatccgacagaaggtcgtgtaaacgagctgcctcctactatgaaaaccgtttctccgtatgcgtgtcaacgccgcaccaccctgaacaaccgtaatcaacgttttacggactcgctggagattcttcgtgaaaattacgagtttaaaggcaacgatgatactgcgctggaatttcgtcgtgctatctccgtgctgaaaagccttccgtttgaggtacgtagcctgaaagacacggaaggattgccctggatcagtgatgaagtcaaagggattatggaagaaatcatcgaagtcggggagtcgcgtgaagtgcaggccgtgctcaatgatgagtggtatcaaagcttccacgcatttacgagtgtctttggagtgggggtgaagacagcagacaagtggtaccgtatgggtctgcgcaccctcgaggatgttcgttccagcaagaccctgaagttgaccccgatgcagaaagtaggtctgctgtattatgaagatcttgctcgcggcgttacgcgtgccgaagctgacgcgatttggctgctggttcaggatgcagtcgcaactttcgacccggatgcgatcgtggagattgtcggtggatttcgtcgtgggaaacctcagggtcacgacgttgatctgcttatcagttctccgggagctgagaaagagcaagaagaccaactcctgcagaaagtgatgaatctgtggaagaaacaagggttgttgctgtgtggtcgtctgttttggagtcagtgggaagatgggggttcgccttccggtaaggctgacgagggtgacgcggaggcgtcgtgctttctgatcctcaaactttatgatcatctggtgcgtaaaagtaaacgcaatatgccgactggttcgaacatgggcgagtccaaaccgtggaaagcaattcgcgtagatctgctgcgttgcccctatggcagttttgcgtttgcgatgttgcagtggaccggaagccgcatgttccgtcgtgatctgaaatggtacgccctggaagagaagaacatgatgctggacaatcattcgctgtatgacatgacccgcggtatcttcctccctgctaaatcggaagaggaaattttcgaacatctggggcttgaatacctggaaccgttcgaacgtaacgca

SEQ ID NO: 3810 - protein, 529 aa, synthetic construct
  REGION 1..529: note = Variant of terminal deoxynucleotidyltransferase
MHHHHHHGGSGSHGIRTIDSDFGKKQQKKGDNHDSSATYEIKFHEFVLFILEEKMGATRRTFLTDLARKKGFRVENELTDEVTHIVAENLSRSEVLAWLKEHKMEKTKQFELLDISWLIESMKVGKPVDTKGKYQLAESVEVSANPDPTEGRVNELPPTMKTVSPYACQRRTTLNNRNQRFTDSLEILRENYEFKGNDDTALEFRRAISVLKSLPFEVRSLKDTEGLPWISDEVKGIMEEIIEVGESREVQAVLNDEWYQSFHAFTSVFGVGVKTADKWYRMGLRTLEDVRSSKTLKLTPMQKVGLLYYEDLARGVTRAEADAIWLLVQDAVATFDPDAIVEIVGGFRRGKPQGHDVDLLISSPGAEKEQEDQLLQKVMNLWKKQGLLLCGRLFWSQWEDGGSPSGKADEGDAEASCFLILKLYDHLVRKSKRNMPTGSNMGESKPWKAIRVDLLRCPYGSFAFAMLQWTGSRMFRRDLKWYALEEKNMMLDNHSLYDMTRGIFLPAKSEEEIFEHLGLEYLEPFERNA

SEQ ID NO: 3811 - DNA, 1587 bp, synthetic construct
  misc_feature 1..1587: note = Variant of terminal deoxynucleotidyltransferase
  source 1..1587: mol_type = other DNA
atgcaccatcatcatcatcatggcggtagcggcagccacggcattcgtaccatcgattcggacttcgggaagaaacagcagaaaaaaggcgataaccacgatagttccgccacttatgaaatcaaatttcacgagtttgtgctgttcattctcgaagaaaaaatgggtgcgacgcgtcgtacttttctgacagatttagcccgcaagaaagggttccgcgtcgagaatgaactgaccgacgaagttacccacatcgtggcagaaaatctgtcacgctctgaagtattggcttggctgaaagaacacaagatggagaagaccaagcaattcgaactgctggatattagctggcttatcgaaagcatgaaagttggtaaaccggtggacaccaaggggaaataccagttggcggaatcggttgaggtgagtgcgaacccagatccgacagaaggtcgtgtaaacgagctgcctcctactatgaaaaccgtttctccgtatgcgtgtcaacgccgcaccaccctgaacaaccgtaatcaacgttttacggactcgctggagattcttcgtgaaaattacgagctgaaacgtaacgatgatactgcgctggaatttcgtcgtgctatctccgtgctgaaaagccttccgtttgaggtacgtagcctgaaagacacggaaggattgccctggatcagtgatgaagtcaaagggattatggaagaaatcatcgaagtcggggagtcgcgtgaagtgcaggccgtgctcaatgatgagtggtatcaaagcttccacgcatttacgagtgtctttggagtgggggtgaagacagcagacaagtggtaccgtatgggtctgcgcaccctcgaggatgttcgttccagcaagaccctgaagttgaccccgatgcagaaagtaggtctgctgtattatgaagatcttgctcgcggcgttacgcgtgccgaagctgacgcgatttggctgctggttcaggatgcagtcgcaactttcgacccggatgcgatcgtggagattgtcggtggatttcgtcgtgggaaacctcagggtcacgacgttgatctgcttatcagttctccgggagctgagaaagagcaagaagaccaactcctgcagaaagtgatgaatctgtggaagaaacaagggttgttgctgtgtggtcgtctggaatggagtcagtgggaagatgggggttcgccttccggtaaggctgacgagggtgacgcggaggcgtcgtgctttctgatcctcaaactttatgatcatctggtgcgtaaaagtaaacgcaatatgccgactggttcgaacatgggcgagtccaaaccgtggaaagcaattcgcgtagatctgctgcgttgcccctatggcagttttgcgtttgcgatgttgcagtggaccggaagccgcatgttccgtcgtgatctgcgctggtacgccctggaagagaagaacatgatgctggacaatcattcgctgtatgacatgacccgcggtatcttcctccctgctaaatcggaagaggaaattttcgaacatctggggcttgaatacctggaaccgttcgaacgtaacgca

SEQ ID NO: 3812 - protein, 529 aa, synthetic construct
  REGION 1..529: note = Variant of terminal deoxynucleotidyltransferase
MHHHHHHGGSGSHGIRTIDSDFGKKQQKKGDNHDSSATYEIKFHEFVLFILEEKMGATRRTFLTDLARKKGFRVENELTDEVTHIVAENLSRSEVLAWLKEHKMEKTKQFELLDISWLIESMKVGKPVDTKGKYQLAESVEVSANPDPTEGRVNELPPTMKTVSPYACQRRTTLNNRNQRFTDSLEILRENYELKRNDDTALEFRRAISVLKSLPFEVRSLKDTEGLPWISDEVKGIMEEIIEVGESREVQAVLNDEWYQSFHAFTSVFGVGVKTADKWYRMGLRTLEDVRSSKTLKLTPMQKVGLLYYEDLARGVTRAEADAIWLLVQDAVATFDPDAIVEIVGGFRRGKPQGHDVDLLISSPGAEKEQEDQLLQKVMNLWKKQGLLLCGRLEWSQWEDGGSPSGKADEGDAEASCFLILKLYDHLVRKSKRNMPTGSNMGESKPWKAIRVDLLRCPYGSFAFAMLQWTGSRMFRRDLRWYALEEKNMMLDNHSLYDMTRGIFLPAKSEEEIFEHLGLEYLEPFERNA

SEQ ID NO: 3813 - DNA, 1587 bp, synthetic construct
  misc_feature 1..1587: note = Variant of terminal deoxynucleotidyltransferase
  source 1..1587: mol_type = other DNA
atgcaccatcatcatcatcatggcggtagcggcagccacggcattcgtaccatcgattcggacttcgggaagaaacagcagaaaaaaggcgataaccacgatagttccgccacttatgaaatcaaatttcacgagtttgtgctgttcattctcgaagaaaaaatgggtgcgacgcgtcgtacttttctgacagatttagcccgcaagaaagggttccgcgtcgagaatgaactgaccgacgaagttacccacatcgtggcagaaaatctgtcacgctctgaagtattggcttggctgaaagaacacaagatggagaagaccaagcaattcgaactgctggatattagctggcttatcgaaagcatgaaagttggtaaaccggtggacaccaaggggaaataccagttggcggaatcggttgaggtgagtgcgaacccagatccgacagaaggtcgtgtaaacgagctgcctcctactatgaaaaccgtttctccgtatgcgtgtcaacgccgcaccaccctgaacaaccgtaatcaacgttttacggactcgctggagattcttcgtgaaaattacgagctgaaaggcaacgatgatactgcgctggaatttcgtcgtgctatctccgtgctgaaaagccttccgtttgaggtacgtagcctgaaagacacggaaggattgccctggatcagtgatgaagtcaaagggattatggaagaaatcatcgaagtcggggagtcgcgtgaagtgcaggccgtgctcaatgatgagtggtatcaaagcttccacgcatttacgagtgtctttggagtgggggtgaagacagcagacaagtggtaccgtatgggtctgcgcaccctcgaggatgttcgttccagcaagaccctgaagttgaccccgatgcagaaagtaggtctgctgtattatgaagatcttgctcgcggcgttacgcgtgccgaagctgacgcgatttggctgctggttcaggatgcagtcgcaactttcgacccggatgcgatcgtggagattgtcggtggatttcgtcgtgggaaacctcagggtcacgacgttgatctgcttatcagttctccgggagctgagaaagagcaagaagaccaactcctgcagaaagtgatgaatctgtggaagaaacaagggttgttgctgtgtggtcgtctgttttggagtcagtgggaagatgggggttcgccttccggtaaggctgacgagggtgacgcggaggcgtcgtgctttctgatcctcaaactttatgatcatctggtgcgtaaaagtaaacgcaatatgccgactggttcgaacatgggcgagtccaaaccgtggaaagcaattcgcgtagatctgctgcgttgcccctatgtcagttttgcgtttgcgatgttgcagtggaccggaagccgcatgttccgtcgtgatctgaaatggtacgccctggaagagaagaacatgatgctggacaatcattcgctgtatgacatgacccgcggtatcttcctccctgctaaatcggaagaggaaattttcgaacatctggggcttgaatacctggaaccgttcgaacgtaacgca

SEQ ID NO: 3814 - protein, 529 aa, synthetic construct
  REGION 1..529: note = Variant of terminal deoxynucleotidyltransferase
MHHHHHHGGSGSHGIRTIDSDFGKKQQKKGDNHDSSATYEIKFHEFVLFILEEKMGATRRTFLTDLARKKGFRVENELTDEVTHIVAENLSRSEVLAWLKEHKMEKTKQFELLDISWLIESMKVGKPVDTKGKYQLAESVEVSANPDPTEGRVNELPPTMKTVSPYACQRRTTLNNRNQRFTDSLEILRENYELKGNDDTALEFRRAISVLKSLPFEVRSLKDTEGLPWISDEVKGIMEEIIEVGESREVQAVLNDEWYQSFHAFTSVFGVGVKTADKWYRMGLRTLEDVRSSKTLKLTPMQKVGLLYYEDLARGVTRAEADAIWLLVQDAVATFDPDAIVEIVGGFRRGKPQGHDVDLLISSPGAEKEQEDQLLQKVMNLWKKQGLLLCGRLFWSQWEDGGSPSGKADEGDAEASCFLILKLYDHLVRKSKRNMPTGSNMGESKPWKAIRVDLLRCPYVSFAFAMLQWTGSRMFRRDLKWYALEEKNMMLDNHSLYDMTRGIFLPAKSEEEIFEHLGLEYLEPFERNA

SEQ ID NO: 3815 - DNA, 1587 bp, synthetic construct
  misc_feature 1..1587: note = Variant of terminal deoxynucleotidyltransferase
  source 1..1587: mol_type = other DNA
atgcaccatcatcatcatcatggcggtagcggcagccacggcattcgtaccatcgattcggacttcgggaagaaacagcagaaaaaaggcgataaccacgatagttccgccacttatgaaatcaaatttcacgagtttgtgctgttcattctcgaagaaaaaatgggtgcgacgcgtcgtacttttctgacagatttagcccgcaagaaagggttccgcgtcgagaatgaactgaccgacgaagttacccacatcgtggcagaaaatctgtcacgctctgaagtattggcttggctgaaagaacacaagatggagaagaccaagcaattcgaactgctggatattagctggcttatcgaaagcatgaaagttggtaaaccggtggacaccaaggggaaataccagttggcggaatcggttgaggtgagtgcgaacccagatccgacagaaggtcgtgtaaacgagctgcctcctactatgaaaaccgtttctccgtatgcgtgtcaacgccgcaccaccctgaacaaccgtaatcaacgttttacggactcgctggagattcttcgtgaaaattacgagtttaaaggcaacgatgatactgcgctggaatttcgtcgtgctatctccgtgctgaaaagccttccgtttgaggtacgtagcctgaaagacacggaaggattgccctggatcagtgatgaagtcaaagggattatggaagaaatcatcgaagtcggggagtcgcgtgaagtgcaggccgtgctcaatgatgagtggtatcaaagcttccacgcatttacgagtgtctttggagtgggggtgaagacagcagacaagtggtaccgtatgggtctgcgcaccctcgaggatgttcgttccagcaagaccctgaagttgaccccgatgcagaaagtaggtctgctgtattatgaagatcttgctcgcggcgttacgcgtgccgaagctgacgcgatttggctgctggttcaggatgcagtcgcaactttcgacccggatgcgatcgtggagattgtcggtggatttcgtcgtgggaaacctcagggtcacgacgttgatctgcttatcagttctccgggagctgagaaagagcaagaagaccaactcctgcagaaagtgatgaatctgtggaagaaacaagggttgttgctgtgtggtcgtctgttttggagtcagtgggaagatgggggttcgccttccggtaaggctgacgagggtgacgcggaggcgtcgtgctttctgatcctcaaactttatgatcatctggtgcgtaaaagtaaacgcaatatgccgactggttcgaacatgggcgagtccaaaccgtggaaagcaattcgcgtagatatgctgcgttgcccctatggcagttttgcgtttgcgatgttgcagtggaccggaagccgcatgttccgtcgtgatctgaaatggtacgccctggaagagaagaacatgatgctggacaatcattcgctgtatgacatgacccgcggtatcttcctccctgctaaatcggaagaggaaattttcgaacatctggggcttgaatacctggaaccgttcgaacgtaacgca

SEQ ID NO: 3816 - protein, 529 aa, synthetic construct
  REGION 1..529: note = Variant of terminal deoxynucleotidyltransferase
MHHHHHHGGSGSHGIRTIDSDFGKKQQKKGDNHDSSATYEIKFHEFVLFILEEKMGATRRTFLTDLARKKGFRVENELTDEVTHIVAENLSRSEVLAWLKEHKMEKTKQFELLDISWLIESMKVGKPVDTKGKYQLAESVEVSANPDPTEGRVNELPPTMKTVSPYACQRRTTLNNRNQRFTDSLEILRENYEFKGNDDTALEFRRAISVLKSLPFEVRSLKDTEGLPWISDEVKGIMEEIIEVGESREVQAVLNDEWYQSFHAFTSVFGVGVKTADKWYRMGLRTLEDVRSSKTLKLTPMQKVGLLYYEDLARGVTRAEADAIWLLVQDAVATFDPDAIVEIVGGFRRGKPQGHDVDLLISSPGAEKEQEDQLLQKVMNLWKKQGLLLCGRLFWSQWEDGGSPSGKADEGDAEASCFLILKLYDHLVRKSKRNMPTGSNMGESKPWKAIRVDMLRCPYGSFAFAMLQWTGSRMFRRDLKWYALEEKNMMLDNHSLYDMTRGIFLPAKSEEEIFEHLGLEYLEPFERNA

SEQ ID NO: 3817 - DNA, 1587 bp, synthetic construct
  misc_feature 1..1587: note = Variant of terminal deoxynucleotidyltransferase
  source 1..1587: mol_type = other DNA
atgcaccatcatcatcatcatggcggtagcggcagccacggcattcgtaccatcgattcggacttcgggaagaaacagcagaaaaaaggcgataaccacgatagttccgccacttatgaaatcaaatttcacgagtttgtgctgttcattctcgaagaaaaaatgggtgcgacgcgtcgtacttttctgacagatttagcccgcaagaaagggttccgcgtcgagaatgaactgaccgacgaagttacccacatcgtggcagaaaatctgtcacgctctgaagtattggcttggctgaaagaacacaagatggagaagaccaagcaattcgaactgctggatattagctggcttatcgaaagcatgaaagttggtaaaccggtggacaccaaggggaaataccagttggcggaatcggttgaggtgagtgcgaacccagatccgacagaaggtcgtgtaaacgagctgcctcctactatgaaaaccgtttctccgtatgcgtgtcaacgccgcaccaccctgaacaaccgtaatcaacgttttacggactcgctggagattcttcgtgaaaattacgagtttaaaggcaacgatgatactgcgctggaatttcgtcgtgctatctccgtgctgaaaagccttccgtttgaggtacgtagcctgaaagacacggaaggattgccctggatcagtgatgaagtcaaagggattatggaagaaatcatcgaagtcggggagtcgcgtgaagtgcaggccgtgctcaatgatgagtggtatcaaagcttccacgcatttacgagtgtctttggagtgggggtgaagacagcagacaagtggtaccgtatgggtctgcgcaccctcgaggatgttcgttccagcaagaccctgaagttgaccccgatgcagaaagtaggtctgctgtattatgaagatcttgctcgcggcgttacgcgtgccgaagctgacgcgatttggctgctggttcaggatgcagtcgcaactttcgacccggatgcgatcgtggagattgtcggtggatttcgtcgtgggaaacctcagggtcacgacgttgatctgcttatcagttctccgggagctgagaaagagcaagaagaccaactcctgcagaaagtgatgaatctgtggaagaaacaagggttgttgctgtgtggtcgtctggaatggagtcagtgggaagatgggggttcgccttccggtaaggctgacgagggtgacgcggaggcgtcgtgctttctgatcctcaaactttatgatcatctggtgcgtaaaagtaaacgcaatatgccgactggttcgaacatgggcgagtccaaaccgtggaaagcaattcgcgtagatctgctgcgttgcccctatggcagttttgcgtttgcgatgttgcagtggaccggaagccgcatgttccgtcgtgatctgcgttggtacgccctggaagagaagaacatgatgctggacaatcattcgctgtatgacatgacccgcggtatcttcctccctgctaaatcggaagaggaaattttcgaacatctggggcttgaatacctggaaccgttcgaacgtaacgca

SEQ ID NO: 3818 - protein, 529 aa, synthetic construct
  REGION 1..529: note = Variant of terminal deoxynucleotidyltransferase
MHHHHHHGGSGSHGIRTIDSDFGKKQQKKGDNHDSSATYEIKFHEFVLFILEEKMGATRRTFLTDLARKKGFRVENELTDEVTHIVAENLSRSEVLAWLKEHKMEKTKQFELLDISWLIESMKVGKPVDTKGKYQLAESVEVSANPDPTEGRVNELPPTMKTVSPYACQRRTTLNNRNQRFTDSLEILRENYEFKGNDDTALEFRRAISVLKSLPFEVRSLKDTEGLPWISDEVKGIMEEIIEVGESREVQAVLNDEWYQSFHAFTSVFGVGVKTADKWYRMGLRTLEDVRSSKTLKLTPMQKVGLLYYEDLARGVTRAEADAIWLLVQDAVATFDPDAIVEIVGGFRRGKPQGHDVDLLISSPGAEKEQEDQLLQKVMNLWKKQGLLLCGRLEWSQWEDGGSPSGKADEGDAEASCFLILKLYDHLVRKSKRNMPTGSNMGESKPWKAIRVDLLRCPYGSFAFAMLQWTGSRMFRRDLRWYALEEKNMMLDNHSLYDMTRGIFLPAKSEEEIFEHLGLEYLEPFERNA

SEQ ID NO: 3819 - DNA, 1587 bp, synthetic construct
  misc_feature 1..1587: note = Variant of terminal deoxynucleotidyltransferase
  source 1..1587: mol_type = other DNA
atgcaccatcatcatcatcatggcggtagcggcagccacggcattcgtaccatcgattcggacttcgggaagaaacagcagaaaaaaggcgataaccacgatagttccgccacttatgaaatcaaatttcacgagtttgtgctgttcattctcgaagaaaaaatgggtgcgacgcgtcgtacttttctgacagatttagcccgcaagaaagggttccgcgtcgagaatgaactgaccgacgaagttacccacatcgtggcagaaaatctgtcacgctctgaagtattggcttggctgaaagaacacaagatggagaagaccaagcaattcgaactgctggatattagctggcttatcgaaagcatgaaagttggtaaaccggtggacaccaaggggaaataccagttggcggaatcggttgaggtgagtgcgaacccagatccgacagaaggtcgtgtaaacgagctgcctcctactatgaaaaccgtttctccgtatgcgtgtcaacgccgcaccaccctgaacaaccgtaatcaacgttttacggactcgctggagattcttcgtgaaaattacgagtttaaacgtaacgatgatactgcgctggaatttcgtcgtgctatctccgtgctgaaaagccttccgtttgaggtacgtagcctgaaagacacggaaggattgccctggatcagtgatgaagtcaaagggattatggaagaaatcatcgaagtcggggagtcgcgtgaagtgcaggccgtgctcaatgatgagtggtatcaaagcttccacgcatttacgagtgtctttggagtgggggtgaagacagcagacaagtggtaccgtatgggtctgcgcaccctcgaggatgttcgttccagcaagaccctgaagttgaccccgatgcagaaagtaggtctgctgtattatgaagatcttgctcgcggcgttacgcgtgccgaagctgacgcgatttggctgctggttcaggatgcagtcgcaactttcgacccggatgcgatcgtggagattgtcggtggatttcgtcgtgggaaacctcagggtcacgacgttgatctgcttatcagttctccgggagctgagaaagagcaagaagaccaactcctgcagaaagtgatgaatctgtggaagaaacaagggttgttgctgtgtggtcgtctggaatggagtcagtgggaagatgggggttcgccttccggtaaggctgacgagggtgacgcggaggcgtcgtgctttctgatcctcaaactttatgatcatctggtgcgtaaaagtaaacgcaatatgccgactggttcgaacatgggcgagtccaaaccgtggaaagcaattcgcgtagatctgctgcgttgcccctatggcagttttgcgtttgcgatgttgcagtggaccggaagccgcatgttccgtcgtgatctgcgctggtacgccctggaagagaagaacatgatgctggacaatcattcgctgtatgacatgacccgcggtatcttcctccctgctaaatcggaagaggaaattttcgaacatctggggcttgaatacctggaaccgttcgaacgtaacgca

SEQ ID NO: 3820 - protein, 529 aa, synthetic construct
  REGION 1..529: note = Variant of terminal deoxynucleotidyltransferase
MHHHHHHGGSGSHGIRTIDSDFGKKQQKKGDNHDSSATYEIKFHEFVLFILEEKMGATRRTFLTDLARKKGFRVENELTDEVTHIVAENLSRSEVLAWLKEHKMEKTKQFELLDISWLIESMKVGKPVDTKGKYQLAESVEVSANPDPTEGRVNELPPTMKTVSPYACQRRTTLNNRNQRFTDSLEILRENYEFKRNDDTALEFRRAISVLKSLPFEVRSLKDTEGLPWISDEVKGIMEEIIEVGESREVQAVLNDEWYQSFHAFTSVFGVGVKTADKWYRMGLRTLEDVRSSKTLKLTPMQKVGLLYYEDLARGVTRAEADAIWLLVQDAVATFDPDAIVEIVGGFRRGKPQGHDVDLLISSPGAEKEQEDQLLQKVMNLWKKQGLLLCGRLEWSQWEDGGSPSGKADEGDAEASCFLILKLYDHLVRKSKRNMPTGSNMGESKPWKAIRVDLLRCPYGSFAFAMLQWTGSRMFRRDLRWYALEEKNMMLDNHSLYDMTRGIFLPAKSEEEIFEHLGLEYLEPFERNA

SEQ ID NO: 3821 - DNA, 1587 bp, synthetic construct
  misc_feature 1..1587: note = Variant of terminal deoxynucleotidyltransferase
  source 1..1587: mol_type = other DNA
atgcaccatcatcatcatcatggcggtagcggcagccacggcattcgtaccatcgattcggacttcgggaagaaacagcagaaaaaaggcgataaccacgatagttccgccacttatgaaatcaaatttcacgagtttgtgctgttcattctcgaagaaaaaatgggtgcgacgcgtcgtacttttctgacagatttagcccgcaagaaagggttccgcgtcgagaatgaactgaccgacgaagttacccacatcgtggcagaaaatctgtcacgctctgaagtattggcttggctgaaagaacacaagatggagaagaccaagcaattcgaactgctggatattagctggcttatcgaaagcatgaaagttggtaaaccggtggacaccaaggggaaataccagttggcggaatcggttgaggtgagtgcgaacccagatccgacagaaggtcgtgtaaacgagctgcctcctactatgaaaaccgtttctccgtatgcgtgtcaacgccgcaccaccctgaacaaccgtaatcaacgttttacggactcgctggagattcttcgtgaaaattacgagttcaaacgcaacgatgatactgcgctggaatttcgtcgtgctatctccgtgctgaaaagccttccgtttgaggtacgtagcctgaaagacacggaaggattgccctggatcagtgatgaagtcaaagggattatggaagaaatcatcgaagtcggggagtcgcgtgaagtgcaggccgtgctcaatgatgagtggtatcaaagcttccacgcatttacgagtgtctttggagtgggggtgaagacagcagacaagtggtaccgtatgggtctgcgcaccctcgaggatgttcgttccagcaagaccctgaagttgaccccgatgcagaaagtaggtctgctgtattatgaagatcttgctcgcggcgttacgcgtgccgaagctgacgcgatttggctgctggttcaggatgcagtcgcaactttcgacccggatgcgatcgtggagattgtcggtggatttcgtcgtgggaaacctcagggtcacgacgttgatctgcttatcagttctccgggagctgagaaagagcaagaagaccaactcctgcagaaagtgatgaatctgtggaagaaacaagggttgttgctgtgtggtcgtctgttttggagtcagtgggaagatgggggttcgccttccggtaaggctgacgagggtgacgcggaggcgtcgtgctttctgatcctcaaactttatgatcatctggtgcgtaaaagtaaacgcaatatgccgactggttcgaacatgggcgagtccaaaccgtggaaagcaattcgcgtagatatgctgcgttgcccctatggcagttttgcgtttgcgatgttgcagtggaccggaagccgcatgttccgtcgtgatctgaaatggtacgccctggaagagaagaacatgatgctggacaatcattcgctgtatgacatgacccgcggtatcttcctccctgctaaatcggaagaggaaattttcgaacatctggggcttgaatacctggaaccgttcgaacgtaacgca

SEQ ID NO: 3822 - protein, 529 aa, synthetic construct
  REGION 1..529: note = Variant of terminal deoxynucleotidyltransferase
MHHHHHHGGSGSHGIRTIDSDFGKKQQKKGDNHDSSATYEIKFHEFVLFILEEKMGATRRTFLTDLARKKGFRVENELTDEVTHIVAENLSRSEVLAWLKEHKMEKTKQFELLDISWLIESMKVGKPVDTKGKYQLAESVEVSANPDPTEGRVNELPPTMKTVSPYACQRRTTLNNRNQRFTDSLEILRENYEFKRNDDTALEFRRAISVLKSLPFEVRSLKDTEGLPWISDEVKGIMEEIIEVGESREVQAVLNDEWYQSFHAFTSVFGVGVKTADKWYRMGLRTLEDVRSSKTLKLTPMQKVGLLYYEDLARGVTRAEADAIWLLVQDAVATFDPDAIVEIVGGFRRGKPQGHDVDLLISSPGAEKEQEDQLLQKVMNLWKKQGLLLCGRLFWSQWEDGGSPSGKADEGDAEASCFLILKLYDHLVRKSKRNMPTGSNMGESKPWKAIRVDMLRCPYGSFAFAMLQWTGSRMFRRDLKWYALEEKNMMLDNHSLYDMTRGIFLPAKSEEEIFEHLGLEYLEPFERNA

SEQ ID NO: 3823 - DNA, 1587 bp, synthetic construct
  misc_feature 1..1587: note = Variant of terminal deoxynucleotidyltransferase
  source 1..1587: mol_type = other DNA
atgcaccatcatcatcatcatggcggtagcggcagccacggcattcgtaccatcgattcggacttcgggaagaaacagcagaaaaaaggcgataaccacgatagttccgccacttatgaaatcaaatttcacgagtttgtgctgttcattctcgaagaaaaaatgggtgcgacgcgtcgtacttttctgacagatttagcccgcaagaaagggttccgcgtcgagaatgaactgaccgacgaagttacccacatcgtggcagaaaatctgtcacgctctgaagtattggcttggctgaaagaacacaagatggagaagaccaagcaattcgaactgctggatattagctggcttatcgaaagcatgaaagttggtaaaccggtggacaccaaggggaaataccagttggcggaatcggttgaggtgagtgcgaacccagatccgacagaaggtcgtgtaaacgagctgcctcctactatgaaaaccgtttctccgtatgcgtgtcaacgccgcaccaccctgaacaaccgtaatcaacgttttacggactcgctggagattcttcgtgaaaattacgagtttaaaggcaacgatgatactgcgctggaatttcgtcgtgctatctccgtgctgaaaagccttccgtttgaggtacgtagcctgaaagacacggaaggattgccctggatcagtgatgaagtcaaagggattatggaagaaatcatcgaagtcggggagtcgcgtgaagtgcaggccgtgctcaatgatgagtggtatcaaagcttccacgcatttacgagtgtctttggagtgggggtgaagacagcagacaagtggtaccgtatgggtctgcgcaccctcgaggatgttcgttccagcaagaccctgaagttgaccccgatgcagaaagtaggtctgctgtattatgaagatcttgctcgcggcgttacgcgtgccgaagctgacgcgatttggctgctggttcaggatgcagtcgcaactttcgacccggatgcgatcgtggagattgtcggtggatttcgtcgtgggaaacctcagggtcacgacgttgatctgcttatcagttctccgggagctgagaaagagcaagaagaccaactcctgcagaaagtgatgaatctgtggaagaaacaagggttgttgctgtgtggtcgtctgttttggagtcagtgggaagatgggggttcgccttccggtaaggctgacgagggtgacgcggaggcgtcgtgctttctgatcctcaaactttatgatcatctggtgcgtaaaagtaaacgcaatatgccgactggttcgaacatgggcgagtccaaaccgtggaaagcaattcgcgtagatatgctgcgttgcccctatggcagttttgcgtttgcgatgttgcagtggaccggaagccgcatgttccgtcgtgatctgcgctggtacgccctggaagagaagaacatgatgctggacaatcattcgctgtatgacatgacccgcggtatcttcctccctgctaaatcggaagaggaaattttcgaacatctggggcttgaatacctggaaccgttcgaacgtaacgca

SEQ ID NO: 3824 - protein, 529 aa, synthetic construct
  REGION 1..529: note = Variant of terminal deoxynucleotidyltransferase
MHHHHHHGGSGSHGIRTIDSDFGKKQQKKGDNHDSSATYEIKFHEFVLFILEEKMGATRRTFLTDLARKKGFRVENELTDEVTHIVAENLSRSEVLAWLKEHKMEKTKQFELLDISWLIESMKVGKPVDTKGKYQLAESVEVSANPDPTEGRVNELPPTMKTVSPYACQRRTTLNNRNQRFTDSLEILRENYEFKGNDDTALEFRRAISVLKSLPFEVRSLKDTEGLPWISDEVKGIMEEIIEVGESREVQAVLNDEWYQSFHAFTSVFGVGVKTADKWYRMGLRTLEDVRSSKTLKLTPMQKVGLLYYEDLARGVTRAEADAIWLLVQDAVATFDPDAIVEIVGGFRRGKPQGHDVDLLISSPGAEKEQEDQLLQKVMNLWKKQGLLLCGRLFWSQWEDGGSPSGKADEGDAEASCFLILKLYDHLVRKSKRNMPTGSNMGESKPWKAIRVDMLRCPYGSFAFAMLQWTGSRMFRRDLRWYALEEKNMMLDNHSLYDMTRGIFLPAKSEEEIFEHLGLEYLEPFERNA

SEQ ID NO: 3825 - DNA, 1587 bp, synthetic construct
  misc_feature 1..1587: note = Variant of terminal deoxynucleotidyltransferase
  source 1..1587: mol_type = other DNA
atgcaccatcatcatcatcatggcggtagcggcagccacggcattcgtaccatcgattcggacttcgggaagaaacagcagaaaaaaggcgataaccacgatagttccgccacttatgaaatcaaatttcacgagtttgtgctgttcattctcgaagaaaaaatgggtgcgacgcgtcgtacttttctgacagatttagcccgcaagaaagggttccgcgtcgagaatgaactgaccgacgaagttacccacatcgtggcagaaaatctgtcacgctctgaagtattggcttggctgaaagaacacaagatggagaagaccaagcaattcgaactgctggatattagctggcttatcgaaagcatgaaagttggtaaaccggtggacaccaaggggaaataccagttggcggaatcggttgaggtgagtgcgaacccagatccgacagaaggtcgtgtaaacgagctgcctcctactatgaaaaccgtttctccgtatgcgtgtcaacgccgcaccaccctgaacaaccgtaatcaacgttttacggactcgctggagattcttcgtgaaaattacgagtttaaacgtaacgatgatactgcgctggaatttcgtcgtgctatctccgtgctgaaaagccttccgtttgaggtacgtagcctgaaagacacggaaggattgccctggatcagtgatgaagtcaaagggattatggaagaaatcatcgaagtcggggagtcgcgtgaagtgcaggccgtgctcaatgatgagtggtatcaaagcttccacgcatttacgagtgtctttggagtgggggtgaagacagcagacaagtggtaccgtatgggtctgcgcaccctcgaggatgttcgttccagcaagaccctgaagttgaccccgatgcagaaagtaggtctgctgtattatgaagatcttgctcgcggcgttacgcgtgccgaagctgacgcgatttggctgctggttcaggatgcagtcgcaactttcgacccggatgcgatcgtggagattgtcggtggatttcgtcgtgggaaacctcagggtcacgacgttgatctgcttatcagttctccgggagctgagaaagagcaagaagaccaactcctgcagaaagtgatgaatctgtggaagaaacaagggttgttgctgtgtggtcgtctgttttggagtcagtgggaagatgggggttcgccttccggtaaggctgacgagggtgacgcggaggcgtcgtgctttctgatcctcaaactttatgatcatctggtgcgtaaaagtaaacgcaatatgccgactggttcgaacatgggcgagtccaaaccgtggaaagcaattcgcgtagatatgctgcgttgcccctatggcagttttgcgtttgcgatgttgcagtggaccggaagccgcatgttccgtcgtgatctgcgctggtacgccctggaagagaagaacatgatgctggacaatcattcgctgtatgacatgacccgcggtatcttcctccctgctaaatcggaagaggaaattttcgaacatctggggcttgaatacctggaaccgttcgaacgtaacgca

SEQ ID NO: 3826 - protein, 529 aa, synthetic construct
  REGION 1..529: note = Variant of terminal deoxynucleotidyltransferase
MHHHHHHGGSGSHGIRTIDSDFGKKQQKKGDNHDSSATYEIKFHEFVLFILEEKMGATRRTFLTDLARKKGFRVENELTDEVTHIVAENLSRSEVLAWLKEHKMEKTKQFELLDISWLIESMKVGKPVDTKGKYQLAESVEVSANPDPTEGRVNELPPTMKTVSPYACQRRTTLNNRNQRFTDSLEILRENYEFKRNDDTALEFRRAISVLKSLPFEVRSLKDTEGLPWISDEVKGIMEEIIEVGESREVQAVLNDEWYQSFHAFTSVFGVGVKTADKWYRMGLRTLEDVRSSKTLKLTPMQKVGLLYYEDLARGVTRAEADAIWLLVQDAVATFDPDAIVEIVGGFRRGKPQGHDVDLLISSPGAEKEQEDQLLQKVMNLWKKQGLLLCGRLFWSQWEDGGSPSGKADEGDAEASCFLILKLYDHLVRKSKRNMPTGSNMGESKPWKAIRVDMLRCPYGSFAFAMLQWTGSRMFRRDLRWYALEEKNMMLDNHSLYDMTRGIFLPAKSEEEIFEHLGLEYLEPFERNA

SEQ ID NO: 3827 - DNA, 1587 bp, synthetic construct
  misc_feature 1..1587: note = Variant of terminal deoxynucleotidyltransferase
  source 1..1587: mol_type = other DNA
atgcaccatcatcatcatcatggcggtagcggcagccacggcattcgtaccatcgattcggacttcgggaagaaacagcagaaaaaaggcgataaccacgatagttccgccacttatgaaatcaaatttcacgagtttgtgctgttcattctcgaagaaaaaatgggtgcgacgcgtcgtacttttctgacagatttagcccgcaagaaagggttccgcgtcgagaatgaactgaccgacgaagttacccacatcgtggcagaaaatctgtcacgctctgaagtattggcttggctgaaagaacacaagatggagaagaccaagcaattcgaactgctggatattagctggcttatcgaaagcatgaaagttggtaaaccggtggacaccaaggggaaataccagttggcggaatcggttgaggtgagtgcgaacccagatccgacagaaggtcgtgtaaacgagctgcctcctactatgaaaaccgtttctccgtatgcgtgtcaacgccgcaccaccctgaacaaccgtaatcaacgttttacggactcgctggagattcttcgtgaaaattacgagtttaaacgtaacgatgatactgcgctggaatttcgtcgtgctatctccgtgctgaaaagccttccgtttgaggtacgtagcctgaaagacacggaaggattgccctggatcagtgatgaagtcaaagggattatggaagaaatcatcgaagtcggggagtcgcgtgaagtgcaggccgtgctcaatgatgagtggtatcaaagcttccacgcatttacgagtgtctttggagtgggggtgaagacagcagacaagtggtaccgtatgggtctgcgcaccctcgaggatgttcgttccagcaagaccctgaagttgaccccgatgcagaaagtaggtctgctgtattatgaagatcttgctcgcggcgttacgcgtgccgaagctgacgcgatttggctgctggttcaggatgcagtcgcaactttcgacccggatgcgatcgtggagattgtcggtggatttcgtcgtgggaaacctcagggtcacgacgttgatctgcttatcagttctccgggagctgagaaagagcaagaagaccaactcctgcagaaagtgatgaatctgtggaagaaacaagggttgttgctgtgtggtcgtctggaatggagtcagtgggaagatgggggttcgccttccggtaaggctgacgagggtgacgcggaggcgtcgtgctttctgatcctcaaactttatgatcatctggtgcgtaaaagtaaacgcaatatgccgactggttcgaacatgggcgagtccaaaccgtggaaagcaattcgcgtagatctgctgcgttgcccctatggcagttttgcgtttgcgatgttgcagtggaccggaagccgcatgttccgtcgtgatctgaaatggtacgccctggaagagaagaacatgatgctggacaatcattcgctgtatgacatgacccgcggtatcttcctccctgctaaatcggaagaggaaattttcgaacatctggggcttgaatacctggaaccgttcgaacgtaacgca

SEQ ID NO: 3828 - protein, 529 aa, synthetic construct
  REGION 1..529: note = Variant of terminal deoxynucleotidyltransferase
MHHHHHHGGSGSHGIRTIDSDFGKKQQKKGDNHDSSATYEIKFHEFVLFILEEKMGATRRTFLTDLARKKGFRVENELTDEVTHIVAENLSRSEVLAWLKEHKMEKTKQFELLDISWLIESMKVGKPVDTKGKYQLAESVEVSANPDPTEGRVNELPPTMKTVSPYACQRRTTLNNRNQRFTDSLEILRENYEFKRNDDTALEFRRAISVLKSLPFEVRSLKDTEGLPWISDEVKGIMEEIIEVGESREVQAVLNDEWYQSFHAFTSVFGVGVKTADKWYRMGLRTLEDVRSSKTLKLTPMQKVGLLYYEDLARGVTRAEADAIWLLVQDAVATFDPDAIVEIVGGFRRGKPQGHDVDLLISSPGAEKEQEDQLLQKVMNLWKKQGLLLCGRLEWSQWEDGGSPSGKADEGDAEASCFLILKLYDHLVRKSKRNMPTGSNMGESKPWKAIRVDLLRCPYGSFAFAMLQWTGSRMFRRDLKWYALEEKNMMLDNHSLYDMTRGIFLPAKSEEEIFEHLGLEYLEPFERNA

SEQ ID NO: 3829 - DNA, 1587 bp, synthetic construct
  misc_feature 1..1587: note = Variant of terminal deoxynucleotidyltransferase
  source 1..1587: mol_type = other DNA
atgcaccatcatcatcatcatggcggtagcggcagccacggcattcgtaccatcgattcggacttcgggaagaaacagcagaaaaaaggcgataaccacgatagttccgccacttatgaaatcaaatttcacgagtttgtgctgttcattctcgaagaaaaaatgggtgcgacgcgtcgtacttttctgacagatttagcccgcaagaaagggttccgcgtcgagaatgaactgaccgacgaagttacccacatcgtggcagaaaatctgtcacgctctgaagtattggcttggctgaaagaacacaagatggagaagaccaagcaattcgaactgctggatattagctggcttatcgaaagcatgaaagttggtaaaccggtggacaccaaggggaaataccagttggcggaatcggttgaggtgagtgcgaacccagatccgacagaaggtcgtgtaaacgagctgcctcctactatgaaaaccgtttctccgtatgcgtgtcaacgccgcaccaccctgaacaaccgtaatcaacgttttacggactcgctggagattcttcgtgaaaattacgagttcaaacgcaacgatgatactgcgctggaatttcgtcgtgctatctccgtgctgaaaagccttccgtttgaggtacgtagcctgaaagacacggaaggattgccctggatcagtgatgaagtcaaagggattatggaagaaatcatcgaagtcggggagtcgcgtgaagtgcaggccgtgctcaatgatgagtggtatcaaagcttccacgcatttacgagtgtctttggagtgggggtgaagacagcagacaagtggtaccgtatgggtctgcgcaccctcgaggatgttcgttccagcaagaccctgaagttgaccccgatgcagaaagtaggtctgctgtattatgaagatcttgctcgcggcgttacgcgtgccgaagctgacgcgatttggctgctggttcaggatgcagtcgcaactttcgacccggatgcgatcgtggagattgtcggtggatttcgtcgtgggaaacctcagggtcacgacgttgatctgcttatcagttctccgggagctgagaaagagcaagaagaccaactcctgcagaaagtgatgaatctgtggaagaaacaagggttgttgctgtgtggtcgtctggaatggagtcagtgggaagatgggggttcgccttccggtaaggctgacgagggtgacgcggaggcgtcgtgctttctgatcctcaaactttatgatcatctggtgcgtaaaagtaaacgcaatatgccgactggttcgaacatgggcgagtccaaaccgtggaaagcaattcgcgtagatatgctgcgttgcccctatggcagttttgcgtttgcgatgttgcagtggaccggaagccgcatgttccgtcgtgatctgcgttggtacgccctggaagagaagaacatgatgctggacaatcattcgctgtatgacatgacccgcggtatcttcctccctgctaaatcggaagaggaaattttcgaacatctggggcttgaatacctggaaccgttcgaacgtaacgca

SEQ ID NO: 3830 - protein, 529 aa, synthetic construct
  REGION 1..529: note = Variant of terminal deoxynucleotidyltransferase
MHHHHHHGGSGSHGIRTIDSDFGKKQQKKGDNHDSSATYEIKFHEFVLFILEEKMGATRRTFLTDLARKKGFRVENELTDEVTHIVAENLSRSEVLAWLKEHKMEKTKQFELLDISWLIESMKVGKPVDTKGKYQLAESVEVSANPDPTEGRVNELPPTMKTVSPYACQRRTTLNNRNQRFTDSLEILRENYEFKRNDDTALEFRRAISVLKSLPFEVRSLKDTEGLPWISDEVKGIMEEIIEVGESREVQAVLNDEWYQSFHAFTSVFGVGVKTADKWYRMGLRTLEDVRSSKTLKLTPMQKVGLLYYEDLARGVTRAEADAIWLLVQDAVATFDPDAIVEIVGGFRRGKPQGHDVDLLISSPGAEKEQEDQLLQKVMNLWKKQGLLLCGRLEWSQWEDGGSPSGKADEGDAEASCFLILKLYDHLVRKSKRNMPTGSNMGESKPWKAIRVDMLRCPYGSFAFAMLQWTGSRMFRRDLRWYALEEKNMMLDNHSLYDMTRGIFLPAKSEEEIFEHLGLEYLEPFERNA

SEQ ID NO: 3831 - DNA, 1587 bp, synthetic construct
  misc_feature 1..1587: note = Variant of terminal deoxynucleotidyltransferase
  source 1..1587: mol_type = other DNA
atgcaccatcatcatcatcatggcggtagcggcagccacggcattcgtaccatcgattcggacttcgggaagaaacagcagaaaaaaggcgataaccacgatagttccgccacttatgaaatcaaatttcacgagtttgtgctgttcattctcgaagaaaaaatgggtgcgacgcgtcgtacttttctgacagatttagcccgcaagaaagggttccgcgtcgagaatgaactgaccgacgaagttacccacatcgtggcagaaaatctgtcacgctctgaagtattggcttggctgaaagaacacaagatggagaagaccaagcaattcgaactgctggatattagctggcttatcgaaagcatgaaagttggtaaaccggtggacaccaaggggaaataccagttggcggaatcggttgaggtgagtgcgaacccagatccgacagaaggtcgtgtaaacgagctgcctcctactatgaaaaccgtttctccgtatgcgtgtcaacgccgcaccaccctgaacaaccgtaatcaacgttttacggactcgctggagattcttcgtgaaaattacgagtttaaaggcaacgatgatactgcgctggaatttcgtcgtgctatctccgtgctgaaaagccttccgtttgaggtacgtagcctgaaagacacggaaggattgccctggatcagtgatgaagtcaaagggattatggaagaaatcatcgaagtcggggagtcgcgtgaagtgcaggccgtgctcaatgatgagtggtatcaaagcttccacgcatttacgagtgtctttggagtgggggtgaagacagcagacaagtggtaccgtatgggtctgcgcaccctcgaggatgttcgttccagcaagaccctgaagttgaccccgatgcagaaagtaggtctgctgtattatgaagatcttgctcgcggcgttacgcgtgccgaagctgacgcgatttggctgctggttcaggatgcagtcgcaactttcgacccggatgcgatcgtggagattgtcggtggatttcgtcgtgggaaacctcagggtcacgacgttgatctgcttatcagttctccgggagctgagaaagagcaagaagaccaactcctgcagaaagtgatgaatctgtggaagaaacaagggttgttgctgtgtggtcgtctggaatggagtcagtgggaagatgggggttcgccttccggtaaggctgacgagggtgacgcggaggcgtcgtgctttctgatcctcaaactttatgatcatctggtgcgtaaaagtaaacgcaatatgccgactggttcgaacatgggcgagtccaaaccgtggaaagcaattcgcgtagatatgctgcgttgcccctatggcagttttgcgtttgcgatgttgcagtggaccggaagccgcatgttccgtcgtgatctgcgttggtacgccctggaagagaagaacatgatgctggacaatcattcgctgtatgacatgacccgcggtatcttcctccctgctaaatcggaagaggaaattttcgaacatctggggcttgaatacctggaaccgttcgaacgtaacgca

SEQ ID NO: 3832 - protein, 529 aa, synthetic construct
  REGION 1..529: note = Variant of terminal deoxynucleotidyltransferase
MHHHHHHGGSGSHGIRTIDSDFGKKQQKKGDNHDSSATYEIKFHEFVLFILEEKMGATRRTFLTDLARKKGFRVENELTDEVTHIVAENLSRSEVLAWLKEHKMEKTKQFELLDISWLIESMKVGKPVDTKGKYQLAESVEVSANPDPTEGRVNELPPTMKTVSPYACQRRTTLNNRNQRFTDSLEILRENYEFKGNDDTALEFRRAISVLKSLPFEVRSLKDTEGLPWISDEVKGIMEEIIEVGESREVQAVLNDEWYQSFHAFTSVFGVGVKTADKWYRMGLRTLEDVRSSKTLKLTPMQKVGLLYYEDLARGVTRAEADAIWLLVQDAVATFDPDAIVEIVGGFRRGKPQGHDVDLLISSPGAEKEQEDQLLQKVMNLWKKQGLLLCGRLEWSQWEDGGSPSGKADEGDAEASCFLILKLYDHLVRKSKRNMPTGSNMGESKPWKAIRVDMLRCPYGSFAFAMLQWTGSRMFRRDLRWYALEEKNMMLDNHSLYDMTRGIFLPAKSEEEIFEHLGLEYLEPFERNA

SEQ ID NO: 3833 - DNA, 1587 bp, synthetic construct
  misc_feature 1..1587: note = Variant of terminal deoxynucleotidyltransferase
  source 1..1587: mol_type = other DNA
atgcaccatcatcatcatcatggcggtagcggcagccacggcattcgtaccatcgattcggacttcgggaagaaacagcagaaaaaaggcgataaccacgatagttccgccacttatgaaatcaaatttcacgagtttgtgctgttcattctcgaagaaaaaatgggtgcgacgcgtcgtacttttctgacagatttagcccgcaagaaagggttccgcgtcgagaatgaactgaccgacgaagttacccacatcgtggcagaaaatctgtcacgctctgaagtattggcttggctgaaagaacacaagatggagaagaccaagcaattcgaactgctggatattagctggcttatcgaaagcatgaaagttggtaaaccggtggacaccaaggggaaataccagttggcggaatcggttgaggtgagtgcgaacccagatccgacagaaggtcgtgtaaacgagctgcctcctactatgaaaaccgtttctccgtatgcgtgtcaacgccgcaccaccctgaacaaccgtaatcaacgttttacggactcgctggagattcttcgtgaaaattacgagtttaaaggcaacgatgatactgcgctggaatttcgtcgtgctatctccgtgctgaaaagccttccgtttgaggtacgtagcctgaaagacacggaaggattgccctggatcagtgatgaagtcaaagggattatggaagaaatcatcgaagtcggggagtcgcgtgaagtgcaggccgtgctcaatgatgagtggtatcaaagcttccacgcatttacgagtgtctttggagtgggggtgaagacagcagacaagtggtaccgtatgggtctgcgcaccctcgaggatgttcgttccagcaagaccctgaagttgaccccgatgcagaaagtaggtctgctgtattatgaagatcttgctcgcggcgttacgcgtgccgaagctgacgcgatttggctgctggttcaggatgcagtcgcaactttcgacccggatgcgatcgtggagattgtcggtggatttcgtcgtgggaaacctcagggtcacgacgttgatctgcttatcagttctccgggagctgagaaagagcaagaagaccaactcctgcagaaagtgatgaatctgtggaagaaacaagggttgttgctgtatggtcgtctgttttggagtcagtgggaagatgggggttcgccttccggtaaggctgacgagggtgacgcggaggcgtcgtgctttctgatcctcaaactttatgatcatctggtgcgtaaaagtaaacgcaatatgccgactggttcgaacatgggcgagtccaaaccgtggaaagcaattcgcgtagatctgctgcgttgcccctatggcagttttgcgtttgcgatgttgcagtggaccggaagccgcatgttccgtcgtgatctgcgttggtacgccctggaagagaagaacatgatgctggacaatcattcgctgtatgacatgacccgcggtatcttcctccctgctaaatcggaagaggaaattttcgaacatctggggcttgaatacctggaaccgttcgaacgtaacgca

SEQ ID NO: 3834 - protein, 529 aa, synthetic construct
  REGION 1..529: note = Variant of terminal deoxynucleotidyltransferase
MHHHHHHGGSGSHGIRTIDSDFGKKQQKKGDNHDSSATYEIKFHEFVLFILEEKMGATRRTFLTDLARKKGFRVENELTDEVTHIVAENLSRSEVLAWLKEHKMEKTKQFELLDISWLIESMKVGKPVDTKGKYQLAESVEVSANPDPTEGRVNELPPTMKTVSPYACQRRTTLNNRNQRFTDSLEILRENYEFKGNDDTALEFRRAISVLKSLPFEVRSLKDTEGLPWISDEVKGIMEEIIEVGESREVQAVLNDEWYQSFHAFTSVFGVGVKTADKWYRMGLRTLEDVRSSKTLKLTPMQKVGLLYYEDLARGVTRAEADAIWLLVQDAVATFDPDAIVEIVGGFRRGKPQGHDVDLLISSPGAEKEQEDQLLQKVMNLWKKQGLLLYGRLFWSQWEDGGSPSGKADEGDAEASCFLILKLYDHLVRKSKRNMPTGSNMGESKPWKAIRVDLLRCPYGSFAFAMLQWTGSRMFRRDLRWYALEEKNMMLDNHSLYDMTRGIFLPAKSEEEIFEHLGLEYLEPFERNA

SEQ ID NO: 3835 - DNA, 1587 bp, synthetic construct
  misc_feature 1..1587: note = Variant of terminal deoxynucleotidyltransferase
  source 1..1587: mol_type = other DNA
atgcaccatcatcatcatcatggcggtagcggcagccacggcattcgtaccatcgattcggacttcgggaagaaacagcagaaaaaaggcgataaccacgatagttccgccacttatgaaatcaaatttcacgagtttgtgctgttcattctcgaagaaaaaatgggtgcgacgcgtcgtacttttctgacagatttagcccgcaagaaagggttccgcgtcgagaatgaactgaccgacgaagttacccacatcgtggcagaaaatctgtcacgctctgaagtattggcttggctgaaagaacacaagatggagaagaccaagcaattcgaactgctggatattagctggcttatcgaaagcatgaaagttggtaaaccggtggacaccaaggggaaataccagttggcggaatcggttgaggtgagtgcgaacccagatccgacagaaggtcgtgtaaacgagctgcctcctactatgaaaaccgtttctccgtatgcgtgtcaacgccgcaccaccctgaacaaccgtaatcaacgttttacggactcgctggagattcttcgtgaaaattacgagttcaaacgcaacgatgatactgcgctggaatttcgtcgtgctatctccgtgctgaaaagccttccgtttgaggtacgtagcctgaaagacacggaaggattgccctggatcagtgatgaagtcaaagggattatggaagaaatcatcgaagtcggggagtcgcgtgaagtgcaggccgtgctcaatgatgagtggtatcaaagcttccacgcatttacgagtgtctttggagtgggggtgaagacagcagacaagtggtaccgtatgggtctgcgcaccctcgaggatgttcgttccagcaagaccctgcgtttgaccccgatgcagaaagtaggtctgctgtattatgaagatcttgctcgcggcgttacgcgtgccgaagctgacgcgatttggctgctggttcaggatgcagtcgcaactttcgacccggatgcgatcgtggagattgtcggtggatttcgtcgtgggaaacctcagggtcacgacgttgatctgcttatcagttctccgggagctgagaaagagcaagaagaccaactcctgcagaaagtgatgaatctgtggaagaaacaagggttgttgctgtacggtcgtctggagtggagtcagtgggaagatgggggttcgccttccggtaaggctgacgagggtgacgcggaggcgtcgtgctttctgatcctcaaactttatgatcatctggtgcgtaaaagtaaacgcaatatgccgactggttcgaacatgggcgagtccaaaccgtggaaagcaattcgcgtagatctgctgcgttgcccctatggcagttttgcgtttgcgatgttgcagtggaccggaagcggcatgttccgtcgtgatctgcgttggtacgccctggaagagaagaacatgatgctggacgtgcattcgctgtatgacatgacccgcggtatcttcctccctgctaaatcggaagaggaaattttcgaacatctggggcttgaatacctggaaccgttcgaacgtaacgca

SEQ ID NO: 3836 - protein, 529 aa, synthetic construct
  REGION 1..529: note = Variant of terminal deoxynucleotidyltransferase
MHHHHHHGGSGSHGIRTIDSDFGKKQQKKGDNHDSSATYEIKFHEFVLFILEEKMGATRRTFLTDLARKKGFRVENELTDEVTHIVAENLSRSEVLAWLKEHKMEKTKQFELLDISWLIESMKVGKPVDTKGKYQLAESVEVSANPDPTEGRVNELPPTMKTVSPYACQRRTTLNNRNQRFTDSLEILRENYEFKRNDDTALEFRRAISVLKSLPFEVRSLKDTEGLPWISDEVKGIMEEIIEVGESREVQAVLNDEWYQSFHAFTSVFGVGVKTADKWYRMGLRTLEDVRSSKTLRLTPMQKVGLLYYEDLARGVTRAEADAIWLLVQDAVATFDPDAIVEIVGGFRRGKPQGHDVDLLISSPGAEKEQEDQLLQKVMNLWKKQGLLLYGRLEWSQWEDGGSPSGKADEGDAEASCFLILKLYDHLVRKSKRNMPTGSNMGESKPWKAIRVDLLRCPYGSFAFAMLQWTGSGMFRRDLRWYALEEKNMMLDVHSLYDMTRGIFLPAKSEEEIFEHLGLEYLEPFERNA

SEQ ID NO: 3837 - DNA, 1587 bp, synthetic construct
  misc_feature 1..1587: note = Variant of terminal deoxynucleotidyltransferase
  source 1..1587: mol_type = other DNA
atgcaccatcatcatcatcatggcggtagcggcagccacggcattcgtaccatcgattcggacttcgggaagaaacagcagaaaaaaggcgataaccacgatagttccgccacttatgaaatcaaatttcacgagtttgtgctgttcattctcgaagaaaaaatgggtgcgacgcgtcgtacttttctgacagatttagcccgcaagaaagggttccgcgtcgagaatgaactgaccgacgaagttacccacatcgtggcagaaaatctgtcacgctctgaagtattggcttggctgaaagaacacaagatggagaagaccaagcaattcgaactgctggatattagctggcttatcgaaagcatgaaagttggtaaaccggtggacaccaaggggaaataccagttggcggaatcggttgaggtgagtgcgaacccagatccgacagaaggtcgtgtaaacgagctgcctcctactatgaaaaccgtttctccgtatgcgtgtcaacgccgcaccaccctgaacaaccgtaatcaacgttttacggactcgctggagattcttcgtgaaaattacgagctgaaacgtaacgatgatactgcgctggaatttcgtcgtgctatctccgtgctgaaaagccttccgtttgaggtacgtagcctgaaagacacggaaggattgccctggatcagtgatgaagtcaaagggattatggaagaaatcatcgaagtcggggagtcgcgtgaagtgcaggccgtgctcaatgatgagtggtatcaaagcttccacgcatttacgagtgtctttggagtgggggtgaagacagcagacaagtggtaccgtatgggtctgcgcaccctcgaggatgttcgttccagcaagaccctgaagttgaccccgatgcagaaagtaggtctgctgtattatgaagatcttgctcgcggcgttacgcgtgccgaagctgacgcgatttggctgctggttcaggatgcagtcgcaactttcgacccggatgcgatcgtggagattgtcggtggatttcgtcgtgggaaacctcagggtcacgacgttgatctgcttatcagttctccgggagctgagaaagagcaagaagaccaactcctgcagaaagtgatgaatctgtggaagaaacaagggttgttgctgtatggtcgtctgttttggagtcagtgggaagatgggggttcgccttccggtaaggctgacgagggtgacgcggaggcgtcgtgctttctgatcctcaaactttatgatcatctggtgcgtaaaagtaaacgcaatatgccgactggttcgaacatgggcgagtccaaaccgtggaaagcaattcgcgtagatctgctgcgttgcccctatggcagttttgcgtttgcgatgttgcagtggaccggaagccgcatgttccgtcgtgatctgcgttggtacgccctggaagagaagaacatgatgctggacaatcattcgctgtatgacatgacccgcggtatcttcctccctgctaaatcggaagaggaaattttcgaacatctggggcttgaatacctggaaccgttcgaacgtaacgca

SEQ ID NO: 3838 - protein, 529 aa, synthetic construct
  REGION 1..529: note = Variant of terminal deoxynucleotidyltransferase
MHHHHHHGGSGSHGIRTIDSDFGKKQQKKGDNHDSSATYEIKFHEFVLFILEEKMGATRRTFLTDLARKKGFRVENELTDEVTHIVAENLSRSEVLAWLKEHKMEKTKQFELLDISWLIESMKVGKPVDTKGKYQLAESVEVSANPDPTEGRVNELPPTMKTVSPYACQRRTTLNNRNQRFTDSLEILRENYELKRNDDTALEFRRAISVLKSLPFEVRSLKDTEGLPWISDEVKGIMEEIIEVGESREVQAVLNDEWYQSFHAFTSVFGVGVKTADKWYRMGLRTLEDVRSSKTLKLTPMQKVGLLYYEDLARGVTRAEADAIWLLVQDAVATFDPDAIVEIVGGFRRGKPQGHDVDLLISSPGAEKEQEDQLLQKVMNLWKKQGLLLYGRLFWSQWEDGGSPSGKADEGDAEASCFLILKLYDHLVRKSKRNMPTGSNMGESKPWKAIRVDLLRCPYGSFAFAMLQWTGSRMFRRDLRWYALEEKNMMLDNHSLYDMTRGIFLPAKSEEEIFEHLGLEYLEPFERNA

SEQ ID NO: 3839 - DNA, 1587 bp, synthetic construct
  misc_feature 1..1587: note = Variant of terminal deoxynucleotidyltransferase
  source 1..1587: mol_type = other DNA
atgcaccatcatcatcatcatggcggtagcggcagccacggcattcgtaccatcgattcggacttcgggaagaaacagcagaaaaaaggcgataaccacgatagttccgccacttatgaaatcaaatttcacgagtttgtgctgttcattctcgaagaaaaaatgggtgcgacgcgtcgtacttttctgacagatttagcccgcaagaaagggttccgcgtcgagaatgaactgaccgacgaagttacccacatcgtggcagaaaatctgtcacgctctgaagtattggcttggctgaaagaacacaagatggagaagaccaagcaattcgaactgctggatattagctggcttatcgaaagcatgaaagttggtaaaccggtggacaccaaggggaaataccagttggcggaatcggttgaggtgagtgcgaacccagatccgacagaaggtcgtgtaaacgagctgcctcctactatgaaaaccgtttctccgtatgcgtgtcaacgccgcaccaccctgaacaaccgtaatcaacgttttacggactcgctggagattcttcgtgaaaattacgagtttaaaggcaacgatgatactgcgctggaatttcgtcgtgctatctccgtgctgaaaagccttccgtttgaggtacgtagcctgaaagacacggaaggattgccctggatcagtgatgaagtcaaagggattatggaagaaatcatcgaagtcggggagtcgcgtgaagtgcaggccgtgctcaatgatgagtggtatcaaagcttccacgcatttacgagtgtctttggagtgggggtgaagacagcagacaagtggtaccgtatgggtctgcgcaccctcgaggatgttcgttccagcaagaccctgaagttgaccccgatgcagaaagtaggtctgctgtattatgaagatcttgctcgcggcgttacgcgtgccgaagctgacgcgatttggctgctggttcaggatgcagtcgcaactttcgacccggatgcgatcgtggagattgtcggtggatttcgtcgtgggaaacctcagggtcacgacgttgatctgcttatcagttctccgggagctgagaaagagcaagaagaccaactcctgcagaaagtgatgaatctgtggaagaaacaagggttgttgctgtatggtcgtctgttttggagtcagtgggaagatgggggttcgccttccggtaaggctgacgagggtgacgcggaggcgtcgtgctttctgatcctcaaactttatgatcatctggtgcgtaaaagtaaacgcaatatgccgactggttcgaacatgggcgagtccaaaccgtggaaagcaattcgcgtagatctgctgcgttgcccctatggcagttttgcgtttgcgatgttgcagtggaccggaagccgcatgttccgtcgtgatctgaaatggtacgccctggaagagaagaacatgatgctggacaatcattcgctgtatgacatgacccgcggtatcttcctccctgctaaatcggaagaggaaattttcgaacatctggggcttgaatacctggaaccgttcgaacgtaacgca

SEQ ID NO: 3840 - protein, 529 aa, synthetic construct
  REGION 1..529: note = Variant of terminal deoxynucleotidyltransferase
MHHHHHHGGSGSHGIRTIDSDFGKKQQKKGDNHDSSATYEIKFHEFVLFILEEKMGATRRTFLTDLARKKGFRVENELTDEVTHIVAENLSRSEVLAWLKEHKMEKTKQFELLDISWLIESMKVGKPVDTKGKYQLAESVEVSANPDPTEGRVNELPPTMKTVSPYACQRRTTLNNRNQRFTDSLEILRENYEFKGNDDTALEFRRAISVLKSLPFEVRSLKDTEGLPWISDEVKGIMEEIIEVGESREVQAVLNDEWYQSFHAFTSVFGVGVKTADKWYRMGLRTLEDVRSSKTLKLTPMQKVGLLYYEDLARGVTRAEADAIWLLVQDAVATFDPDAIVEIVGGFRRGKPQGHDVDLLISSPGAEKEQEDQLLQKVMNLWKKQGLLLYGRLFWSQWEDGGSPSGKADEGDAEASCFLILKLYDHLVRKSKRNMPTGSNMGESKPWKAIRVDLLRCPYGSFAFAMLQWTGSRMFRRDLKWYALEEKNMMLDNHSLYDMTRGIFLPAKSEEEIFEHLGLEYLEPFERNA

SEQ ID NO: 3841 - DNA, 1587 bp, synthetic construct
  misc_feature 1..1587: note = Variant of terminal deoxynucleotidyltransferase
  source 1..1587: mol_type = other DNA
atgcaccatcatcatcatcatggcggtagcggcagccacggcattcgtaccatcgattcggacttcgggaagaaacagcagaaaaaaggcgataaccacgatagttccgccacttatgaaatcaaatttcacgagtttgtgctgttcattctcgaagaaaaaatgggtgcgacgcgtcgtacttttctgacagatttagcccgcaagaaagggttccgcgtcgagaatgaactgaccgacgaagttacccacatcgtggcagaaaatctgtcacgctctgaagtattggcttggctgaaagaacacaagatggagaagaccaagcaattcgaactgctggatattagctggcttatcgaaagcatgaaagttggtaaaccggtggacaccaaggggaaataccagttggcggaatcggttgaggtgagtgcgaacccagatccgacagaaggtcgtgtaaacgagctgcctcctactatgaaaaccgtttctccgtatgcgtgtcaacgccgcaccaccctgaacaaccgtaatcaacgttttacggactcgctggagattcttcgtgaaaattacgagttcaaacgcaacgatgatactgcgctggaatttcgtcgtgctatctccgtgctgaaaagccttccgtttgaggtacgtagcctgaaagacacggaaggattgccctggatcagtgatgaagtcaaagggattatggaagaaatcatcgaagtcggggagtcgcgtgaagtgcaggccgtgctcaatgatgagtggtatcaaagcttccacgcatttacgagtgtctttggagtgggggtgaagacagcagacaagtggtaccgtatgggtctgcgcaccctcgaggatgttcgttccagcaagaccctgaagttgaccccgatgcagaaagtaggtctgctgtattatgaagatcttgctcgcggcgttacgcgtgccgaagctgacgcgatttggctgctggttcaggatgcagtcgcaactttcgacccggatgcgatcgtggagattgtcggtggatttcgtcgtgggaaacctcagggtcacgacgttgatctgcttatcagttctccgggagctgagaaagagcaagaagaccaactcctgcagaaagtgatgaatctgtggaagaaacaagggttgttgctgtatggtcgtctgttttggagtcagtgggaagatgggggttcgccttccggtaaggctgacgagggtgacgcggaggcgtcgtgctttctgatcctcaaactttatgatcatctggtgcgtaaaagtaaacgcaatatgccgactggttcgaacatgggcgagtccaaaccgtggaaagcaattcgcgtagatctgctgcgttgcccctatggcagttttgcgtttgcgatgttgcagtggaccggaagccgcatgttccgtcgtgatctgaaatggtacgccctggaagagaagaacatgatgctggacaatcattcgctgtatgacatgacccgcggtatcttcctccctgctaaatcggaagaggaaattttcgaacatctggggcttgaatacctggaaccgttcgaacgtaacgca

SEQ ID NO: 3842 - protein, 529 aa, synthetic construct
  REGION 1..529: note = Variant of terminal deoxynucleotidyltransferase
MHHHHHHGGSGSHGIRTIDSDFGKKQQKKGDNHDSSATYEIKFHEFVLFILEEKMGATRRTFLTDLARKKGFRVENELTDEVTHIVAENLSRSEVLAWLKEHKMEKTKQFELLDISWLIESMKVGKPVDTKGKYQLAESVEVSANPDPTEGRVNELPPTMKTVSPYACQRRTTLNNRNQRFTDSLEILRENYEFKRNDDTALEFRRAISVLKSLPFEVRSLKDTEGLPWISDEVKGIMEEIIEVGESREVQAVLNDEWYQSFHAFTSVFGVGVKTADKWYRMGLRTLEDVRSSKTLKLTPMQKVGLLYYEDLARGVTRAEADAIWLLVQDAVATFDPDAIVEIVGGFRRGKPQGHDVDLLISSPGAEKEQEDQLLQKVMNLWKKQGLLLYGRLFWSQWEDGGSPSGKADEGDAEASCFLILKLYDHLVRKSKRNMPTGSNMGESKPWKAIRVDLLRCPYGSFAFAMLQWTGSRMFRRDLKWYALEEKNMMLDNHSLYDMTRGIFLPAKSEEEIFEHLGLEYLEPFERNA

SEQ ID NO: 3843 - DNA, 1587 bp, synthetic construct
  misc_feature 1..1587: note = Variant of terminal deoxynucleotidyltransferase
  source 1..1587: mol_type = other DNA
atgcaccatcatcatcatcatggcggtagcggcagccacggcattcgtaccatcgattcggacttcgggaagaaacagcagaaaaaaggcgataaccacgatagttccgccacttatgaaatcaaatttcacgagtttgtgctgttcattctcgaagaaaaaatgggtgcgacgcgtcgtacttttctgacagatttagcccgcaagaaagggttccgcgtcgagaatgaactgaccgacgaagttacccacatcgtggcagaaaatctgtcacgctctgaagtattggcttggctgaaagaacacaagatggagaagaccaagcaattcgaactgctggatattagctggcttatcgaaagcatgaaagttggtaaaccggtggacaccaaggggaaataccagttggcggaatcggttgaggtgagtgcgaacccagatccgacagaaggtcgtgtaaacgagctgcctcctactatgaaaaccgtttctccgtatgcgtgtcaacgccgcaccaccctgaacaaccgtaatcaacgttttacggactcgctggagattcttcgtgaaaattacgagttcaaacgcaacgatgatactgcgctggaatttcgtcgtgctatctccgtgctgaaaagccttccgtttgaggtacgtagcctgaaagacacggaaggattgccctggatcagtgatgaagtcaaagggattatggaagaaatcatcgaagtcggggagtcgcgtgaagtgcaggccgtgctcaatgatgagtggtatcaaagcttccacgcatttacgagtgtctttggagtgggggtgaagacagcagacaagtggtaccgtatgggtctgcgcaccctcgaggatgttcgttccagcaagaccctgaagttgaccccgatgcagaaagtaggtctgctgtattatgaagatcttgctcgcggcgttacgcgtgccgaagctgacgcgatttggctgctggttcaggatgcagtcgcaactttcgacccggatgcgatcgtggagattgtcggtggatttcgtcgtgggaaacctcagggtcacgacgttgatctgcttatcagttctccgggagctgagaaagagcaagaagaccaactcctgcagaaagtgatgaatctgtggaagaaacaagggttgttgctgtatggtcgtctgttttggagtcagtgggaagatgggggttcgccttccggtaaggctgacgagggtgacgcggaggcgtcgtgctttctgatcctcaaactttatgatcatctggtgcgtaaaagtaaacgcaatatgccgactggttcgaacatgggcgagtccaaaccgtggaaagcaattcgcgtagatctgctgcgttgcccctatggcagttttgcgtttgcgatgttgcagtggaccggaagccgcatgttccgtcgtgatctgcgctggtacgccctggaagagaagaacatgatgctggacaatcattcgctgtatgacatgacccgcggtatcttcctccctgctaaatcggaagaggaaattttcgaacatctggggcttgaatacctggaaccgttcgaacgtaacgca

SEQ ID NO: 3844 - protein, 529 aa, synthetic construct
  REGION 1..529: note = Variant of terminal deoxynucleotidyltransferase
MHHHHHHGGSGSHGIRTIDSDFGKKQQKKGDNHDSSATYEIKFHEFVLFILEEKMGATRRTFLTDLARKKGFRVENELTDEVTHIVAENLSRSEVLAWLKEHKMEKTKQFELLDISWLIESMKVGKPVDTKGKYQLAESVEVSANPDPTEGRVNELPPTMKTVSPYACQRRTTLNNRNQRFTDSLEILRENYEFKRNDDTALEFRRAISVLKSLPFEVRSLKDTEGLPWISDEVKGIMEEIIEVGESREVQAVLNDEWYQSFHAFTSVFGVGVKTADKWYRMGLRTLEDVRSSKTLKLTPMQKVGLLYYEDLARGVTRAEADAIWLLVQDAVATFDPDAIVEIVGGFRRGKPQGHDVDLLISSPGAEKEQEDQLLQKVMNLWKKQGLLLYGRLFWSQWEDGGSPSGKADEGDAEASCFLILKLYDHLVRKSKRNMPTGSNMGESKPWKAIRVDLLRCPYGSFAFAMLQWTGSRMFRRDLRWYALEEKNMMLDNHSLYDMTRGIFLPAKSEEEIFEHLGLEYLEPFERNA

SEQ ID NO: 3845 - DNA, 1587 bp, synthetic construct
  misc_feature 1..1587: note = Variant of terminal deoxynucleotidyltransferase
  source 1..1587: mol_type = other DNA
atgcaccatcatcatcatcatggcggtagcggcagccacggcattcgtaccatcgattcggacttcgggaagaaacagcagaaaaaaggcgataaccacgatagttccgccacttatgaaatcaaatttcacgagtttgtgctgttcattctcgaagaaaaaatgggtgcgacgcgtcgtacttttctgacagatttagcccgcaagaaagggttccgcgtcgagaatgaactgaccgacgaagttacccacatcgtggcagaaaatctgtcacgctctgaagtattggcttggctgaaagaacacaagatggagaagaccaagcaattcgaactgctggatattagctggcttatcgaaagcatgaaagttggtaaaccggtggacaccaaggggaaataccagttggcggaatcggttgaggtgagtgcgaacccagatccgacagaaggtcgtgtaaacgagctgcctcctactatgaaaaccgtttctccgtatgcgtgtcaacgccgcaccaccctgaacaaccgtaatcaacgttttacggactcgctggagattcttcgtgaaaattacgagctgaaaggcaacgatgatactgcgctggaatttcgtcgtgctatctccgtgctgaaaagccttccgtttgaggtacgtagcctgaaagacacggaaggattgccctggatcagtgatgaagtcaaagggattatggaagaaatcatcgaagtcggggagtcgcgtgaagtgcaggccgtgctcaatgatgagtggtatcaaagcttccacgcatttacgagtgtctttggagtgggggtgaagacagcagacaagtggtaccgtatgggtctgcgcaccctcgaggatgttcgttccagcaagaccctgaagttgaccccgatgcagaaagtaggtctgctgtattatgaagatcttgctcgcggcgttacgcgtgccgaagctgacgcgatttggctgctggttcaggatgcagtcgcaactttcgacccggatgcgatcgtggagattgtcggtggatttcgtcgtgggaaacctcagggtcacgacgttgatctgcttatcagttctccgggagctgagaaagagcaagaagaccaactcctgcagaaagtgatgaatctgtggaagaaacaagggttgttgctgtatggtcgtctggaatggagtcagtgggaagatgggggttcgccttccggtaaggctgacgagggtgacgcggaggcgtcgtgctttctgatcctcaaactttatgatcatctggtgcgtaaaagtaaacgcaatatgccgactggttcgaacatgggcgagtccaaaccgtggaaagcaattcgcgtagatatgctgcgttgcccctatggcagttttgcgtttgcgatgttgcagtggaccggaagccgcatgttccgtcgtgatctgcgttggtacgccctggaagagaagaacatgatgctggacaatcattcgctgtatgacatgacccgcggtatcttcctccctgctaaatcggaagaggaaattttcgaacatctggggcttgaatacctggaaccgttcgaacgtaacgca

SEQ ID NO: 3846 - protein, 529 aa, synthetic construct
  REGION 1..529: note = Variant of terminal deoxynucleotidyltransferase
MHHHHHHGGSGSHGIRTIDSDFGKKQQKKGDNHDSSATYEIKFHEFVLFILEEKMGATRRTFLTDLARKKGFRVENELTDEVTHIVAENLSRSEVLAWLKEHKMEKTKQFELLDISWLIESMKVGKPVDTKGKYQLAESVEVSANPDPTEGRVNELPPTMKTVSPYACQRRTTLNNRNQRFTDSLEILRENYELKGNDDTALEFRRAISVLKSLPFEVRSLKDTEGLPWISDEVKGIMEEIIEVGESREVQAVLNDEWYQSFHAFTSVFGVGVKTADKWYRMGLRTLEDVRSSKTLKLTPMQKVGLLYYEDLARGVTRAEADAIWLLVQDAVATFDPDAIVEIVGGFRRGKPQGHDVDLLISSPGAEKEQEDQLLQKVMNLWKKQGLLLYGRLEWSQWEDGGSPSGKADEGDAEASCFLILKLYDHLVRKSKRNMPTGSNMGESKPWKAIRVDMLRCPYGSFAFAMLQWTGSRMFRRDLRWYALEEKNMMLDNHSLYDMTRGIFLPAKSEEEIFEHLGLEYLEPFERNA

SEQ ID NO: 3847 - DNA, 1587 bp, synthetic construct
  misc_feature 1..1587: note = Variant of terminal deoxynucleotidyltransferase
  source 1..1587: mol_type = other DNA
atgcaccatcatcatcatcatggcggtagcggcagccacggcattcgtaccatcgattcggacttcgggaagaaacagcagaaaaaaggcgataaccacgatagttccgccacttatgaaatcaaatttcacgagtttgtgctgttcattctcgaagaaaaaatgggtgcgacgcgtcgtacttttctgacagatttagcccgcaagaaagggttccgcgtcgagaatgaactgaccgacgaagttacccacatcgtggcagaaaatctgtcacgctctgaagtattggcttggctgaaagaacacaagatggagaagaccaagcaattcgaactgctggatattagctggcttatcgaaagcatgaaagttggtaaaccggtggacaccaaggggaaataccagttggcggaatcggttgaggtgagtgcgaacccagatccgacagaaggtcgtgtaaacgagctgcctcctactatgaaaaccgtttctccgtatgcgtgtcaacgccgcaccaccctgaacaaccgtaatcaacgttttacggactcgctggagattcttcgtgaaaattacgagctgaaacgtaacgatgatactgcgctggaatttcgtcgtgctatctccgtgctgaaaagccttccgtttgaggtacgtagcctgaaagacacggaaggattgccctggatcagtgatgaagtcaaagggattatggaagaaatcatcgaagtcggggagtcgcgtgaagtgcaggccgtgctcaatgatgagtggtatcaaagcttccacgcatttacgagtgtctttggagtgggggtgaagacagcagacaagtggtaccgtatgggtctgcgcaccctcgaggatgttcgttccagcaagaccctgaagttgaccccgatgcagaaagtaggtctgctgtattatgaagatcttgctcgcggcgttacgcgtgccgaagctgacgcgatttggctgctggttcaggatgcagtcgcaactttcgacccggatgcgatcgtggagattgtcggtggatttcgtcgtgggaaacctcagggtcacgacgttgatctgcttatcagttctccgggagctgagaaagagcaagaagaccaactcctgcagaaagtgatgaatctgtggaagaaacaagggttgttgctgtatggtcgtctgttttggagtcagtgggaagatgggggttcgccttccggtaaggctgacgagggtgacgcggaggcgtcgtgctttctgatcctcaaactttatgatcatctggtgcgtaaaagtaaacgcaatatgccgactggttcgaacatgggcgagtccaaaccgtggaaagcaattcgcgtagatatgctgcgttgcccctatggcagttttgcgtttgcgatgttgcagtggaccggaagccgcatgttccgtcgtgatctgaaatggtacgccctggaagagaagaacatgatgctggacaatcattcgctgtatgacatgacccgcggtatcttcctccctgctaaatcggaagaggaaattttcgaacatctggggcttgaatacctggaaccgttcgaacgtaacgca

SEQ ID NO: 3848 - protein, 529 aa, synthetic construct
  REGION 1..529: note = Variant of terminal deoxynucleotidyltransferase
MHHHHHHGGSGSHGIRTIDSDFGKKQQKKGDNHDSSATYEIKFHEFVLFILEEKMGATRRTFLTDLARKKGFRVENELTDEVTHIVAENLSRSEVLAWLKEHKMEKTKQFELLDISWLIESMKVGKPVDTKGKYQLAESVEVSANPDPTEGRVNELPPTMKTVSPYACQRRTTLNNRNQRFTDSLEILRENYELKRNDDTALEFRRAISVLKSLPFEVRSLKDTEGLPWISDEVKGIMEEIIEVGESREVQAVLNDEWYQSFHAFTSVFGVGVKTADKWYRMGLRTLEDVRSSKTLKLTPMQKVGLLYYEDLARGVTRAEADAIWLLVQDAVATFDPDAIVEIVGGFRRGKPQGHDVDLLISSPGAEKEQEDQLLQKVMNLWKKQGLLLYGRLFWSQWEDGGSPSGKADEGDAEASCFLILKLYDHLVRKSKRNMPTGSNMGESKPWKAIRVDMLRCPYGSFAFAMLQWTGSRMFRRDLKWYALEEKNMMLDNHSLYDMTRGIFLPAKSEEEIFEHLGLEYLEPFERNA

SEQ ID NO: 3849 - DNA, 1587 bp, synthetic construct
  misc_feature 1..1587: note = Variant of terminal deoxynucleotidyltransferase
  source 1..1587: mol_type = other DNA
atgcaccatcatcatcatcatggcggtagcggcagccacggcattcgtaccatcgattcggacttcgggaagaaacagcagaaaaaaggcgataaccacgatagttccgccacttatgaaatcaaatttcacgagtttgtgctgttcattctcgaagaaaaaatgggtgcgacgcgtcgtacttttctgacagatttagcccgcaagaaagggttccgcgtcgagaatgaactgaccgacgaagttacccacatcgtggcagaaaatctgtcacgctctgaagtattggcttggctgaaagaacacaagatggagaagaccaagcaattcgaactgctggatattagctggcttatcgaaagcatgaaagttggtaaaccggtggacaccaaggggaaataccagttggcggaatcggttgaggtgagtgcgaacccagatccgacagaaggtcgtgtaaacgagctgcctcctactatgaaaaccgtttctccgtatgcgtgtcaacgccgcaccaccctgaacaaccgtaatcaacgttttacggactcgctggagattcttcgtgaaaattacgagttcaaacgcaacgatgatactgcgctggaatttcgtcgtgctatctccgtgctgaaaagccttccgtttgaggtacgtagcctgaaagacacggaaggattgccctggatcagtgatgaagtcaaagggattatggaagaaatcatcgaagtcggggagtcgcgtgaagtgcaggccgtgctcaatgatgagtggtatcaaagcttccacgcatttacgagtgtctttggagtgggggtgaagacagcagacaagtggtaccgtatgggtctgcgcaccctcgaggatgttcgttccagcaagaccctgcgtttgaccccgatgcagaaagtaggtctgctgtattatgaagatcttgctcgcggcgttacgcgtgccgaagctgacgcgatttggctgctggttcaggatgcagtcgcaactttcgacccggatgcgatcgtggagattgtcggtggatttcgtcgtgggaaacctcagggtcacgacgttgatctgcttatcagttctccgggagctgagaaagagcaagaagaccaactcctgcagaaagtgatgaatctgtggaagaaacaagggttgttgctgtacggtcgtctggagtggagtcagtgggaagatgggggttcgccttccggtaaggctgacgagggtgacgcggaggcgtcgtgctttctgatcctcaaactttatgatcatctggtgcgtaaaagtaaacgcaatatgccgactggttcgaacatgggcgagtccaaaccgtggaaagcaattcgcgtagatctgctgcgttgcccctatggcagttttgcgtttgcgatgttgcagtggtccggaagcggcatgttccgtcgtgatctgcgttggtacgccctggaagagaagaacatgatgctggacaatcattcgctgtatgacatgacccgcggtatcttcctccctgctaaatcggaagaggaaattttcgaacatctggggcttgaatacctggaaccgttcgaacgtaacgca

SEQ ID NO: 3850 - protein, 529 aa, synthetic construct
  REGION 1..529: note = Variant of terminal deoxynucleotidyltransferase
MHHHHHHGGSGSHGIRTIDSDFGKKQQKKGDNHDSSATYEIKFHEFVLFILEEKMGATRRTFLTDLARKKGFRVENELTDEVTHIVAENLSRSEVLAWLKEHKMEKTKQFELLDISWLIESMKVGKPVDTKGKYQLAESVEVSANPDPTEGRVNELPPTMKTVSPYACQRRTTLNNRNQRFTDSLEILRENYEFKRNDDTALEFRRAISVLKSLPFEVRSLKDTEGLPWISDEVKGIMEEIIEVGESREVQAVLNDEWYQSFHAFTSVFGVGVKTADKWYRMGLRTLEDVRSSKTLRLTPMQKVGLLYYEDLARGVTRAEADAIWLLVQDAVATFDPDAIVEIVGGFRRGKPQGHDVDLLISSPGAEKEQEDQLLQKVMNLWKKQGLLLYGRLEWSQWEDGGSPSGKADEGDAEASCFLILKLYDHLVRKSKRNMPTGSNMGESKPWKAIRVDLLRCPYGSFAFAMLQWSGSGMFRRDLRWYALEEKNMMLDNHSLYDMTRGIFLPAKSEEEIFEHLGLEYLEPFERNA

SEQ ID NO: 3851 - DNA, 1587 bp, synthetic construct
  misc_feature 1..1587: note = Variant of terminal deoxynucleotidyltransferase
  source 1..1587: mol_type = other DNA
atgcaccatcatcatcatcatggcggtagcggcagccacggcattcgtaccatcgattcggacttcgggaagaaacagcagaaaaaaggcgataaccacgatagttccgccacttatgaaatcaaatttcacgagtttgtgctgttcattctcgaagaaaaaatgggtgcgacgcgtcgtacttttctgacagatttagcccgcaagaaagggttccgcgtcgagaatgaactgaccgacgaagttacccacatcgtggcagaaaatctgtcacgctctgaagtattggcttggctgaaagaacacaagatggagaagaccaagcaattcgaactgctggatattagctggcttatcgaaagcatgaaagttggtaaaccggtggacaccaaggggaaataccagttggcggaatcggttgaggtgagtgcgaacccagatccgacagaaggtcgtgtaaacgagctgcctcctactatgaaaaccgtttctccgtatgcgtgtcaacgccgcaccaccctgaacaaccgtaatcaacgttttacggactcgctggagattcttcgtgaaaattacgagctgaaaggcaacgatgatactgcgctggaatttcgtcgtgctatctccgtgctgaaaagccttccgtttgaggtacgtagcctgaaagacacggaaggattgccctggatcagtgatgaagtcaaagggattatggaagaaatcatcgaagtcggggagtcgcgtgaagtgcaggccgtgctcaatgatgagtggtatcaaagcttccacgcatttacgagtgtctttggagtgggggtgaagacagcagacaagtggtaccgtatgggtctgcgcaccctcgaggatgttcgttccagcaagaccctgaagttgaccccgatgcagaaagtaggtctgctgtattatgaagatcttgctcgcggcgttacgcgtgccgaagctgacgcgatttggctgctggttcaggatgcagtcgcaactttcgacccggatgcgatcgtggagattgtcggtggatttcgtcgtgggaaacctcagggtcacgacgttgatctgcttatcagttctccgggagctgagaaagagcaagaagaccaactcctgcagaaagtgatgaatctgtggaagaaacaagggttgttgctgtatggtcgtctgttttggagtcagtgggaagatgggggttcgccttccggtaaggctgacgagggtgacgcggaggcgtcgtgctttctgatcctcaaactttatgatcatctggtgcgtaaaagtaaacgcaatatgccgactggttcgaacatgggcgagtccaaaccgtggaaagcaattcgcgtagatatgctgcgttgcccctatggcagttttgcgtttgcgatgttgcagtggaccggaagccgcatgttccgtcgtgatctgaaatggtacgccctggaagagaagaacatgatgctggacaatcattcgctgtatgacatgacccgcggtatcttcctccctgctaaatcggaagaggaaattttcgaacatctggggcttgaatacctggaaccgttcgaacgtaacgca

SEQ ID NO: 3852 - protein, 529 aa, synthetic construct
  REGION 1..529: note = Variant of terminal deoxynucleotidyltransferase
MHHHHHHGGSGSHGIRTIDSDFGKKQQKKGDNHDSSATYEIKFHEFVLFILEEKMGATRRTFLTDLARKKGFRVENELTDEVTHIVAENLSRSEVLAWLKEHKMEKTKQFELLDISWLIESMKVGKPVDTKGKYQLAESVEVSANPDPTEGRVNELPPTMKTVSPYACQRRTTLNNRNQRFTDSLEILRENYELKGNDDTALEFRRAISVLKSLPFEVRSLKDTEGLPWISDEVKGIMEEIIEVGESREVQAVLNDEWYQSFHAFTSVFGVGVKTADKWYRMGLRTLEDVRSSKTLKLTPMQKVGLLYYEDLARGVTRAEADAIWLLVQDAVATFDPDAIVEIVGGFRRGKPQGHDVDLLISSPGAEKEQEDQLLQKVMNLWKKQGLLLYGRLFWSQWEDGGSPSGKADEGDAEASCFLILKLYDHLVRKSKRNMPTGSNMGESKPWKAIRVDMLRCPYGSFAFAMLQWTGSRMFRRDLKWYALEEKNMMLDNHSLYDMTRGIFLPAKSEEEIFEHLGLEYLEPFERNA

SEQ ID NO: 3853 - DNA, 1587 bp, synthetic construct
  misc_feature 1..1587: note = Variant of terminal deoxynucleotidyltransferase
  source 1..1587: mol_type = other DNA
atgcaccatcatcatcatcatggcggtagcggcagccacggcattcgtaccatcgattcggacttcgggaagaaacagcagaaaaaaggcgataaccacgatagttccgccacttatgaaatcaaatttcacgagtttgtgctgttcattctcgaagaaaaaatgggtgcgacgcgtcgtacttttctgacagatttagcccgcaagaaagggttccgcgtcgagaatgaactgaccgacgaagttacccacatcgtggcagaaaatctgtcacgctctgaagtattggcttggctgaaagaacacaagatggagaagaccaagcaattcgaactgctggatattagctggcttatcgaaagcatgaaagttggtaaaccggtggacaccaaggggaaataccagttggcggaatcggttgaggtgagtgcgaacccagatccgacagaaggtcgtgtaaacgagctgcctcctactatgaaaaccgtttctccgtatgcgtgtcaacgccgcaccaccctgaacaaccgtaatcaacgttttacggactcgctggagattcttcgtgaaaattacgagtttaaaggcaacgatgatactgcgctggaatttcgtcgtgctatctccgtgctgaaaagccttccgtttgaggtacgtagcctgaaagacacggaaggattgccctggatcagtgatgaagtcaaagggattatggaagaaatcatcgaagtcggggagtcgcgtgaagtgcaggccgtgctcaatgatgagtggtatcaaagcttccacgcatttacgagtgtctttggagtgggggtgaagacagcagacaagtggtaccgtatgggtctgcgcaccctcgaggatgttcgttccagcaagaccctgaagttgaccccgatgcagaaagtaggtctgctgtattatgaagatcttgctcgcggcgttacgcgtgccgaagctgacgcgatttggctgctggttcaggatgcagtcgcaactttcgacccggatgcgatcgtggagattgtcggtggatttcgtcgtgggaaacctcagggtcacgacgttgatctgcttatcagttctccgggagctgagaaagagcaagaagaccaactcctgcagaaagtgatgaatctgtggaagaaacaagggttgttgctgtatggtcgtctgttttggagtcagtgggaagatgggggttcgccttccggtaaggctgacgagggtgacgcggaggcgtcgtgctttctgatcctcaaactttatgatcatctggtgcgtaaaagtaaacgcaatatgccgactggttcgaacatgggcgagtccaaaccgtggaaagcaattcgcgtagatatgctgcgttgcccctatggcagttttgcgtttgcgatgttgcagtggaccggaagccgcatgttccgtcgtgatctgaaatggtacgccctggaagagaagaacatgatgctggacaatcattcgctgtatgacatgacccgcggtatcttcctccctgctaaatcggaagaggaaattttcgaacatctggggcttgaatacctggaaccgttcgaacgtaacgca

SEQ ID NO: 3854 - protein, 529 aa, synthetic construct
  REGION 1..529: note = Variant of terminal deoxynucleotidyltransferase
MHHHHHHGGSGSHGIRTIDSDFGKKQQKKGDNHDSSATYEIKFHEFVLFILEEKMGATRRTFLTDLARKKGFRVENELTDEVTHIVAENLSRSEVLAWLKEHKMEKTKQFELLDISWLIESMKVGKPVDTKGKYQLAESVEVSANPDPTEGRVNELPPTMKTVSPYACQRRTTLNNRNQRFTDSLEILRENYEFKGNDDTALEFRRAISVLKSLPFEVRSLKDTEGLPWISDEVKGIMEEIIEVGESREVQAVLNDEWYQSFHAFTSVFGVGVKTADKWYRMGLRTLEDVRSSKTLKLTPMQKVGLLYYEDLARGVTRAEADAIWLLVQDAVATFDPDAIVEIVGGFRRGKPQGHDVDLLISSPGAEKEQEDQLLQKVMNLWKKQGLLLYGRLFWSQWEDGGSPSGKADEGDAEASCFLILKLYDHLVRKSKRNMPTGSNMGESKPWKAIRVDMLRCPYGSFAFAMLQWTGSRMFRRDLKWYALEEKNMMLDNHSLYDMTRGIFLPAKSEEEIFEHLGLEYLEPFERNA

SEQ ID NO: 3855 - DNA, 1587 bp, synthetic construct
  misc_feature 1..1587: note = Variant of terminal deoxynucleotidyltransferase
  source 1..1587: mol_type = other DNA
atgcaccatcatcatcatcatggcggtagcggcagccacggcattcgtaccatcgattcggacttcgggaagaaacagcagaaaaaaggcgataaccacgatagttccgccacttatgaaatcaaatttcacgagtttgtgctgttcattctcgaagaaaaaatgggtgcgacgcgtcgtacttttctgacagatttagcccgcaagaaagggttccgcgtcgagaatgaactgaccgacgaagttacccacatcgtggcagaaaatctgtcacgctctgaagtattggcttggctgaaagaacacaagatggagaagaccaagcaattcgaactgctggatattagctggcttatcgaaagcatgaaagttggtaaaccggtggacaccaaggggaaataccagttggcggaatcggttgaggtgagtgcgaacccagatccgacagaaggtcgtgtaaacgagctgcctcctactatgaaaaccgtttctccgtatgcgtgtcaacgccgcaccaccctgaacaaccgtaatcaacgttttacggactcgctggagattcttcgtgaaaattacgagttcaaaggcaacgatgatactgcgctggaatttcgtcgtgctatctccgtgctgaaaagccttccgtttgaggtacgtagcctgaaagacacggaaggattgccctggatcagtgatgaagtcaaagggattatggaagaaatcatcgaagtcggggagtcgcgtgaagtgcaggccgtgctcaatgatgagtggtatcaaagcttccacgcatttacgagtgtctttggagtgggggtgaagacagcagacaagtggtaccgtatgggtctgcgcaccctcgaggatgttcgttccagcaagaccctgaagttgaccccgatgcagaaagtaggtctgctgtattatgaagatcttgctcgcggcgttacgcgtgccgaagctgacgcgatttggctgctggttcaggatgcagtcgcaactttcgacccggatgcgatcgtggagattgtcggtggatttcgtcgtgggaaacctcagggtcacgacgttgatctgcttatcagttctccgggagctgagaaagagcaagaagaccaactcctgcagaaagtgatgaatctgtggaagaaacaagggttgttgctgtatggtcgtctgttttggagtcagtgggaagatgggggttcgccttccggtaaggctgacgagggtgacgcggaggcgtcgtgctttctgatcctcaaactttatgatcatctggtgcgtaaaagtaaacgcaatatgccgactggttcgaacatgggcgagtccaaaccgtggaaagcaattcgcgtagatatgctgcgttgcccctatggcagttttgcgtttgcgatgttgcagtggaccggaagccgcatgttccgtcgtgatctgcgctggtacgccctggaagagaagaacatgatgctggacaatcattcgctgtatgacatgacccgcggtatcttcctccctgctaaatcggaagaggaaattttcgaacatctggggcttgaatacctggaaccgttcgaacgtaacgca

SEQ ID NO: 3856 - protein, 529 aa, synthetic construct
  REGION 1..529: note = Variant of terminal deoxynucleotidyltransferase
MHHHHHHGGSGSHGIRTIDSDFGKKQQKKGDNHDSSATYEIKFHEFVLFILEEKMGATRRTFLTDLARKKGFRVENELTDEVTHIVAENLSRSEVLAWLKEHKMEKTKQFELLDISWLIESMKVGKPVDTKGKYQLAESVEVSANPDPTEGRVNELPPTMKTVSPYACQRRTTLNNRNQRFTDSLEILRENYEFKGNDDTALEFRRAISVLKSLPFEVRSLKDTEGLPWISDEVKGIMEEIIEVGESREVQAVLNDEWYQSFHAFTSVFGVGVKTADKWYRMGLRTLEDVRSSKTLKLTPMQKVGLLYYEDLARGVTRAEADAIWLLVQDAVATFDPDAIVEIVGGFRRGKPQGHDVDLLISSPGAEKEQEDQLLQKVMNLWKKQGLLLYGRLFWSQWEDGGSPSGKADEGDAEASCFLILKLYDHLVRKSKRNMPTGSNMGESKPWKAIRVDMLRCPYGSFAFAMLQWTGSRMFRRDLRWYALEEKNMMLDNHSLYDMTRGIFLPAKSEEEIFEHLGLEYLEPFERNA

SEQ ID NO: 3857 - DNA, 1587 bp, synthetic construct
  misc_feature 1..1587: note = Variant of terminal deoxynucleotidyltransferase
  source 1..1587: mol_type = other DNA
atgcaccatcatcatcatcatggcggtagcggcagccacggcattcgtaccatcgattcggacttcgggaagaaacagcagaaaaaaggcgataaccacgatagttccgccacttatgaaatcaaatttcacgagtttgtgctgttcattctcgaagaaaaaatgggtgcgacgcgtcgtacttttctgacagatttagcccgcaagaaagggttccgcgtcgagaatgaactgaccgacgaagttacccacatcgtggcagaaaatctgtcacgctctgaagtattggcttggctgaaagaacacaagatggagaagaccaagcaattcgaactgctggatattagctggcttatcgaaagcatgaaagttggtaaaccggtggacaccaaggggaaataccagttggcggaatcggttgaggtgagtgcgaacccagatccgacagaaggtcgtgtaaacgagctgcctcctactatgaaaaccgtttctccgtatgcgtgtcaacgccgcaccaccctgaacaaccgtaatcaacgttttacggactcgctggagattcttcgtgaaaattacgagctgaaacgtaacgatgatactgcgctggaatttcgtcgtgctatctccgtgctgaaaagccttccgtttgaggtacgtagcctgaaagacacggaaggattgccctggatcagtgatgaagtcaaagggattatggaagaaatcatcgaagtcggggagtcgcgtgaagtgcaggccgtgctcaatgatgagtggtatcaaagcttccacgcatttacgagtgtctttggagtgggggtgaagacagcagacaagtggtaccgtatgggtctgcgcaccctcgaggatgttcgttccagcaagaccctgaagttgaccccgatgcagaaagtaggtctgctgtattatgaagatcttgctcgcggcgttacgcgtgccgaagctgacgcgatttggctgctggttcaggatgcagtcgcaactttcgacccggatgcgatcgtggagattgtcggtggatttcgtcgtgggaaacctcagggtcacgacgttgatctgcttatcagttctccgggagctgagaaagagcaagaagaccaactcctgcagaaagtgatgaatctgtggaagaaacaagggttgttgctgtatggtcgtctgttttggagtcagtgggaagatgggggttcgccttccggtaaggctgacgagggtgacgcggaggcgtcgtgctttctgatcctcaaactttatgatcatctggtgcgtaaaagtaaacgcaatatgccgactggttcgaacatgggcgagtccaaaccgtggaaagcaattcgcgtagatatgctgcgttgcccctatggcagttttgcgtttgcgatgttgcagtggaccggaagccgcatgttccgtcgtgatctgcgctggtacgccctggaagagaagaacatgatgctggacaatcattcgctgtatgacatgacccgcggtatcttcctccctgctaaatcggaagaggaaattttcgaacatctggggcttgaatacctggaaccgttcgaacgtaacgca

SEQ ID NO: 3858 - protein, 529 aa, synthetic construct
  REGION 1..529: note = Variant of terminal deoxynucleotidyltransferase
MHHHHHHGGSGSHGIRTIDSDFGKKQQKKGDNHDSSATYEIKFHEFVLFILEEKMGATRRTFLTDLARKKGFRVENELTDEVTHIVAENLSRSEVLAWLKEHKMEKTKQFELLDISWLIESMKVGKPVDTKGKYQLAESVEVSANPDPTEGRVNELPPTMKTVSPYACQRRTTLNNRNQRFTDSLEILRENYELKRNDDTALEFRRAISVLKSLPFEVRSLKDTEGLPWISDEVKGIMEEIIEVGESREVQAVLNDEWYQSFHAFTSVFGVGVKTADKWYRMGLRTLEDVRSSKTLKLTPMQKVGLLYYEDLARGVTRAEADAIWLLVQDAVATFDPDAIVEIVGGFRRGKPQGHDVDLLISSPGAEKEQEDQLLQKVMNLWKKQGLLLYGRLFWSQWEDGGSPSGKADEGDAEASCFLILKLYDHLVRKSKRNMPTGSNMGESKPWKAIRVDMLRCPYGSFAFAMLQWTGSRMFRRDLRWYALEEKNMMLDNHSLYDMTRGIFLPAKSEEEIFEHLGLEYLEPFERNA

SEQ ID NO: 3859 - DNA, 1587 bp, synthetic construct
  misc_feature 1..1587: note = Variant of terminal deoxynucleotidyltransferase
  source 1..1587: mol_type = other DNA
atgcaccatcatcatcatcatggcggtagcggcagccacggcattcgtaccatcgattcggacttcgggaagaaacagcagaaaaaaggcgataaccacgatagttccgccacttatgaaatcaaatttcacgagtttgtgctgttcattctcgaagaaaaaatgggtgcgacgcgtcgtacttttctgacagatttagcccgcaagaaagggttccgcgtcgagaatgaactgaccgacgaagttacccacatcgtggcagaaaatctgtcacgctctgaagtattggcttggctgaaagaacacaagatggagaagaccaagcaattcgaactgctggatattagctggcttatcgaaagcatgaaagttggtaaaccggtggacaccaaggggaaataccagttggcggaatcggttgaggtgagtgcgaacccagatccgacagaaggtcgtgtaaacgagctgcctcctactatgaaaaccgtttctccgtatgcgtgtcaacgccgcaccaccctgaacaaccgtaatcaacgttttacggactcgctggagattcttcgtgaaaattacgagtttaaaggcaacgatgatactgcgctggaatttcgtcgtgctatctccgtgctgaaaagccttccgtttgaggtacgtagcctgaaagacacggaaggattgccctggatcagtgatgaagtcaaagggattatggaagaaatcatcgaagtcggggagtcgcgtgaagtgcaggccgtgctcaatgatgagtggtatcaaagcttccacgcatttacgagtgtctttggagtgggggtgaagacagcagacaagtggtaccgtatgggtctgcgcaccctcgaggatgttcgttccagcaagaccctgaagttgaccccgatgcagaaagtaggtctgctgtattatgaagatcttgctcgcggcgttacgcgtgccgaagctgacgcgatttggctgctggttcaggatgcagtcgcaactttcgacccggatgcgatcgtggagattgtcggtggatttcgtcgtgggaaacctcagggtcacgacgttgatctgcttatcagttctccgggagctgagaaagagcaagaagaccaactcctgcagaaagtgatgaatctgtggaagaaacaagggttgttgctgtatggtcgtctggaatggagtcagtgggaagatgggggttcgccttccggtaaggctgacgagggtgacgcggaggcgtcgtgctttctgatcctcaaactttatgatcatctggtgcgtaaaagtaaacgcaatatgccgactggttcgaacatgggcgagtccaaaccgtggaaagcaattcgcgtagatatgctgcgttgcccctatggcagttttgcgtttgcgatgttgcagtggaccggaagccgcatgttccgtcgtgatctgcgctggtacgccctggaagagaagaacatgatgctggacaatcattcgctgtatgacatgacccgcggtatcttcctccctgctaaatcggaagaggaaattttcgaacatctggggcttgaatacctggaaccgttcgaacgtaacgca

SEQ ID NO: 3860 - protein, 529 aa, synthetic construct
  REGION 1..529: note = Variant of terminal deoxynucleotidyltransferase
MHHHHHHGGSGSHGIRTIDSDFGKKQQKKGDNHDSSATYEIKFHEFVLFILEEKMGATRRTFLTDLARKKGFRVENELTDEVTHIVAENLSRSEVLAWLKEHKMEKTKQFELLDISWLIESMKVGKPVDTKGKYQLAESVEVSANPDPTEGRVNELPPTMKTVSPYACQRRTTLNNRNQRFTDSLEILRENYEFKGNDDTALEFRRAISVLKSLPFEVRSLKDTEGLPWISDEVKGIMEEIIEVGESREVQAVLNDEWYQSFHAFTSVFGVGVKTADKWYRMGLRTLEDVRSSKTLKLTPMQKVGLLYYEDLARGVTRAEADAIWLLVQDAVATFDPDAIVEIVGGFRRGKPQGHDVDLLISSPGAEKEQEDQLLQKVMNLWKKQGLLLYGRLEWSQWEDGGSPSGKADEGDAEASCFLILKLYDHLVRKSKRNMPTGSNMGESKPWKAIRVDMLRCPYGSFAFAMLQWTGSRMFRRDLRWYALEEKNMMLDNHSLYDMTRGIFLPAKSEEEIFEHLGLEYLEPFERNA

SEQ ID NO: 3861 - DNA, 1587 bp, synthetic construct
  misc_feature 1..1587: note = Variant of terminal deoxynucleotidyltransferase
  source 1..1587: mol_type = other DNA
atgcaccatcatcatcatcatggcggtagcggcagccacggcattcgtaccatcgattcggacttcgggaagaaacagcagaaaaaaggcgataaccacgatagttccgccacttatgaaatcaaatttcacgagtttgtgctgttcattctcgaagaaaaaatgggtgcgacgcgtcgtacttttctgacagatttagcccgcaagaaagggttccgcgtcgagaatgaactgaccgacgaagttacccacatcgtggcagaaaatctgtcacgctctgaagtattggcttggctgaaagaacacaagatggagaagaccaagcaattcgaactgctggatattagctggcttatcgaaagcatgaaagttggtaaaccggtggacaccaaggggaaataccagttggcggaatcggttgaggtgagtgcgaacccagatccgacagaaggtcgtgtaaacgagctgcctcctactatgaaaaccgtttctccgtatgcgtgtcaacgccgcaccaccctgaacaaccgtaatcaacgttttacggactcgctggagattcttcgtgaaaattacgagtttaaaggcaacgatgatactgcgctggaatttcgtcgtgctatctccgtgctgaaaagccttccgtttgaggtacgtagcctgaaagacacggaaggattgccctggatcagtgatgaagtcaaagggattatggaagaaatcatcgaagtcggggagtcgcgtgaagtgcaggccgtgctcaatgatgagtggtatcaaagcttccacgcatttacgagtgtctttggagtgggggtgaagacagcagacaagtggtaccgtatgggtctgcgcaccctcgaggatgttcgttccagcaagaccctgaagttgaccccgatgcagaaagtaggtctgctgtattatgaagatcttgctcgcggcgttacgcgtgccgaagctgacgcgatttggctgctggttcaggatgcagtcgcaactttcgacccggatgcgatcgtggagattgtcggtggatttcgtcgtgggaaacctcagggtcacgacgttgatctgcttatcagttctccgggagctgagaaagagcaagaagaccaactcctgcagaaagtgatgaatctgtggaagaaacaagggttgttgctgtatggtcgtctggaatggagtcagtgggaagatgggggttcgccttccggtaaggctgacgagggtgacgcggaggcgtcgtgctttctgatcctcaaactttatgatcatctggtgcgtaaaagtaaacgcaatatgccgactggttcgaacatgggcgagtccaaaccgtggaaagcaattcgcgtagatctgctgcgttgcccctatggcagttttgcgtttgcgatgttgcagtggaccggaagccgcatgttccgtcgtgatctgcgctggtacgccctggaagagaagaacatgatgctggacaatcattcgctgtatgacatgacccgcggtatcttcctccctgctaaatcggaagaggaaattttcgaacatctggggcttgaatacctggaaccgttcgaacgtaacgca

SEQ ID NO: 3862 - protein, 529 aa, synthetic construct
  REGION 1..529: note = Variant of terminal deoxynucleotidyltransferase
MHHHHHHGGSGSHGIRTIDSDFGKKQQKKGDNHDSSATYEIKFHEFVLFILEEKMGATRRTFLTDLARKKGFRVENELTDEVTHIVAENLSRSEVLAWLKEHKMEKTKQFELLDISWLIESMKVGKPVDTKGKYQLAESVEVSANPDPTEGRVNELPPTMKTVSPYACQRRTTLNNRNQRFTDSLEILRENYEFKGNDDTALEFRRAISVLKSLPFEVRSLKDTEGLPWISDEVKGIMEEIIEVGESREVQAVLNDEWYQSFHAFTSVFGVGVKTADKWYRMGLRTLEDVRSSKTLKLTPMQKVGLLYYEDLARGVTRAEADAIWLLVQDAVATFDPDAIVEIVGGFRRGKPQGHDVDLLISSPGAEKEQEDQLLQKVMNLWKKQGLLLYGRLEWSQWEDGGSPSGKADEGDAEASCFLILKLYDHLVRKSKRNMPTGSNMGESKPWKAIRVDLLRCPYGSFAFAMLQWTGSRMFRRDLRWYALEEKNMMLDNHSLYDMTRGIFLPAKSEEEIFEHLGLEYLEPFERNA

SEQ ID NO: 3863 - DNA, 1587 bp, synthetic construct
  misc_feature 1..1587: note = Variant of terminal deoxynucleotidyltransferase
  source 1..1587: mol_type = other DNA
atgcaccatcatcatcatcatggcggtagcggcagccacggcattcgtaccatcgattcggacttcgggaagaaacagcagaaaaaaggcgataaccacgatagttccgccacttatgaaatcaaatttcacgagtttgtgctgttcattctcgaagaaaaaatgggtgcgacgcgtcgtacttttctgacagatttagcccgcaagaaagggttccgcgtcgagaatgaactgaccgacgaagttacccacatcgtggcagaaaatctgtcacgctctgaagtattggcttggctgaaagaacacaagatggagaagaccaagcaattcgaactgctggatattagctggcttatcgaaagcatgaaagttggtaaaccggtggacaccaaggggaaataccagttggcggaatcggttgaggtgagtgcgaacccagatccgacagaaggtcgtgtaaacgagctgcctcctactatgaaaaccgtttctccgtatgcgtgtcaacgccgcaccaccctgaacaaccgtaatcaacgttttacggactcgctggagattcttcgtgaaaattacgagttcaaacgtaacgatgatactgcgctggaatttcgtcgtgctatctccgtgctgaaaagccttccgtttgaggtacgtagcctgaaagacacggaaggattgccctggatcagtgatgaagtcaaagggattatggaagaaatcatcgaagtcggggagtcgcgtgaagtgcaggccgtgctcaatgatgagtggtatcaaagcttccacgcatttacgagtgtctttggagtgggggtgaagacagcagacaagtggtaccgtatgggtctgcgcaccctcgaggatgttcgttccagcaagaccctgaagttgaccccgatgcagaaagtaggtctgctgtattatgaagatcttgctcgcggcgttacgcgtgccgaagctgacgcgatttggctgctggttcaggatgcagtcgcaactttcgacccggatgcgatcgtggagattgtcggtggatttcgtcgtgggaaacctcagggtcacgacgttgatctgcttatcagttctccgggagctgagaaagagcaagaagaccaactcctgcagaaagtgatgaatctgtggaagaaacaagggttgttgctgtatggtcgtctggaatggagtcagtgggaagatgggggttcgccttccggtaaggctgacgagggtgacgcggaggcgtcgtgctttctgatcctcaaactttatgatcatctggtgcgtaaaagtaaacgcaatatgccgactggttcgaacatgggcgagtccaaaccgtggaaagcaattcgcgtagatatgctgcgttgcccctatggcagttttgcgtttgcgatgttgcagtggaccggaagccgcatgttccgtcgtgatctgcgttggtacgccctggaagagaagaacatgatgctggacaatcattcgctgtatgacatgacccgcggtatcttcctccctgctaaatcggaagaggaaattttcgaacatctggggcttgaatacctggaaccgttcgaacgtaacgca

SEQ ID NO: 3864 - protein, 529 aa, synthetic construct
  REGION 1..529: note = Variant of terminal deoxynucleotidyltransferase
MHHHHHHGGSGSHGIRTIDSDFGKKQQKKGDNHDSSATYEIKFHEFVLFILEEKMGATRRTFLTDLARKKGFRVENELTDEVTHIVAENLSRSEVLAWLKEHKMEKTKQFELLDISWLIESMKVGKPVDTKGKYQLAESVEVSANPDPTEGRVNELPPTMKTVSPYACQRRTTLNNRNQRFTDSLEILRENYEFKRNDDTALEFRRAISVLKSLPFEVRSLKDTEGLPWISDEVKGIMEEIIEVGESREVQAVLNDEWYQSFHAFTSVFGVGVKTADKWYRMGLRTLEDVRSSKTLKLTPMQKVGLLYYEDLARGVTRAEADAIWLLVQDAVATFDPDAIVEIVGGFRRGKPQGHDVDLLISSPGAEKEQEDQLLQKVMNLWKKQGLLLYGRLEWSQWEDGGSPSGKADEGDAEASCFLILKLYDHLVRKSKRNMPTGSNMGESKPWKAIRVDMLRCPYGSFAFAMLQWTGSRMFRRDLRWYALEEKNMMLDNHSLYDMTRGIFLPAKSEEEIFEHLGLEYLEPFERNA

SEQ ID NO: 3865 - DNA, 1587 bp, synthetic construct
  misc_feature 1..1587: note = Variant of terminal deoxynucleotidyltransferase
  source 1..1587: mol_type = other DNA
atgcaccatcatcatcatcatggcggtagcggcagccacggcattcgtaccatcgattcggacttcgggaagaaacagcagaaaaaaggcgataaccacgatagttccgccacttatgaaatcaaatttcacgagtttgtgctgttcattctcgaagaaaaaatgggtgcgacgcgtcgtacttttctgacagatttagcccgcaagaaagggttccgcgtcgagaatgaactgaccgacgaagttacccacatcgtggcagaaaatctgtcacgctctgaagtattggcttggctgaaagaacacaagatggagaagaccaagcaattcgaactgctggatattagctggcttatcgaaagcatgaaagttggtaaaccggtggacaccaaggggaaataccagttggcggaatcggttgaggtgagtgcgaacccagatccgacagaaggtcgtgtaaacgagctgcctcctactatgaaaaccgtttctccgtatgcgtgtcaacgccgcaccaccctgaacaaccgtaatcaacgttttacggactcgctggagattcttcgtgaaaattacgagctgaaaggcaacccagatactgcgctggaatttcgtcgtgctatctccgtgctgaaaagccttccgtttgaggtacgtagcctgaaagacacggaaggattgccctggatcagtgatgaagtcaaagggattatggaagaaatcatcgaagtcggggagtcgcgtgaagtgcaggccgtgctcaatgatgagtggtatcaaagcttccacgcatttacgagtgtctttggagtgggggtgaagacagcagacaagtggtaccgtatgggtctgcgcaccctcgaggatgttcgttccagcaagaccctgaagttgaccccgatgcagaaagtaggtctgctgtattatgaagatcttgctcgcggcgttacgcgtgccgaagctgacgcgatttggctgctggttcaggatgcagtcgcaactttcgacccggatgcgatcgtggagattgtcggtggatttcgtcgtgggaaacctcagggtcacgacgttgatctgcttatcagttctccgggagctgagaaagagcaagaagaccaactcctgcagaaagtgatgaatctgtggaagaaacaagggttgttgctgtgtggtcgtctggaatggagtcagtgggaagatgggggttcgccttccggtaaggctgatgagggtgacgcggaggcgtcgtgctttctgatcctcaaactttatgatcatctggtgcgtaaaagtaaacgcaatatgccgactggttcgaacatgggcgagtccaaaccgtggaaagcaattaaagtagatctgctgcgttgcccctatggcagttttgcgtttgcgatgttgcagtggaccggaagccgcatgttccgtcgtgatctgcgctggtacgccctggaagagaagaacatgatgctggacgttcattcgctgtatgacatgacccgcggtatcttcctccctgctaaatcggaagaggaaattttcgaacatctggggcttgaatacctggaaccgttcgaacgtaacgca

SEQ ID NO: 3866 - protein, 529 aa, synthetic construct
  REGION 1..529: note = Variant of terminal deoxynucleotidyltransferase
MHHHHHHGGSGSHGIRTIDSDFGKKQQKKGDNHDSSATYEIKFHEFVLFILEEKMGATRRTFLTDLARKKGFRVENELTDEVTHIVAENLSRSEVLAWLKEHKMEKTKQFELLDISWLIESMKVGKPVDTKGKYQLAESVEVSANPDPTEGRVNELPPTMKTVSPYACQRRTTLNNRNQRFTDSLEILRENYELKGNPDTALEFRRAISVLKSLPFEVRSLKDTEGLPWISDEVKGIMEEIIEVGESREVQAVLNDEWYQSFHAFTSVFGVGVKTADKWYRMGLRTLEDVRSSKTLKLTPMQKVGLLYYEDLARGVTRAEADAIWLLVQDAVATFDPDAIVEIVGGFRRGKPQGHDVDLLISSPGAEKEQEDQLLQKVMNLWKKQGLLLCGRLEWSQWEDGGSPSGKADEGDAEASCFLILKLYDHLVRKSKRNMPTGSNMGESKPWKAIKVDLLRCPYGSFAFAMLQWTGSRMFRRDLRWYALEEKNMMLDVHSLYDMTRGIFLPAKSEEEIFEHLGLEYLEPFERNA

SEQ ID NO: 3867 - DNA, 1587 bp, synthetic construct
  misc_feature 1..1587: note = Variant of terminal deoxynucleotidyltransferase
  source 1..1587: mol_type = other DNA
atgcaccatcatcatcatcatggcggtagcggcagccacggcattcgtaccatcgattcggacttcgggaagaaacagcagaaaaaaggcgataaccacgatagttccgccacttatgaaatcaaatttcacgagtttgtgctgttcattctcgaagaaaaaatgggtgcgacgcgtcgtacttttctgacagatttagcccgcaagaaagggttccgcgtcgagaatgaactgaccgacgaagttacccacatcgtggcagaaaatctgtcacgctctgaagtattggcttggctgaaagaacacaagatggagaagaccaagcaattcgaactgctggatattagctggcttatcgaaagcatgaaagttggtaaaccggtggacaccaaggggaaataccagttggcggaatcggttgaggtgagtgcgaacccagatccgacagaaggtcgtgtaaacgagctgcctcctactatgaaaaccgtttctccgtatgcgtgtcaacgccgcaccaccctgaacaaccgtaatcaacgttttacggactcgctggagattcttcgtgaaaattacgagctgaaaggcaacccagatactgcgctggaatttcgtcgtgctatctccgtgctgaaaagccttccgtttgaggtacgtagcctgaaagacacggaaggattgccctggatcagtgatgaagtcaaagggattatggaagaaatcatcgaagtcggggagtcgcgtgaagtgcaggccgtgctcaatgatgagtggtatcaaagcttccacgcatttacgcaggtctttggagtgggggtgaagacagcagacaagtggtaccgtatgggtctgcgcaccctcgaggatgttcgttccagcaagaccctgaagttgaccccgatgcagaaagtaggtctgctgtattatgaagatcttgctgctggcgttacgcgtgccgaagctgacgcgatttggctgctggtccaggatgcagtcgcaactttcgacccggatgcgatcgtggagattgtcggtggatttcgtcgtgggaaacctcagggtcacgacgttgatctgcttatcagttctccgggagctgagaaagagcaagaagaccaactcctgcagaaagtgatgaatctgtggaagaaacaagggttgttgctgtgtggtcgtctggaatggagtcagtgggaagatgggggttcgccttccggtaaggctgacgagggtgacgcggaggcgtcgtgctttctgatcctcaaactttatgatcatctggtgcgtaaaagtaaacgcaatatgccgactggttcgaacatgggcgagtccaaaccgtggaaagcaattaaagtagatctgctgcgttgcccctatggcagttttgcgtttgcgatgttgcagtggaccggaagccgcatgttccgtcgtgatctgcgctggtacgccctggaagagaagaacatgatgctggacaatcattcgctgtatgacatgacccgcggtatcttcctccctgctaaatcggaagaggaaattttcgaacatctggggcttgaatacctggaaccgttcgaacgtaacgca

SEQ ID NO: 3868 - protein, 529 aa, synthetic construct
  REGION 1..529: note = Variant of terminal deoxynucleotidyltransferase
MHHHHHHGGSGSHGIRTIDSDFGKKQQKKGDNHDSSATYEIKFHEFVLFILEEKMGATRRTFLTDLARKKGFRVENELTDEVTHIVAENLSRSEVLAWLKEHKMEKTKQFELLDISWLIESMKVGKPVDTKGKYQLAESVEVSANPDPTEGRVNELPPTMKTVSPYACQRRTTLNNRNQRFTDSLEILRENYELKGNPDTALEFRRAISVLKSLPFEVRSLKDTEGLPWISDEVKGIMEEIIEVGESREVQAVLNDEWYQSFHAFTQVFGVGVKTADKWYRMGLRTLEDVRSSKTLKLTPMQKVGLLYYEDLAAGVTRAEADAIWLLVQDAVATFDPDAIVEIVGGFRRGKPQGHDVDLLISSPGAEKEQEDQLLQKVMNLWKKQGLLLCGRLEWSQWEDGGSPSGKADEGDAEASCFLILKLYDHLVRKSKRNMPTGSNMGESKPWKAIKVDLLRCPYGSFAFAMLQWTGSRMFRRDLRWYALEEKNMMLDNHSLYDMTRGIFLPAKSEEEIFEHLGLEYLEPFERNA

SEQ ID NO: 3869 - DNA, 1587 bp, synthetic construct
  misc_feature 1..1587: note = Variant of terminal deoxynucleotidyltransferase
  source 1..1587: mol_type = other DNA
atgcaccatcatcatcatcatggcggtagcggcagccacggcattcgtaccatcgattcggacttcgggaagaaacagcagaaaaaaggcgataaccacgatagttccgccacttatgaaatcaaatttcacgagtttgtgctgttcattctcgaagaaaaaatgggtgcgacgcgtcgtacttttctgacagatttagcccgcaagaaagggttccgcgtcgagaatgaactgaccgacgaagttacccacatcgtggcagaaaatctgtcacgctctgaagtattggcttggctgaaagaacacaagatggagaagaccaagcaattcgaactgctggatattagctggcttatcgaaagcatgaaagttggtaaaccggtggacaccaaggggaaataccagttggcggaatcggttgaggtgagtgcgaacccagatccgacagaaggtcgtgtaaacgagctgcctcctactatgaaaaccgtttctccgtatgcgtgtcaacgccgcaccaccctgaacaaccgtaatcaacgttttacggactcgctggagattcttcgtgaaaattacgagctgaaaggcaacgacgatactgcgctggaatttcgtcgtgctatctccgtgctgaaaagccttccgtttgaggtacgtagcctgaaagacacggaaggattgccctggatcagtgatgaagtcaaagggattatggaagaaatcatcgaagtcggggagtcgcgtgaagtgcaggccgtgctcaatgatgagtggtatcaaagcttccacgcatttacgcgtgtctttggagtgggggtgaagacagcagacaagtggtaccgtatgggtctgcgcaccctcgaggatgttcgttccagcaagaccctgaagttgaccccgatgcagaaagtaggtctgctgtattatgaagatcttgctcgcggcgttacgcgtgccgaagctgacgcgatttggctgctggttcaggatgcagtcgcaactttcgacccggatgcgatcgtggagattgtcggtggatttcgtcgtgggaaacctcagggtcacgacgttgatctgcttatcagttctccgggagctgagaaagagcaagaagaccaactcctgcagaaagtgatgaatctgtggaagaaacaagggttgttgctgtgtggtcgtctggaatggagtcagtgggaagatgggggttcgccttccggtaaggctgatgagggtgacgcggaggcgtcgtgctttctgatcctcaaactttatgatcatctggtgcgtaaaagtaaacgcaatatgccgactggttcgaacatgggcgagtccaaaccgtggaaagcaattaaagtagatctgctgcgttgcccctatggcagttttgcgtttgcgatgttgcagtggaccggaagccgcatgttccgtcgtgatctgcgctggtacgccctggaagagaagaacatgatgctggacaatcattcgctgtatgacatgacccgcggtatcttcctccctgctaaatcggaagaggaaattttcgaacatctggggcttgaatacctggaaccgttcgaacgtaacgca

SEQ ID NO: 3870 - protein, 529 aa, synthetic construct
  REGION 1..529: note = Variant of terminal deoxynucleotidyltransferase
MHHHHHHGGSGSHGIRTIDSDFGKKQQKKGDNHDSSATYEIKFHEFVLFILEEKMGATRRTFLTDLARKKGFRVENELTDEVTHIVAENLSRSEVLAWLKEHKMEKTKQFELLDISWLIESMKVGKPVDTKGKYQLAESVEVSANPDPTEGRVNELPPTMKTVSPYACQRRTTLNNRNQRFTDSLEILRENYELKGNDDTALEFRRAISVLKSLPFEVRSLKDTEGLPWISDEVKGIMEEIIEVGESREVQAVLNDEWYQSFHAFTRVFGVGVKTADKWYRMGLRTLEDVRSSKTLKLTPMQKVGLLYYEDLARGVTRAEADAIWLLVQDAVATFDPDAIVEIVGGFRRGKPQGHDVDLLISSPGAEKEQEDQLLQKVMNLWKKQGLLLCGRLEWSQWEDGGSPSGKADEGDAEASCFLILKLYDHLVRKSKRNMPTGSNMGESKPWKAIKVDLLRCPYGSFAFAMLQWTGSRMFRRDLRWYALEEKNMMLDNHSLYDMTRGIFLPAKSEEEIFEHLGLEYLEPFERNA

SEQ ID NO: 3871 - DNA, 1587 bp, synthetic construct
  misc_feature 1..1587: note = Variant of terminal deoxynucleotidyltransferase
  source 1..1587: mol_type = other DNA
atgcaccatcatcatcatcatggcggtagcggcagccacggcattcgtaccatcgattcggacttcgggaagaaacagcagaaaaaaggcgataaccacgatagttccgccacttatgaaatcaaatttcacgagtttgtgctgttcattctcgaagaaaaaatgggtgcgacgcgtcgtacttttctgacagatttagcccgcaagaaagggttccgcgtcgagaatgaactgaccgacgaagttacccacatcgtggcagaaaatctgtcacgctctgaagtattggcttggctgaaagaacacaagatggagaagaccaagcaattcgaactgctggatattagctggcttatcgaaagcatgaaagttggtaaaccggtggacaccaaggggaaataccagttggcggaatcggttgaggtgagtgcgaacccagatccgacagaaggtcgtgtaaacgagctgcctcctactatgaaaaccgtttctccgtatgcgtgtcaacgccgcaccaccctgaacaaccgtaatcaacgttttacggactcgctggagattcttcgtgaaaattacgagctgaaaggcaacgatgatactgcgctggaatttcgtcgtgctatctccgtgctgaaaagccttccgtttgaggtacgtagcctgaaagacacggaaggattgccctggatcagtgatgaagtcaaagggattatggaagaaatcatcgaagtcggggagtcgcgtgaagtgcaggccgtgctcaatgatgagtggtatcaaagcttccacgcatttacgagtgtctttggagtgggggtgaagacagcagacaagtggtaccgtatgggtctgcgcaccctcgaggatgttcgttccagcaagaccctgaagttgaccccgatgcagaaagtaggtctgctgtattatgaagatcttgctcgcggcgttacgcgtgccgaagctgacgcgatttggctgctggttcaggatgcagtcgcaactttcgacccggatgcgatcgtggagattgtcggtggatttcgtcgtgggaaacctcagggtcacgacgttgatctgcttatcagttctccgggagctgagaaagagcaagaagaccaactcctgcagaaagtgatgaatctgtggaagaaacaagggttgttgctgtgtggtcgtctggaatggagtcagtgggaagatgggggttcgccttccggtaaggctgacgagggtgacgcggaggcgtcgtgctttctgatcctcaaactttatgatcatctggtgcgtaaaagtaaacgcaatatgccgactggttcgaacatgggcgagtccaaaccgtggaaagcaattaaagtagatctgctgcgttgcccctatggcagttttgcgtttgcgatgttgcagtggaccggaagccgcatgtttcgtcgtgatctgcgctggtacgccctggaagagaagaacatgatgctggacaatcattcgctgtatgacatgacccgcggtatcttcctccctgctaaatcggaagaggaaattttcgaacatctggggcttgaatacctggaaccgttcgaacgtaacgca

SEQ ID NO: 3872 - protein, 529 aa, synthetic construct
  REGION 1..529: note = Variant of terminal deoxynucleotidyltransferase
MHHHHHHGGSGSHGIRTIDSDFGKKQQKKGDNHDSSATYEIKFHEFVLFILEEKMGATRRTFLTDLARKKGFRVENELTDEVTHIVAENLSRSEVLAWLKEHKMEKTKQFELLDISWLIESMKVGKPVDTKGKYQLAESVEVSANPDPTEGRVNELPPTMKTVSPYACQRRTTLNNRNQRFTDSLEILRENYELKGNDDTALEFRRAISVLKSLPFEVRSLKDTEGLPWISDEVKGIMEEIIEVGESREVQAVLNDEWYQSFHAFTSVFGVGVKTADKWYRMGLRTLEDVRSSKTLKLTPMQKVGLLYYEDLARGVTRAEADAIWLLVQDAVATFDPDAIVEIVGGFRRGKPQGHDVDLLISSPGAEKEQEDQLLQKVMNLWKKQGLLLCGRLEWSQWEDGGSPSGKADEGDAEASCFLILKLYDHLVRKSKRNMPTGSNMGESKPWKAIKVDLLRCPYGSFAFAMLQWTGSRMFRRDLRWYALEEKNMMLDNHSLYDMTRGIFLPAKSEEEIFEHLGLEYLEPFERNA

SEQ ID NO: 3873 - DNA, 1587 bp, synthetic construct
  misc_feature 1..1587: note = Variant of terminal deoxynucleotidyltransferase
  source 1..1587: mol_type = other DNA
atgcaccatcatcatcatcatggcggtagcggcagccacggcattcgtaccatcgattcggacttcgggaagaaacagcagaaaaaaggcgataaccacgatagttccgccacttatgaaatcaaatttcacgagtttgtgctgttcattctcgaagaaaaaatgggtgcgacgcgtcgtacttttctgacagatttagcccgcaagaaagggttccgcgtcgagaatgaactgaccgacgaagttacccacatcgtggcagaaaatctgtcacgctctgaagtattggcttggctgaaagaacacaagatggagaagaccaagcaattcgaactgctggatattagctggcttatcgaaagcatgaaagttggtaaaccggtggacaccaaggggaaataccagttggcggaatcggttgaggtgagtgcgaacccagatccgacagaaggtcgtgtaaacgagctgcctcctactatgaaaaccgtttctccgtatgcgtgtcaacgccgcaccaccctgaacaaccgtaatcaacgttttacggactcgctggagattcttcgtgaaaattacgagctgaaaggcaacccagatactgcgctggaatttcgtcgtgctatctccgtgctgaaaagccttccgtttgaggtacgtagcctgaaagacacggaaggattgccctggatcagtgatgaagtcaaagggattatggaagaaatcatcgaagtcggggagtcgcgtgaagtgcaggccgtgctcaatgatgagtggtatcaaagcttccacgcatttacgcaggtctttggagtgggggtgaagacagcagacaagtggtaccgtatgggtctgcgcaccctcgaggatgttcgttccagcaagaccctgaagttgaccccgatgcagaaagtaggtctgctgtattatgaagatcttgctcgtggcgttacgcgtgccgaagctgacgcgatttggctgctggttcaggatgcagtcgcaactttcgacccggatgcgatcgtggagattgtcggtggatttcgtcgtgggaaacctcagggtcacgacgttgatctgcttatcagttctccgggagctgagaaagagcaagaagaccaactcctgcagaaagtgatgaatctgtggaagaaacaagggttgttgctgtgtggtcgtctggaatggagtcagtgggaagatgggggttcgccttccggtaaggctctggagggtgacgcggaggcgtcgtgctttctgatcctcaaactttatgatcatctggtgcgtaaaagtaaacgcaatatgccgactggttcgaacatgggcgagtccaaaccgtggaaagcaattaaagtagatctgctgcgttgcccctatggcagttttgcgtttgcgatgttgcagtggaccggaagccgcatgttccgtcgtgatctgcgctggtacgccctggaagagaagaacatgatgctggacaatcattcgctgtatgacatgacccgcggtatcttcctccctgctaaatcggaagaggaaattttcgaacatctggggcttgaatacctggaaccgttcgaacgtaacgca

SEQ ID NO: 3874 - protein, 529 aa, synthetic construct
  REGION 1..529: note = Variant of terminal deoxynucleotidyltransferase
MHHHHHHGGSGSHGIRTIDSDFGKKQQKKGDNHDSSATYEIKFHEFVLFILEEKMGATRRTFLTDLARKKGFRVENELTDEVTHIVAENLSRSEVLAWLKEHKMEKTKQFELLDISWLIESMKVGKPVDTKGKYQLAESVEVSANPDPTEGRVNELPPTMKTVSPYACQRRTTLNNRNQRFTDSLEILRENYELKGNPDTALEFRRAISVLKSLPFEVRSLKDTEGLPWISDEVKGIMEEIIEVGESREVQAVLNDEWYQSFHAFTQVFGVGVKTADKWYRMGLRTLEDVRSSKTLKLTPMQKVGLLYYEDLARGVTRAEADAIWLLVQDAVATFDPDAIVEIVGGFRRGKPQGHDVDLLISSPGAEKEQEDQLLQKVMNLWKKQGLLLCGRLEWSQWEDGGSPSGKALEGDAEASCFLILKLYDHLVRKSKRNMPTGSNMGESKPWKAIKVDLLRCPYGSFAFAMLQWTGSRMFRRDLRWYALEEKNMMLDNHSLYDMTRGIFLPAKSEEEIFEHLGLEYLEPFERNA

SEQ ID NO: 3875 - DNA, 1587 bp, synthetic construct
  misc_feature 1..1587: note = Variant of terminal deoxynucleotidyltransferase
  source 1..1587: mol_type = other DNA
atgcaccatcatcatcatcatggcggtagcggcagccacggcattcgtaccatcgattcggacttcgggaagaaacagcagaaaaaaggcgataaccacgatagttccgccacttatgaaatcaaatttcacgagtttgtgctgttcattctcgaagaaaaaatgggtgcgacgcgtcgtacttttctgacagatttagcccgcaagaaagggttccgcgtcgagaatgaactgaccgacgaagttacccacatcgtggcagaaaatctgtcacgctctgaagtattggcttggctgaaagaacacaagatggagaagaccaagcaattcgaactgctggatattagctggcttatcgaaagcatgaaagttggtaaaccggtggacaccaaggggaaataccagttggcggaatcggttgaggtgagtgcgaacccagatccgacagaaggtcgtgtaaacgagctgcctcctactatgaaaaccgtttctccgtatgcgtgtcaacgccgcaccaccctgaacaaccgtaatcaacgttttacggactcgctggagattcttcgtgaaaattacgagctgaaaggcaacgatgatactgcgctggaatttcgtcgtgctatctccgtgctgaaaagccttccgtttgaggtacgtagcctgaaagacacggaaggattgccctggatcagtgatgaagtcaaagggattatggaagaaatcatcgaagtcggggagtcgcgtgaagtgcaggccgtgctcaatgatgagtggtatcaaagcttccacgcatttacgagtgtctttggagtgggggtgaagacagcagacaagtggtaccgtatgggtctgcgcaccctcgaggatgttcgttccagcaagaccctgaagttgaccccgatgcagaaagtaggtctgctgtattatgaagatcttgctcgtggcgttacgcgtgccgaagctgacgcgatttggctgctggtccaggatgcagtcgcaactttcgacccggatgcgatcgtggagattgtcggtggatttcgtcgtgggaaacctcagggtcacgacgttgatctgcttatcagttctccgggagctgagaaagagcaagaagaccaactcctgcagaaagtgatgaatctgtggaagaaacaagggttgttgctgtgtggtcgtctggaatggagtcagtgggaagatgggggttcgccttccggtaaggctgacgagggtgacgcggaggcgtcgtgctttctgatcctcaaactttatgatcatctggtgcgtaaaagtaaacgcaatatgccgactggttcgaacatgggcgagtccaaaccgtggaaagcaattaaagtagatctgctgcgttgcccctatggcagttttgcgtttgcgatgttgcagtggaccggaagccgcatgttccgtcgtgatctgcgctggtacgccctggaagagaagaacatgatgctggacaacgtctcgctgtatgacatgacccgcggtatcttcctccctgctaaatcggaagaggaaattttcgaacatctggggcttgaatacctggaaccgttcgaacgtaacgca

SEQ ID NO: 3876 - protein, 529 aa, synthetic construct
  REGION 1..529: note = Variant of terminal deoxynucleotidyltransferase
MHHHHHHGGSGSHGIRTIDSDFGKKQQKKGDNHDSSATYEIKFHEFVLFILEEKMGATRRTFLTDLARKKGFRVENELTDEVTHIVAENLSRSEVLAWLKEHKMEKTKQFELLDISWLIESMKVGKPVDTKGKYQLAESVEVSANPDPTEGRVNELPPTMKTVSPYACQRRTTLNNRNQRFTDSLEILRENYELKGNDDTALEFRRAISVLKSLPFEVRSLKDTEGLPWISDEVKGIMEEIIEVGESREVQAVLNDEWYQSFHAFTSVFGVGVKTADKWYRMGLRTLEDVRSSKTLKLTPMQKVGLLYYEDLARGVTRAEADAIWLLVQDAVATFDPDAIVEIVGGFRRGKPQGHDVDLLISSPGAEKEQEDQLLQKVMNLWKKQGLLLCGRLEWSQWEDGGSPSGKADEGDAEASCFLILKLYDHLVRKSKRNMPTGSNMGESKPWKAIKVDLLRCPYGSFAFAMLQWTGSRMFRRDLRWYALEEKNMMLDNVSLYDMTRGIFLPAKSEEEIFEHLGLEYLEPFERNA

SEQ ID NO: 3877 - DNA, 1587 bp, synthetic construct
  misc_feature 1..1587: note = Variant of terminal deoxynucleotidyltransferase
  source 1..1587: mol_type = other DNA
atgcaccatcatcatcatcatggcggtagcggcagccacggcattcgtaccatcgattcggacttcgggaagaaacagcagaaaaaaggcgataaccacgatagttccgccacttatgaaatcaaatttcacgagtttgtgctgttcattctcgaagaaaaaatgggtgcgacgcgtcgtacttttctgacagatttagcccgcaagaaagggttccgcgtcgagaatgaactgaccgacgaagttacccacatcgtggcagaaaatctgtcacgctctgaagtattggcttggctgaaagaacacaagatggagaagaccaagcaattcgaactgctggatattagctggcttatcgaaagcatgaaagttggtaaaccggtggacaccaaggggaaataccagttggcggaatcggttgaggtgagtgcgaacccagatccgacagaaggtcgtgtaaacgagctgcctcctactatgaaaaccgtttctccgtatgcgtgtcaacgccgcaccaccctgaacaaccgtaatcaacgttttacggactcgctggagattcttcgtgaaaattacgagctgaaaggcaacgatgatactgcgctggaatttcgtcgtgctatctccgtgctgaaaagccttccgtttgaggtacgtagcctgaaagacacggaaggattgccctggatcagtgatgaagtcaaagggattatggaagaaatcatcgaagtcggggagtcgcgtgaagtgcaggccgtgctcaatgatgagtggtatcaaagcttccacgcatttacgagtgtctttggagtgggggtgaagacagcagacaagtggtaccgtatgggtctgcgcaccctcgaggatgttcgttccagcaagaccctgaagttgaccccgatgcagaaagtaggtctgctgtattatgaagatcttgctcgcggcgttacgcgtgccgaagctgacgcgatttggctgctgacccaggatgcagtcgcaactttcgacccggatgcgatcgtggagattgtcggtggatttcgtcgtgggaaacctcagggtcacgacgttgatctgcttatcagttctccgggagctgagaaagagcaagaagaccaactcctgcagaaagtgatgaatctgtggaagaaacaagggttgttgctgtgtggtcgtctggaatggagtcagtgggaagatgggggttcgccttccggtaaggctgacgagggtgacgcggaggcgtcgtgctttctgatcctcaaactttatgatcatctggtgcgtaaaagtaaacgcaatatgccgactggttcgaacatgggcgagtccaaaccgtggaaagcaattaaagtagatctgctgcgttgcccctatggcagttttgcgtttgcgatgttgcagtggaccggaagccgcatgtttcgtcgtgatctgcgctggtacgccctggaagagaagaacatgatgctggacaatcattcgctgtatgacatgacccgcggtatcttcctccctgctaaatcggaagaggaaattttcgaacatctggggcttgaatacctggaaccgttcgaacgtaacgca

SEQ ID NO: 3878 - protein, 529 aa, synthetic construct
  REGION 1..529: note = Variant of terminal deoxynucleotidyltransferase
MHHHHHHGGSGSHGIRTIDSDFGKKQQKKGDNHDSSATYEIKFHEFVLFILEEKMGATRRTFLTDLARKKGFRVENELTDEVTHIVAENLSRSEVLAWLKEHKMEKTKQFELLDISWLIESMKVGKPVDTKGKYQLAESVEVSANPDPTEGRVNELPPTMKTVSPYACQRRTTLNNRNQRFTDSLEILRENYELKGNDDTALEFRRAISVLKSLPFEVRSLKDTEGLPWISDEVKGIMEEIIEVGESREVQAVLNDEWYQSFHAFTSVFGVGVKTADKWYRMGLRTLEDVRSSKTLKLTPMQKVGLLYYEDLARGVTRAEADAIWLLTQDAVATFDPDAIVEIVGGFRRGKPQGHDVDLLISSPGAEKEQEDQLLQKVMNLWKKQGLLLCGRLEWSQWEDGGSPSGKADEGDAEASCFLILKLYDHLVRKSKRNMPTGSNMGESKPWKAIKVDLLRCPYGSFAFAMLQWTGSRMFRRDLRWYALEEKNMMLDNHSLYDMTRGIFLPAKSEEEIFEHLGLEYLEPFERNA

SEQ ID NO: 3879 - DNA, 1587 bp, synthetic construct
  misc_feature 1..1587: note = Variant of terminal deoxynucleotidyltransferase
  source 1..1587: mol_type = other DNA
atgcaccatcatcatcatcatggcggtagcggcagccacggcattcgtaccatcgattcggacttcgggaagaaacagcagaaaaaaggcgataaccacgatagttccgccacttatgaaatcaaatttcacgagtttgtgctgttcattctcgaagaaaaaatgggtgcgacgcgtcgtacttttctgacagatttagcccgcaagaaagggttccgcgtcgagaatgaactgaccgacgaagttacccacatcgtggcagaaaatctgtcacgctctgaagtattggcttggctgaaagaacacaagatggagaagaccaagcaattcgaactgctggatattagctggcttatcgaaagcatgaaagttggtaaaccggtggacaccaaggggaaataccagttggcggaatcggttgaggtgagtgcgaacccagatccgacagaaggtcgtgtaaacgagctgcctcctactatgaaaaccgtttctccgtatgcgtgtcaacgccgcaccaccctgaacaaccgtaatcaacgttttacggactcgctggagattcttcgtgaaaattacgagctgaaaggcaacgacgatactgcgctggaatttcgtcgtgctatctccgtgctgaaaagccttccgtttgaggtacgtagcctgaaagacacggaaggattgccctggatcagtgatgaagtcaaagggattatggaagaaatcatcgaagtcggggagtcgcgtgaagtgcaggccgtgctcaatgatgagtggtatcaaagcttccacgcatttacgagtgtctttggagtgggggtgaagacagcagacaagtggtaccgtatgggtctgcgcaccctcgaggatgttcgttccagcaagaccctgaagttgaccccgatgcagaaagtaggtctgctgtattatgaagatcttgctgctggcgttacgcgtgccgaagctgacgcgatttggctgctggtccaggatgcagtcgcaactttcgacccggatgcgatcgtggagattgtcggtggatttcgtcgtgggaaacctcagggtcacgacgttgatctgcttatcagttctccgggagctgagaaagagcaagaagaccaactcctgcagaaagtgatgaatctgtggaagaaacaagggttgttgctgtgtggtcgtctggaatggagtcagtgggaagatgggggttcgccttccggtaaggctgatgagggtgacgcggaggcgtcgtgctttctgatcctcaaactttatgatcatctggtgcgtaaaagtaaacgcaatatgccgactggttcgaacatgggcgagtccaaaccgtggaaagcaattaaagtagatctgctgcgttgcccctatggcagttttgcgtttgcgatgttgcagtggaccggaagccgcatgttccgtcgtgatctgcgctggtacgccctggaagagaagaacatgatgctggacaaccattcgctgtatgacatgacccgcggtatcttcctccctgctaaatcggaagaggaaattttcgaacatctggggcttgaatacctggaaccgttcgaacgtaacgca

SEQ ID NO: 3880 - protein, 529 aa, synthetic construct
  REGION 1..529: note = Variant of terminal deoxynucleotidyltransferase
MHHHHHHGGSGSHGIRTIDSDFGKKQQKKGDNHDSSATYEIKFHEFVLFILEEKMGATRRTFLTDLARKKGFRVENELTDEVTHIVAENLSRSEVLAWLKEHKMEKTKQFELLDISWLIESMKVGKPVDTKGKYQLAESVEVSANPDPTEGRVNELPPTMKTVSPYACQRRTTLNNRNQRFTDSLEILRENYELKGNDDTALEFRRAISVLKSLPFEVRSLKDTEGLPWISDEVKGIMEEIIEVGESREVQAVLNDEWYQSFHAFTSVFGVGVKTADKWYRMGLRTLEDVRSSKTLKLTPMQKVGLLYYEDLAAGVTRAEADAIWLLVQDAVATFDPDAIVEIVGGFRRGKPQGHDVDLLISSPGAEKEQEDQLLQKVMNLWKKQGLLLCGRLEWSQWEDGGSPSGKADEGDAEASCFLILKLYDHLVRKSKRNMPTGSNMGESKPWKAIKVDLLRCPYGSFAFAMLQWTGSRMFRRDLRWYALEEKNMMLDNHSLYDMTRGIFLPAKSEEEIFEHLGLEYLEPFERNA

SEQ ID NO: 3881 - DNA, 1587 bp, synthetic construct
  misc_feature 1..1587: note = Variant of terminal deoxynucleotidyltransferase
  source 1..1587: mol_type = other DNA
atgcaccatcatcatcatcatggcggtagcggcagccacggcattcgtaccatcgattcggacttcgggaagaaacagcagaaaaaaggcgataaccacgatagttccgccacttatgaaatcaaatttcacgagtttgtgctgttcattctcgaagaaaaaatgggtgcgacgcgtcgtacttttctgacagatttagcccgcaagaaagggttccgcgtcgagaatgaactgaccgacgaagttacccacatcgtggcagaaaatctgtcacgctctgaagtattggcttggctgaaagaacacaagatggagaagaccaagcaattcgaactgctggatattagctggcttatcgaaagcatgaaagttggtaaaccggtggacaccaaggggaaataccagttggcggaatcggttgaggtgagtgcgaacccagatccgacagaaggtcgtgtaaacgagctgcctcctactatgaaaaccgtttctccgtatgcgtgtcaacgccgcaccaccctgaacaaccgtaatcaacgttttacggactcgctggagattcttcgtgaaaattacgagctgaaaggcaacgacgatactgcgctggaatttcgtcgtgctatctccgtgctgaaaagccttccgtttgaggtacgtagcctgaaagacacggaaggattgccctggatcagtgatgaagtcaaagggattatggaagaaatcatcgaagtcggggagtcgcgtgaagtgcaggccgtgctcaatgatgagtggtatcaaagcttccacgcatttacgcgtgtctttggagtgggggtgaagacagcagacaagtggtaccgtatgggtctgcgcaccctcgaggatgttcgttccagcaagaccctgaagttgaccccgatgcagaaagtaggtctgctgtattatgaagatcttgctgctggcgttacgcgtgccgaagctgacgcgatttggctgctgacccaggatgcagtcgcaactttcgacccggatgcgatcgtggagattgtcggtggatttcgtcgtgggaaacctcagggtcacgacgttgatctgcttatcagttctccgggagctgagaaagagcaagaagaccaactcctgcagaaagtgatgaatctgtggaagaaacaagggttgttgctgtgtggtcgtctggaatggagtcagtgggaagatgggggttcgccttccggtaaggctgacgagggtgacgcggaggcgtcgtgctttctgatcctcaaactttatgatcatctggtgcgtaaaagtaaacgcaatatgccgactggttcgaacatgggcgagtccaaaccgtggaaagcaattaaagtagatctgctgcgttgcccctatggcagttttgcgtttgcgatgttgcagtggaccggaagccgcatgtttcgtcgtgatctgcgctggtacgccctggaagagaagaacatgatgctggacaatcgttcgctgtatgacctgacccgcggtatcttcctccctgctaaatcggaagaggaaattttcgaacatctggggcttgaatacctggaaccgttcgaacgtaacgca

SEQ ID NO: 3882 - protein, 529 aa, synthetic construct
  REGION 1..529: note = Variant of terminal deoxynucleotidyltransferase
MHHHHHHGGSGSHGIRTIDSDFGKKQQKKGDNHDSSATYEIKFHEFVLFILEEKMGATRRTFLTDLARKKGFRVENELTDEVTHIVAENLSRSEVLAWLKEHKMEKTKQFELLDISWLIESMKVGKPVDTKGKYQLAESVEVSANPDPTEGRVNELPPTMKTVSPYACQRRTTLNNRNQRFTDSLEILRENYELKGNDDTALEFRRAISVLKSLPFEVRSLKDTEGLPWISDEVKGIMEEIIEVGESREVQAVLNDEWYQSFHAFTRVFGVGVKTADKWYRMGLRTLEDVRSSKTLKLTPMQKVGLLYYEDLAAGVTRAEADAIWLLTQDAVATFDPDAIVEIVGGFRRGKPQGHDVDLLISSPGAEKEQEDQLLQKVMNLWKKQGLLLCGRLEWSQWEDGGSPSGKADEGDAEASCFLILKLYDHLVRKSKRNMPTGSNMGESKPWKAIKVDLLRCPYGSFAFAMLQWTGSRMFRRDLRWYALEEKNMMLDNRSLYDLTRGIFLPAKSEEEIFEHLGLEYLEPFERNA

SEQ ID NO: 3883 - DNA, 1587 bp, synthetic construct
  misc_feature 1..1587: note = Variant of terminal deoxynucleotidyltransferase
  source 1..1587: mol_type = other DNA
atgcaccatcatcatcatcatggcggtagcggcagccacggcattcgtaccatcgattcggacttcgggaagaaacagcagaaaaaaggcgataaccacgatagttccgccacttatgaaatcaaatttcacgagtttgtgctgttcattctcgaagaaaaaatgggtgcgacgcgtcgtacttttctgacagatttagcccgcaagaaagggttccgcgtcgagaatgaactgaccgacgaagttacccacatcgtggcagaaaatctgtcacgctctgaagtattggcttggctgaaagaacacaagatggagaagaccaagcaattcgaactgctggatattagctggcttatcgaaagcatgaaagttggtaaaccggtggacaccaaggggaaataccagttggcggaatcggttgaggtgagtgcgaacccagatccgacagaaggtcgtgtaaacgagctgcctcctactatgaaaaccgtttctccgtatgcgtgtcaacgccgcaccaccctgaacaaccgtaatcaacgttttacggactcgctggagattcttcgtgaaaattacgagctgaaaggcaacccagatactgcgctggaatttcgtcgtgctatctccgtgctgaaaagccttccgtttgaggtacgtagcctgaaagacacggaaggattgccctggatcagtgatgaagtcaaagggattatggaagaaatcatcgaagtcggggagtcgcgtgaagtgcaggccgtgctcaatgatgagtggtatcaaagcttccacgcatttacgagtgtctttggagtgggggtgaagacagcagacaagtggtaccgtatgggtctgcgcaccctcgaggatgttcgttccagcaagaccctgaagttgaccccgatgcagaaagtaggtctgctgtattatgaagatcttgctcgcggcgttacgcgtgccgaagctgacgcgatttggctgctggttcaggatgcagtcgcaactttcgacccggatgcgatcgtggagattgtcggtggatttcgtcgtgggaaacctcagggtcacgacgttgatctgcttatcagttctccgggagctgagaaagagcaagaagaccaactcctgcagaaagtgatgaatctgtggaagaaacaagggttgttgctgtgtggtcgtctggaatggagtcagtgggaagatgggggttcgccttccggtaaggctgacgagggtgacgcggaggcgtcgtgctttctgatcctcaaactttatgatcatctggtgcgtaaaagtaaacgcaatatgccgactggttcgaacatgggcgagtccaaaccgtggaaagcaattcgcgtagatctgctgcgttgcccctatggcagttttgcgtttgcgatgttgcagtggaccggaagccgcatgttccgtcgtgatctgcgctggtacgccctggaagagaagaacatgatgctggacaatcattcgctgtatgacatgacccgcggtatcttcctccctgctaaatcggaagaggaaattttcgaacatctggggcttgaatacctggaaccgttcgaacgtaacgca

SEQ ID NO: 3884 - protein, 529 aa, synthetic construct
  REGION 1..529: note = Variant of terminal deoxynucleotidyltransferase
MHHHHHHGGSGSHGIRTIDSDFGKKQQKKGDNHDSSATYEIKFHEFVLFILEEKMGATRRTFLTDLARKKGFRVENELTDEVTHIVAENLSRSEVLAWLKEHKMEKTKQFELLDISWLIESMKVGKPVDTKGKYQLAESVEVSANPDPTEGRVNELPPTMKTVSPYACQRRTTLNNRNQRFTDSLEILRENYELKGNPDTALEFRRAISVLKSLPFEVRSLKDTEGLPWISDEVKGIMEEIIEVGESREVQAVLNDEWYQSFHAFTSVFGVGVKTADKWYRMGLRTLEDVRSSKTLKLTPMQKVGLLYYEDLARGVTRAEADAIWLLVQDAVATFDPDAIVEIVGGFRRGKPQGHDVDLLISSPGAEKEQEDQLLQKVMNLWKKQGLLLCGRLEWSQWEDGGSPSGKADEGDAEASCFLILKLYDHLVRKSKRNMPTGSNMGESKPWKAIRVDLLRCPYGSFAFAMLQWTGSRMFRRDLRWYALEEKNMMLDNHSLYDMTRGIFLPAKSEEEIFEHLGLEYLEPFERNA

SEQ ID NO: 3885 - DNA, 1587 bp, synthetic construct
  misc_feature 1..1587: note = Variant of terminal deoxynucleotidyltransferase
  source 1..1587: mol_type = other DNA
atgcaccatcatcatcatcatggcggtagcggcagccacggcattcgtaccatcgattcggacttcgggaagaaacagcagaaaaaaggcgataaccacgatagttccgccacttatgaaatcaaatttcacgagtttgtgctgttcattctcgaagaaaaaatgggtgcgacgcgtcgtacttttctgacagatttagcccgcaagaaagggttccgcgtcgagaatgaactgaccgacgaagttacccacatcgtggcagaaaatctgtcacgctctgaagtattggcttggctgaaagaacacaagatggagaagaccaagcaattcgaactgctggatattagctggcttatcgaaagcatgaaagttggtaaaccggtggacaccaaggggaaataccagttggcggaatcggttgaggtgagtgcgaacccagatccgacagaaggtcgtgtaaacgagctgcctcctactatgaaaaccgtttctccgtatgcgtgtcaacgccgcaccaccctgaacaaccgtaatcaacgttttacggactcgctggagattcttcgtgaaaattacgagctgaaaggcaacgacgatactgcgctggaatttcgtcgtgctatctccgtgctgaaaagccttccgtttgaggtacgtagcctgaaagacacggaaggattgccctggatcagtgatgaagtcaaagggattatggaagaaatcatcgaagtcggggagtcgcgtgaagtgcaggccgtgctcaatgatgagtggtatcaaagcttccacgcatttacgagtgtctttggagtgggggtgaagacagcagacaagtggtaccgtatgggtctgcgcaccctcgaggatgttcgttccagcaagaccctgaagttgaccccgatgcagaaagtaggtctgctgtattatgaagatcttgctcgtggcgttacgcgtgccgaagctgacgcgatttggctgctggtccaggatgcagtcgcaactttcgacccggatgcgatcgtggagattgtcggtggatttcgtcgtgggaaacctcagggtcacgacgttgatctgcttatcagttctccgggagctgagaaagagcaagaagaccaactcctgcagaaagtgatgaatctgtggaagaaacaagggttgttgctgtgtggtcgtctggaatggagtcagtgggaagatgggggttcgccttccggtaaggctgatgagggtgacgcggaggcgtcgtgctttctgatcctcaaactttatgatcatctggtgcgtaaaagtaaacgcaatatgccgactggttcgaacatgggcgagtccaaaccgtggaaagcaattaaagtagatctgctgcgttgcccctatggcagttttgcgtttgcgatgttgcagtggaccggaagccgcatgtttcgtcgtgatctgcgctggtacgccctggaagagaagaacatgatgctggacgttcattcgctgtatgacctgacccgcggtatcttcctccctgctaaatcggaagaggaaattttcgaacatctggggcttgaatacctggaaccgttcgaacgtaacgca

SEQ ID NO: 3886 - protein, 529 aa, synthetic construct
  REGION 1..529: note = Variant of terminal deoxynucleotidyltransferase
MHHHHHHGGSGSHGIRTIDSDFGKKQQKKGDNHDSSATYEIKFHEFVLFILEEKMGATRRTFLTDLARKKGFRVENELTDEVTHIVAENLSRSEVLAWLKEHKMEKTKQFELLDISWLIESMKVGKPVDTKGKYQLAESVEVSANPDPTEGRVNELPPTMKTVSPYACQRRTTLNNRNQRFTDSLEILRENYELKGNDDTALEFRRAISVLKSLPFEVRSLKDTEGLPWISDEVKGIMEEIIEVGESREVQAVLNDEWYQSFHAFTSVFGVGVKTADKWYRMGLRTLEDVRSSKTLKLTPMQKVGLLYYEDLARGVTRAEADAIWLLVQDAVATFDPDAIVEIVGGFRRGKPQGHDVDLLISSPGAEKEQEDQLLQKVMNLWKKQGLLLCGRLEWSQWEDGGSPSGKADEGDAEASCFLILKLYDHLVRKSKRNMPTGSNMGESKPWKAIKVDLLRCPYGSFAFAMLQWTGSRMFRRDLRWYALEEKNMMLDVHSLYDLTRGIFLPAKSEEEIFEHLGLEYLEPFERNA

SEQ ID NO: 3887 - DNA, 1587 bp, synthetic construct
  misc_feature 1..1587: note = Variant of terminal deoxynucleotidyltransferase
  source 1..1587: mol_type = other DNA
atgcaccatcatcatcatcatggcggtagcggcagccacggcattcgtaccatcgattcggacttcgggaagaaacagcagaaaaaaggcgataaccacgatagttccgccacttatgaaatcaaatttcacgagtttgtgctgttcattctcgaagaaaaaatgggtgcgacgcgtcgtacttttctgacagatttagcccgcaagaaagggttccgcgtcgagaatgaactgaccgacgaagttacccacatcgtggcagaaaatctgtcacgctctgaagtattggcttggctgaaagaacacaagatggagaagaccaagcaattcgaactgctggatattagctggcttatcgaaagcatgaaagttggtaaaccggtggacaccaaggggaaataccagttggcggaatcggttgaggtgagtgcgaacccagatccgacagaaggtcgtgtaaacgagctgcctcctactatgaaaaccgtttctccgtatgcgtgtcaacgccgcaccaccctgaacaaccgtaatcaacgttttacggactcgctggagattcttcgtgaaaattacgagctgaaaggcaacgacgatactgcgctggaatttcgtcgtgctatctccgtgctgaaaagccttccgtttgaggtacgtagcctgaaagacacggaaggattgccctggatcagtgatgaagtcaaagggattatggaagaaatcatcgaagtcggggagtcgcgtgaagtgcaggccgtgctcaatgatgagtggtatcaaagcttccacgcatttacgcaggtctttggagtgggggtgaagacagcagacaagtggtaccgtatgggtctgcgcaccctcgaggatgttcgttccagcaagaccctgaagttgaccccgatgcagaaagtaggtctgctgtattatgaagatcttgctcgcggcgttacgcgtgccgaagctgacgcgatttggctgctggttcaggatgcagtcgcaactttcgacccggatgcgatcgtggagattgtcggtggatttcgtcgtgggaaacctcagggtcacgacgttgatctgcttatcagttctccgggagctgagaaagagcaagaagaccaactcctgcagaaagtgatgaatctgtggaagaaacaagggttgttgctgtgtggtcgtctggaatggagtcagtgggaagatgggggttcgccttccggtaaggctgacgagggtgacgcggaggcgtcgtgctttctgatcctcaaactttatgatcatctggtgcgtaaaagtaaacgcaatatgccgactggttcgaacatgggcgagtccaaaccgtggaaagcaattaaagtagatctgctgcgttgcccctatggcagttttgcgtttgcgatgttgcagtggaccggaagccgcatgttccgtcgtgatctgcgctggtacgccctggaagagaagaacatgatgctggacaacgtctcgctgtatgacctgacccgcggtatcttcctccctgctaaatcggaagaggaaattttcgaacatctggggcttgaatacctggaaccgttcgaacgtaacgca

SEQ ID NO: 3888 - protein, 529 aa, synthetic construct
  REGION 1..529: note = Variant of terminal deoxynucleotidyltransferase
MHHHHHHGGSGSHGIRTIDSDFGKKQQKKGDNHDSSATYEIKFHEFVLFILEEKMGATRRTFLTDLARKKGFRVENELTDEVTHIVAENLSRSEVLAWLKEHKMEKTKQFELLDISWLIESMKVGKPVDTKGKYQLAESVEVSANPDPTEGRVNELPPTMKTVSPYACQRRTTLNNRNQRFTDSLEILRENYELKGNDDTALEFRRAISVLKSLPFEVRSLKDTEGLPWISDEVKGIMEEIIEVGESREVQAVLNDEWYQSFHAFTQVFGVGVKTADKWYRMGLRTLEDVRSSKTLKLTPMQKVGLLYYEDLARGVTRAEADAIWLLVQDAVATFDPDAIVEIVGGFRRGKPQGHDVDLLISSPGAEKEQEDQLLQKVMNLWKKQGLLLCGRLEWSQWEDGGSPSGKADEGDAEASCFLILKLYDHLVRKSKRNMPTGSNMGESKPWKAIKVDLLRCPYGSFAFAMLQWTGSRMFRRDLRWYALEEKNMMLDNVSLYDLTRGIFLPAKSEEEIFEHLGLEYLEPFERNA

SEQ ID NO: 3889 - DNA, 1587 bp, synthetic construct
  misc_feature 1..1587: note = Variant of terminal deoxynucleotidyltransferase
  source 1..1587: mol_type = other DNA
atgcaccatcatcatcatcatggcggtagcggcagccacggcattcgtaccatcgattcggacttcgggaagaaacagcagaaaaaaggcgataaccacgatagttccgccacttatgaaatcaaatttcacgagtttgtgctgttcattctcgaagaaaaaatgggtgcgacgcgtcgtacttttctgacagatttagcccgcaagaaagggttccgcgtcgagaatgaactgaccgacgaagttacccacatcgtggcagaaaatctgtcacgctctgaagtattggcttggctgaaagaacacaagatggagaagaccaagcaattcgaactgctggatattagctggcttatcgaaagcatgaaagttggtaaaccggtggacaccaaggggaaataccagttggcggaatcggttgaggtgagtgcgaacccagatccgacagaaggtcgtgtaaacgagctgcctcctactatgaaaaccgtttctccgtatgcgtgtcaacgccgcaccaccctgaacaaccgtaatcaacgttttacggactcgctggagattcttcgtgaaaattacgagctgaaaggcaacgacgatactgcgctggaatttcgtcgtgctatctccgtgctgaaaagccttccgtttgaggtacgtagcctgaaagacacggaaggattgccctggatcagtgatgaagtcaaagggattatggaagaaatcatcgaagtcggggagtcgcgtgaagtgcaggccgtgctcaatgatgagtggtatcaaagcttccacgcatttacgagtgtctttggagtgggggtgaagacagcagacaagtggtaccgtatgggtctgcgcaccctcgaggatgttcgttccagcaagaccctgaagttgaccccgatgcagaaagtaggtctgctgtattatgaagatcttgctgctggcgttacgcgtgccgaagctgacgcgatttggctgctgacccaggatgcagtcgcaactttcgacccggatgcgatcgtggagattgtcggtggatttcgtcgtgggaaacctcagggtcacgacgttgatctgcttatcagttctccgggagctgagaaagagcaagaagaccaactcctgcagaaagtgatgaatctgtggaagaaacaagggttgttgctgtgtggtcgtctggaatggagtcagtgggaagatgggggttcgccttccggtaaggctgatgagggtgacgcggaggcgtcgtgctttctgatcctcaaactttatgatcatctggtgcgtaaaagtaaacgcaatatgccgactggttcgaacatgggcgagtccaaaccgtggaaagcaattaaagtagatctgctgcgttgcccctatggcagttttgcgtttgcgatgttgcagtggaccggaagccgcatgtttcgtcgtgatctgcgctggtacgccctggaagagaagaacatgatgctggacaatcattcgctgtatgacctgacccgcggtatcttcctccctgctaaatcggaagaggaaattttcgaacatctggggcttgaatacctggaaccgttcgaacgtaacgca

SEQ ID NO: 3890 - protein, 529 aa, synthetic construct
  REGION 1..529: note = Variant of terminal deoxynucleotidyltransferase
MHHHHHHGGSGSHGIRTIDSDFGKKQQKKGDNHDSSATYEIKFHEFVLFILEEKMGATRRTFLTDLARKKGFRVENELTDEVTHIVAENLSRSEVLAWLKEHKMEKTKQFELLDISWLIESMKVGKPVDTKGKYQLAESVEVSANPDPTEGRVNELPPTMKTVSPYACQRRTTLNNRNQRFTDSLEILRENYELKGNDDTALEFRRAISVLKSLPFEVRSLKDTEGLPWISDEVKGIMEEIIEVGESREVQAVLNDEWYQSFHAFTSVFGVGVKTADKWYRMGLRTLEDVRSSKTLKLTPMQKVGLLYYEDLAAGVTRAEADAIWLLTQDAVATFDPDAIVEIVGGFRRGKPQGHDVDLLISSPGAEKEQEDQLLQKVMNLWKKQGLLLCGRLEWSQWEDGGSPSGKADEGDAEASCFLILKLYDHLVRKSKRNMPTGSNMGESKPWKAIKVDLLRCPYGSFAFAMLQWTGSRMFRRDLRWYALEEKNMMLDNHSLYDLTRGIFLPAKSEEEIFEHLGLEYLEPFERNA

SEQ ID NO: 3891 - DNA, 1587 bp, synthetic construct
  misc_feature 1..1587: note = Variant of terminal deoxynucleotidyltransferase
  source 1..1587: mol_type = other DNA
atgcaccatcatcatcatcatggcggtagcggcagccacggcattcgtaccatcgattcggacttcgggaagaaacagcagaaaaaaggcgataaccacgatagttccgccacttatgaaatcaaatttcacgagtttgtgctgttcattctcgaagaaaaaatgggtgcgacgcgtcgtacttttctgacagatttagcccgcaagaaagggttccgcgtcgagaatgaactgaccgacgaagttacccacatcgtggcagaaaatctgtcacgctctgaagtattggcttggctgaaagaacacaagatggagaagaccaagcaattcgaactgctggatattagctggcttatcgaaagcatgaaagttggtaaaccggtggacaccaaggggaaataccagttggcggaatcggttgaggtgagtgcgaacccagatccgacagaaggtcgtgtaaacgagctgcctcctactatgaaaaccgtttctccgtatgcgtgtcaacgccgcaccaccctgaacaaccgtaatcaacgttttacggactcgctggagattcttcgtgaaaattacgagctgaaaggcaacgatgatactgcgctggaatttcgtcgcgctgtctccgtgctgaaaagccttccgtttgaggtacgtagcctgaaagacacggaaggattgccctggatcagtgatgaagtcaaagggattatggaagaaatcatcgaagtcggggagtcgcgtgaagtgcaggccgtgctcaatgatgagtggtatcaaagcttccacgcatttacgagtgtctttggagtgggggtgaagacagcagacaagtggtaccgtatgggtctgcgcaccctcgaggatgttcgttccagcaagaccctgaagttgaccccgatgcagaaagtaggtctgctggtttatgaagatcttgctcgcggcgttacgcgtgccgaagctgacgcgatttggctgctggttcaggatgcagtcgcaactttcgacccggatgcgatcgtggagattgtcggtggatttcgtcgtgggaaacctcagggtcacgacgttgatctgcttatcagttctccgggagctgagaaagagcaagaagaccaactcctgcagaaagtgatgaatctgtggaagaaacaagggttgttgctgtgtggtcgtctggaatggagtcagtgggaagatgggggttcgccttccggtaaggctgacgagggtgacgcggaggcgtcgtgctttctgatcctcaaactttatgatcatctggtgcgtaaaagtaaacgcaatatgccgactggttcgaacatgggcgagtccaaaccgtggaaagcaattcgcgtagatctgctgcgttgcccctatggcagttttgcgtttgcgatgttgcagtggaccggaagccgcatgttccgtcgtgatctgcgctggtacgccctggaagagaagaacatgatgctggacaatcattcgctgtatgacatgacccgcggtatcttcctccctgctaaatcggaagaggaaattttcgaacatctggggcttgaatacctggaaccgttcgaacgtaacgca

SEQ ID NO: 3892 - protein, 529 aa, synthetic construct
  REGION 1..529: note = Variant of terminal deoxynucleotidyltransferase
MHHHHHHGGSGSHGIRTIDSDFGKKQQKKGDNHDSSATYEIKFHEFVLFILEEKMGATRRTFLTDLARKKGFRVENELTDEVTHIVAENLSRSEVLAWLKEHKMEKTKQFELLDISWLIESMKVGKPVDTKGKYQLAESVEVSANPDPTEGRVNELPPTMKTVSPYACQRRTTLNNRNQRFTDSLEILRENYELKGNDDTALEFRRAVSVLKSLPFEVRSLKDTEGLPWISDEVKGIMEEIIEVGESREVQAVLNDEWYQSFHAFTSVFGVGVKTADKWYRMGLRTLEDVRSSKTLKLTPMQKVGLLVYEDLARGVTRAEADAIWLLVQDAVATFDPDAIVEIVGGFRRGKPQGHDVDLLISSPGAEKEQEDQLLQKVMNLWKKQGLLLCGRLEWSQWEDGGSPSGKADEGDAEASCFLILKLYDHLVRKSKRNMPTGSNMGESKPWKAIRVDLLRCPYGSFAFAMLQWTGSRMFRRDLRWYALEEKNMMLDNHSLYDMTRGIFLPAKSEEEIFEHLGLEYLEPFERNA

SEQ ID NO: 3893 - DNA, 1587 bp, synthetic construct
  misc_feature 1..1587: note = Variant of terminal deoxynucleotidyltransferase
  source 1..1587: mol_type = other DNA
atgcaccatcatcatcatcatggcggtagcggcagccacggcattcgtaccatcgattcggacttcgggaagaaacagcagaaaaaaggcgataaccacgatagttccgccacttatgaaatcaaatttcacgagtttgtgctgttcattctcgaagaaaaaatgggtgcgacgcgtcgtacttttctgacagatttagcccgcaagaaagggttccgcgtcgagaatgaactgaccgacgaagttacccacatcgtggcagaaaatctgtcacgctctgaagtattggcttggctgaaagaacacaagatggagaagaccaagcaattcgaactgctggatattagctggcttatcgaaagcatgaaagttggtaaaccggtggacaccaaggggaaataccagttggcggaatcggttgaggtgagtgcgaacccagatccgacagaaggtcgtgtaaacgagctgcctcctactatgaaaaccgtttctccgtatgcgtgtcaacgccgcaccaccctgaacaaccgtaatcaacgttttacggactcgctggagattcttcgtgaaaattacgagctgaaaggcaacgatgatactgcgctggaatttcgtcgtgctatctccgtgctgaaaagccttccgtttgaggtacgtagcctgaaagacacggaaggattgccctggatcagtgatgaagtcaaagggattatggaagaaatcatcgaagtcggggagtcgcgtgaagtgcaggccgtgctcaatgatgagtggtatcaaagcttccacgcatttacgagtgtctttggagtgggggtgaagacagcagacaagtggtaccgtatgggtctgcgcaccctcgaggatgttcgttccagcaagaccctgaagttgaccccgatgcagaaagtaggtctgctgtattatgaagatcttgctcgtggcgttacgcgtgccgaagctgacgcgatttggctgctgacccaggatgcagtcgcaactttcgacccggatgcgatcgtggagattgtcggtggatttcgtcgtgggaaacctcagggtcacgacgttgatctgcttatcagttctccgggagctgagaaagagcaagaagaccaactcctgcagaaagtgatgaatctgtggaagaaacaagggttgttgctgtgtggtcgtctggaatggagtcagtgggaagatgggggttcgccttccggtaaggctctggagggtgacgcggaggcgtcgtgctttctgatcctcaaactttatgatcatctggtgcgtaaaagtaaacgcaatatgccgactggttcgaacatgggcgagtccaaaccgtggaaagcaattaaagtagatctgctgcgttgcccctatggcagttttgcgtttgcgatgttgcagtggaccggaagccgcatgtttcgtcgtgatctgcgctggtacgccctggaagagaagaacatgatgctggacaatcattcgctgtatgacatgacccgcggtatcttcctccctgctaaatcggaagaggaaattttcgaacatctggggcttgaatacctggaaccgttcgaacgtaacgca

SEQ ID NO: 3894 - protein, 529 aa, synthetic construct
  REGION 1..529: note = Variant of terminal deoxynucleotidyltransferase
MHHHHHHGGSGSHGIRTIDSDFGKKQQKKGDNHDSSATYEIKFHEFVLFILEEKMGATRRTFLTDLARKKGFRVENELTDEVTHIVAENLSRSEVLAWLKEHKMEKTKQFELLDISWLIESMKVGKPVDTKGKYQLAESVEVSANPDPTEGRVNELPPTMKTVSPYACQRRTTLNNRNQRFTDSLEILRENYELKGNDDTALEFRRAISVLKSLPFEVRSLKDTEGLPWISDEVKGIMEEIIEVGESREVQAVLNDEWYQSFHAFTSVFGVGVKTADKWYRMGLRTLEDVRSSKTLKLTPMQKVGLLYYEDLARGVTRAEADAIWLLTQDAVATFDPDAIVEIVGGFRRGKPQGHDVDLLISSPGAEKEQEDQLLQKVMNLWKKQGLLLCGRLEWSQWEDGGSPSGKALEGDAEASCFLILKLYDHLVRKSKRNMPTGSNMGESKPWKAIKVDLLRCPYGSFAFAMLQWTGSRMFRRDLRWYALEEKNMMLDNHSLYDMTRGIFLPAKSEEEIFEHLGLEYLEPFERNA

SEQ ID NO: 3895 - DNA, 1587 bp, synthetic construct
  misc_feature 1..1587: note = Variant of terminal deoxynucleotidyltransferase
  source 1..1587: mol_type = other DNA
atgcaccatcatcatcatcatggcggtagcggcagccacggcattcgtaccatcgattcggacttcgggaagaaacagcagaaaaaaggcgataaccacgatagttccgccacttatgaaatcaaatttcacgagtttgtgctgttcattctcgaagaaaaaatgggtgcgacgcgtcgtacttttctgacagatttagcccgcaagaaagggttccgcgtcgagaatgaactgaccgacgaagttacccacatcgtggcagaaaatctgtcacgctctgaagtattggcttggctgaaagaacacaagatggagaagaccaagcaattcgaactgctggatattagctggcttatcgaaagcatgaaagttggtaaaccggtggacaccaaggggaaataccagttggcggaatcggttgaggtgagtgcgaacccagatccgacagaaggtcgtgtaaacgagctgcctcctactatgaaaaccgtttctccgtatgcgtgtcaacgccgcaccaccctgaacaaccgtaatcaacgttttacggactcgctggagattcttcgtgaaaattacgagctgaaaggcaacccagatactgcgctggaatttcgtcgtgctatctccgtgctgaaaagccttccgtttgaggtacgtagcctgaaagacacggaaggattgccctggatcagtgatgaagtcaaagggattatggaagaaatcatcgaagtcggggagtcgcgtgaagtgcaggccgtgctcaatgatgagtggtatcaaagcttccacgcatttacgcaggtctttggagtgggggtgaagacagcagacaagtggtaccgtatgggtctgcgcaccctcgaggatgttcgttccagcaagaccctgaagttgaccccgatgcagaaagtaggtctgctgtattatgaagatcttgctgctggcgttacgcgtgccgaagctgacgcgatttggctgctggttcaggatgcagtcgcaactttcgacccggatgcgatcgtggagattgtcggtggatttcgtcgtgggaaacctcagggtcacgacgttgatctgcttatcagttctccgggagctgagaaagagcaagaagaccaactcctgcagaaagtgatgaatctgtggaagaaacaagggttgttgctgtgtggtcgtctggaatggagtcagtgggaagatgggggttcgccttccggtaaggctgatgagggtgacgcggaggcgtcgtgctttctgatcctcaaactttatgatcatctggtgcgtaaaagtaaacgcaatatgccgactggttcgaacatgggcgagtccaaaccgtggaaagcaattcgcgtagatctgctgcgttgcccctatggcagttttgcgtttgcgatgttgcagtggaccggaagccgcatggttcgtcgtgatctgcgctggtacgccctggaagagaagaacatgatgctggacaatcattcgctgtatgacatgacccgcggtatcttcctccctgctaaatcggaagaggaaattttcgaacatctggggcttgaatacctggaaccgttcgaacgtaacgca

SEQ ID NO: 3896 - protein, 529 aa, synthetic construct
  REGION 1..529: note = Variant of terminal deoxynucleotidyltransferase
MHHHHHHGGSGSHGIRTIDSDFGKKQQKKGDNHDSSATYEIKFHEFVLFILEEKMGATRRTFLTDLARKKGFRVENELTDEVTHIVAENLSRSEVLAWLKEHKMEKTKQFELLDISWLIESMKVGKPVDTKGKYQLAESVEVSANPDPTEGRVNELPPTMKTVSPYACQRRTTLNNRNQRFTDSLEILRENYELKGNPDTALEFRRAISVLKSLPFEVRSLKDTEGLPWISDEVKGIMEEIIEVGESREVQAVLNDEWYQSFHAFTQVFGVGVKTADKWYRMGLRTLEDVRSSKTLKLTPMQKVGLLYYEDLAAGVTRAEADAIWLLVQDAVATFDPDAIVEIVGGFRRGKPQGHDVDLLISSPGAEKEQEDQLLQKVMNLWKKQGLLLCGRLEWSQWEDGGSPSGKADEGDAEASCFLILKLYDHLVRKSKRNMPTGSNMGESKPWKAIRVDLLRCPYGSFAFAMLQWTGSRMVRRDLRWYALEEKNMMLDNHSLYDMTRGIFLPAKSEEEIFEHLGLEYLEPFERNA

SEQ ID NO: 3897 - DNA, 1587 bp, synthetic construct
  misc_feature 1..1587: note = Variant of terminal deoxynucleotidyltransferase
  source 1..1587: mol_type = other DNA
atgcaccatcatcatcatcatggcggtagcggcagccacggcattcgtaccatcgattcggacttcgggaagaaacagcagaaaaaaggcgataaccacgatagttccgccacttatgaaatcaaatttcacgagtttgtgctgttcattctcgaagaaaaaatgggtgcgacgcgtcgtacttttctgacagatttagcccgcaagaaagggttccgcgtcgagaatgaactgaccgacgaagttacccacatcgtggcagaaaatctgtcacgctctgaagtattggcttggctgaaagaacacaagatggagaagaccaagcaattcgaactgctggatattagctggcttatcgaaagcatgaaagttggtaaaccggtggacaccaaggggaaataccagttggcggaatcggttgaggtgagtgcgaacccagatccgacagaaggtcgtgtaaacgagctgcctcctactatgaaaaccgtttctccgtatgcgtgtcaacgccgcaccaccctgaacaaccgtaatcaacgttttacggactcgctggagattcttcgtgaaaattacgagctgaaaggcaacccagatactgcgctggaatttcgtcgtgctatctccgtgctgaaaagccttccgtttgaggtacgtagcctgaaagacacggaaggattgccctggatcagtgatgaagtcaaagggattatggaagaaatcatcgaagtcggggagtcgcgtgaagtgcaggccgtgctcaatgatgagtggtatcaaagcttccacgcatttacgcgtgtctttggagtgggggtgaagacagcagacaagtggtaccgtatgggtctgcgcaccctcgaggatgttcgttccagcaagaccctgaagttgaccccgatgcagaaagtaggtctgctgtattatgaagatcttctgcgtggcgttacgcgtgccgaagctgacgcgatttggctgctggtccaggatgcagtcgcaactttcgacccggatgcgatcgtggagattgtcggtggatttcgtcgtgggaaacctcagggtcacgacgttgatctgcttatcagttctccgggagctgagaaagagcaagaagaccaactcctgcagaaagtgatgaatctgtggaagaaacaagggttgttgctgtgtggtcgtctggaatggagtcagtgggaagatgggggttcgccttccggtaaggctgatgagggtgacgcggaggcgtcgtgctttctgatcctcaaactttatgatcatctggtgcgtaaaagtaaacgcaatatgccgactggttcgaacatgggcgagtccaaaccgtggaaagcaattaaagtagatctgctgcgttgcccctatggcagttttgcgtttgcgatgttgcagtggaccggaagccgcatggttcgtcgtgatctgcgctggtacgccctggaagagaagaacatgatgctggacaacgtctcgctgtatgacctgacccgcggtatcttcctccctgctaaatcggaagaggaaattttcgaacatctggggcttgaatacctggaaccgttcgaacgtaacgca

SEQ ID NO: 3898 - protein, 529 aa, synthetic construct
  REGION 1..529: note = Variant of terminal deoxynucleotidyltransferase
MHHHHHHGGSGSHGIRTIDSDFGKKQQKKGDNHDSSATYEIKFHEFVLFILEEKMGATRRTFLTDLARKKGFRVENELTDEVTHIVAENLSRSEVLAWLKEHKMEKTKQFELLDISWLIESMKVGKPVDTKGKYQLAESVEVSANPDPTEGRVNELPPTMKTVSPYACQRRTTLNNRNQRFTDSLEILRENYELKGNPDTALEFRRAISVLKSLPFEVRSLKDTEGLPWISDEVKGIMEEIIEVGESREVQAVLNDEWYQSFHAFTRVFGVGVKTADKWYRMGLRTLEDVRSSKTLKLTPMQKVGLLYYEDLLRGVTRAEADAIWLLVQDAVATFDPDAIVEIVGGFRRGKPQGHDVDLLISSPGAEKEQEDQLLQKVMNLWKKQGLLLCGRLEWSQWEDGGSPSGKADEGDAEASCFLILKLYDHLVRKSKRNMPTGSNMGESKPWKAIKVDLLRCPYGSFAFAMLQWTGSRMVRRDLRWYALEEKNMMLDNVSLYDLTRGIFLPAKSEEEIFEHLGLEYLEPFERNA

SEQ ID NO: 3899 - DNA, 1587 bp, synthetic construct
  misc_feature 1..1587: note = Variant of terminal deoxynucleotidyltransferase
  source 1..1587: mol_type = other DNA
atgcaccatcatcatcatcatggcggtagcggcagccacggcattcgtaccatcgattcggacttcgggaagaaacagcagaaaaaaggcgataaccacgatagttccgccacttatgaaatcaaatttcacgagtttgtgctgttcattctcgaagaaaaaatgggtgcgacgcgtcgtacttttctgacagatttagcccgcaagaaagggttccgcgtcgagaatgaactgaccgacgaagttacccacatcgtggcagaaaatctgtcacgctctgaagtattggcttggctgaaagaacacaagatggagaagaccaagcaattcgaactgctggatattagctggcttatcgaaagcatgaaagttggtaaaccggtggacaccaaggggaaataccagttggcggaatcggttgaggtgagtgcgaacccagatccgacagaaggtcgtgtaaacgagctgcctcctactatgaaaaccgtttctccgtatgcgtgtcaacgccgcaccaccctgaacaaccgtaatcaacgttttacggactcgctggagattcttcgtgaaaattacgagctgaaaggcaacgacgatactgcgctggaatttcgtcgtgctatctccgtgctgaaaagccttccgtttgaggtacgtagcctgaaagacacggaaggattgccctggatcagtgatgaagtcaaagggattatggaagaaatcatcgaagtcggggagtcgcgtgaagtgcaggccgtgctcaatgatgagtggtatcaaagcttccacgcatttacgcgtgtctttggagtgggggtgaagacagcagacaagtggtaccgtatgggtctgcgcaccctcgaggatgttcgttccagcaagaccctgaagttgaccccgatgcagaaagtaggtctgctgtattatgaagatcttgctcgcggcgttacgcgtgccgaagctgacgcgatttggctgctggttcaggatgcagtcgcaactttcgacccggatgcgatcgtggagattgtcggtggatttcgtcgtgggaaacctcagggtcacgacgttgatctgcttatcagttctccgggagctgagaaagagcaagaagaccaactcctgcagaaagtgatgaatctgtggaagaaacaagggttgttgctgtgtggtcgtctggaatggagtcagtgggaagatgggggttcgccttccggtaaggctgacgagggtgacgcggaggcgtcgtgctttctgatcctcaaactttatgatcatctggtgcgtaaaagtaaacgcaatatgccgactggttcgaacatgggcgagtccaaaccgtggaaagcaattcgcgtagatctgctgcgttgcccctatggcagttttgcgtttgcgatgttgcagtggaccggaagccgcatgtttcgtcgtgatctgcgctggtacgccctggaagagaagaacatgatgctggacaatcattcgctgtatgacatgacccgcggtatcttcctccctgctaaatcggaagaggaaattttcgaacatctggggcttgaatacctggaaccgttcgaacgtaacgca

SEQ ID NO: 3900 - protein, 529 aa, synthetic construct
  REGION 1..529: note = Variant of terminal deoxynucleotidyltransferase
MHHHHHHGGSGSHGIRTIDSDFGKKQQKKGDNHDSSATYEIKFHEFVLFILEEKMGATRRTFLTDLARKKGFRVENELTDEVTHIVAENLSRSEVLAWLKEHKMEKTKQFELLDISWLIESMKVGKPVDTKGKYQLAESVEVSANPDPTEGRVNELPPTMKTVSPYACQRRTTLNNRNQRFTDSLEILRENYELKGNDDTALEFRRAISVLKSLPFEVRSLKDTEGLPWISDEVKGIMEEIIEVGESREVQAVLNDEWYQSFHAFTRVFGVGVKTADKWYRMGLRTLEDVRSSKTLKLTPMQKVGLLYYEDLARGVTRAEADAIWLLVQDAVATFDPDAIVEIVGGFRRGKPQGHDVDLLISSPGAEKEQEDQLLQKVMNLWKKQGLLLCGRLEWSQWEDGGSPSGKADEGDAEASCFLILKLYDHLVRKSKRNMPTGSNMGESKPWKAIRVDLLRCPYGSFAFAMLQWTGSRMFRRDLRWYALEEKNMMLDNHSLYDMTRGIFLPAKSEEEIFEHLGLEYLEPFERNA

SEQ ID NO: 3901 - DNA, 1587 bp, synthetic construct
  misc_feature 1..1587: note = Variant of terminal deoxynucleotidyltransferase
  source 1..1587: mol_type = other DNA
atgcaccatcatcatcatcatggcggtagcggcagccacggcattcgtaccatcgattcggacttcgggaagaaacagcagaaaaaaggcgataaccacgatagttccgccacttatgaaatcaaatttcacgagtttgtgctgttcattctcgaagaaaaaatgggtgcgacgcgtcgtacttttctgacagatttagcccgcaagaaagggttccgcgtcgagaatgaactgaccgacgaagttacccacatcgtggcagaaaatctgtcacgctctgaagtattggcttggctgaaagaacacaagatggagaagaccaagcaattcgaactgctggatattagctggcttatcgaaagcatgaaagttggtaaaccggtggacaccaaggggaaataccagttggcggaatcggttgaggtgagtgcgaacccagatccgacagaaggtcgtgtaaacgagctgcctcctactatgaaaaccgtttctccgtatgcgtgtcaacgccgcaccaccctgaacaaccgtaatcaacgttttacggactcgctggagattcttcgtgaaaattacgagctgaaaggcaacccagatactgcgctggaatttcgtcgtgctatctccgtgctgaaaagccttccgtttgaggtacgtagcctgaaagacacggaaggattgccctggatcagtgatgaagtcaaagggattatggaagaaatcatcgaagtcggggagtcgcgtgaagtgcaggccgtgctcaatgatgagtggtatcaaagcttccacgcatttacgcaggtctttggagtgggggtgaagacagcagacaagtggtaccgtatgggtctgcgcaccctcgaggatgttcgttccagcaagaccctgaagttgaccccgatgcagaaagtaggtctgctgtattatgaagatcttgctcgtggcgttacgcgtgccgaagctgacgcgatttggctgctggtccaggatgcagtcgcaactttcgacccggatgcgatcgtggagattgtcggtggatttcgtcgtgggaaacctcagggtcacgacgttgatctgcttatcagttctccgggagctgagaaagagcaagaagaccaactcctgcagaaagtgatgaatctgtggaagaaacaagggttgttgctgtgtggtcgtctggaatggagtcagtgggaagatgggggttcgccttccggtaaggctgatgagggtgacgcggaggcgtcgtgctttctgatcctcaaactttatgatcatctggtgcgtaaaagtaaacgcaatatgccgactggttcgaacatgggcgagtccaaaccgtggaaagcaattcgcgtagatctgctgcgttgcccctatggcagttttgcgtttgcgatgttgcagtggaccggaagccgcatggttcgtcgtgatctgcgctggtacgccctggaagagaagaacatgatgctggacaatcattcgctgtatgacatgacccgcggtatcttcctccctgctaaatcggaagaggaaattttcgaacatctggggcttgaatacctggaaccgttcgaacgtaacgca

SEQ ID NO: 3902 - protein, 529 aa, synthetic construct
  REGION 1..529: note = Variant of terminal deoxynucleotidyltransferase
MHHHHHHGGSGSHGIRTIDSDFGKKQQKKGDNHDSSATYEIKFHEFVLFILEEKMGATRRTFLTDLARKKGFRVENELTDEVTHIVAENLSRSEVLAWLKEHKMEKTKQFELLDISWLIESMKVGKPVDTKGKYQLAESVEVSANPDPTEGRVNELPPTMKTVSPYACQRRTTLNNRNQRFTDSLEILRENYELKGNPDTALEFRRAISVLKSLPFEVRSLKDTEGLPWISDEVKGIMEEIIEVGESREVQAVLNDEWYQSFHAFTQVFGVGVKTADKWYRMGLRTLEDVRSSKTLKLTPMQKVGLLYYEDLARGVTRAEADAIWLLVQDAVATFDPDAIVEIVGGFRRGKPQGHDVDLLISSPGAEKEQEDQLLQKVMNLWKKQGLLLCGRLEWSQWEDGGSPSGKADEGDAEASCFLILKLYDHLVRKSKRNMPTGSNMGESKPWKAIRVDLLRCPYGSFAFAMLQWTGSRMVRRDLRWYALEEKNMMLDNHSLYDMTRGIFLPAKSEEEIFEHLGLEYLEPFERNA

SEQ ID NO: 3903 - DNA, 1587 bp, synthetic construct
  misc_feature 1..1587: note = Variant of terminal deoxynucleotidyltransferase
  source 1..1587: mol_type = other DNA
atgcaccatcatcatcatcatggcggtagcggcagccacggcattcgtaccatcgattcggacttcgggaagaaacagcagaaaaaaggcgataaccacgatagttccgccacttatgaaatcaaatttcacgagtttgtgctgttcattctcgaagaaaaaatgggtgcgacgcgtcgtacttttctgacagatttagcccgcaagaaagggttccgcgtcgagaatgaactgaccgacgaagttacccacatcgtggcagaaaatctgtcacgctctgaagtattggcttggctgaaagaacacaagatggagaagaccaagcaattcgaactgctggatattagctggcttatcgaaagcatgaaagttggtaaaccggtggacaccaaggggaaataccagttggcggaatcggttgaggtgagtgcgaacccagatccgacagaaggtcgtgtaaacgagctgcctcctactatgaaaaccgtttctccgtatgcgtgtcaacgccgcaccaccctgaacaaccgtaatcaacgttttacggactcgctggagattcttcgtgaaaattacgagctgaaaggcaacgatgatactgcgctggaatttcgtcgtgctatctccgtgctgaaaagccttccgtttgaggtacgtagcctgaaagacacggaaggattgccctggatcagtgatgaagtcaaagggattatggaagaaatcatcgaagtcggggagtcgcgtgaagtgcaggccgtgctcaatgatgagtggtatcaaagcttccacgcatttacgagtgtctttggagtgggggtgaagacagcagacaagtggtaccgtatgggtctgcgcaccctcgaggatgttcgttccagcaagaccctgaagttgaccccgatgcagaaagtaggtctgctgtattatgaagatcttgctcgcggcgttacgcgtgccgaagctgacgcgatttggctgctggttcaggatgcagtcgcaactttcgacccggatgcgatcgtggagattgtcggtggatttcgtcgtgggaaacctcagggtcacgacgttgatctgcttatcagttctccgggagctgagaaagagcaagaagaccaactcctgcagaaagtgatgaatctgtggaagaaacaagggttgttgctgtgtggtcgtctggaatggagtcagtgggaagatgggggttcgccttccggtaaggctctggagggtgacgcggaggcgtcgtgctttctgatcctcaaactttatgatcatctggtgcgtaaaagtaaacgcaatatgccgactggttcgaacatgggcgagtccaaaccgtggaaagcaattcgcgtagatctgctgcgttgcccctatggcagttttgcgtttgcgatgttgcagtggaccggaagccgcatgttccgtcgtgatctgcgctggtacgccctggaagagaagaacatgatgctggacaatcattcgctgtatgacatgacccgcggtatcttcctccctgctaaatcggaagaggaaattttcgaacatctggggcttgaatacctggaaccgttcgaacgtaacgca

SEQ ID NO: 3904 - protein, 529 aa, synthetic construct
  REGION 1..529: note = Variant of terminal deoxynucleotidyltransferase
MHHHHHHGGSGSHGIRTIDSDFGKKQQKKGDNHDSSATYEIKFHEFVLFILEEKMGATRRTFLTDLARKKGFRVENELTDEVTHIVAENLSRSEVLAWLKEHKMEKTKQFELLDISWLIESMKVGKPVDTKGKYQLAESVEVSANPDPTEGRVNELPPTMKTVSPYACQRRTTLNNRNQRFTDSLEILRENYELKGNDDTALEFRRAISVLKSLPFEVRSLKDTEGLPWISDEVKGIMEEIIEVGESREVQAVLNDEWYQSFHAFTSVFGVGVKTADKWYRMGLRTLEDVRSSKTLKLTPMQKVGLLYYEDLARGVTRAEADAIWLLVQDAVATFDPDAIVEIVGGFRRGKPQGHDVDLLISSPGAEKEQEDQLLQKVMNLWKKQGLLLCGRLEWSQWEDGGSPSGKALEGDAEASCFLILKLYDHLVRKSKRNMPTGSNMGESKPWKAIRVDLLRCPYGSFAFAMLQWTGSRMFRRDLRWYALEEKNMMLDNHSLYDMTRGIFLPAKSEEEIFEHLGLEYLEPFERNA

SEQ ID NO: 3905 - DNA, 1587 bp, synthetic construct
  misc_feature 1..1587: note = Variant of terminal deoxynucleotidyltransferase
  source 1..1587: mol_type = other DNA
atgcaccatcatcatcatcatggcggtagcggcagccacggcattcgtaccatcgattcggacttcgggaagaaacagcagaaaaaaggcgataaccacgatagttccgccacttatgaaatcaaatttcacgagtttgtgctgttcattctcgaagaaaaaatgggtgcgacgcgtcgtacttttctgacagatttagcccgcaagaaagggttccgcgtcgagaatgaactgaccgacgaagttacccacatcgtggcagaaaatctgtcacgctctgaagtattggcttggctgaaagaacacaagatggagaagaccaagcaattcgaactgctggatattagctggcttatcgaaagcatgaaagttggtaaaccggtggacaccaaggggaaataccagttggcggaatcggttgaggtgagtgcgaacccagatccgacagaaggtcgtgtaaacgagctgcctcctactatgaaaaccgtttctccgtatgcgtgtcaacgccgcaccaccctgaacaaccgtaatcaacgttttacggactcgctggagattcttcgtgaaaattacgagctgaaaggcaacgatgatactgcgctggaatttcgtcgcgctgtctccgtgctgaaaagccttccgtttgaggtacgtagcctgaaagacacggaaggattgccctggatcagtgatgaagtcaaagggattatggaagaaatcatcgaagtcggggagtcgcgtgaagtgcaggccgtgctcaatgatgagtggtatcaaagcttccacgcatttacgagtgtctttggagtgggggtgaagacagcagacaagtggtaccgtatgggtctgcgcaccctcgaggatgttcgttccagcaagaccctgaagttgaccccgatgcagaaagtaggtctgctggcttatgaagatcttgctcgcggcgttacgcgtgccgaagctgacgcgatttggctgctggttcaggatgcagtcgcaactttcgacccggatgcgatcgtggagattgtcggtggatttcgtcgtgggaaacctcagggtcacgacgttgatctgcttatcagttctccgggagctgagaaagagcaagaagaccaactcctgcagaaagtgatgaatctgtggaagaaacaagggttgttgctgtgtggtcgcctggaatggagtcagtgggaagatgggggttcgccttccggtaaggctgacgagggtgacgcggaggcgtcgtgctttctgatcctcaaactttatgatcatctggtgcgtaaaagtaaacgcaatatgccgactggttcgaacatgggcgagtccaaaccgtggaaagcaattcgcgtagatctgctgcgttgcccctatggcaattttgcttttgcgatgttgcagtggaccggaagccgcatgttccgtcgtgatctgcgctggtacgccctggaagagaagaacatgatgctggacaatcattcgctgtatgacatgacccgcggtatcttcctccctgctaaatcggaagaggaaattttcgaacatctggggcttgaatacctggaaccgttcgaacgtaacgca

SEQ ID NO: 3906 - protein, 529 aa, synthetic construct
  REGION 1..529: note = Variant of terminal deoxynucleotidyltransferase
MHHHHHHGGSGSHGIRTIDSDFGKKQQKKGDNHDSSATYEIKFHEFVLFILEEKMGATRRTFLTDLARKKGFRVENELTDEVTHIVAENLSRSEVLAWLKEHKMEKTKQFELLDISWLIESMKVGKPVDTKGKYQLAESVEVSANPDPTEGRVNELPPTMKTVSPYACQRRTTLNNRNQRFTDSLEILRENYELKGNDDTALEFRRAVSVLKSLPFEVRSLKDTEGLPWISDEVKGIMEEIIEVGESREVQAVLNDEWYQSFHAFTSVFGVGVKTADKWYRMGLRTLEDVRSSKTLKLTPMQKVGLLAYEDLARGVTRAEADAIWLLVQDAVATFDPDAIVEIVGGFRRGKPQGHDVDLLISSPGAEKEQEDQLLQKVMNLWKKQGLLLCGRLEWSQWEDGGSPSGKADEGDAEASCFLILKLYDHLVRKSKRNMPTGSNMGESKPWKAIRVDLLRCPYGNFAFAMLQWTGSRMFRRDLRWYALEEKNMMLDNHSLYDMTRGIFLPAKSEEEIFEHLGLEYLEPFERNA

SEQ ID NO: 3907 - DNA, 1587 bp, synthetic construct
  misc_feature 1..1587: note = Variant of terminal deoxynucleotidyltransferase
  source 1..1587: mol_type = other DNA
atgcaccatcatcatcatcatggcggtagcggcagccacggcattcgtaccatcgattcggacttcgggaagaaacagcagaaaaaaggcgataaccacgatagttccgccacttatgaaatcaaatttcacgagtttgtgctgttcattctcgaagaaaaaatgggtgcgacgcgtcgtacttttctgacagatttagcccgcaagaaagggttccgcgtcgagaatgaactgaccgacgaagttacccacatcgtggcagaaaatctgtcacgctctgaagtattggcttggctgaaagaacacaagatggagaagaccaagcaattcgaactgctggatattagctggcttatcgaaagcatgaaagttggtaaaccggtggacaccaaggggaaataccagttggcggaatcggttgaggtgagtgcgaacccagatccgacagaaggtcgtgtaaacgagctgcctcctactatgaaaaccgtttctccgtatgcgtgtcaacgccgcaccaccctgaacaaccgtaatcaacgttttacggactcgctggagattcttcgtgaaaattacgagctgaaaggcaacgatgatactgcgctggaatttcgtcgcgctatctccgtgctgaaaagccttccgtttgaggtacgtagcctgaaagacacggaaggattgccctggatcagtgatgaagtcaaagggattatggaagaaatcatcgaagtcggggagtcgcgtgaagtgcaggccgtgctcaatgatgagtggtatcaaagcttccacgcatttacgagtgtctttggagtgggggtgaagacagcagacaagtggtaccgtatgggtctgcgcaccctcgaggatgttcgttccagcaagaccctgaagttgaccccgatgcagaaagtaggtctgctggcttatgaagatcttgctcgcggcgttacgcgtgccgaagctgacgcgatttggctgctggttcaggatgcagtcgcaactttcgacccggatgcgatcgtggagattgtcggtggatttcgtcgtgggaaacctcagggtcacgacgttgatctgcttatcagttctccgggagctgagaaagagcaagaagaccaactcctgcagaaagtgatgaatctgtggaagaaacaagggttgttgctgtgtggtcgtctggaatggagtcagtgggaagatgggggttcgccttccggtaaggctgacgagggtgacgcggaggcgtcgtgctttctgatcctcaaactttatgatcatctggtgcgtaaaagtaaacgcaatatgccgactggttcgaacatgggcgagtccaaaccgtggaaagcaattcgcgtagatctgctgcgttgcccctatggcagttttgcgtttgcgatgttgcagtggaccggaagccgcatgttccgtcgtgatctgcgctggtacgccctggaagagaagaacatgatgctggacaatcattcgctgtatgacatgacccgcggtatcttcctccctgctaaatcggaagaggaaattttcgaacatctggggcttgaatacctggaaccgttcgaacgtaacgca

SEQ ID NO: 3908 - protein, 529 aa, synthetic construct
  REGION 1..529: note = Variant of terminal deoxynucleotidyltransferase
MHHHHHHGGSGSHGIRTIDSDFGKKQQKKGDNHDSSATYEIKFHEFVLFILEEKMGATRRTFLTDLARKKGFRVENELTDEVTHIVAENLSRSEVLAWLKEHKMEKTKQFELLDISWLIESMKVGKPVDTKGKYQLAESVEVSANPDPTEGRVNELPPTMKTVSPYACQRRTTLNNRNQRFTDSLEILRENYELKGNDDTALEFRRAISVLKSLPFEVRSLKDTEGLPWISDEVKGIMEEIIEVGESREVQAVLNDEWYQSFHAFTSVFGVGVKTADKWYRMGLRTLEDVRSSKTLKLTPMQKVGLLAYEDLARGVTRAEADAIWLLVQDAVATFDPDAIVEIVGGFRRGKPQGHDVDLLISSPGAEKEQEDQLLQKVMNLWKKQGLLLCGRLEWSQWEDGGSPSGKADEGDAEASCFLILKLYDHLVRKSKRNMPTGSNMGESKPWKAIRVDLLRCPYGSFAFAMLQWTGSRMFRRDLRWYALEEKNMMLDNHSLYDMTRGIFLPAKSEEEIFEHLGLEYLEPFERNA

SEQ ID NO: 3909 - DNA, 1587 bp, synthetic construct
  misc_feature 1..1587: note = Variant of terminal deoxynucleotidyltransferase
  source 1..1587: mol_type = other DNA
atgcaccatcatcatcatcatggcggtagcggcagccacggcattcgtaccatcgattcggacttcgggaagaaacagcagaaaaaaggcgataaccacgatagttccgccacttatgaaatcaaatttcacgagtttgtgctgttcattctcgaagaaaaaatgggtgcgacgcgtcgtacttttctgacagatttagcccgcaagaaagggttccgcgtcgagaatgaactgaccgacgaagttacccacatcgtggcagaaaatctgtcacgctctgaagtattggcttggctgaaagaacacaagatggagaagaccaagcaattcgaactgctggatattagctggcttatcgaaagcatgaaagttggtaaaccggtggacaccaaggggaaataccagttggcggaatcggttgaggtgagtgcgaacccagatccgacagaaggtcgtgtaaacgagctgcctcctactatgaaaaccgtttctccgtatgcgtgtcaacgccgcaccaccctgaacaaccgtaatcaacgttttacggactcgctggagattcttcgtgaaaattacgagctgaaaggcaacgatgatactgcgctggaatttcgtcgtgctatctccgtgctgaaaagccttccgtttgaggtacgtagcctgaaagacacggaaggattgccctggatcagtgatgaagtcaaagggattatggaagaaatcatcgaagtcggggagtcgcgtgaagtgcaggccgtgctcaatgatgagtggtatcaaagcttccacgcatttacgagtgtctttggagtgggggtgaagacagcagacaagtggtaccgtatgggtctgcgcaccctcgaggatgttcgttccagcaagaccctgaagttgaccccgatgcagaaagtaggtctgctgtattatgaagatcttgctcgcggcgttacgcgtgccgaagctgacgcgatttggctgctggttcaggatgcagtcgcaactttcgacccggatgcgatcgtggagattgtcggtggatttcgtcgtgggaaacctcagggtcacgacgttgatctgcttatcagttctccgggagctgagaaagagcaagaagaccaactcctgcagaaagtgatgaatctgtggaagaaacaagggttgttgctgtgtggtcgtctggaatggagtcagtgggaagatgggggttcgccttccggtaaggctgacgagggtgacgcggaggcgtcgtgctttctgatcctcaaactttatgatcatctggtgcgtaaaagtaaacgcaatatgccgactggttcgaacatgggcgagtccaaaccgtggaaagcaattcgcgtagatctgctgcgttgcccctatggcagttttgcgtttgcgatgttgcagtggaccggaagccgcatggttcgtcgtgatctgcgctggtacgccctggaagagaagaacatgatgctggacaatcattcgctgtatgacatgacccgcggtatcttcctccctgctaaatcggaagaggaaattttcgaacatctggggcttgaatacctggaaccgttcgaacgtaacgca

SEQ ID NO: 3910 - protein, 529 aa, synthetic construct
  REGION 1..529: note = Variant of terminal deoxynucleotidyltransferase
MHHHHHHGGSGSHGIRTIDSDFGKKQQKKGDNHDSSATYEIKFHEFVLFILEEKMGATRRTFLTDLARKKGFRVENELTDEVTHIVAENLSRSEVLAWLKEHKMEKTKQFELLDISWLIESMKVGKPVDTKGKYQLAESVEVSANPDPTEGRVNELPPTMKTVSPYACQRRTTLNNRNQRFTDSLEILRENYELKGNDDTALEFRRAISVLKSLPFEVRSLKDTEGLPWISDEVKGIMEEIIEVGESREVQAVLNDEWYQSFHAFTSVFGVGVKTADKWYRMGLRTLEDVRSSKTLKLTPMQKVGLLYYEDLARGVTRAEADAIWLLVQDAVATFDPDAIVEIVGGFRRGKPQGHDVDLLISSPGAEKEQEDQLLQKVMNLWKKQGLLLCGRLEWSQWEDGGSPSGKADEGDAEASCFLILKLYDHLVRKSKRNMPTGSNMGESKPWKAIRVDLLRCPYGSFAFAMLQWTGSRMVRRDLRWYALEEKNMMLDNHSLYDMTRGIFLPAKSEEEIFEHLGLEYLEPFERNA

SEQ ID NO: 3911 - DNA, 1587 bp, synthetic construct
  misc_feature 1..1587: note = Variant of terminal deoxynucleotidyltransferase
  source 1..1587: mol_type = other DNA
atgcaccatcatcatcatcatggcggtagcggcagccacggcattcgtaccatcgattcggacttcgggaagaaacagcagaaaaaaggcgataaccacgatagttccgccacttatgaaatcaaatttcacgagtttgtgctgttcattctcgaagaaaaaatgggtgcgacgcgtcgtacttttctgacagatttagcccgcaagaaagggttccgcgtcgagaatgaactgaccgacgaagttacccacatcgtggcagaaaatctgtcacgctctgaagtattggcttggctgaaagaacacaagatggagaagaccaagcaattcgaactgctggatattagctggcttatcgaaagcatgaaagttggtaaaccggtggacaccaaggggaaataccagttggcggaatcggttgaggtgagtgcgaacccagatccgacagaaggtcgtgtaaacgagctgcctcctactatgaaaaccgtttctccgtatgcgtgtcaacgccgcaccaccctgaacaaccgtaatcaacgttttacggactcgctggagattcttcgtgaaaattacgagctgaaaggcaacgatgatactgcgctggaatttcgtcgtgctatctccgtgctgaaaagccttccgtttgaggtacgtagcctgaaagacacggaaggattgccctggatcagtgatgaagtcaaagggattatggaagaaatcatcgaagtcggggagtcgcgtgaagtgcaggccgtgctcaatgatgagtggtatcaaagcttccacgcatttacgagtgtctttggagtgggggtgaagacagcagacaagtggtaccgtatgggtctgcgcaccctcgaggatgttcgttccagcaagaccctgaagttgaccccgatgcagaaagtaggtctgctgtattatgaagatcttgctcgcggcgttacgcgtgccgaagctgacgcgatttggctgctggtccaggatgcagtcgcaactttcgacccggatgcgatcgtggagattgtcggtggatttcgtcgtgggaaacctcagggtcacgacgttgatctgcttatcagttctccgggagctgagaaagagcaagaagaccaactcctgcagaaagtgatgaatctgtggaagaaacaagggttgttgctgtgtggtcgtctggaatggagtcagtgggaagatgggggttcgccttccggtaaggctgatgagggtgacgcagaggcgtcgtgctttctgatcctcaaactttatgatcatctggtgcgtaaaagtaaacgcaatatgccgactggttcgaacatgggcgagtccaaaccgtggaaagcaattaaagtagatctgctgcgttgcccctatggcagttttgcgtttgcgatgttgcagtggaccggaagccgcatgttccgtcgtgatctgcgctggtacgccctggaagagaagaacatgatgctggacgttgtctcgctgtatgacatgacccgcggtatcttcctccctgctaaatcggaagaggaaattttcgaacatctggggcttgaatacctggaaccgttcgaacgtaacgca

SEQ ID NO: 3912 - protein, 529 aa, synthetic construct
  REGION 1..529: note = Variant of terminal deoxynucleotidyltransferase
MHHHHHHGGSGSHGIRTIDSDFGKKQQKKGDNHDSSATYEIKFHEFVLFILEEKMGATRRTFLTDLARKKGFRVENELTDEVTHIVAENLSRSEVLAWLKEHKMEKTKQFELLDISWLIESMKVGKPVDTKGKYQLAESVEVSANPDPTEGRVNELPPTMKTVSPYACQRRTTLNNRNQRFTDSLEILRENYELKGNDDTALEFRRAISVLKSLPFEVRSLKDTEGLPWISDEVKGIMEEIIEVGESREVQAVLNDEWYQSFHAFTSVFGVGVKTADKWYRMGLRTLEDVRSSKTLKLTPMQKVGLLYYEDLARGVTRAEADAIWLLVQDAVATFDPDAIVEIVGGFRRGKPQGHDVDLLISSPGAEKEQEDQLLQKVMNLWKKQGLLLCGRLEWSQWEDGGSPSGKADEGDAEASCFLILKLYDHLVRKSKRNMPTGSNMGESKPWKAIKVDLLRCPYGSFAFAMLQWTGSRMFRRDLRWYALEEKNMMLDVVSLYDMTRGIFLPAKSEEEIFEHLGLEYLEPFERNA

SEQ ID NO: 3913 - DNA, 1587 bp, synthetic construct
  misc_feature 1..1587: note = Variant of terminal deoxynucleotidyltransferase
  source 1..1587: mol_type = other DNA
atgcaccatcatcatcatcatggcggtagcggcagccacggcattcgtaccatcgattcggacttcgggaagaaacagcagaaaaaaggcgataaccacgatagttccgccacttatgaaatcaaatttcacgagtttgtgctgttcattctcgaagaaaaaatgggtgcgacgcgtcgtacttttctgacagatttagcccgcaagaaagggttccgcgtcgagaatgaactgaccgacgaagttacccacatcgtggcagaaaatctgtcacgctctgaagtattggcttggctgaaagaacacaagatggagaagaccaagcaattcgaactgctggatattagctggcttatcgaaagcatgaaagttggtaaaccggtggacaccaaggggaaataccagttggcggaatcggttgaggtgagtgcgaacccagatccgacagaaggtcgtgtaaacgagctgcctcctactatgaaaaccgtttctccgtatgcgtgtcaacgccgcaccaccctgaacaaccgtaatcaacgttttacggactcgctggagattcttcgtgaaaattacgagctgaaaggcaacgatgatactgcgctggaatttcgtcgtgctatctccgtgctgaaaagccttccgtttgaggtacgtagcctgaaagacacggaaggattgccctggatcagtgatgaagtcaaagggattatggaagaaatcatcgaagtcggggagtcgcgtgaagtgcaggccgtgctcaatgatgagtggtatcaaagcttccacgcatttacgagtgtctttggagtgggggtgaagacagcagacaagtggtaccgtatgggtctgcgcaccctcgaggatgttcgttccagcaagaccctgaagttgaccccgatgcagaaagtaggtctgctgtattatgaagatcttgctcgcggcgttacgcgtgccgaagctgacgcgatttggctgctggttcaggatgcagtcgcaactttcgacccggatgcgatcgtggagattgtcggtggatttcgtcgtgggaaacctcagggtcacgacgttgatctgcttatcagttctccgggagctgagaaagagcaagaagaccaactcctgcagaaagtgatgaatctgtggaagaaacaagggttgttgctgtgtggtcgtctggaatggagtcagtgggaagatgggggttcgccttccggtaaggctctggagggtgacgcggaggcgtcgtgctttctgatcctcaaactttatgatcatctggtgcgtaaaagtaaacgcaatatgccgactggttcgaacatgggcgagtccaaaccgtggaaagcaattcgcgtagatctgctgcgttgcccctatggcagttttgcgtttgcgatgttgcagtggaccggaagccgcatggttcgtcgtgatctgcgctggtacgccctggaagagaagaacatgatgctggacaacgtctcgctgtatgacatgacccgcggtatcttcctccctgctaaatcggaagaggaaattttcgaacatctggggcttgaatacctggaaccgttcgaacgtaacgca

SEQ ID NO: 3914 - protein, 529 aa, synthetic construct
  REGION 1..529: note = Variant of terminal deoxynucleotidyltransferase
MHHHHHHGGSGSHGIRTIDSDFGKKQQKKGDNHDSSATYEIKFHEFVLFILEEKMGATRRTFLTDLARKKGFRVENELTDEVTHIVAENLSRSEVLAWLKEHKMEKTKQFELLDISWLIESMKVGKPVDTKGKYQLAESVEVSANPDPTEGRVNELPPTMKTVSPYACQRRTTLNNRNQRFTDSLEILRENYELKGNDDTALEFRRAISVLKSLPFEVRSLKDTEGLPWISDEVKGIMEEIIEVGESREVQAVLNDEWYQSFHAFTSVFGVGVKTADKWYRMGLRTLEDVRSSKTLKLTPMQKVGLLYYEDLARGVTRAEADAIWLLVQDAVATFDPDAIVEIVGGFRRGKPQGHDVDLLISSPGAEKEQEDQLLQKVMNLWKKQGLLLCGRLEWSQWEDGGSPSGKALEGDAEASCFLILKLYDHLVRKSKRNMPTGSNMGESKPWKAIRVDLLRCPYGSFAFAMLQWTGSRMVRRDLRWYALEEKNMMLDNVSLYDMTRGIFLPAKSEEEIFEHLGLEYLEPFERNA

SEQ ID NO: 3915 - DNA, 1587 bp, synthetic construct
  misc_feature 1..1587: note = Variant of terminal deoxynucleotidyltransferase
  source 1..1587: mol_type = other DNA
atgcaccatcatcatcatcatggcggtagcggcagccacggcattcgtaccatcgattcggacttcgggaagaaacagcagaaaaaaggcgataaccacgatagttccgccacttatgaaatcaaatttcacgagtttgtgctgttcattctcgaagaaaaaatgggtgcgacgcgtcgtacttttctgacagatttagcccgcaagaaagggttccgcgtcgagaatgaactgaccgacgaagttacccacatcgtggcagaaaatctgtcacgctctgaagtattggcttggctgaaagaacacaagatggagaagaccaagcaattcgaactgctggatattagctggcttatcgaaagcatgaaagttggtaaaccggtggacaccaaggggaaataccagttggcggaatcggttgaggtgagtgcgaacccagatccgacagaaggtcgtgtaaacgagctgcctcctactatgaaaaccgtttctccgtatgcgtgtcaacgccgcaccaccctgaacaaccgtaatcaacgttttacggactcgctggagattcttcgtgaaaattacgagctgaaaggcaacgatgatactgcgctggaatttcgtcgcgctatctccgtgctgaaaagccttccgtttgaggtacgtagcctgaaagacacggaaggattgccctggatcagtgatgaagtcaaagggattatggaagaaatcatcgaagtcggggagtcgcgtgaagtgcaggccgtgctcaatgatgagtggtatcaaagcttccacgcatttacgagtgtctttggagtgggggtgaagacagcagacaagtggtaccgtatgggtctgcgcaccctcgaggatgttcgttccagcaagaccctgaagttgaccccgatgcagaaagtaggtctgctggtttatgaagatcttgctcgcggcgttacgcgtgccgaagctgacgcgatttggctgctggttcaggatgcagtcgcaactttcgacccggatgcgatcgtggagattgtcggtggatttcgtcgtgggaaacctcagggtcacgacgttgatctgcttatcagttctccgggagctgagaaagagcaagaagaccaactcctgcagaaagtgatgaatctgtggaagaaacaagggttgttgctgtgtggtcgtctggaatggagtcagtgggaagatgggggttcgccttccggtaaggctgacgagggtgacgcggaggcctcgtgctttctgatcctcaaactttatgatcatctggtgcgtaaaagtaaacgcaatatgccgactggttcgaacatgggcgagtccaaaccgtggaaagcaattcgcgtagatctgctgcgttgcccctatggcagttttgcttttgcgatgttgcagtggaccggaagccgcatgttccgtcgtgatctgcgctggtacgccctggaagagaagaacatgatgctggacaatcattcgctgtatgacatgacccgcggtatcttcctccctgctaaatcggaagaggaaattttcgaacatctggggcttgaatacctggaaccgttcgaacgtaacgca

SEQ ID NO: 3916 - protein, 529 aa, synthetic construct
  REGION 1..529: note = Variant of terminal deoxynucleotidyltransferase
MHHHHHHGGSGSHGIRTIDSDFGKKQQKKGDNHDSSATYEIKFHEFVLFILEEKMGATRRTFLTDLARKKGFRVENELTDEVTHIVAENLSRSEVLAWLKEHKMEKTKQFELLDISWLIESMKVGKPVDTKGKYQLAESVEVSANPDPTEGRVNELPPTMKTVSPYACQRRTTLNNRNQRFTDSLEILRENYELKGNDDTALEFRRAISVLKSLPFEVRSLKDTEGLPWISDEVKGIMEEIIEVGESREVQAVLNDEWYQSFHAFTSVFGVGVKTADKWYRMGLRTLEDVRSSKTLKLTPMQKVGLLVYEDLARGVTRAEADAIWLLVQDAVATFDPDAIVEIVGGFRRGKPQGHDVDLLISSPGAEKEQEDQLLQKVMNLWKKQGLLLCGRLEWSQWEDGGSPSGKADEGDAEASCFLILKLYDHLVRKSKRNMPTGSNMGESKPWKAIRVDLLRCPYGSFAFAMLQWTGSRMFRRDLRWYALEEKNMMLDNHSLYDMTRGIFLPAKSEEEIFEHLGLEYLEPFERNA

SEQ ID NO: 3917 - DNA, 1587 bp, synthetic construct
  misc_feature 1..1587: note = Variant of terminal deoxynucleotidyltransferase
  source 1..1587: mol_type = other DNA
atgcaccatcatcatcatcatggcggtagcggcagccacggcattcgtaccatcgattcggacttcgggaagaaacagcagaaaaaaggcgataaccacgatagttccgccacttatgaaatcaaatttcacgagtttgtgctgttcattctcgaagaaaaaatgggtgcgacgcgtcgtacttttctgacagatttagcccgcaagaaagggttccgcgtcgagaatgaactgaccgacgaagttacccacatcgtggcagaaaatctgtcacgctctgaagtattggcttggctgaaagaacacaagatggagaagaccaagcaattcgaactgctggatattagctggcttatcgaaagcatgaaagttggtaaaccggtggacaccaaggggaaataccagttggcggaatcggttgaggtgagtgcgaacccagatccgacagaaggtcgtgtaaacgagctgcctcctactatgaaaaccgtttctccgtatgcgtgtcaacgccgcaccaccctgaacaaccgtaatcaacgttttacggactcgctggagattcttcgtgaaaattacgagctgaaaggcaacgacgatactgcgctggaatttcgtcgtgctatctccgtgctgaaaagccttccgtttgaggtacgtagcctgaaagacacggaaggattgccctggatcagtgatgaagtcaaagggattatggaagaaatcatcgaagtcggggagtcgcgtgaagtgcaggccgtgctcaatgatgagtggtatcaaagcttccacgcatttacgcgtgtctttggagtgggggtgaagacagcagacaagtggtaccgtatgggtctgcgcaccctcgaggatgttcgttccagcaagaccctgaagttgaccccgtggcagaaagtaggtctgctgtattatgaagatcttgctcgcggcgttacgcgtgccgaagctgacgcgatttggctgctggttcaggatgcagtcgcaactttcgacccggatgcgatcgtggagattgtcggtggatttcgtcgtgggaaacctcagggtcacgacgttgatctgcttatcagttctccgggagctgagaaagagcaagaagaccaactcctgcagaaagtgatgaatctgtggaagaaacaagggttgttgctgtgtggtcgtctggaatggagtcagtgggaagatgggggttcgccttccggtaaggctgatgagggtgacgcggaggcgtcgtgctttctgatcctcaaactttatgatcatctggtgcgtaaaagtaaacgcaatatgccgactggttcgaacatgggcgagtccaaaccgtggaaagcaattaaagtagatctgctgcgttgcccctatggcagttttgcgtttgcgatgttgcagtggaccggaagccgcatgttccgtcgtgatctgcgctggtacgccctggaagagaagaacatgatgctggacaatcattcgctgtatgacatgacccgcggtatcttcctccctgctaaatcggaagaggaaattttcgaacatctggggcttgaatacctggaaccgttcgaacgtaacgca

SEQ ID NO: 3918 - protein, 529 aa, synthetic construct
  REGION 1..529: note = Variant of terminal deoxynucleotidyltransferase
MHHHHHHGGSGSHGIRTIDSDFGKKQQKKGDNHDSSATYEIKFHEFVLFILEEKMGATRRTFLTDLARKKGFRVENELTDEVTHIVAENLSRSEVLAWLKEHKMEKTKQFELLDISWLIESMKVGKPVDTKGKYQLAESVEVSANPDPTEGRVNELPPTMKTVSPYACQRRTTLNNRNQRFTDSLEILRENYELKGNDDTALEFRRAISVLKSLPFEVRSLKDTEGLPWISDEVKGIMEEIIEVGESREVQAVLNDEWYQSFHAFTRVFGVGVKTADKWYRMGLRTLEDVRSSKTLKLTPWQKVGLLYYEDLARGVTRAEADAIWLLVQDAVATFDPDAIVEIVGGFRRGKPQGHDVDLLISSPGAEKEQEDQLLQKVMNLWKKQGLLLCGRLEWSQWEDGGSPSGKADEGDAEASCFLILKLYDHLVRKSKRNMPTGSNMGESKPWKAIKVDLLRCPYGSFAFAMLQWTGSRMFRRDLRWYALEEKNMMLDNHSLYDMTRGIFLPAKSEEEIFEHLGLEYLEPFERNA

SEQ ID NO: 3919 - DNA, 1587 bp, synthetic construct
  misc_feature 1..1587: note = Variant of terminal deoxynucleotidyltransferase
  source 1..1587: mol_type = other DNA
atgcaccatcatcatcatcatggcggtagcggcagccacggcattcgtaccatcgattcggacttcgggaagaaacagcagaaaaaaggcgataaccacgatagttccgccacttatgaaatcaaatttcacgagtttgtgctgttcattctcgaagaaaaaatgggtgcgacgcgtcgtacttttctgacagatttagcccgcaagaaagggttccgcgtcgagaatgaactgaccgacgaagttacccacatcgtggcagaaaatctgtcacgctctgaagtattggcttggctgaaagaacacaagatggagaagaccaagcaattcgaactgctggatattagctggcttatcgaaagcatgaaagttggtaaaccggtggacaccaaggggaaataccagttggcggaatcggttgaggtgagtgcgaacccagatccgacagaaggtcgtgtaaacgagctgcctcctactatgaaaaccgtttctccgtatgcgtgtcaacgccgcaccaccctgaacaaccgtaatcaacgttttacggactcgctggagattcttcgtgaaaattacgagctgaaaggcaacgacgatactgcgctggaatttcgtcgtgctatctccgtgctgaaaagccttccgtttgaggtacgtagcctgaaagacacggaaggattgccctggatcagtgatgaagtcaaagggattatggaagaaatcatcgaagtcggggagtcgcgtgaagtgcaggccgtgctcaatgatgagtggtatcaaagcttccacgcatttacgcgtgtctttggagtgggggtgaagacagcagacaagtggtaccgtatgggtctgcgcaccctcgaggatgttcgttccagcaagaccctgaagttgaccccggggcagaaagtaggtctgctgtattatgaagatcttgctcgcggcgttacgcgtgccgaagctgacgcgatttggctgctggttcaggatgcagtcgcaactttcgacccggatgcgatcgtggagattgtcggtggatttcgtcgtgggaaacctcagggtcacgacgttgatctgcttatcagttctccgggagctgagaaagagcaagaagaccaactcctgcagaaagtgatgaatctgtggaagaaacaagggttgttgctgtgtggtcgtctggaatggagtcagtgggaagatgggggttcgccttccggtaaggctgatgagggtgacgcggaggcgtcgtgctttctgatcctcaaactttatgatcatctggtgcgtaaaagtaaacgcaatatgccgactggttcgaacatgggcgagtccaaaccgtggaaagcaattaaagtagatctgctgcgttgcccctatggcagttttgcgtttgcgatgttgcagtggaccggaagccgcatgttccgtcgtgatctgcgctggtacgccctggaagagaagaacatgatgctggacaatcattcgctgtatgacatgacccgcggtatcttcctccctgctaaatcggaagaggaaattttcgaacatctggggcttgaatacctggaaccgttcgaacgtaacgca

SEQ ID NO: 3920 - protein, 529 aa, synthetic construct
  REGION 1..529: note = Variant of terminal deoxynucleotidyltransferase
MHHHHHHGGSGSHGIRTIDSDFGKKQQKKGDNHDSSATYEIKFHEFVLFILEEKMGATRRTFLTDLARKKGFRVENELTDEVTHIVAENLSRSEVLAWLKEHKMEKTKQFELLDISWLIESMKVGKPVDTKGKYQLAESVEVSANPDPTEGRVNELPPTMKTVSPYACQRRTTLNNRNQRFTDSLEILRENYELKGNDDTALEFRRAISVLKSLPFEVRSLKDTEGLPWISDEVKGIMEEIIEVGESREVQAVLNDEWYQSFHAFTRVFGVGVKTADKWYRMGLRTLEDVRSSKTLKLTPGQKVGLLYYEDLARGVTRAEADAIWLLVQDAVATFDPDAIVEIVGGFRRGKPQGHDVDLLISSPGAEKEQEDQLLQKVMNLWKKQGLLLCGRLEWSQWEDGGSPSGKADEGDAEASCFLILKLYDHLVRKSKRNMPTGSNMGESKPWKAIKVDLLRCPYGSFAFAMLQWTGSRMFRRDLRWYALEEKNMMLDNHSLYDMTRGIFLPAKSEEEIFEHLGLEYLEPFERNA

SEQ ID NO: 3921 - DNA, 1284 bp, synthetic construct
  misc_feature 1..1284: note = Variant of alkaline phosphatase
  source 1..1284: mol_type = other DNA
atgcaccatcatcatcatcatggcggtagcggctttagtcaggtgaaaaacgttatttatctgatcggcgatggtatgggcttgagccaagtctacctgacctcgatgttagaaggtcgcccgctgtccttcatgaagacgccatatattgggctcgtgaagactcatagcgcgaattcttgggttacagactcagctgcagccggcaccgcgctggccagcgggttcaagaccaacaacggtatgatcaatattttaccggatggcacggtggtacctaccatctttgaggtcgcgaagacttacggagttcgtacgggtattgtggtaacatgccgcgttactcacgcaaccccggccgcgttctatgctcatgtgaaatcgcgtgacgaagaaaatgagatcgctcgtcagctggtcgaaaacgaaaccgtggatgtcgttatgggaggaggctgggcgaactttcttcccaaagatctgggtggtaaacgcgacgacaatttgaacctgattgaactcgccaaagagaaaggctacatctatgtgaaaacccgcgaagaactgtccaagatttctgcagatagcgataagattcttgcgctgtttgcaccgtcacacttagatccagcgagttcgcgtaaagaacagccgatgctgtatgagatggtagagaaagccttggaaatcctgagcaaagatgacgaaccgttctttctgatggtggaagggtcccaaattgattgggaggcccatgacaatgatatctacggtgtctggaaagaagttgtggaatttgataaagcagttcaggtagcgcttgacttcgctctcaaacgcggtgatacgctggtgattgtcacggcggatcacgaaaccggcggtctggggctcagtagtggagactatcgtgtggatgtcgacaagatccgcaacttcaagaagacaaccgactggattatggccaattacagccctaaagatcgcgagaaattcaagaaagcaatcgaagagtattttgggttaacgctgtctgatgaagatctgaaccgtatttcgatgtccaagaatcccaagatcgaacttggtcgtattctgggtgagaaagtttctgtagggtggactaccaccacgcatagcggaactccggtgccgatctttgcttttggaccaggtgcggaaaactttaccggtttcctggataatacggaaattccgcgcattatcatgaaattgacagggtactcattgcagtatcctctgctgaaagaaccggttaccaag

SEQ ID NO: 3922 - protein, 428 aa, synthetic construct
  REGION 1..428: note = Variant of alkaline phosphatase
MHHHHHHGGSGFSQVKNVIYLIGDGMGLSQVYLTSMLEGRPLSFMKTPYIGLVKTHSANSWVTDSAAAGTALASGFKTNNGMINILPDGTVVPTIFEVAKTYGVRTGIVVTCRVTHATPAAFYAHVKSRDEENEIARQLVENETVDVVMGGGWANFLPKDLGGKRDDNLNLIELAKEKGYIYVKTREELSKISADSDKILALFAPSHLDPASSRKEQPMLYEMVEKALEILSKDDEPFFLMVEGSQIDWEAHDNDIYGVWKEVVEFDKAVQVALDFALKRGDTLVIVTADHETGGLGLSSGDYRVDVDKIRNFKKTTDWIMANYSPKDREKFKKAIEEYFGLTLSDEDLNRISMSKNPKIELGRILGEKVSVGWTTTTHSGTPVPIFAFGPGAENFTGFLDNTEIPRIIMKLTGYSLQYPLLKEPVTK

SEQ ID NO: 3923 - DNA, 1449 bp, synthetic construct
  misc_feature 1..1449: note = Variant of alkaline phosphatase
  source 1..1449: mol_type = other DNA
atgcaccatcatcatcatcatggcggtagcggctatgatagtcaagaaagcggcattaagaacatcatcattctgattggtgacgggatgggcatgtcgcatgtgcagatcaccaaattggtttacggtcacctgaatatggaggagtttccgattattggattcgaacttacggaaagcttatctggtgaggtcacagattcagcggcggcaggaactgctatcgccaccggcgtgaagacgtataaccgcatgatctccgttaccaatattaccggcaaagtaactaacctgacgaccctcctcgaaattgcccaggtgctgggtaaatcgacagggttagtcaccacgacccgtatcacgcatgcaaccccagcggtatttgcttctcacgttccggatcgcgacatggaagaagaaattgcccgtcagttgatcgcacatcgcgtgaatgtcctgcttggtggtggccgtaagaaattcgatgaaaacaccctgaagatggcgaaagagcaaggctacaatatcgtgtttacgaaagaagaactggagaaagcggaaggcgaattcattctgggtctgtttgccgacagccatatcccttatgttctggatcgtaaaccggaagatgtggggttgttggagatgactaagaaagcgatttccattctggagaagaatcccaacggcttctttctgatgattgaaggtggacgcattgatcacgctgcccatgaaaacgacatcgcaagtgttgtagcggagaccaaagaatttgatgatgtcgtggggtacgtgctggaatatgccaagaaacgcggcgacacgctcgttatcgtcttagcagaccacgaaacaggtggccttggcttaggcctgacttatggtgatgcgattaacgaagatgtgatccgtaatatcaacgctagcgtctcgaagattgcgtcagaaattcgcgccaccaatgacatcaaacgtgtgatcaagaaatacaccgggttcgagctgactgaagatgagattaactatattgaagaagcaattaatctggcggatgaatacgctcttcagaacgccatcgcggacattatcaacaaacgcgtaggcgttggttttgtgagccataaacacacaggagcaccggttagtctgctggcctatggcccaggagcggagaatttcgcgggctttctgcatcatgtagataccgccaaactcatcgcgaaactcatgctgttcgggaagaaagatattccggtgacgattttgggtatttctggtgttaaaggcgacatcaccggcgactttaaagtcgatgaacaggatgcatacgtcacgctgatgatgttattaggagaacgtgtggatactgagttggaacgcaaagtagacatgaacaacaatgggatcatcgaactgggcgatgtgctgctgattcttcaagagtcg

SEQ ID NO: 3924 - protein, 483 aa, synthetic construct
  REGION 1..483: note = Variant of alkaline phosphatase
MHHHHHHGGSGYDSQESGIKNIIILIGDGMGMSHVQITKLVYGHLNMEEFPIIGFELTESLSGEVTDSAAAGTAIATGVKTYNRMISVTNITGKVTNLTTLLEIAQVLGKSTGLVTTTRITHATPAVFASHVPDRDMEEEIARQLIAHRVNVLLGGGRKKFDENTLKMAKEQGYNIVFTKEELEKAEGEFILGLFADSHIPYVLDRKPEDVGLLEMTKKAISILEKNPNGFFLMIEGGRIDHAAHENDIASVVAETKEFDDVVGYVLEYAKKRGDTLVIVLADHETGGLGLGLTYGDAINEDVIRNINASVSKIASEIRATNDIKRVIKKYTGFELTEDEINYIEEAINLADEYALQNAIADIINKRVGVGFVSHKHTGAPVSLLAYGPGAENFAGFLHHVDTAKLIAKLMLFGKKDIPVTILGISGVKGDITGDFKVDEQDAYVTLMMLLGERVDTELERKVDMNNNGIIELGDVLLILQES

SEQ ID NO: 3925 - DNA, 1314 bp, synthetic construct
  misc_feature 1..1314: note = Variant of alkaline phosphatase
  source 1..1314: mol_type = other DNA
atgcaccatcatcatcatcatggcggtagcggcagctatgtgaaaaacgtaatttactttatcggcgatggtatgggcttcaatcatgtctattttgcgtccattctggaaggtcgtccgttgaacatgatgaagtctcagcacgttgggatcgtgaagaccttcagtgcaaacacgtgggttactgacagcgccgctgctggcaccgcgctggcgacggggttcaagaccaataatggaatgattggtatgttaccaaacggcgagcttgttccgtcaatcgccgaaatcctgaaatcgtacggtgtgaaagtcggcattgtagtaacatgccgcgtcacccatgcaactcctgccgccttctatggacacgttccggatcgcgacatggaaaatgagctggcagaacaactcattgaaagcgattttgatgtggtcatgggtggtggcatgcgtcattttattcccgcgtcggagaaaggctccaaacgcaacgacgggaaagatctgatcgcgattgcacgtgaacgcggctacacggtggtgacgaagaaaagtgaattggctcaggtggaatctggcaaagttctggcgttatttgcctcaagccacctggcaccggcgagtgagcgtccagatgatcagccgatgctctatgaaatggtggagaaagccctggaacttcttagccgcgacggtgaacctttctttctgatggtcgaaggctcgcaaatcgattgggaagcgcatggtaacgacccgtatggagtgtggaaagaggttgttgaatttgatgaagctattggtgtagcgttggagttcgccaagaagaatcccgacaccctgatcgtcgtgaccgcagatcatgaaacaggcggcctgtccacctctacgggtagctacgcgctggatgtggacaaactccgtgagtttaaagccaacaccgattggtttttagcgcgctataatgttgaagacaaagagaaattcattgctgcagtgaaagaattctacggaatcgatgtctcggaagaagattatgcccagctgctgaacattaagaagactgctaaatcagcgtacgatttgccgaatgcatttgggcgttatatctcctccaaagtattattaggctggaccacatttgaccacacgagcgatccagtgccgatttttgcgttcggtcctggcagtgagcattttaccggttggctggacaacactgatgttccgcgcatcattgcccgtcttatgggctgtccactcacctacccgatccagaaagaaccgattattgcgggtcccgtgttgtac

SEQ ID NO: 3926 - protein, 438 aa, synthetic construct
  REGION 1..438: note = Variant of alkaline phosphatase
MHHHHHHGGSGSYVKNVIYFIGDGMGFNHVYFASILEGRPLNMMKSQHVGIVKTFSANTWVTDSAAAGTALATGFKTNNGMIGMLPNGELVPSIAEILKSYGVKVGIVVTCRVTHATPAAFYGHVPDRDMENELAEQLIESDFDVVMGGGMRHFIPASEKGSKRNDGKDLIAIARERGYTVVTKKSELAQVESGKVLALFASSHLAPASERPDDQPMLYEMVEKALELLSRDGEPFFLMVEGSQIDWEAHGNDPYGVWKEVVEFDEAIGVALEFAKKNPDTLIVVTADHETGGLSTSTGSYALDVDKLREFKANTDWFLARYNVEDKEKFIAAVKEFYGIDVSEEDYAQLLNIKKTAKSAYDLPNAFGRYISSKVLLGWTTFDHTSDPVPIFAFGPGSEHFTGWLDNTDVPRIIARLMGCPLTYPIQKEPIIAGPVLY

SEQ ID NO: 3927 - DNA, 1314 bp, synthetic construct
  misc_feature 1..1314: note = Variant of alkaline phosphatase
  source 1..1314: mol_type = other DNA
atgcaccatcatcatcatcatggcggtagcggccatgtgaaaaacgttatttattttatcggcgatggtatggggttcaatcacctgtacttagccagcttgctggaaggcaagaccctgaacatgatgaagacgccgtataccggtatcgtcaagactttcagtgcgaatacatgggtgaccgactctgctgcagcaggcactgccttagcgacggggtttaagaccaacaacggaatgattggtatgctcccaaatcaggagtcagtaccgacgatcattgaagttgcgaaagcttacggcatgaagaccggtattgtggtgacatgccgcatcacccatgccactcctgcgtcgttctatggacacgtaccggatcgtgacatggaaaatgagcttgcggaacaactgattaccaacgcaacggtcgatatcattatgggtggtggctaccgcaactttttgccaatgagcgttaaaggttcctcccgtaaagatgagaaagacctgattgctctggccaaagagaaagggtatgcgtatgtcaccaagaaaagcgaactggccaatatcgattcggataaagtgctggcactctttagcagcagtcatatggcggctgcatcagatcgctctggagaacagccgatgctgtacgaaatggttgagaaagcgttggaattacttagtaaagacggtgaacccttctttctgatggtggaagggtcgcagattgattgggaagcccacggtaacgacccgtatggagtctggaaagaagtagcggagtttgataaagccgttggtgtggcacttcaattcgcgaagacgaatcctgacaccctgatcgtcattacagccgatcatgaaactggtgggctgtccacgtcaaccggaacctacatgctggaagtggagatgctgaagaaattcaagatgaacacggatacctttctcgcgaaatttaatatcgaagagaaagagaaatttattagcgctgtgaaagaaatctattcgattgacatgacagaagcggaatacgaatggttgttgaacatcaagaagactgccaaaagctattatgatctgccgaataatttcgggaaatacatctcctccaaagccttagtaggatggacgacgtttgatcataccggaaacccggtccccattttcgcttttggtccaggtgcggaatattttactgggtggttcgacaacaccgatattcctcgtctgattgcacgcttaatgggatgtccgctgacctacccgatctataaagaaccggttattacaggtccagtgctctac

SEQ ID NO: 3928 - protein, 438 aa, synthetic construct
  REGION 1..438: note = Variant of alkaline phosphatase
MHHHHHHGGSGHVKNVIYFIGDGMGFNHLYLASLLEGKTLNMMKTPYTGIVKTFSANTWVTDSAAAGTALATGFKTNNGMIGMLPNQESVPTIIEVAKAYGMKTGIVVTCRITHATPASFYGHVPDRDMENELAEQLITNATVDIIMGGGYRNFLPMSVKGSSRKDEKDLIALAKEKGYAYVTKKSELANIDSDKVLALFSSSHMAAASDRSGEQPMLYEMVEKALELLSKDGEPFFLMVEGSQIDWEAHGNDPYGVWKEVAEFDKAVGVALQFAKTNPDTLIVITADHETGGLSTSTGTYMLEVEMLKKFKMNTDTFLAKFNIEEKEKFISAVKEIYSIDMTEAEYEWLLNIKKTAKSYYDLPNNFGKYISSKALVGWTTFDHTGNPVPIFAFGPGAEYFTGWFDNTDIPRLIARLMGCPLTYPIYKEPVITGPVLY

SEQ ID NO: 3929 - DNA, 1287 bp, synthetic construct
  misc_feature 1..1287: note = Variant of alkaline phosphatase
  source 1..1287: mol_type = other DNA
atgcaccatcatcatcatcatggcggtagcggctttagtttttctcaggtgaaaaacatcatttatttcattggcgatggtatgggactgagccaagcgtacctcacctcgctgatcgaaggtcgcccgctttccttcatgaagacgccatatactggcctggttaagacccattcagtagacagctgggtgacagatagtgccgcagcaggcaccgctttagccagcgggttcaaaaccaagaatggcatgattaacgtcttgccggatggtactcgtgtgcctacgatctttgagattgcgaaagcgtacggtgctaagacgggcatcgttgttacatgccgcgttactcacgcaacaccggccgcgttctatgcgcatgtcaaatctcgttcggaagaaaatgagattgcacgccagctggtggaatccgaaacggtagacctggtgatgggtggagggtgggccaactttttgcccgaaagccttggtggtaaacgttcagatggcctgaatctcattgagatggcgaaaaagaaaggctacgtctatgtgacgaagaaagaagacctgatgaaacttccggaaaacacggagaaagtcctggccttatttgctccatcccacttagatccggcgagtagtcgcgaagaacagcctatgctgtatgagatggtgaagaaagccttggaaatcctgagcaatgatgaagagccgttctttctgatggtagaagggtcgcaaattgactgggaagcgcatgataacgatatctacggtgtctggaaagaggttgtggaatttgaccgtgctgttcaggtggcacttgatttcgcgttaaaacgcggcgacactctggtcattgtaacagcagatcacgaaactggaggtctggcgctgtcttctggcgactatcgtgttgatgtggatcgcatccgcaaatttagcaagacgacggattggattctcgccaactacagcttgaaagaccgtgagtcgttcaagaaagccatcgagaaatattttggtctgactctctccgattcagacctggatcgcatcacaagctcgaataattccaaagtagaattaggccgtgtgctgagcgagaaagttaacgtcggatggacaacgacgagtcattctggtgttcccgtgccgatttacgcttttggtccaggcgcggaaaacttcactggctttctggacaatacggatattccgcgtatcatgatgaaattggcagggtattcacttcagtatcctctggtgaaagaaccggtcaag

SEQ ID NO: 3930 - protein, 429 aa, synthetic construct
  REGION 1..429: note = Variant of alkaline phosphatase
MHHHHHHGGSGFSFSQVKNIIYFIGDGMGLSQAYLTSLIEGRPLSFMKTPYTGLVKTHSVDSWVTDSAAAGTALASGFKTKNGMINVLPDGTRVPTIFEIAKAYGAKTGIVVTCRVTHATPAAFYAHVKSRSEENEIARQLVESETVDLVMGGGWANFLPESLGGKRSDGLNLIEMAKKKGYVYVTKKEDLMKLPENTEKVLALFAPSHLDPASSREEQPMLYEMVKKALEILSNDEEPFFLMVEGSQIDWEAHDNDIYGVWKEVVEFDRAVQVALDFALKRGDTLVIVTADHETGGLALSSGDYRVDVDRIRKFSKTTDWILANYSLKDRESFKKAIEKYFGLTLSDSDLDRITSSNNSKVELGRVLSEKVNVGWTTTSHSGVPVPIYAFGPGAENFTGFLDNTDIPRIMMKLAGYSLQYPLVKEPVK

SEQ ID NO: 3931 - DNA, 1182 bp, synthetic construct
  misc_feature 1..1182: note = Variant of alkaline phosphatase
  source 1..1182: mol_type = other DNA
atgcaccatcatcatcatcatggcggtagcggctgtagtccgaccgaaaagaaagccaaaagcctgccaaacacgccgtttactcctaccttagcggagcagaatccgctgaaacgccaatgggcagaacccattgaatcgtatcagatcaagaacattccgttggctaagaatccgaacggcaaacccaagaatatcatcctgctgattggtgatggaatggggctcacacagatttacgcggcgatgacggcaaaccgtggcaaacttaatatcgaaaactgctcccatattggtctgatcaagacctatgcctcaaacgcctacattactgacagcgctgcgggcgcgaccgcattcgcttgcggtgagaagacgtataatggcgccattggtgtggatgcagaagggaaatctctgaagaccatcttggaaattgcggaggagaacggcttagccacaggaatggttgcgaccagcagcatcactcacgcaacgccagcctgttttattgcgcatcagaaaagtcgccgcatggaagaagaaatcgctgctgatttcctgaataccgacatcgacgtctttattggtggcggcaaaaaattcttcgaacgttctgcaaacggtcgtaatctgcttccggaattagcagcgaaagggtaccaagtactcgataacatgaatgagattgcgaaagtgaaacagggtaaattggctggctttaccgcgcaagaacagaacccgaagatgtccgaaggccgcggtgagatgctgcttcagtcgacgaaaacagcgctcaatatcctctcgcagaacaagaaagggttctttcttatggttgaaggcagccaaattgattggggaggacacgataacaacctgtcctatgtggtgcaagagaccatcgactttgataaagtcattggtgaggttttggaatttgcagcaaaagatggcgaaacgttggtaattattactgctgaccatgaaaccggtggtttaactttagtcggcgggaatatcaaagaaggcaaagtggaaggtgcgttctcaaccggcggtcacacgtctgttatcgtgcctgtctatgcgtacggatgccaggcggacaaatttagtgggatctatgagaacaccgatattttccataagatgatggctgtatttggctttacaagccgt

SEQ ID NO: 3932 - protein, 394 aa, synthetic construct
  REGION 1..394: note = Variant of alkaline phosphatase
MHHHHHHGGSGCSPTEKKAKSLPNTPFTPTLAEQNPLKRQWAEPIESYQIKNIPLAKNPNGKPKNIILLIGDGMGLTQIYAAMTANRGKLNIENCSHIGLIKTYASNAYITDSAAGATAFACGEKTYNGAIGVDAEGKSLKTILEIAEENGLATGMVATSSITHATPACFIAHQKSRRMEEEIAADFLNTDIDVFIGGGKKFFERSANGRNLLPELAAKGYQVLDNMNEIAKVKQGKLAGFTAQEQNPKMSEGRGEMLLQSTKTALNILSQNKKGFFLMVEGSQIDWGGHDNNLSYVVQETIDFDKVIGEVLEFAAKDGETLVIITADHETGGLTLVGGNIKEGKVEGAFSTGGHTSVIVPVYAYGCQADKFSGIYENTDIFHKMMAVFGFTSR

SEQ ID NO: 3933 - DNA, 1611 bp, synthetic construct
  misc_feature 1..1611: note = Variant of alkaline phosphatase
  source 1..1611: mol_type = other DNA
atgcaccatcatcatcatcatggcggtagcggcgcaatggaaaccgcgaagaagaaagaggagccgaaagtgaagaacgtcattatgatggttatggatggtacttctagcagcgctacaacactggcccgctggtataaaggcgaaccattggcgatggaccagatcgtaagtggaggagtgcgtacctactcagcagaatctgctattactgatagtgccccggcagcaaccgctatggctaccggtcgcaaatcgaattcctcctatatcggcgttctgcctagcaaagtgaacactcccggcgtcgaaaaagtgcgtgagaaagatcattaccgcccggttgccaatgtcttagaaggtgcgaaacaaaaaggcaaagcaaccgggattattgccaccagcgaaattcagcacgctacaccggccggttattctgggcatcataaggaccgtaacaactttgaagtactgggcgaacagcaggtgtaccaaaatatggatgtggttctcggtggtggcaaagagtcactgcagccaggcaccaaagacaaatcgcgcaaagatggcgaagatcttgtaaaggtcctgaaggacaagaaatatgatttcgtggaaactaaagatcaattgctgaaatccaaaagcaagaagatctggggtgcatttagtcagcgtgacttagcctacgatatggatcgccgtgcaacccacccggaacaacctaccatcgctgagatgactaagaaatctatccagacactgagcaaagacaaagatggcttcttcctgtttgttgaagggtcaaaaccggattgggcagcacaccagaatgaccccattgggatgattagtgatgtgcttgcctttgataacgctgttaaagaagccctggactttgccaagaaagacaagcataccatggtcatcgctgtgtcggatcatggtaactctggcattagcatcggcaatagcaacaccaccaaaggatatgatacaacaccagtatccgcatatgttgatccgttgaagaaagccaagatgactgtagaaggtgctaccggcaaactcaaagacgacctgtcgaatattgaggaggcagccaaactgtacggtttagatgatttaactccggccgaaaagaaacagctgaaatccgtcaagaacaagaaagaggcagctagtcttttcaccaaactgctgtcaaatcgcgctaacatcgggtttacaaccggtggtcacaccggagaagacgtgttcctctattcttacggccctgagaaaccgcaaggcttggtggaaaacactgatatcgccaagaccatggcaaaagccatgggctttaatctggataaactgaccaacgaactcttcattgaggcaaaacaggcttttaagaaagccggtgcatccgttactattgaccagaaagatccagccaatccggtgctggttgctgcccgtaagaaagcaaaggctgaaatgccggtcaacaagaatatcatccgcattaacgggaaagaatatgaacttgacagcgtgattgtcgaaagcaatggctcgttctacgttcccaaagaagccgtgcaactgtttaagaagtatgcacgt

SEQ ID NO: 3934 - protein, 537 aa, synthetic construct
  REGION 1..537: note = Variant of alkaline phosphatase
MHHHHHHGGSGAMETAKKKEEPKVKNVIMMVMDGTSSSATTLARWYKGEPLAMDQIVSGGVRTYSAESAITDSAPAATAMATGRKSNSSYIGVLPSKVNTPGVEKVREKDHYRPVANVLEGAKQKGKATGIIATSEIQHATPAGYSGHHKDRNNFEVLGEQQVYQNMDVVLGGGKESLQPGTKDKSRKDGEDLVKVLKDKKYDFVETKDQLLKSKSKKIWGAFSQRDLAYDMDRRATHPEQPTIAEMTKKSIQTLSKDKDGFFLFVEGSKPDWAAHQNDPIGMISDVLAFDNAVKEALDFAKKDKHTMVIAVSDHGNSGISIGNSNTTKGYDTTPVSAYVDPLKKAKMTVEGATGKLKDDLSNIEEAAKLYGLDDLTPAEKKQLKSVKNKKEAASLFTKLLSNRANIGFTTGGHTGEDVFLYSYGPEKPQGLVENTDIAKTMAKAMGFNLDKLTNELFIEAKQAFKKAGASVTIDQKDPANPVLVAARKKAKAEMPVNKNIIRINGKEYELDSVIVESNGSFYVPKEAVQLFKKYAR

SEQ ID NO: 3935 - DNA, 561 bp, synthetic construct
  misc_feature 1..561: note = Variant of inorganic pyrophosphatase
  source 1..561: mol_type = other DNA
atggatattaagaaaattccggcgggtaaaaacccaccagaagacatctatgtggtggttgagattccgcaggatagcccgatcaaatacgaactggacaaagaaaccggcgccgtgtttgtcgatcgcttcttgtttacggcaatgcattatcccttcaattacgggtttatccctcaaactctggctgatgatggcgaccctgtagacgtcctcgtaatcagtcgttatccagttgcgccgggttcggtgattcgttgccgcccgattggaggacttgagatgcgcgatgaagaaggcgtggataccaaactgatcgccgttcctcactccaagattgacccgacattcgatgagatcaaatctgtcgatgatttaccgaaagctctgctggaccgtattaagcatttctttgaacactacaaagaattagaaccgggtaaatgggttaaagtggaaggttttcgcggcgtccagtttgcgattgatgagatcaagaaaggcatcgagaactataaaaagaagagcgagggtggctccggccaccatcatcaccatcac

SEQ ID NO: 3936 - protein, 187 aa, synthetic construct
  REGION 1..187: note = Variant of inorganic pyrophosphatase
MDIKKIPAGKNPPEDIYVVVEIPQDSPIKYELDKETGAVFVDRFLFTAMHYPFNYGFIPQTLADDGDPVDVLVISRYPVAPGSVIRCRPIGGLEMRDEEGVDTKLIAVPHSKIDPTFDEIKSVDDLPKALLDRIKHFFEHYKELEPGKWVKVEGFRGVQFAIDEIKKGIENYKKKSEGGSGHHHHHH

SEQ ID NO: 3937 - DNA, 561 bp, synthetic construct
  misc_feature 1..561: note = Variant of inorganic pyrophosphatase
  source 1..561: mol_type = other DNA
atgggctataaagatttaccaccgggtaagaacccgccggaagacatttacgtggtgatcgagattcctcagggcagcgggatcaaatatgaactggataaagataccggagtcatctttgttgaccgcttcttgtttacggcgatgtactaccccttcaattatggctttattccgcaaactctggccgatgatggtgacccggtagatgttctggtgatttctcgtgaaccagtagctccaggttcggtcatgcgttgccgcccaattggaatgttggagatgcgcgacgaagaagggattgataccaaactgatcgcagttccgcatgagaaacttgacccgacgtattccgatattaagacagtggatcagctgcccgaaatcattcgtgaacgcatcaaacacttcttcgagcattacaaagaattagaaccgggtaaatgggtgaaggtcgaaaactggcgtggactgcaggacgcgattgaggagatcaagaaaggcatcgagaattataagaaaggtggtaagggtggctccggccaccatcatcaccatcac

SEQ ID NO: 3938 - protein, 187 aa, synthetic construct
  REGION 1..187: note = Variant of inorganic pyrophosphatase
MGYKDLPPGKNPPEDIYVVIEIPQGSGIKYELDKDTGVIFVDRFLFTAMYYPFNYGFIPQTLADDGDPVDVLVISREPVAPGSVMRCRPIGMLEMRDEEGIDTKLIAVPHEKLDPTYSDIKTVDQLPEIIRERIKHFFEHYKELEPGKWVKVENWRGLQDAIEEIKKGIENYKKGGKGGSGHHHHHH

SEQ ID NO: 3939 - DNA, 555 bp, synthetic construct
  misc_feature 1..555: note = Variant of inorganic pyrophosphatase
  source 1..555: mol_type = other DNA
atggctaatctgaaatctttaccggtgggcaagaaagcgcctgaagtcgtccatatggtgattgaggtaccgaaaggtagcgggaacaagtatgaatacgatcccgaactgggcgccatcaaattggaccgcgttcttccaggtgcgcagttctatccgggagattacggctttattccatcaaccctgtcggaggatggtgacccgctggatggcctcatcctgtctacataccctctcttacctggtgtggtggttgaagttcgtccggtcgggctgctgctgatggaagacgagaaaggtcaagacgccaagattcttggcgtggtggcagaagatcagcgcctggatcacatccaggatattggagatgtacccgaaggcgtgaaacaagagatccagcatttctttgaaacttacaaagcactggaagcgaagaaaggcaaatgggttaaagtaaccggttggcgtgggcgcgaagaagccttggcggaaattcgtgctagtatggcacgctatggtggaggtggctccggccaccatcatcaccatcac

SEQ ID NO: 3940 - protein, 185 aa, synthetic construct
  REGION 1..185: note = Variant of inorganic pyrophosphatase
MANLKSLPVGKKAPEVVHMVIEVPKGSGNKYEYDPELGAIKLDRVLPGAQFYPGDYGFIPSTLSEDGDPLDGLILSTYPLLPGVVVEVRPVGLLLMEDEKGQDAKILGVVAEDQRLDHIQDIGDVPEGVKQEIQHFFETYKALEAKKGKWVKVTGWRGREEALAEIRASMARYGGGGSGHHHHHH

SEQ ID NO: 3941 - DNA, 546 bp, synthetic construct
  misc_feature 1..546: note = Variant of inorganic pyrophosphatase
  source 1..546: mol_type = other DNA
atgaaattaggtccgggaaagaaagcaccagatgaaattaacgtgctgatcgagattccgatgaatagcaacatcaagtatgaatacgacgaagaagaagaggtcatcaaagttgatcgcgtgctgtatacctcgatggtctacccctttaattatggcttcattccggatacgttggaagaagacggtgatcctctggacgttcttgtactgggcaactacagtttactcccggggactgtgattgaagctcgtccagttggcatcgtgtacatgaaagatgaggaaggtgaggacgcgaagattgtagccgtcccgcgcgataagaccgatccgacgttctccaacatcaaagacgtgaatgatttgccacaggcgatcaagaacaagatcattcatttctttgagcactataaagaactggaacctggcaaatgggtgaagatttctgggtggggaagcgcctcagaagcgaaagagcgtatcaagaaagcaattgagcgcaagaagaataagggtggctccggccaccatcatcaccatcac

SEQ ID NO: 3942 - protein, 182 aa, synthetic construct
  REGION 1..182: note = Variant of inorganic pyrophosphatase
MKLGPGKKAPDEINVLIEIPMNSNIKYEYDEEEEVIKVDRVLYTSMVYPFNYGFIPDTLEEDGDPLDVLVLGNYSLLPGTVIEARPVGIVYMKDEEGEDAKIVAVPRDKTDPTFSNIKDVNDLPQAIKNKIIHFFEHYKELEPGKWVKISGWGSASEAKERIKKAIERKKNKGGSGHHHHHH

SEQ ID NO: 3943 - DNA, 531 bp, synthetic construct
  misc_feature 1..531: note = Variant of inorganic pyrophosphatase
  source 1..531: mol_type = other DNA
atggcgtttgaaaacaaaattgtggaagcattcatcgaaattccgaccggtagccagaataagtatgagttcgataaagaacgtggcgtctttaaactggaccgcgtgttatactcgccaatgttctatcctgccgagtacggatatctgcaaaacacgcttgctttggatggtgatccgctggacatcctcgttatcactactaatccgacatttccagggtgcgtaattgatacgcgcgttattggctttctgaacatggtggatagtggcgaagaagacgcgaaactgattggtgtacccgtcgaagatccgcgttttgacgaagtgcgctccatcgaagatttaccgcagcataaactgaaggagatcgcccacttcttcgaacgttacaaagatttgcagggcaaacgcaccgaaattggtacctgggaaggcccagaagcagcggcgaaactgattgacgaatgtatcgcccgttataatgagcaaaacaagaagggtggctccggccaccatcatcaccatcac

SEQ ID NO: 3944 - protein, 177 aa, synthetic construct
  REGION 1..177: note = Variant of inorganic pyrophosphatase
MAFENKIVEAFIEIPTGSQNKYEFDKERGVFKLDRVLYSPMFYPAEYGYLQNTLALDGDPLDILVITTNPTFPGCVIDTRVIGFLNMVDSGEEDAKLIGVPVEDPRFDEVRSIEDLPQHKLKEIAHFFERYKDLQGKRTEIGTWEGPEAAAKLIDECIARYNEQNKKGGSGHHHHHH

SEQ ID NO: 3945 - DNA, 519 bp, synthetic construct
  misc_feature 1..519: note = Variant of inorganic pyrophosphatase
  source 1..519: mol_type = other DNA
atgagtggtctgattgttgatgcgtttatcgaaattccgaccggcagccagaacaaatatgagtacgacaaagaaaaaggtgtgttccgcttagatcgtgtcctgtattcgccattgtactatccgacggaatacggctatctggagaatactctggcccttgatggcgaccctctcgatatcctggtattgaccacctttccgacattcccggggtgcgtgattcgcgcacgtgttgttggtgcgctggtgatgtccgatgataagggacaagacgaaaaattactcgctgtacccgccgatgatccacgctgggactttgtccagggcctgaacgacgtgcctgaacatcgtctgaaagaaatcgcgcacttcttcgcagtgtataaggatctggagaataagaagacgaacgtcgaagggtggaaagacgctgcctttgccgctaaactttacgaagagtgtgttcagcgctatatggcaggtaagggtggctccggccaccatcatcaccatcac

SEQ ID NO: 3946 - protein, 173 aa, synthetic construct
  REGION 1..173: note = Variant of inorganic pyrophosphatase
MSGLIVDAFIEIPTGSQNKYEYDKEKGVFRLDRVLYSPLYYPTEYGYLENTLALDGDPLDILVLTTFPTFPGCVIRARVVGALVMSDDKGQDEKLLAVPADDPRWDFVQGLNDVPEHRLKEIAHFFAVYKDLENKKTNVEGWKDAAFAAKLYEECVQRYMAGKGGSGHHHHHH

SEQ ID NO: 3947 - DNA, 525 bp, synthetic construct
  misc_feature 1..525: note = Variant of inorganic pyrophosphatase
  source 1..525: mol_type = other DNA
atgaccgtgaaaaatcagattgtagaagcgtttatcgaaattccgactggcagccagaacaagtatgagttcgataaagaacgcggtatcttcaaactggaccgtgtcttgttttccccaatgttctacccggccgagtatgggtacctggaaaacacgcttgcattagatggagatcctctggacattctggtgctggttaccaatccgacatttccgggctgcgttatcgatacccgcgtgattggctatctcaacatgatcgactcgggtgaagaagatgctaaactcattggtgtccccgtagaagatccgcgttttgacgagatccattctattgatgatctgccgcaacacaaactgaaggaaattgcgcatttctttgaacgctacaaagacttacagggcaagaagacggaaatcggtacctgggaagggcctgagaaagccgccaaattgatcgaagaatgtcgtgcgcgctatgaggagaataagggtggctccggccaccatcatcaccatcac

SEQ ID NO: 3948 - protein, 175 aa, synthetic construct
  REGION 1..175: note = Variant of inorganic pyrophosphatase
MTVKNQIVEAFIEIPTGSQNKYEFDKERGIFKLDRVLFSPMFYPAEYGYLENTLALDGDPLDILVLVTNPTFPGCVIDTRVIGYLNMIDSGEEDAKLIGVPVEDPRFDEIHSIDDLPQHKLKEIAHFFERYKDLQGKKTEIGTWEGPEKAAKLIEECRARYEENKGGSGHHHHHH

SEQ ID NO: 3949 - DNA, 18 bp, synthetic construct
  misc_feature 1..18: note = Modified oligo substrate or product
  modified_base 17^18: mod_base = OTHER; note = there is a phosphorothioate bond between these bases
  modified_base 1: mod_base = OTHER; note = 5'-6-carboxyfluorescein-thymidine
  modified_base 16: mod_base = OTHER; note = 2'-O-methyladenosine
  modified_base 17: mod_base = OTHER; note = 2'-O-methyluridine
  modified_base 18: mod_base = OTHER; note = 2'-O-methylguanosine
  source 1..18: mol_type = other DNA
nttttttttttttttnnn

SEQ ID NO: 3950 - DNA, 18 bp, synthetic construct
  misc_feature 1..18: note = Modified oligo substrate or product
  modified_base 16^17: mod_base = OTHER; note = there is a phosphorothioate bond between these bases
  modified_base 17^18: mod_base = OTHER; note = there is a phosphorothioate bond between these bases
  modified_base 1: mod_base = OTHER; note = 5'-6-carboxyfluorescein-thymidine
  modified_base 16: mod_base = OTHER; note = 2'-O-methylcytidine
  modified_base 17: mod_base = OTHER; note = 2'-O-methylguanosine
  modified_base 18: mod_base = OTHER; note = 2'-O-methyladenosine
  source 1..18: mol_type = other DNA
nttttttttttttttnnn

SEQ ID NO: 3951 - DNA, 20 bp, synthetic construct
  misc_feature 1..20: note = Modified oligo substrate or product
  modified_base 1: mod_base = OTHER; note = 5'-6-carboxyfluorescein-thymidine
  modified_base 18: mod_base = OTHER; note = 2'-O-methylguanosine
  modified_base 19: mod_base = OTHER; note = 2'-O-methyluridine
  modified_base 20: mod_base = OTHER; note = 2'-O-methylcytidine
  source 1..20: mol_type = other DNA
nttttttttttttttttnnn

SEQ ID NO: 3952 - DNA, 15 bp, synthetic construct
  misc_feature 1..15: note = Modified oligo substrate or product
  modified_base 1: mod_base = OTHER; note = 5'-6-carboxyfluorescein-thymidine
  modified_base 13: mod_base = OTHER; note = 2'-O-methyladenosine
  modified_base 14: mod_base = OTHER; note = 2'-O-methyluridine
  modified_base 15: mod_base = OTHER; note = 2'-O-methyladenosine
  source 1..15: mol_type = other DNA
ntttttttttttnnn

SEQ ID NO: 3953 - DNA, 25 bp, synthetic construct
  misc_feature 1..25: note = Modified oligo substrate or product
  modified_base 1: mod_base = OTHER; note = 5'-6-carboxyfluorescein-thymidine
  modified_base 23: mod_base = OTHER; note = 2'-O-methyladenosine
  modified_base 24: mod_base = OTHER; note = 2'-O-methyluridine
  modified_base 25: mod_base = OTHER; note = 2'-O-methyluridine
  source 1..25: mol_type = other DNA
ntttttttttttttttttttttnnn

SEQ ID NO: 3954 - DNA, 30 bp, synthetic construct
  misc_feature 1..30: note = Modified oligo substrate or product
  modified_base 1: mod_base = OTHER; note = 5'-6-carboxyfluorescein-thymidine
  modified_base 28: mod_base = OTHER; note = 2'-O-methyladenosine
  modified_base 29: mod_base = OTHER; note = 2'-O-methyluridine
  modified_base 30: mod_base = OTHER; note = 2'-O-methylguanosine
  source 1..30: mol_type = other DNA
nttttttttttttttttttttttttttnnn

SEQ ID NO: 3955 - DNA, 60 bp, synthetic construct
  misc_feature 1..60: note = Modified oligo substrate or product
  modified_base 1: mod_base = OTHER; note = 5'-6-carboxyfluorescein-thymidine
  modified_base 58: mod_base = OTHER; note = 2'-O-methyluridine
  modified_base 59: mod_base = OTHER; note = 2'-O-methyluridine
  modified_base 60: mod_base = OTHER; note = 2'-O-methylcytidine
  source 1..60: mol_type = other DNA
nttttttttttttttttttttttttttttttttttttttttttttttttttttttttnnn

SEQ ID NO: 3956 - DNA, 35 bp, synthetic construct
  misc_feature 1..35: note = Modified oligo substrate or product
  modified_base 1: mod_base = OTHER; note = 5'-6-carboxyfluorescein-thymidine
  modified_base 33: mod_base = OTHER; note = 2'-O-methyladenosine
  modified_base 34: mod_base = OTHER; note = 2'-O-methylcytidine
  modified_base 35: mod_base = OTHER; note = 2'-O-methylcytidine
  source 1..35: mol_type = other DNA
ntttttttttttttttttttttttttttttttnnn

SEQ ID NO: 3957 - DNA, 40 bp, synthetic construct
  misc_feature 1..40: note = Modified oligo substrate or product
  modified_base 1: mod_base = OTHER; note = 5'-6-carboxyfluorescein-thymidine
  modified_base 38: mod_base = OTHER; note = 2'-O-methyladenosine
  modified_base 39: mod_base = OTHER; note = 2'-O-methylguanosine
  modified_base 40: mod_base = OTHER; note = 2'-O-methylcytidine
  source 1..40: mol_type = other DNA
nttttttttttttttttttttttttttttttttttttnnn

SEQ ID NO: 3958 - DNA, 45 bp, synthetic construct
  misc_feature 1..45: note = Modified oligo substrate or product
  modified_base 1: mod_base = OTHER; note = 5'-6-carboxyfluorescein-thymidine
  modified_base 43: mod_base = OTHER; note = 2'-O-methyladenosine
  modified_base 44: mod_base = OTHER; note = 2'-O-methyladenosine
  modified_base 45: mod_base = OTHER; note = 2'-O-methylcytidine
  source 1..45: mol_type = other DNA
ntttttttttttttttttttttttttttttttttttttttttnnn

SEQ ID NO: 3959 - DNA, 50 bp, synthetic construct
  misc_feature 1..50: note = Modified oligo substrate or product
  modified_base 1: mod_base = OTHER; note = 5'-6-carboxyfluorescein-thymidine
  modified_base 48: mod_base = OTHER; note = 2'-O-methylguanosine
  modified_base 49: mod_base = OTHER; note = 2'-O-methyluridine
  modified_base 50: mod_base = OTHER; note = 2'-O-methylcytidine
  source 1..50: mol_type = other DNA
nttttttttttttttttttttttttttttttttttttttttttttttnnn

SEQ ID NO: 3960 - DNA, 55 bp, synthetic construct
  misc_feature 1..55: note = Modified oligo substrate or product
  modified_base 1: mod_base = OTHER; note = 5'-6-carboxyfluorescein-thymidine
  modified_base 53: mod_base = OTHER; note = 2'-O-methylcytidine
  modified_base 54: mod_base = OTHER; note = 2'-O-methyluridine
  modified_base 55: mod_base = OTHER; note = 2'-O-methylcytidine
  source 1..55: mol_type = other DNA
ntttttttttttttttttttttttttttttttttttttttttttttttttttnnn

SEQ ID NO: 3961 - DNA, 18 bp, synthetic construct
  misc_feature 1..18: note = Modified oligo substrate or product
  modified_base 1: mod_base = OTHER; note = 5'-6-carboxyfluorescein-thymidine
  modified_base 16: mod_base = OTHER; note = 2'-O-methyladenosine
  modified_base 17: mod_base = OTHER; note = 2'-O-methyluridine
  modified_base 18: mod_base = OTHER; note = 2'-deoxyfluoroguanosine
  source 1..18: mol_type = other DNA
nttttttttttttttnnn

SEQ ID NO: 3962 - DNA, 18 bp, synthetic construct
  misc_feature 1..18: note = Modified oligo substrate or product
  modified_base 1: mod_base = OTHER; note = 5'-6-carboxyfluorescein-thymidine
  modified_base 16: mod_base = OTHER; note = 2'-O-methyladenosine
  modified_base 17: mod_base = OTHER; note = 2'-O-methylguanosine
  modified_base 18: mod_base = OTHER; note = 2'-O-(2-methoxyethyl)cytidine
  source 1..18: mol_type = other DNA
nttttttttttttttnnn

SEQ ID NO: 3963 - DNA, 18 bp, synthetic construct
  misc_feature 1..18: note = Modified oligo substrate or product
  modified_base 1: mod_base = OTHER; note = 5'-6-carboxyfluorescein-thymidine
  modified_base 16: mod_base = OTHER; note = 2'-O-methylguanosine
  modified_base 17: mod_base = OTHER; note = 2'-O-methyladenosine
  modified_base 18: mod_base = OTHER; note = 2'-O-methylcytidine
  source 1..18: mol_type = other DNA
nttttttttttttttnnn

SEQ ID NO: 3964 - DNA, 25 bp, synthetic construct
  misc_feature 1..25: note = Modified oligo substrate or product
  modified_base 22^23: mod_base = OTHER; note = there is a phosphorothioate bond between these bases
  modified_base 1: mod_base = OTHER; note = 5'-6-carboxyfluorescein-thymidine
  modified_base 23: mod_base = OTHER; note = 2'-deoxyfluoroadenosine
  modified_base 24: mod_base = OTHER; note = 2'-deoxyfluoroguanosine
  modified_base 25: mod_base = OTHER; note = 2'-O-methyladenosine
  source 1..25: mol_type = other DNA
ntttttttttttttttttttttnnn

SEQ ID NO: 3965 - DNA, 25 bp, synthetic construct
  misc_feature 1..25: note = Modified oligo substrate or product
  modified_base 1: mod_base = OTHER; note = 5'-6-carboxyfluorescein-thymidine
  modified_base 23: mod_base = OTHER; note = 2'-deoxyfluorocytidine
  modified_base 24: mod_base = OTHER; note = 2'-deoxyfluoroguanosine
  modified_base 25: mod_base = OTHER; note = 2'-deoxyfluoroadenosine
  source 1..25: mol_type = other DNA
ntttttttttttttttttttttnnn

SEQ ID NO: 3966 - DNA, 30 bp, synthetic construct; identical to SEQ ID NO: 3954
  misc_feature 1..30: note = Modified oligo substrate or product
  modified_base 1: mod_base = OTHER; note = 5'-6-carboxyfluorescein-thymidine
  modified_base 28: mod_base = OTHER; note = 2'-deoxyfluoroguanosine
  modified_base 29: mod_base = OTHER; note = 2'-O-methyladenosine
  modified_base 30: mod_base = OTHER; note = 2'-deoxyfluorouridine
  source 1..30: mol_type = other DNA

SEQ ID NO: 3967 - DNA, 18 bp, synthetic construct
  misc_feature 1..18: note = Modified oligo substrate or product
  modified_base 1: mod_base = OTHER; note = 5'-6-carboxyfluorescein-thymidine
  modified_base 16: mod_base = OTHER; note = 2'-O-methylguanosine
  modified_base 17: mod_base = OTHER; note = 2'-O-methyladenosine
  modified_base 18: mod_base = OTHER; note = 2'-O-methylcytidine
  source 1..18: mol_type = other DNA
nttttttttttttttnnn

SEQ ID NO: 3968 - DNA, 14 bp, synthetic construct
  misc_feature 1..14: note = Modified oligo substrate or product
  modified_base 1: mod_base = OTHER; note = 5'-6-carboxyfluorescein-thymidine
  modified_base 12: mod_base = OTHER; note = 2'-O-methylcytidine
  modified_base 13: mod_base = OTHER; note = 2'-O-methylguanosine
  modified_base 14: mod_base = OTHER; note = 2'-O-methyladenosine
  source 1..14: mol_type = other DNA
nttttttttttnnn

SEQ ID NO: 3969 - DNA, 14 bp, synthetic construct
  misc_feature 1..14: note = Modified oligo substrate or product
  modified_base 12^13: mod_base = OTHER; note = there is a phosphorothioate bond between these bases
  modified_base 13^14: mod_base = OTHER; note = there is a phosphorothioate bond between these bases
  modified_base 1: mod_base = OTHER; note = 5'-6-carboxyfluorescein-thymidine
  modified_base 12: mod_base = OTHER; note = 2'-O-methylcytidine
  modified_base 13: mod_base = OTHER; note = 2'-O-methyladenosine
  modified_base 14: mod_base = OTHER; note = 2'-O-methylguanosine
  source 1..14: mol_type = other DNA
nttttttttttnnn

SEQ ID NO: 3970 - DNA, 18 bp, synthetic construct
  misc_feature 1..18: note = Modified oligo substrate or product
  modified_base 1: mod_base = OTHER; note = 5'-6-carboxyfluorescein-thymidine
  modified_base 16: mod_base = OTHER; note = 2'-O-methyladenosine
  modified_base 17: mod_base = OTHER; note = 2'-deoxyfluorouridine
  modified_base 18: mod_base = OTHER; note = 2'-O-methylcytidine
  source 1..18: mol_type = other DNA
nttttttttttttttnnn

SEQ ID NO: 3971 - DNA, 18 bp, synthetic construct
  misc_feature 1..18: note = Modified oligo substrate or product
  modified_base 1: mod_base = OTHER; note = 5'-6-carboxyfluorescein-thymidine
  modified_base 16: mod_base = OTHER; note = 2'-O-methylcytidine
  modified_base 17: mod_base = OTHER; note = 2'-O-methyluridine
  modified_base 18: mod_base = OTHER; note = 2'-O-methylguanosine
  source 1..18: mol_type = other DNA
nttttttttttttttnnn

SEQ ID NO: 3972 - DNA, 30 bp, synthetic construct; identical to SEQ ID NO: 3954
  misc_feature 1..30: note = Modified oligo substrate or product
  modified_base 28^29: mod_base = OTHER; note = there is a phosphorothioate bond between these bases
  modified_base 29^30: mod_base = OTHER; note = there is a phosphorothioate bond between these bases
  modified_base 1: mod_base = OTHER; note = 5'-6-carboxyfluorescein-thymidine
  modified_base 28: mod_base = OTHER; note = 2'-deoxyfluorocytidine
  modified_base 29: mod_base = OTHER; note = 2'-deoxyfluoroguanosine
  modified_base 30: mod_base = OTHER; note = 2'-deoxyfluoroadenosine
  source 1..30: mol_type = other DNA

SEQ ID NO: 3973 - DNA, 14 bp, synthetic construct
  misc_feature 1..14: note = Modified oligo substrate or product
  modified_base 12^13: mod_base = OTHER; note = there is a phosphorothioate bond between these bases
  modified_base 13^14: mod_base = OTHER; note = there is a phosphorothioate bond between these bases
  modified_base 1: mod_base = OTHER; note = 5'-6-carboxyfluorescein-thymidine
  modified_base 12: mod_base = OTHER; note = 2'-O-methyluridine
  modified_base 13: mod_base = OTHER; note = 2'-deoxyfluoroadenosine
  modified_base 14: mod_base = OTHER; note = 2'-deoxyfluoroadenosine
  source 1..14: mol_type = other DNA
nttttttttttnnn

SEQ ID NO: 3974 - DNA, 51 bp, synthetic construct
  misc_feature 1..51: note = Modified oligo substrate or product
  modified_base 49^50: mod_base = OTHER; note = there is a phosphorothioate bond between these bases
  modified_base 50^51: mod_base = OTHER; note = there is a phosphorothioate bond between these bases
  modified_base 1: mod_base = OTHER; note = 5'-6-carboxyfluorescein-thymidine
  modified_base 49: mod_base = OTHER; note = 2'-O-methylguanosine
  modified_base 50: mod_base = OTHER; note = 2'-O-methyladenosine
  modified_base 51: mod_base = OTHER; note = 2'-O-methylcytidine
  source 1..51: mol_type = other DNA
ntttttttttttttttttttttttttttttttttttttttttttttttnnn

SEQ ID NO: 3975 - DNA, 18 bp, synthetic construct
  misc_feature 1..18: note = Modified oligo substrate or product
  modified_base 1: mod_base = OTHER; note = 5'-6-carboxyfluorescein-thymidine
  modified_base 16: mod_base = OTHER; note = 2'-O-methyladenosine
  modified_base 17: mod_base = OTHER; note = 2'-O-methylcytidine
  modified_base 18: mod_base = OTHER; note = 2'-O-methyluridine
  source 1..18: mol_type = other DNA
nttttttttttttttnnn

SEQ ID NO: 3976 - DNA, 20 bp, synthetic construct
  misc_feature 1..20: note = Modified oligo substrate or product
  modified_base 17^18: mod_base = OTHER; note = there is a phosphorothioate bond between these bases
  modified_base 18^19: mod_base = OTHER; note = there is a phosphorothioate bond between these bases
  modified_base 1: mod_base = OTHER; note = 5'-6-carboxyfluorescein-thymidine
  modified_base 18: mod_base = OTHER; note = 2'-deoxyfluoroadenosine
  modified_base 19: mod_base = OTHER; note = 2'-deoxyfluoroadenosine
  modified_base 20: mod_base = OTHER; note = 2'-deoxyfluoroguanosine
  source 1..20: mol_type = other DNA
nttttttttttttttttnnn

SEQ ID NO: 3977 - DNA, 18 bp, synthetic construct
  misc_feature 1..18: note = Modified oligo substrate or product
  modified_base 1: mod_base = OTHER; note = 5'-6-carboxyfluorescein-thymidine
  modified_base 16: mod_base = OTHER; note = 2'-O-methyladenosine
  modified_base 17: mod_base = OTHER; note = 2'-O-methyluridine
  modified_base 18: mod_base = OTHER; note = 2'-deoxyfluorouridine
  source 1..18: mol_type = other DNA
nttttttttttttttnnn

SEQ ID NO: 3978 - DNA, 18 bp, synthetic construct
  misc_feature 1..18: note = Modified oligo substrate or product
  modified_base 1: mod_base = OTHER; note = 5'-6-carboxyfluorescein-thymidine
  modified_base 16: mod_base = OTHER; note = 2'-O-methyladenosine
  modified_base 17: mod_base = OTHER; note = 2'-O-methyluridine
  modified_base 18: mod_base = OTHER; note = 2'-deoxyfluorocytidine
  source 1..18: mol_type = other DNA
nttttttttttttttnnn

SEQ ID NO: 3979 - DNA, 16 bp, synthetic construct
  misc_feature 1..16: note = Modified oligo substrate or product
  modified_base 1: mod_base = OTHER; note = thymidine with a 5'-biotin modifition
  modified_base 4: mod_base = OTHER; note = thymidine with a 5'-fluorescein modification
  modified_base 14: mod_base = OTHER; note = 2'-O-methyladenosine
  modified_base 15: mod_base = OTHER; note = 2'-O-methyluridine
  modified_base 16: mod_base = OTHER; note = 2'-O-methyladenosine
  source 1..16: mol_type = other DNA
nttntttttttttnnn

SEQ ID NO: 3980 - DNA, 17 bp, synthetic construct
  misc_feature 1..17: note = Modified oligo substrate or product
  modified_base 1: mod_base = OTHER; note = thymidine with a 5'-biotin modifition
  modified_base 4: mod_base = OTHER; note = thymidine with a 5'-fluorescein modification
  modified_base 14: mod_base = OTHER; note = 2'-O-methyladenosine
  modified_base 15: mod_base = OTHER; note = 2'-O-methyluridine
  modified_base 16: mod_base = OTHER; note = 2'-O-methyladenosine
  modified_base 17: mod_base = OTHER; note = 2'-O-methyladenosine
  source 1..17: mol_type = other DNA
nttntttttttttnnnn

SEQ ID NO: 3981 - DNA, 18 bp, synthetic construct
  misc_feature 1..18: note = Modified oligo substrate or product
  modified_base 1: mod_base = OTHER; note = thymidine with a 5'-biotin modifition
  modified_base 4: mod_base = OTHER; note = thymidine with a 5'-fluorescein modification
  modified_base 14: mod_base = OTHER; note = 2'-O-methyladenosine
  modified_base 15: mod_base = OTHER; note = 2'-O-methyluridine
  modified_base 16: mod_base = OTHER; note = 2'-O-methyladenosine
  modified_base 17: mod_base = OTHER; note = 2'-O-methyladenosine
  modified_base 18: mod_base = OTHER; note = 2'-O-methylguanosine
  source 1..18: mol_type = other DNA
nttntttttttttnnnnn

SEQ ID NO: 3982 - DNA, 19 bp, synthetic construct
  misc_feature 1..19: note = Modified oligo substrate or product
  modified_base 1: mod_base = OTHER; note = thymidine with a 5'-biotin modifition
  modified_base 4: mod_base = OTHER; note = thymidine with a 5'-fluorescein modification
  modified_base 14: mod_base = OTHER; note = 2'-O-methyladenosine
  modified_base 15: mod_base = OTHER; note = 2'-O-methyluridine
  modified_base 16: mod_base = OTHER; note = 2'-O-methyladenosine
  modified_base 17: mod_base = OTHER; note = 2'-O-methyladenosine
  modified_base 18: mod_base = OTHER; note = 2'-O-methylguanosine
  modified_base 19: mod_base = OTHER; note = 2'-O-methyladenosine
  source 1..19: mol_type = other DNA
nttntttttttttnnnnnn

SEQ ID NO: 3983 - DNA, 20 bp, synthetic construct
  misc_feature 1..20: note = Modified oligo substrate or product
  modified_base 1: mod_base = OTHER; note = thymidine with a 5'-biotin modifition
  modified_base 4: mod_base = OTHER; note = thymidine with a 5'-fluorescein modification
  modified_base 14: mod_base = OTHER; note = 2'-O-methyladenosine
  modified_base 15: mod_base = OTHER; note = 2'-O-methyluridine
  modified_base 16: mod_base = OTHER; note = 2'-O-methyladenosine
  modified_base 17: mod_base = OTHER; note = 2'-O-methyladenosine
  modified_base 18: mod_base = OTHER; note = 2'-O-methylguanosine
  modified_base 19: mod_base = OTHER; note = 2'-O-methyladenosine
  modified_base 20: mod_base = OTHER; note = 2'-deoxyfluoroadenosine
  source 1..20: mol_type = other DNA
nttntttttttttnnnnnnn

SEQ ID NO: 3984 - DNA, 16 bp, synthetic construct
  misc_feature 1..16: note = Modified oligo substrate or product
  modified_base 1: mod_base = OTHER; note = thymidine with a 5'-biotin modifition
  modified_base 14: mod_base = OTHER; note = 2'-O-methyladenosine
  modified_base 15: mod_base = OTHER; note = 2'-O-methyluridine
  modified_base 16: mod_base = OTHER; note = 2'-O-methyladenosine
  source 1..16: mol_type = other DNA
nttttttttttttnnn

SEQ ID NO: 3985 - DNA, 17 bp, synthetic construct
  misc_feature 1..17: note = Modified oligo substrate or product
  modified_base 1: mod_base = OTHER; note = thymidine with a 5'-biotin modifition
  modified_base 14: mod_base = OTHER; note = 2'-O-methyladenosine
  modified_base 15: mod_base = OTHER; note = 2'-O-methyluridine
  modified_base 16: mod_base = OTHER; note = 2'-O-methyladenosine
  modified_base 17: mod_base = OTHER; note = 2'-O-methyladenosine
  source 1..17: mol_type = other DNA
nttttttttttttnnnn

SEQ ID NO: 3986 - DNA, 18 bp, synthetic construct
  misc_feature 1..18: note = Modified oligo substrate or product
  modified_base 1: mod_base = OTHER; note = thymidine with a 5'-biotin modifition
  modified_base 14: mod_base = OTHER; note = 2'-O-methyladenosine
  modified_base 15: mod_base = OTHER; note = 2'-O-methyluridine
  modified_base 16: mod_base = OTHER; note = 2'-O-methyladenosine
  modified_base 17: mod_base = OTHER; note = 2'-O-methyladenosine
  modified_base 18: mod_base = OTHER; note = 2'-O-methylguanosine
  source 1..18: mol_type = other DNA
nttttttttttttnnnnn

SEQ ID NO: 3987 - DNA, 19 bp, synthetic construct
  misc_feature 1..19: note = Modified oligo substrate or product
  modified_base 1: mod_base = OTHER; note = thymidine with a 5'-biotin modifition
  modified_base 14: mod_base = OTHER; note = 2'-O-methyladenosine
  modified_base 15: mod_base = OTHER; note = 2'-O-methyluridine
  modified_base 16: mod_base = OTHER; note = 2'-O-methyladenosine
  modified_base 17: mod_base = OTHER; note = 2'-O-methyladenosine
  modified_base 18: mod_base = OTHER; note = 2'-O-methylguanosine
  modified_base 19: mod_base = OTHER; note = 2'-O-methyladenosine
  source 1..19: mol_type = other DNA
nttttttttttttnnnnnn

SEQ ID NO: 3988 - DNA, 20 bp, synthetic construct
  misc_feature 1..20: note = Modified oligo substrate or product
  modified_base 1: mod_base = OTHER; note = thymidine with a 5'-biotin modifition
  modified_base 14: mod_base = OTHER; note = 2'-O-methyladenosine
  modified_base 15: mod_base = OTHER; note = 2'-O-methyluridine
  modified_base 16: mod_base = OTHER; note = 2'-O-methyladenosine
  modified_base 17: mod_base = OTHER; note = 2'-O-methyladenosine
  modified_base 18: mod_base = OTHER; note = 2'-O-methylguanosine
  modified_base 19: mod_base = OTHER; note = 2'-O-methyladenosine
  modified_base 20: mod_base = OTHER; note = 2'-deoxyfluoroadenosine
  source 1..20: mol_type = other DNA
nttttttttttttnnnnnnn

SEQ ID NO: 3989 - DNA, 19 bp, synthetic construct
  misc_feature 1..19: note = Modified oligo substrate or product
  modified_base 17^18: mod_base = OTHER; note = there is a phosphorothioate bond between these bases
  modified_base 1: mod_base = OTHER; note = 5'-6-carboxyfluorescein-thymidine
  modified_base 18: mod_base = OTHER; note = 2'-O-methyluridine
  modified_base 19: mod_base = OTHER; note = 2'-O-methyladenosine with a 3'-PO4 blocking group
  source 1..19: mol_type = other DNA
nttttttttttttttatnn

SEQ ID NO: 3990 - DNA, 19 bp, synthetic construct
  misc_feature 1..19: note = Modified oligo substrate or product
  modified_base 17^18: mod_base = OTHER; note = there is a phosphorothioate bond between these bases
  modified_base 1: mod_base = OTHER; note = 5'-6-carboxyfluorescein-thymidine
  modified_base 17: mod_base = OTHER; note = 2'-O-methyluridine
  modified_base 18: mod_base = OTHER; note = 2'-O-methylguanosine
  modified_base 19: mod_base = OTHER; note = 2'-O-methyladenosine with a 3'-PO4 blocking group
  source 1..19: mol_type = other DNA
nttttttttttttttannn

SEQ ID NO: 3991 - DNA, 19 bp, synthetic construct
  misc_feature 1..19: note = Modified oligo substrate or product
  modified_base 1: mod_base = OTHER; note = 5'-6-carboxyfluorescein-thymidine
  modified_base 16: mod_base = OTHER; note = 2'-O-methyluridine
  modified_base 17: mod_base = OTHER; note = 2'-O-methylguanosine
  modified_base 18: mod_base = OTHER; note = 2'-O-methyladenosine
  modified_base 19: mod_base = OTHER; note = 2'-O-methyladenosine
  source 1..19: mol_type = other DNA
nttttttttttttttnnnn

SEQ ID NO: 3992 - DNA, 19 bp, synthetic construct
  misc_feature 1..19: note = Modified oligo substrate or product
  modified_base 17^18: mod_base = OTHER; note = there is a phosphorothioate bond between these bases
  modified_base 1: mod_base = OTHER; note = 5'-6-carboxyfluorescein-thymidine
  modified_base 17: mod_base = OTHER; note = 2'-O-methylguanosine
  modified_base 18: mod_base = OTHER; note = 2'-O-methylcytidine
  modified_base 19: mod_base = OTHER; note = 2'-O-methyladenosine with a 3'-PO4 blocking group
  source 1..19: mol_type = other DNA
nttttttttttttttannn

SEQ ID NO: 3993 - DNA, 19 bp, synthetic construct
  misc_feature 1..19: note = Modified oligo substrate or product
  modified_base 17^18: mod_base = OTHER; note = there is a phosphorothioate bond between these bases
  modified_base 1: mod_base = OTHER; note = 5'-6-carboxyfluorescein-thymidine
  modified_base 16: mod_base = OTHER; note = 2'-O-methyladenosine
  modified_base 17: mod_base = OTHER; note = 2'-O-methyluridine
  modified_base 18: mod_base = OTHER; note = 2'-O-methylguanosine
  modified_base 19: mod_base = OTHER; note = 2'-O-methyladenosine with a 3'-PO4 blocking group
  source 1..19: mol_type = other DNA
nttttttttttttttnnnn

SEQ ID NO: 3994 - DNA, 19 bp, synthetic construct
  misc_feature 1..19: note = Modified oligo substrate or product
  modified_base 16^17: mod_base = OTHER; note = there is a phosphorothioate bond between these bases
  modified_base 17^18: mod_base = OTHER; note = there is a phosphorothioate bond between these bases
  modified_base 1: mod_base = OTHER; note = 5'-6-carboxyfluorescein-thymidine
  modified_base 16: mod_base = OTHER; note = 2'-O-methylcytidine
  modified_base 17: mod_base = OTHER; note = 2'-O-methylguanosine
  modified_base 18: mod_base = OTHER; note = 2'-O-methyladenosine
  modified_base 19: mod_base = OTHER; note = 2'-O-methyladenosine with a 3'-PO4 blocking group
  source 1..19: mol_type = other DNA
nttttttttttttttnnnn

SEQ ID NO: 3995 - DNA, 21 bp, synthetic construct
  misc_feature 1..21: note = Modified oligo substrate or product
  modified_base 1: mod_base = OTHER; note = 5'-6-carboxyfluorescein-thymidine
  modified_base 18: mod_base = OTHER; note = 2'-O-methylguanosine
  modified_base 19: mod_base = OTHER; note = 2'-O-methyluridine
  modified_base 20: mod_base = OTHER; note = 2'-O-methylcytidine
  modified_base 21: mod_base = OTHER; note = 2'-O-methyladenosine with a 3'-PO4 blocking group
  source 1..21: mol_type = other DNA
nttttttttttttttttnnnn

SEQ ID NO: 3996 - DNA, 16 bp, synthetic construct
  misc_feature 1..16: note = Modified oligo substrate or product
  modified_base 1: mod_base = OTHER; note = 5'-6-carboxyfluorescein-thymidine
  modified_base 13: mod_base = OTHER; note = 2'-O-methyladenosine
  modified_base 14: mod_base = OTHER; note = 2'-O-methyluridine
  modified_base 15: mod_base = OTHER; note = 2'-O-methyladenosine
  modified_base 16: mod_base = OTHER; note = 2'-O-methyladenosine with a 3'-PO4 blocking group
  source 1..16: mol_type = other DNA
ntttttttttttnnnn

SEQ ID NO: 3997 - DNA, 21 bp, synthetic construct
  misc_feature 1..21: note = Modified oligo substrate or product
  modified_base 1: mod_base = OTHER; note = 5'-6-carboxyfluorescein-thymidine
  modified_base 18: mod_base = OTHER; note = 2'-O-methyladenosine
  modified_base 19: mod_base = OTHER; note = 2'-O-methyluridine
  modified_base 20: mod_base = OTHER; note = 2'-O-methylcytidine
  modified_base 21: mod_base = OTHER; note = 2'-O-methyladenosine with a 3'-PO4 blocking group
  source 1..21: mol_type = other DNA
nttttttttttttttttnnnn

SEQ ID NO: 3998 - DNA, 26 bp, synthetic construct
  misc_feature 1..26: note = Modified oligo substrate or product
  modified_base 1: mod_base = OTHER; note = 5'-6-carboxyfluorescein-thymidine
  modified_base 23: mod_base = OTHER; note = 2'-O-methyladenosine
  modified_base 24: mod_base = OTHER; note = 2'-O-methyluridine
  modified_base 25: mod_base = OTHER; note = 2'-O-methyluridine
  modified_base 26: mod_base = OTHER; note = 2'-O-methyladenosine with a 3'-PO4 blocking group
  source 1..26: mol_type = other DNA
ntttttttttttttttttttttnnnn

SEQ ID NO: 3999 - DNA, 31 bp, synthetic construct
  misc_feature 1..31: note = Modified oligo substrate or product
  modified_base 1: mod_base = OTHER; note = 5'-6-carboxyfluorescein-thymidine
  modified_base 28: mod_base = OTHER; note = 2'-O-methyladenosine
  modified_base 29: mod_base = OTHER; note = 2'-O-methyluridine
  modified_base 30: mod_base = OTHER; note = 2'-O-methylguanosine
  modified_base 31: mod_base = OTHER; note = 2'-O-methyladenosine with a 3'-PO4 blocking group
  source 1..31: mol_type = other DNA
nttttttttttttttttttttttttttnnnn

SEQ ID NO: 4000 - DNA, 61 bp, synthetic construct
  misc_feature 1..61: note = Modified oligo substrate or product
  modified_base 1: mod_base = OTHER; note = 5'-6-carboxyfluorescein-thymidine
  modified_base 58: mod_base = OTHER; note = 2'-O-methyluridine
  modified_base 59: mod_base = OTHER; note = 2'-O-methyluridine
  modified_base 60: mod_base = OTHER; note = 2'-O-methylcytidine
  modified_base 61: mod_base = OTHER; note = 2'-O-methyladenosine with a 3'-PO4 blocking group
  source 1..61: mol_type = other DNA
nttttttttttttttttttttttttttttttttttttttttttttttttttttttttnnnn

SEQ ID NO: 4001 - DNA, 36 bp, synthetic construct
  misc_feature 1..36: note = Modified oligo substrate or product
  modified_base 1: mod_base = OTHER; note = 5'-6-carboxyfluorescein-thymidine
  modified_base 33: mod_base = OTHER; note = 2'-O-methyladenosine
  modified_base 34: mod_base = OTHER; note = 2'-O-methylcytidine
  modified_base 35: mod_base = OTHER; note = 2'-O-methylcytidine
  modified_base 36: mod_base = OTHER; note = 2'-O-methyladenosine with a 3'-PO4 blocking group
  source 1..36: mol_type = other DNA
ntttttttttttttttttttttttttttttttnnnn

SEQ ID NO: 4002 - DNA, 41 bp, synthetic construct
  misc_feature 1..41: note = Modified oligo substrate or product
  modified_base 1: mod_base = OTHER; note = 5'-6-carboxyfluorescein-thymidine
  modified_base 38: mod_base = OTHER; note = 2'-O-methyladenosine
  modified_base 39: mod_base = OTHER; note = 2'-O-methylguanosine
  modified_base 40: mod_base = OTHER; note = 2'-O-methylcytidine
  modified_base 41: mod_base = OTHER; note = 2'-O-methyladenosine with a 3'-PO4 blocking group
  source 1..41: mol_type = other DNA
nttttttttttttttttttttttttttttttttttttnnnn

SEQ ID NO: 4003 - DNA, 46 bp, synthetic construct
  misc_feature 1..46: note = Modified oligo substrate or product
  modified_base 1: mod_base = OTHER; note = 5'-6-carboxyfluorescein-thymidine
  modified_base 43: mod_base = OTHER; note = 2'-O-methyladenosine
  modified_base 44: mod_base = OTHER; note = 2'-O-methyladenosine
  modified_base 45: mod_base = OTHER; note = 2'-O-methylcytidine
  modified_base 46: mod_base = OTHER; note = 2'-O-methyladenosine with a 3'-PO4 blocking group
  source 1..46: mol_type = other DNA
ntttttttttttttttttttttttttttttttttttttttttnnnn

SEQ ID NO: 4004 - DNA, 51 bp, synthetic construct
  misc_feature 1..51: note = Modified oligo substrate or product
  modified_base 1: mod_base = OTHER; note = 5'-6-carboxyfluorescein-thymidine
  modified_base 48: mod_base = OTHER; note = 2'-O-methylguanosine
  modified_base 49: mod_base = OTHER; note = 2'-O-methyluridine
  modified_base 50: mod_base = OTHER; note = 2'-O-methylcytidine
  modified_base 51: mod_base = OTHER; note = 2'-O-methyladenosine with a 3'-PO4 blocking group
  source 1..51: mol_type = other DNA
nttttttttttttttttttttttttttttttttttttttttttttttnnnn

SEQ ID NO: 4005 - DNA, 56 bp, synthetic construct
  misc_feature 1..56: note = Modified oligo substrate or product
  modified_base 1: mod_base = OTHER; note = 5'-6-carboxyfluorescein-thymidine
  modified_base 53: mod_base = OTHER; note = 2'-O-methylcytidine
  modified_base 54: mod_base = OTHER; note = 2'-O-methyluridine
  modified_base 55: mod_base = OTHER; note = 2'-O-methylcytidine
  modified_base 56: mod_base = OTHER; note = 2'-O-methyladenosine with a 3'-PO4 blocking group
  source 1..56: mol_type = other DNA
ntttttttttttttttttttttttttttttttttttttttttttttttttttnnnn

SEQ ID NO: 4006 - DNA, 19 bp, synthetic construct
  misc_feature 1..19: note = Modified oligo substrate or product
  modified_base 1: mod_base = OTHER; note = 5'-6-carboxyfluorescein-thymidine
  modified_base 16: mod_base = OTHER; note = 2'-O-methyladenosine
  modified_base 17: mod_base = OTHER; note = 2'-O-methyluridine
  modified_base 18: mod_base = OTHER; note = 2'-deoxyfluoroguanosine
  modified_base 19: mod_base = OTHER; note = 2'-O-methyladenosine with a 3'-PO4 blocking group
  source 1..19: mol_type = other DNA
nttttttttttttttnnnn

SEQ ID NO: 4007 - DNA, 19 bp, synthetic construct
  misc_feature 1..19: note = Modified oligo substrate or product
  modified_base 1: mod_base = OTHER; note = 5'-6-carboxyfluorescein-thymidine
  modified_base 16: mod_base = OTHER; note = 2'-O-methyladenosine
  modified_base 17: mod_base = OTHER; note = 2'-O-methylguanosine
  modified_base 18: mod_base = OTHER; note = 2'-O-(2-methoxyethyl)cytidine
  modified_base 19: mod_base = OTHER; note = 2'-O-methyladenosine with a 3'-PO4 blocking group
  source 1..19: mol_type = other DNA
nttttttttttttttnnnn

SEQ ID NO: 4008 - DNA, 18 bp, synthetic construct
  misc_feature 1..18: note = Modified oligo substrate or product
  modified_base 1: mod_base = OTHER; note = 5'-6-carboxyfluorescein-thymidine
  modified_base 16: mod_base = OTHER; note = 2'-O-methylguanosine
  modified_base 17: mod_base = OTHER; note = 2'-O-methyladenosine
  modified_base 18: mod_base = OTHER; note = 2'-O-methylcytidine with a 3'-PO4 blocking group
  source 1..18: mol_type = other DNA
nttttttttttttttnnn

SEQ ID NO: 4009 - DNA, 26 bp, synthetic construct
  misc_feature 1..26: note = Modified oligo substrate or product
  modified_base 22^23: mod_base = OTHER; note = there is a phosphorothioate bond between these bases
  modified_base 1: mod_base = OTHER; note = 5'-6-carboxyfluorescein-thymidine
  modified_base 23: mod_base = OTHER; note = 2'-deoxyfluoroadenosine
  modified_base 24: mod_base = OTHER; note = 2'-deoxyfluoroguanosine
  modified_base 25: mod_base = OTHER; note = 2'-O-methyladenosine
  modified_base 26: mod_base = OTHER; note = 2'-deoxyfluoroadenosine with a 3'-PO4 blocking group
  source 1..26: mol_type = other DNA
ntttttttttttttttttttttnnnn

SEQ ID NO: 4010 - DNA, 26 bp, synthetic construct
  misc_feature 1..26: note = Modified oligo substrate or product
  modified_base 1: mod_base = OTHER; note = 5'-6-carboxyfluorescein-thymidine
  modified_base 23: mod_base = OTHER; note = 2'-deoxyfluorocytidine
  modified_base 24: mod_base = OTHER; note = 2'-deoxyfluoroguanosine
  modified_base 25: mod_base = OTHER; note = 2'-deoxyfluoroadenosine
  modified_base 26: mod_base = OTHER; note = 2'-deoxyfluoroadenosine with a 3'-PO4 blocking group
  source 1..26: mol_type = other DNA
ntttttttttttttttttttttnnnn

SEQ ID NO: 4011 - DNA, 31 bp, synthetic construct; identical to SEQ ID NO: 3999
  misc_feature 1..31: note = Modified oligo substrate or product
  modified_base 1: mod_base = OTHER; note = 5'-6-carboxyfluorescein-thymidine
  modified_base 28: mod_base = OTHER; note = 2'-deoxyfluoroguanosine
  modified_base 29: mod_base = OTHER; note = 2'-O-methyladenosine
  modified_base 30: mod_base = OTHER; note = 2'-deoxyfluorouridine
  modified_base 31: mod_base = OTHER; note = 2'-deoxyfluoroadenosine with a 3'-PO4 blocking group
  source 1..31: mol_type = other DNA

SEQ ID NO: 4012 - DNA, 19 bp, synthetic construct
  misc_feature 1..19: note = Modified oligo substrate or product
  modified_base 1: mod_base = OTHER; note = 5'-6-carboxyfluorescein-thymidine
  modified_base 16: mod_base = OTHER; note = 2'-O-methylguanosine
  modified_base 17: mod_base = OTHER; note = 2'-O-methyladenosine
  modified_base 18: mod_base = OTHER; note = 2'-O-methylcytidine
  modified_base 19: mod_base = OTHER; note = 2'-deoxyfluoroadenosine with a 3'-PO4 blocking group
  source 1..19: mol_type = other DNA
nttttttttttttttnnnn

SEQ ID NO: 4013 - DNA, 15 bp, synthetic construct
  misc_feature 1..15: note = Modified oligo substrate or product
  modified_base 1: mod_base = OTHER; note = 5'-6-carboxyfluorescein-thymidine
  modified_base 12: mod_base = OTHER; note = 2'-O-methylcytidine
  modified_base 13: mod_base = OTHER; note = 2'-O-methylguanosine
  modified_base 14: mod_base = OTHER; note = 2'-O-methyladenosine
  modified_base 15: mod_base = OTHER; note = 2'-deoxyfluoroadenosine with a 3'-PO4 blocking group
  source 1..15: mol_type = other DNA
nttttttttttnnnn

SEQ ID NO: 4014 - DNA, 19 bp, synthetic construct
  misc_feature 1..19: note = Modified oligo substrate or product
  modified_base 1: mod_base = OTHER; note = 5'-6-carboxyfluorescein-thymidine
  modified_base 16: mod_base = OTHER; note = 2'-O-methyluridine
  modified_base 17: mod_base = OTHER; note = 2'-O-methylguanosine
  modified_base 18: mod_base = OTHER; note = 2'-O-methyladenosine
  modified_base 19: mod_base = OTHER; note = 2'-O-methyladenosine with a 3'-PO4 blocking group
  source 1..19: mol_type = other DNA
nttttttttttttttnnnn

SEQ ID NO: 4015 - DNA, 15 bp, synthetic construct
  misc_feature 1..15: note = Modified oligo substrate or product
  modified_base 12^13: mod_base = OTHER; note = there is a phosphorothioate bond between these bases
  modified_base 13^14: mod_base = OTHER; note = there is a phosphorothioate bond between these bases
  modified_base 1: mod_base = OTHER; note = 5'-6-carboxyfluorescein-thymidine
  modified_base 12: mod_base = OTHER; note = 2'-O-methylcytidine
  modified_base 13: mod_base = OTHER; note = 2'-O-methyladenosine
  modified_base 14: mod_base = OTHER; note = 2'-O-methylguanosine
  modified_base 15: mod_base = OTHER; note = 2'-deoxyfluoroadenosine with a 3'-PO4 blocking group
  source 1..15: mol_type = other DNA
nttttttttttnnnn

SEQ ID NO: 4016 - DNA, 15 bp, synthetic construct
  misc_feature 1..15: note = Modified oligo substrate or product
  modified_base 12^13: mod_base = OTHER; note = there is a phosphorothioate bond between these bases
  modified_base 13^14: mod_base = OTHER; note = there is a phosphorothioate bond between these bases
  modified_base 1: mod_base = OTHER; note = 5'-6-carboxyfluorescein-thymidine
  modified_base 12: mod_base = OTHER; note = 2'-O-methylcytidine
  modified_base 13: mod_base = OTHER; note = 2'-O-methyladenosine
  modified_base 14: mod_base = OTHER; note = 2'-O-methylguanosine
  modified_base 15: mod_base = OTHER; note = 2'-O-methyladenosine with a 3'-PO4 blocking group
  source 1..15: mol_type = other DNA
nttttttttttnnnn

SEQ ID NO: 4017 - DNA, 19 bp, synthetic construct
  misc_feature 1..19: note = Modified oligo substrate or product
  modified_base 1: mod_base = OTHER; note = 5'-6-carboxyfluorescein-thymidine
  modified_base 16: mod_base = OTHER; note = 2'-O-methyladenosine
  modified_base 17: mod_base = OTHER; note = 2'-deoxyfluorouridine
  modified_base 18: mod_base = OTHER; note = 2'-O-methylcytidine
  modified_base 19: mod_base = OTHER; note = 2'-O-methyladenosine with a 3'-PO4 blocking group
  source 1..19: mol_type = other DNA
nttttttttttttttnnnn

SEQ ID NO: 4018 - DNA, 19 bp, synthetic construct
  misc_feature 1..19: note = Modified oligo substrate or product
  modified_base 1: mod_base = OTHER; note = 5'-6-carboxyfluorescein-thymidine
  modified_base 16: mod_base = OTHER; note = 2'-O-methylcytidine
  modified_base 17: mod_base = OTHER; note = 2'-O-methyluridine
  modified_base 18: mod_base = OTHER; note = 2'-O-methylguanosine
  modified_base 19: mod_base = OTHER; note = 2'-O-methyladenosine with a 3'-PO4 blocking group
  source 1..19: mol_type = other DNA
nttttttttttttttnnnn

SEQ ID NO: 4019 - DNA, 31 bp, synthetic construct; identical to SEQ ID NO: 3999
  misc_feature 1..31: note = Modified oligo substrate or product
  modified_base 28^29: mod_base = OTHER; note = there is a phosphorothioate bond between these bases
  modified_base 29^30: mod_base = OTHER; note = there is a phosphorothioate bond between these bases
  modified_base 1: mod_base = OTHER; note = 5'-6-carboxyfluorescein-thymidine
  modified_base 28: mod_base = OTHER; note = 2'-deoxyfluorocytidine
  modified_base 29: mod_base = OTHER; note = 2'-deoxyfluoroguanosine
  modified_base 30: mod_base = OTHER; note = 2'-deoxyfluoroadenosine
  modified_base 31: mod_base = OTHER; note = 2'-deoxyfluoroadenosine with a 3'-PO4 blocking group
  source 1..31: mol_type = other DNA

SEQ ID NO: 4020 - DNA, 15 bp, synthetic construct
  misc_feature 1..15: note = Modified oligo substrate or product
  modified_base 12^13: mod_base = OTHER; note = there is a phosphorothioate bond between these bases
  modified_base 13^14: mod_base = OTHER; note = there is a phosphorothioate bond between these bases
  modified_base 1: mod_base = OTHER; note = 5'-6-carboxyfluorescein-thymidine
  modified_base 12: mod_base = OTHER; note = 2'-O-methyluridine
  modified_base 13: mod_base = OTHER; note = 2'-deoxyfluoroadenosine
  modified_base 14: mod_base = OTHER; note = 2'-deoxyfluoroadenosine
  modified_base 15: mod_base = OTHER; note = 2'-deoxyfluoroadenosine with a 3'-PO4 blocking group
  source 1..15: mol_type = other DNA
nttttttttttnnnn

SEQ ID NO: 4021 - DNA, 19 bp, synthetic construct
  misc_feature 1..19: note = Modified oligo substrate or product
  modified_base 1: mod_base = OTHER; note = 5'-6-carboxyfluorescein-thymidine
  modified_base 16: mod_base = OTHER; note = 2'-O-methylguanosine
  modified_base 17: mod_base = OTHER; note = 2'-O-methyladenosine
  modified_base 18: mod_base = OTHER; note = 2'-O-methylcytidine
  modified_base 19: mod_base = OTHER; note = 2'-O-methyluridine with a 3'-PO4 blocking group
  source 1..19: mol_type = other DNA
nttttttttttttttnnnn

SEQ ID NO: 4022 - DNA, 52 bp, synthetic construct
  misc_feature 1..52: note = Modified oligo substrate or product
  modified_base 49^50: mod_base = OTHER; note = there is a phosphorothioate bond between these bases
  modified_base 50^51: mod_base = OTHER; note = there is a phosphorothioate bond between these bases
  modified_base 1: mod_base = OTHER; note = 5'-6-carboxyfluorescein-thymidine
  modified_base 49: mod_base = OTHER; note = 2'-O-methylguanosine
  modified_base 50: mod_base = OTHER; note = 2'-O-methyladenosine
  modified_base 51: mod_base = OTHER; note = 2'-O-methylcytidine
  modified_base 52: mod_base = OTHER; note = 2'-O-methyladenosine with a 3'-PO4 blocking group
  source 1..52: mol_type = other DNA
ntttttttttttttttttttttttttttttttttttttttttttttttnnnn

SEQ ID NO: 4023 - DNA, 19 bp, synthetic construct
  misc_feature 1..19: note = Modified oligo substrate or product
  modified_base 1: mod_base = OTHER; note = 5'-6-carboxyfluorescein-thymidine
  modified_base 16: mod_base = OTHER; note = 2'-O-methyladenosine
  modified_base 17: mod_base = OTHER; note = 2'-O-methylcytidine
  modified_base 18: mod_base = OTHER; note = 2'-O-methyluridine
  modified_base 19: mod_base = OTHER; note = 2'-deoxyfluoroadenosine with a 3'-PO4 blocking group
  source 1..19: mol_type = other DNA
nttttttttttttttnnnn

SEQ ID NO: 4024 - DNA, 19 bp, synthetic construct
  misc_feature 1..19: note = Modified oligo substrate or product
  modified_base 1: mod_base = OTHER; note = 5'-6-carboxyfluorescein-thymidine
  modified_base 16: mod_base = OTHER; note = 2'-O-methylguanosine
  modified_base 17: mod_base = OTHER; note = 2'-O-methyladenosine
  modified_base 18: mod_base = OTHER; note = 2'-O-methylcytidine
  modified_base 19: mod_base = OTHER; note = 2'-O-methyladenosine with a 3'-PO4 blocking group
  source 1..19: mol_type = other DNA
nttttttttttttttnnnn

SEQ ID NO: 4025 - DNA, 19 bp, synthetic construct
  misc_feature 1..19: note = Modified oligo substrate or product
  modified_base 1: mod_base = OTHER; note = 5'-6-carboxyfluorescein-thymidine
  modified_base 16: mod_base = OTHER; note = 2'-O-methyladenosine
  modified_base 17: mod_base = OTHER; note = 2'-O-methylcytidine
  modified_base 18: mod_base = OTHER; note = 2'-O-methyluridine
  modified_base 19: mod_base = OTHER; note = 2'-O-methyluridine with a 3'-PO4 blocking group
  source 1..19: mol_type = other DNA
nttttttttttttttnnnn

SEQ ID NO: 4026 - DNA, 19 bp, synthetic construct
  misc_feature 1..19: note = Modified oligo substrate or product
  modified_base 1: mod_base = OTHER; note = 5'-6-carboxyfluorescein-thymidine
  modified_base 16: mod_base = OTHER; note = 2'-O-methyladenosine
  modified_base 17: mod_base = OTHER; note = 2'-O-methylcytidine
  modified_base 18: mod_base = OTHER; note = 2'-O-methyluridine
  modified_base 19: mod_base = OTHER; note = 2'-O-methylcytidine with a 3'-PO4 blocking group
  source 1..19: mol_type = other DNA
nttttttttttttttnnnn

SEQ ID NO: 4027 - DNA, 19 bp, synthetic construct
  misc_feature 1..19: note = Modified oligo substrate or product
  modified_base 1: mod_base = OTHER; note = 5'-6-carboxyfluorescein-thymidine
  modified_base 16: mod_base = OTHER; note = 2'-O-methyladenosine
  modified_base 17: mod_base = OTHER; note = 2'-O-methylcytidine
  modified_base 18: mod_base = OTHER; note = 2'-O-methyluridine
  modified_base 19: mod_base = OTHER; note = 2'-O-methylguanosine with a 3'-PO4 blocking group
  source 1..19: mol_type = other DNA
nttttttttttttttnnnn

SEQ ID NO: 4028 - DNA, 19 bp, synthetic construct
  misc_feature 1..19: note = Modified oligo substrate or product
  modified_base 1: mod_base = OTHER; note = 5'-6-carboxyfluorescein-thymidine
  modified_base 16: mod_base = OTHER; note = 2'-O-methyladenosine
  modified_base 17: mod_base = OTHER; note = 2'-O-methylcytidine
  modified_base 18: mod_base = OTHER; note = 2'-O-methyluridine
  modified_base 19: mod_base = OTHER; note = 2'-O-methyladenosine with a 3'-PO4 blocking group
  source 1..19: mol_type = other DNA
nttttttttttttttnnnn

SEQ ID NO: 4029 - DNA, 21 bp, synthetic construct
  misc_feature 1..21: note = Modified oligo substrate or product
  modified_base 17^18: mod_base = OTHER; note = there is a phosphorothioate bond between these bases
  modified_base 18^19: mod_base = OTHER; note = there is a phosphorothioate bond between these bases
  modified_base 1: mod_base = OTHER; note = 5'-6-carboxyfluorescein-thymidine
  modified_base 18: mod_base = OTHER; note = 2'-deoxyfluoroadenosine
  modified_base 19: mod_base = OTHER; note = 2'-deoxyfluoroadenosine
  modified_base 20: mod_base = OTHER; note = 2'-deoxyfluoroguanosine
  modified_base 21: mod_base = OTHER; note = 2'-deoxyfluoroadenosine with a 3'-PO4 blocking group
  source 1..21: mol_type = other DNA
nttttttttttttttttnnnn

SEQ ID NO: 4030 - DNA, 19 bp, synthetic construct
  misc_feature 1..19: note = Modified oligo substrate or product
  modified_base 1: mod_base = OTHER; note = 5'-6-carboxyfluorescein-thymidine
  modified_base 16: mod_base = OTHER; note = 2'-O-methylguanosine
  modified_base 17: mod_base = OTHER; note = 2'-O-methyladenosine
  modified_base 18: mod_base = OTHER; note = 2'-O-methylcytidine
  modified_base 19: mod_base = OTHER; note = 2'-O-methylcytidine with a 3'-PO4 blocking group
  source 1..19: mol_type = other DNA
nttttttttttttttnnnn

SEQ ID NO: 4031 - DNA, 19 bp, synthetic construct
  misc_feature 1..19: note = Modified oligo substrate or product
  modified_base 1: mod_base = OTHER; note = 5'-6-carboxyfluorescein-thymidine
  modified_base 16: mod_base = OTHER; note = 2'-O-methyladenosine
  modified_base 17: mod_base = OTHER; note = 2'-O-methyluridine
  modified_base 18: mod_base = OTHER; note = 2'-deoxyfluorouridine
  modified_base 19: mod_base = OTHER; note = 2'-O-methyladenosine with a 3'-PO4 blocking group
  source 1..19: mol_type = other DNA
nttttttttttttttnnnn

SEQ ID NO: 4032 - DNA, 19 bp, synthetic construct
  misc_feature 1..19: note = Modified oligo substrate or product
  modified_base 1: mod_base = OTHER; note = 5'-6-carboxyfluorescein-thymidine
  modified_base 16: mod_base = OTHER; note = 2'-O-methylguanosine
  modified_base 17: mod_base = OTHER; note = 2'-O-methyladenosine
  modified_base 18: mod_base = OTHER; note = 2'-O-methylcytidine
  modified_base 19: mod_base = OTHER; note = 2'-O-methylguanosine with a 3'-PO4 blocking group
  source 1..19: mol_type = other DNA
nttttttttttttttnnnn

SEQ ID NO: 4033 - DNA, 19 bp, synthetic construct
  misc_feature 1..19: note = Modified oligo substrate or product
  modified_base 18^19: mod_base = OTHER; note = there is a phosphorothioate bond between these bases
  modified_base 1: mod_base = OTHER; note = 5'-6-carboxyfluorescein-thymidine
  modified_base 16: mod_base = OTHER; note = 2'-O-methyladenosine
  modified_base 17: mod_base = OTHER; note = 2'-O-methylcytidine
  modified_base 18: mod_base = OTHER; note = 2'-O-methyluridine
  modified_base 19: mod_base = OTHER; note = 2'-O-methyluridine with a 3'-PO4 blocking group
  source 1..19: mol_type = other DNA
nttttttttttttttnnnn

SEQ ID NO: 4034 - DNA, 19 bp, synthetic construct
  misc_feature 1..19: note = Modified oligo substrate or product
  modified_base 18^19: mod_base = OTHER; note = there is a phosphorothioate bond between these bases
  modified_base 1: mod_base = OTHER; note = 5'-6-carboxyfluorescein-thymidine
  modified_base 16: mod_base = OTHER; note = 2'-O-methylguanosine
  modified_base 17: mod_base = OTHER; note = 2'-O-methyladenosine
  modified_base 18: mod_base = OTHER; note = 2'-O-methylcytidine
  modified_base 19: mod_base = OTHER; note = 2'-O-methyluridine with a 3'-PO4 blocking group
  source 1..19: mol_type = other DNA
nttttttttttttttnnnn

SEQ ID NO: 4035 - DNA, 19 bp, synthetic construct
  misc_feature 1..19: note = Modified oligo substrate or product
  modified_base 18^19: mod_base = OTHER; note = there is a phosphorothioate bond between these bases
  modified_base 1: mod_base = OTHER; note = 5'-6-carboxyfluorescein-thymidine
  modified_base 16: mod_base = OTHER; note = 2'-O-methylguanosine
  modified_base 17: mod_base = OTHER; note = 2'-O-methyladenosine
  modified_base 18: mod_base = OTHER; note = 2'-O-methylcytidine
  modified_base 19: mod_base = OTHER; note = 2'-O-methylguanosine with a 3'-PO4 blocking group
  source 1..19: mol_type = other DNA
nttttttttttttttnnnn

SEQ ID NO: 4036 - DNA, 19 bp, synthetic construct
  misc_feature 1..19: note = Modified oligo substrate or product
  modified_base 18^19: mod_base = OTHER; note = there is a phosphorothioate bond between these bases
  modified_base 1: mod_base = OTHER; note = 5'-6-carboxyfluorescein-thymidine
  modified_base 16: mod_base = OTHER; note = 2'-O-methyladenosine
  modified_base 17: mod_base = OTHER; note = 2'-O-methylcytidine
  modified_base 18: mod_base = OTHER; note = 2'-O-methyluridine
  modified_base 19: mod_base = OTHER; note = 2'-O-methylguanosine with a 3'-PO4 blocking group
  source 1..19: mol_type = other DNA
nttttttttttttttnnnn

SEQ ID NO: 4037 - DNA, 19 bp, synthetic construct
  misc_feature 1..19: note = Modified oligo substrate or product
  modified_base 1: mod_base = OTHER; note = 5'-6-carboxyfluorescein-thymidine
  modified_base 16: mod_base = OTHER; note = 2'-O-methyladenosine
  modified_base 17: mod_base = OTHER; note = 2'-O-methyluridine
  modified_base 18: mod_base = OTHER; note = 2'-deoxyfluorocytidine
  modified_base 19: mod_base = OTHER; note = 2'-O-methyladenosine with a 3'-PO4 blocking group
  source 1..19: mol_type = other DNA
nttttttttttttttnnnn

SEQ ID NO: 4038 - DNA, 17 bp, synthetic construct
  misc_feature 1..17: note = Modified oligo substrate or product
  modified_base 1: mod_base = OTHER; note = thymidine with a 5'-biotin modifition
  modified_base 4: mod_base = OTHER; note = thymidine with a 5'-fluorescein modification
  modified_base 14: mod_base = OTHER; note = 2'-O-methyladenosine
  modified_base 15: mod_base = OTHER; note = 2'-O-methyluridine
  modified_base 16: mod_base = OTHER; note = 2'-O-methyladenosine
  modified_base 17: mod_base = OTHER; note = 2'-O-methyladenosine with a 3'-PO4 blocking group
  source 1..17: mol_type = other DNA
nttntttttttttnnnn

SEQ ID NO: 4039 - DNA, 18 bp, synthetic construct
  misc_feature 1..18: note = Modified oligo substrate or product
  modified_base 1: mod_base = OTHER; note = thymidine with a 5'-biotin modifition
  modified_base 4: mod_base = OTHER; note = thymidine with a 5'-fluorescein modification
  modified_base 14: mod_base = OTHER; note = 2'-O-methyladenosine
  modified_base 15: mod_base = OTHER; note = 2'-O-methyluridine
  modified_base 16: mod_base = OTHER; note = 2'-O-methyladenosine
  modified_base 17: mod_base = OTHER; note = 2'-O-methyladenosine
  modified_base 18: mod_base = OTHER; note = 2'-O-methylguanosine with a 3'-PO4 blocking group
  source 1..18: mol_type = other DNA
nttntttttttttnnnnn

SEQ ID NO: 4040 - DNA, 19 bp, synthetic construct
  misc_feature 1..19: note = Modified oligo substrate or product
  modified_base 1: mod_base = OTHER; note = thymidine with a 5'-biotin modifition
  modified_base 4: mod_base = OTHER; note = thymidine with a 5'-fluorescein modification
  modified_base 14: mod_base = OTHER; note = 2'-O-methyladenosine
  modified_base 15: mod_base = OTHER; note = 2'-O-methyluridine
  modified_base 16: mod_base = OTHER; note = 2'-O-methyladenosine
  modified_base 17: mod_base = OTHER; note = 2'-O-methyladenosine
  modified_base 18: mod_base = OTHER; note = 2'-O-methylguanosine
  modified_base 19: mod_base = OTHER; note = 2'-O-methyladenosine with a 3'-PO4 blocking group
  source 1..19: mol_type = other DNA
nttntttttttttnnnnnn

SEQ ID NO: 4041 - DNA, 20 bp, synthetic construct
  misc_feature 1..20: note = Modified oligo substrate or product
  modified_base 1: mod_base = OTHER; note = thymidine with a 5'-biotin modifition
  modified_base 4: mod_base = OTHER; note = thymidine with a 5'-fluorescein modification
  modified_base 14: mod_base = OTHER; note = 2'-O-methyladenosine
  modified_base 15: mod_base = OTHER; note = 2'-O-methyluridine
  modified_base 16: mod_base = OTHER; note = 2'-O-methyladenosine
  modified_base 17: mod_base = OTHER; note = 2'-O-methyladenosine
  modified_base 18: mod_base = OTHER; note = 2'-O-methylguanosine
  modified_base 19: mod_base = OTHER; note = 2'-O-methyladenosine
  modified_base 20: mod_base = OTHER; note = 2'-deoxyfluoroadenosine with a 3'-PO4 blocking group
  source 1..20: mol_type = other DNA
nttntttttttttnnnnnnn

SEQ ID NO: 4042 - DNA, 17 bp, synthetic construct
  misc_feature 1..17: note = Modified oligo substrate or product
  modified_base 1: mod_base = OTHER; note = thymidine with a 5'-biotin modifition
  modified_base 14: mod_base = OTHER; note = 2'-O-methyladenosine
  modified_base 15: mod_base = OTHER; note = 2'-O-methyluridine
  modified_base 16: mod_base = OTHER; note = 2'-O-methyladenosine
  modified_base 17: mod_base = OTHER; note = 2'-O-methyladenosine with a 3'-PO4 blocking group
  source 1..17: mol_type = other DNA
nttttttttttttnnnn

SEQ ID NO: 4043 - DNA, 18 bp, synthetic construct
  misc_feature 1..18: note = Modified oligo substrate or product
  modified_base 1: mod_base = OTHER; note = thymidine with a 5'-biotin modifition
  modified_base 14: mod_base = OTHER; note = 2'-O-methyladenosine
  modified_base 15: mod_base = OTHER; note = 2'-O-methyluridine
  modified_base 16: mod_base = OTHER; note = 2'-O-methyladenosine
  modified_base 17: mod_base = OTHER; note = 2'-O-methyladenosine
  modified_base 18: mod_base = OTHER; note = 2'-O-methylguanosine with a 3'-PO4 blocking group
  source 1..18: mol_type = other DNA
nttttttttttttnnnnn

SEQ ID NO: 4044 - DNA, 19 bp, synthetic construct
  misc_feature 1..19: note = Modified oligo substrate or product
  modified_base 1: mod_base = OTHER; note = thymidine with a 5'-biotin modifition
  modified_base 14: mod_base = OTHER; note = 2'-O-methyladenosine
  modified_base 15: mod_base = OTHER; note = 2'-O-methyluridine
  modified_base 16: mod_base = OTHER; note = 2'-O-methyladenosine
  modified_base 17: mod_base = OTHER; note = 2'-O-methyladenosine
  modified_base 18: mod_base = OTHER; note = 2'-O-methylguanosine
  modified_base 19: mod_base = OTHER; note = 2'-O-methyladenosine with a 3'-PO4 blocking group
  source 1..19: mol_type = other DNA
nttttttttttttnnnnnn

SEQ ID NO: 4045 - DNA, 20 bp, synthetic construct
  misc_feature 1..20: note = Modified oligo substrate or product
  modified_base 1: mod_base = OTHER; note = thymidine with a 5'-biotin modifition
  modified_base 14: mod_base = OTHER; note = 2'-O-methyladenosine
  modified_base 15: mod_base = OTHER; note = 2'-O-methyluridine
  modified_base 16: mod_base = OTHER; note = 2'-O-methyladenosine
  modified_base 17: mod_base = OTHER; note = 2'-O-methyladenosine
  modified_base 18: mod_base = OTHER; note = 2'-O-methylguanosine
  modified_base 19: mod_base = OTHER; note = 2'-O-methyladenosine
  modified_base 20: mod_base = OTHER; note = 2'-deoxyfluoroadenosine with a 3'-PO4 blocking group
  source 1..20: mol_type = other DNA
nttttttttttttnnnnnnn

SEQ ID NO: 4046 - DNA, 18 bp, synthetic construct
  misc_feature 1..18: note = Modified oligo substrate or product
  modified_base 17^18: mod_base = OTHER; note = there is a phosphorothioate bond between these bases
  modified_base 1: mod_base = OTHER; note = 5'-6-carboxyfluorescein-thymidine
  modified_base 16: mod_base = OTHER; note = 2'-O-methyladenosine
  modified_base 17: mod_base = OTHER; note = 2'-O-methyluridine
  modified_base 18: mod_base = OTHER; note = 2'-O-methylguanosine
  source 1..18: mol_type = other DNA
nttttttttttttttnnn

SEQ ID NO: 4047 - DNA, 1587 bp, synthetic construct
  misc_feature 1..1587: note = Variant of terminal deoxynucleotidyltransferase
  source 1..1587: mol_type = other DNA
atgcaccatcatcatcatcatggcggtagcggcagccacggcattcgtaccatcgattcggacttcgggaagaaacagcagaaaaaaggcgataaccacgatagttccgccacttatgaaatcaaatttcacgagtttgtgctgttcattctcgaagaaaaaatgggtgcgacgcgtcgtacttttctgacagatttagcccgcaagaaagggttccgcgtcgagaatgaactgaccgacgaagttacccacatcgtggcagaaaatctgtcacgctctgaagtattggcttggctgaaagaacacaagatggagaagaccaagcaattcgaactgctggatattagctggcttatcgaaagcatgaaagttggtaaaccggtggacaccaaggggaaataccagttggcggaatcggttgaggtgagtgcgaacccagatccgacagaaggtcgtgtaaacgagctgcctcctactatgaaaaccgtttctccgtatgcgtgtcaacgccgcaccaccctgaacaaccgtaatcaacgttttacggactcgctggagattcttcgtgaaaattacgagctgaaaggcaacgatgatactgcgctggaaattcgtcgtgctatctccgtgctgaaaagccttccgtttgaggtacgtagcctgaaagacacggaaggattgccctggatcagtgatgaagtcaaagggattatggaagaaatcatcgaagtcggggagtcgcgtgaagtgcaggccgtgctcaatgatgagtggtatcaaagcttccacgcatttacgcgtgtctttggagtgggggtgaagacagcagacaagtggtaccgtatgggtctgcgcaccctcgaggatgttcgttccagcaagaccctgaagttgaccccgatgcagaaagtaggtctgctgtattatgaagatcttgctcgcggcgttacgcgtgccgaagctgacgcgatttggctgctggttcaggatgcagtcgcaactttcgacccggatgcgatcgtggagattgtcggtggatttcgtcgtgggaaacctcagggtcacgacgttgatctgcttatcagttctccgggagctgagaaagagcaagaagaccaactcctgcagaaagtgatgaatctgtggaagaaacaagggttgttgctgtgtggtcgtctggaatggagtcagtgggaagatgggggttcgccttccggtaaggctgatgagggtgacgcggaggcgtcgtgctttctgatcctcaaactttatgatcatctggtgcgtaaaagtaaacgcaatatgccgactggttcgaacatgggcgagtccaaaccgtggaaagcaattaaagtagatctgctgcgttgcccctatggcagttttgcgtttgcgatgttgcagtggaccggaagccgcatgttccgtcgtgatctgcgctggtacgccctggaagagaagaacatgatgctggacaatcattcgctgtatgacatgacccgcggtatcttcctccctgctaaatcggaagaggaaattttcgaacatctggggcttgaatacctggaaccgttcgaacgtaacgca

SEQ ID NO: 4048 - protein, 529 aa, synthetic construct
  REGION 1..529: note = Variant of terminal deoxynucleotidyltransferase
MHHHHHHGGSGSHGIRTIDSDFGKKQQKKGDNHDSSATYEIKFHEFVLFILEEKMGATRRTFLTDLARKKGFRVENELTDEVTHIVAENLSRSEVLAWLKEHKMEKTKQFELLDISWLIESMKVGKPVDTKGKYQLAESVEVSANPDPTEGRVNELPPTMKTVSPYACQRRTTLNNRNQRFTDSLEILRENYELKGNDDTALEIRRAISVLKSLPFEVRSLKDTEGLPWISDEVKGIMEEIIEVGESREVQAVLNDEWYQSFHAFTRVFGVGVKTADKWYRMGLRTLEDVRSSKTLKLTPMQKVGLLYYEDLARGVTRAEADAIWLLVQDAVATFDPDAIVEIVGGFRRGKPQGHDVDLLISSPGAEKEQEDQLLQKVMNLWKKQGLLLCGRLEWSQWEDGGSPSGKADEGDAEASCFLILKLYDHLVRKSKRNMPTGSNMGESKPWKAIKVDLLRCPYGSFAFAMLQWTGSRMFRRDLRWYALEEKNMMLDNHSLYDMTRGIFLPAKSEEEIFEHLGLEYLEPFERNA

SEQ ID NO: 4049 - DNA, 1587 bp, synthetic construct
  misc_feature 1..1587: note = Variant of terminal deoxynucleotidyltransferase
  source 1..1587: mol_type = other DNA
atgcaccatcatcatcatcatggcggtagcggcagccacggcattcgtaccatcgattcggacttcgggaagaaacagcagaaaaaaggcgataaccacgatagttccgccacttatgaaatcaaatttcacgagtttgtgctgttcattctcgaagaaaaaatgggtgcgacgcgtcgtacttttctgacagatttagcccgcaagaaagggttccgcgtcgagaatgaactgaccgacgaagttacccacatcgtggcagaaaatctgtcacgctctgaagtattggcttggctgaaagaacacaagatggagaagaccaagcaattcgaactgctggatattagctggcttatcgaaagcatgaaagttggtaaaccggtggacaccaaggggaaataccagttggcggaatcggttgaggtgagtgcgaacccagatccgacagaaggtcgtgtaaacgagctgcctcctactatgaaaaccgtttctccgtatgcgtgtcaacgccgcaccaccctgaacaaccgtaatcaacgttttacggactcgctggagattcttcgtgaaaattacgagctgaaaggcaacgacgatactgcgctggaatttcgtcgtgctatctccgtgctgaaaagccttccgtttgaggtacgtagcctgaaagacacggaaggattgccctggatcagtgatgaagtcaaagggattatggaagaaatcatcgaagtcggggagtcgcgtgaagtgcaggccgtgctcaatgatgagtggtatcaaagcttccacgcatttacgcgtgtctttggagtgggggtgaagacagcagacaagtggtaccgtatgggtctgcgcaccctcgaggatgttcgttccagcaagaccctgaagttgaccccgatgcagaaagtaggtctgctgtattatgaagatcttgctcgcggcgttacgcgtgccgaagctgacgcgatttggctgctggttcaggatgcagtcgcaactttcgacccggatgcgatcgtggagattgtcggtggatttcgtcgtgggaaacctcagggtcacgacgttgatctgcttatcagttctccgggagctgagaaagagcaagaagaccaactcctgcagaaagtgatgaatctgtggaagaaacaagggttgttgctgtgtggtcgtctggaatggagtcagtgggaagatgggggttcgccttccctgaaggctgacgagggtgacgcggaggcgtcgtgctttctgatcctcaaactttatgatcatctggtgcgtaaaagtaaacgcaatatgccgactggttcgaacatgggcgagtccaaaccgtggaaagcaattaaagtagatctgctgcgttgcccctatggcagttttgcgtttgcgatgttgcagtggaccggaagccgcatgttccgtcgtgatctgcgctggtacgccctggaagagaagaacatgatgctggacaatcattcgctgtatgacatgacccgcggtatcttcctccctgctaaatcggaagaggaaattttcgaacatctggggcttgaatacctggaaccgttcgaacgtaacgca

SEQ ID NO: 4050 - protein, 529 aa, synthetic construct
  REGION 1..529: note = Variant of terminal deoxynucleotidyltransferase
MHHHHHHGGSGSHGIRTIDSDFGKKQQKKGDNHDSSATYEIKFHEFVLFILEEKMGATRRTFLTDLARKKGFRVENELTDEVTHIVAENLSRSEVLAWLKEHKMEKTKQFELLDISWLIESMKVGKPVDTKGKYQLAESVEVSANPDPTEGRVNELPPTMKTVSPYACQRRTTLNNRNQRFTDSLEILRENYELKGNDDTALEFRRAISVLKSLPFEVRSLKDTEGLPWISDEVKGIMEEIIEVGESREVQAVLNDEWYQSFHAFTRVFGVGVKTADKWYRMGLRTLEDVRSSKTLKLTPMQKVGLLYYEDLARGVTRAEADAIWLLVQDAVATFDPDAIVEIVGGFRRGKPQGHDVDLLISSPGAEKEQEDQLLQKVMNLWKKQGLLLCGRLEWSQWEDGGSPSLKADEGDAEASCFLILKLYDHLVRKSKRNMPTGSNMGESKPWKAIKVDLLRCPYGSFAFAMLQWTGSRMFRRDLRWYALEEKNMMLDNHSLYDMTRGIFLPAKSEEEIFEHLGLEYLEPFERNA

SEQ ID NO: 4051 - DNA, 1587 bp, synthetic construct
  misc_feature 1..1587: note = Variant of terminal deoxynucleotidyltransferase
  source 1..1587: mol_type = other DNA
atgcaccatcatcatcatcatggcggtagcggcagccacggcattcgtaccatcgattcggacttcgggaagaaacagcagaaaaaaggcgataaccacgatagttccgccacttatgaaatcaaatttcacgagtttgtgctgttcattctcgaagaaaaaatgggtgcgacgcgtcgtacttttctgacagatttagcccgcaagaaagggttccgcgtcgagaatgaactgaccgacgaagttacccacatcgtggcagaaaatctgtcacgctctgaagtattggcttggctgaaagaacacaagatggagaagaccaagcaattcgaactgctggatattagctggcttatcgaaagcatgaaagttggtaaaccggtggacaccaaggggaaataccagttggcggaatcggttgaggtgagtgcgaacccagatccgacagaaggtcgtgtaaacgagctgcctcctactatgaaaaccgtttctccgtatgcgtgtcaacgccgcaccaccctgaacaaccgtaatcaacgttttacggactcgctggagattcttcgtgaaaattacgagctgaaaggcaacgacgatactgcgctggaatttcgtcgtgctatctccgtgctgaaaagccttccgtttgaggtacgtagcctgaaagacacggaaggattgccctggatcagtgatgaagtcaaagggattatggaagaaatcatcgaagtcggggagtcgcgtgaagtgcaggccgtgctcaatgatgagtggtatcaaagcttccacgcatttacgcgtgtctttggagtgggggtgaagacagcagacaagtggtaccgtatgggtctgcgcaccctcgaggatgttcgttccagcaagaccctgaagttgaccccgatgcagaaagtaggtctgctgtattatgaagatcttgctcgcggcgttacgcgtgccgaagctgacgcgatttggctgctggttcaggatgcagtcgcaactttcgacccggatgcgatcgtggagattgtcggtggatttcgtcgtgggaaacctcagggtcacgacgttgatctgcttatcagttctccgggagctgagaaagagcaagaagaccaactcctgcagaaagtgatgaatctgtggaagaaacaagggttgttgctgtgtggtcgtctggaatggagtcagtgggaagatgggggttcgccttcctctaaggctgacgagggtgacgcggaggcgtcgtgctttctgatcctcaaactttatgatcatctggtgcgtaaaagtaaacgcaatatgccgactggttcgaacatgggcgagtccaaaccgtggaaagcaattaaagtagatctgctgcgttgcccctatggcagttttgcgtttgcgatgttgcagtggaccggaagccgcatgttccgtcgtgatctgcgctggtacgccctggaagagaagaacatgatgctggacaatcattcgctgtatgacatgacccgcggtatcttcctccctgctaaatcggaagaggaaattttcgaacatctggggcttgaatacctggaaccgttcgaacgtaacgca

SEQ ID NO: 4052 - protein, 529 aa, synthetic construct
  REGION 1..529: note = Variant of terminal deoxynucleotidyltransferase
MHHHHHHGGSGSHGIRTIDSDFGKKQQKKGDNHDSSATYEIKFHEFVLFILEEKMGATRRTFLTDLARKKGFRVENELTDEVTHIVAENLSRSEVLAWLKEHKMEKTKQFELLDISWLIESMKVGKPVDTKGKYQLAESVEVSANPDPTEGRVNELPPTMKTVSPYACQRRTTLNNRNQRFTDSLEILRENYELKGNDDTALEFRRAISVLKSLPFEVRSLKDTEGLPWISDEVKGIMEEIIEVGESREVQAVLNDEWYQSFHAFTRVFGVGVKTADKWYRMGLRTLEDVRSSKTLKLTPMQKVGLLYYEDLARGVTRAEADAIWLLVQDAVATFDPDAIVEIVGGFRRGKPQGHDVDLLISSPGAEKEQEDQLLQKVMNLWKKQGLLLCGRLEWSQWEDGGSPSSKADEGDAEASCFLILKLYDHLVRKSKRNMPTGSNMGESKPWKAIKVDLLRCPYGSFAFAMLQWTGSRMFRRDLRWYALEEKNMMLDNHSLYDMTRGIFLPAKSEEEIFEHLGLEYLEPFERNA

SEQ ID NO: 4053 - DNA, 1587 bp, synthetic construct
  misc_feature 1..1587: note = Variant of terminal deoxynucleotidyltransferase
  source 1..1587: mol_type = other DNA
atgcaccatcatcatcatcatggcggtagcggcagccacggcattcgtaccatcgattcggacttcgggaagaaacagcagaaaaaaggcgataaccacgatagttccgccacttatgaaatcaaatttcacgagtttgtgctgttcattctcgaagaaaaaatgggtgcgacgcgtcgtacttttctgacagatttagcccgcaagaaagggttccgcgtcgagaatgaactgaccgacgaagttacccacatcgtggcagaaaatctgtcacgctctgaagtattggcttggctgaaagaacacaagatggagaagaccaagcaattcgaactgctggatattagctggcttatcgaaagcatgaaagttggtaaaccggtggacaccaaggggaaataccagttggcggaatcggttgaggtgagtgcgaacccagatccgacagaaggtcgtgtaaacgagctgcctcctactatgaaaaccgtttctccgtatgcgtgtcaacgccgcaccaccctgaacaaccgtaatcaacgttttacggactcgctggagattcttcgtgaaaattacgagctgaaaggcaacgacgatactgcgctggaatttcgtcgtgctatctccgtgctgaaaagccttccgtttgaggtacgtagcctgaaagacacggaaggattgccctggatcagtgatgaagtcaaagggattatggaagaaatcatcgaagtcggggagtcgcgtgaagtgcaggccgtgctcaatgatgagtggtatcaaagcttccacgcatttacgcgtgtctttggagtgggggtgaagacagcagacaagtggtaccgtatgggtctgcgcaccctcgaggatgttcgttccagcaagaccctgaagttgaccccgatgcagaaagtaggtctgctgtattatgaagatcttgctcgcggcgttacgcgtgccgaagctgacgcgatttggctgctggttcaggatgcagtcgcaactttcgacccggatgcgatcgtgcagattgtcggtggatttcgtcgtgggaaacctcagggtcacgacgttgatctgcttatcagttctccgggagctgagaaagagcaagaagaccaactcctgcagaaagtgatgaatctgtggaagaaacaagggttgttgctgtgtggtcgtctggaatggagtcagtgggaagatgggggttcgccttccggtaaggctgatgagggtgacgcggaggcgtcgtgctttctgatcctcaaactttatgatcatctggtgcgtaaaagtaaacgcaatatgccgactggttcgaacatgggcgagtccaaaccgtggaaagcaattaaagtagatctgctgcgttgcccctatggcagttttgcgtttgcgatgttgcagtggaccggaagccgcatgttccgtcgtgatctgcgctggtacgccctggaagagaagaacatgatgctggacaatcattcgctgtatgacatgacccgcggtatcttcctccctgctaaatcggaagaggaaattttcgaacatctggggcttgaatacctggaaccgttcgaacgtaacgca

SEQ ID NO: 4054 - protein, 529 aa, synthetic construct
  REGION 1..529: note = Variant of terminal deoxynucleotidyltransferase
MHHHHHHGGSGSHGIRTIDSDFGKKQQKKGDNHDSSATYEIKFHEFVLFILEEKMGATRRTFLTDLARKKGFRVENELTDEVTHIVAENLSRSEVLAWLKEHKMEKTKQFELLDISWLIESMKVGKPVDTKGKYQLAESVEVSANPDPTEGRVNELPPTMKTVSPYACQRRTTLNNRNQRFTDSLEILRENYELKGNDDTALEFRRAISVLKSLPFEVRSLKDTEGLPWISDEVKGIMEEIIEVGESREVQAVLNDEWYQSFHAFTRVFGVGVKTADKWYRMGLRTLEDVRSSKTLKLTPMQKVGLLYYEDLARGVTRAEADAIWLLVQDAVATFDPDAIVQIVGGFRRGKPQGHDVDLLISSPGAEKEQEDQLLQKVMNLWKKQGLLLCGRLEWSQWEDGGSPSGKADEGDAEASCFLILKLYDHLVRKSKRNMPTGSNMGESKPWKAIKVDLLRCPYGSFAFAMLQWTGSRMFRRDLRWYALEEKNMMLDNHSLYDMTRGIFLPAKSEEEIFEHLGLEYLEPFERNA

SEQ ID NO: 4055 - DNA, 1587 bp, synthetic construct
  misc_feature 1..1587: note = Variant of terminal deoxynucleotidyltransferase
  source 1..1587: mol_type = other DNA
atgcaccatcatcatcatcatggcggtagcggcagccacggcattcgtaccatcgattcggacttcgggaagaaacagcagaaaaaaggcgataaccacgatagttccgccacttatgaaatcaaatttcacgagtttgtgctgttcattctcgaagaaaaaatgggtgcgacgcgtcgtacttttctgacagatttagcccgcaagaaagggttccgcgtcgagaatgaactgaccgacgaagttacccacatcgtggcagaaaatctgtcacgctctgaagtattggcttggctgaaagaacacaagatggagaagaccaagcaattcgaactgctggatattagctggcttatcgaaagcatgaaagttggtaaaccggtggacaccaaggggaaataccagttggcggaatcggttgaggtgagtgcgaacccagatccgacagaaggtcgtgtaaacgagctgcctcctactatgaaaaccgtttctccgtatgcgtgtcaacgccgcaccaccctgaacaaccgtaatcaacgttttacggactcgctggagattcttcgtgaaaattacgagctgaaaggcaacgacgatactgcgctggaatttcgtcgtgctatctccgtgctgaaaagccttccgtttgaggtacgtagcctgaaagacacggaaggattgccctggatcagtgatgaagtcaaagggattatggaagaaatcatcgaagtcggggagtcgcgtgaagtgcaggccgtgctcaatgatgagtggtatcaaagcttccacgcatttacgcgtgtctttggagtgggggtgaagacagcagacaagtggtaccgtatgggtctgcgcaccctcgaggatgttcgttccagcaagaccctgaagttgaccccgatgcagaaagtaggtctgctgtattatgaagatcttgctcgcggcgttacgcgtgccgaagctgacgcgatttggctgctggttcaggatgcagtcgcaactttcgacccggatgcgatcgtggagattgtcggtggatttcgtcgtgggaaacctcagggtcacgacgttgatctgcttatcagttctccgggagctgagaaagagcaagaagaccaactcctgcagaaagtgatgaatctgtggaagaaacaagggttgttgctgtgtggtcgtctggaatggagtcagtgggaagatgggggttcggggtccggtaaggctgacgagggtgacgcggaggcgtcgtgctttctgatcctcaaactttatgatcatctggtgcgtaaaagtaaacgcaatatgccgactggttcgaacatgggcgagtccaaaccgtggaaagcaattaaagtagatctgctgcgttgcccctatggcagttttgcgtttgcgatgttgcagtggaccggaagccgcatgttccgtcgtgatctgcgctggtacgccctggaagagaagaacatgatgctggacaatcattcgctgtatgacatgacccgcggtatcttcctccctgctaaatcggaagaggaaattttcgaacatctggggcttgaatacctggaaccgttcgaacgtaacgca

SEQ ID NO: 4056 - protein, 529 aa, synthetic construct
  REGION 1..529: note = Variant of terminal deoxynucleotidyltransferase
MHHHHHHGGSGSHGIRTIDSDFGKKQQKKGDNHDSSATYEIKFHEFVLFILEEKMGATRRTFLTDLARKKGFRVENELTDEVTHIVAENLSRSEVLAWLKEHKMEKTKQFELLDISWLIESMKVGKPVDTKGKYQLAESVEVSANPDPTEGRVNELPPTMKTVSPYACQRRTTLNNRNQRFTDSLEILRENYELKGNDDTALEFRRAISVLKSLPFEVRSLKDTEGLPWISDEVKGIMEEIIEVGESREVQAVLNDEWYQSFHAFTRVFGVGVKTADKWYRMGLRTLEDVRSSKTLKLTPMQKVGLLYYEDLARGVTRAEADAIWLLVQDAVATFDPDAIVEIVGGFRRGKPQGHDVDLLISSPGAEKEQEDQLLQKVMNLWKKQGLLLCGRLEWSQWEDGGSGSGKADEGDAEASCFLILKLYDHLVRKSKRNMPTGSNMGESKPWKAIKVDLLRCPYGSFAFAMLQWTGSRMFRRDLRWYALEEKNMMLDNHSLYDMTRGIFLPAKSEEEIFEHLGLEYLEPFERNA

SEQ ID NO: 4057 - DNA, 1587 bp, synthetic construct
  misc_feature 1..1587: note = Variant of terminal deoxynucleotidyltransferase
  source 1..1587: mol_type = other DNA
atgcaccatcatcatcatcatggcggtagcggcagccacggcattcgtaccatcgattcggacttcgggaagaaacagcagaaaaaaggcgataaccacgatagttccgccacttatgaaatcaaatttcacgagtttgtgctgttcattctcgaagaaaaaatgggtgcgacgcgtcgtacttttctgacagatttagcccgcaagaaagggttccgcgtcgagaatgaactgaccgacgaagttacccacatcgtggcagaaaatctgtcacgctctgaagtattggcttggctgaaagaacacaagatggagaagaccaagcaattcgaactgctggatattagctggcttatcgaaagcatgaaagttggtaaaccggtggacaccaaggggaaataccagttggcggaatcggttgaggtgagtgcgaacccagatccgacagaaggtcgtgtaaacgagctgcctcctactatgaaaaccgtttctccgtatgcgtgtcaacgccgcaccaccctgaacaaccgtaatcaacgttttacggactcgctggagattcttcgtgaaaattacgagctgaaaggcaacgacgatactgcgctggaatttcgtcgtgctatctccgtgctgaaaagccttccgtttgaggtacgtagcctgaaagacacggaaggattgccctggatcagtgatgaagtcaaagggattatggaagaaatcatcgaagtcggggagtcgcgtgaagtgcaggccgtgctcaatgatgagtggtatcaaagcttccacgcatttacgcgtgtctttggagtgggggtgaagacagcagacaagtggtaccgtatgggtctgcgcaccctcgaggatgttcgttccagcaaggtgctgaagttgaccccgatgcagaaagtaggtctgctgtattatgaagatcttgctcgcggcgttacgcgtgccgaagctgacgcgatttggctgctggttcaggatgcagtcgcaactttcgacccggatgcgatcgtggagattgtcggtggatttcgtcgtgggaaacctcagggtcacgacgttgatctgcttatcagttctccgggagctgagaaagagcaagaagaccaactcctgcagaaagtgatgaatctgtggaagaaacaagggttgttgctgtgtggtcgtctggaatggagtcagtgggaagatgggggttcgccttccggtaaggctgatgagggtgacgcggaggcgtcgtgctttctgatcctcaaactttatgatcatctggtgcgtaaaagtaaacgcaatatgccgactggttcgaacatgggcgagtccaaaccgtggaaagcaattaaagtagatctgctgcgttgcccctatggcagttttgcgtttgcgatgttgcagtggaccggaagccgcatgttccgtcgtgatctgcgctggtacgccctggaagagaagaacatgatgctggacaatcattcgctgtatgacatgacccgcggtatcttcctccctgctaaatcggaagaggaaattttcgaacatctggggcttgaatacctggaaccgttcgaacgtaacgca

SEQ ID NO: 4058 - protein, 529 aa, synthetic construct
  REGION 1..529: note = Variant of terminal deoxynucleotidyltransferase
MHHHHHHGGSGSHGIRTIDSDFGKKQQKKGDNHDSSATYEIKFHEFVLFILEEKMGATRRTFLTDLARKKGFRVENELTDEVTHIVAENLSRSEVLAWLKEHKMEKTKQFELLDISWLIESMKVGKPVDTKGKYQLAESVEVSANPDPTEGRVNELPPTMKTVSPYACQRRTTLNNRNQRFTDSLEILRENYELKGNDDTALEFRRAISVLKSLPFEVRSLKDTEGLPWISDEVKGIMEEIIEVGESREVQAVLNDEWYQSFHAFTRVFGVGVKTADKWYRMGLRTLEDVRSSKVLKLTPMQKVGLLYYEDLARGVTRAEADAIWLLVQDAVATFDPDAIVEIVGGFRRGKPQGHDVDLLISSPGAEKEQEDQLLQKVMNLWKKQGLLLCGRLEWSQWEDGGSPSGKADEGDAEASCFLILKLYDHLVRKSKRNMPTGSNMGESKPWKAIKVDLLRCPYGSFAFAMLQWTGSRMFRRDLRWYALEEKNMMLDNHSLYDMTRGIFLPAKSEEEIFEHLGLEYLEPFERNA

SEQ ID NO: 4059 - DNA, 1587 bp, synthetic construct
  misc_feature 1..1587: note = Variant of terminal deoxynucleotidyltransferase
  source 1..1587: mol_type = other DNA
atgcaccatcatcatcatcatggcggtagcggcagccacggcattcgtaccatcgattcggacttcgggaagaaacagcagaaaaaaggcgataaccacgatagttccgccacttatgaaatcaaatttcacgagtttgtgctgttcattctcgaagaaaaaatgggtgcgacgcgtcgtacttttctgacagatttagcccgcaagaaagggttccgcgtcgagaatgaactgaccgacgaagttacccacatcgtggcagaaaatctgtcacgctctgaagtattggcttggctgaaagaacacaagatggagaagaccaagcaattcgaactgctggatattagctggcttatcgaaagcatgaaagttggtaaaccggtggacaccaaggggaaataccagttggcggaatcggttgaggtgagtgcgaacccagatccgacagaaggtcgtgtaaacgagctgcctcctactatgaaaaccgtttctccgtatgcgtgtcaacgccgcaccaccctgaacaaccgtaatatgcgttttacggactcgctggagattcttcgtgaaaattacgagctgaaaggcaacgacgatactgcgctggaatttcgtcgtgctatctccgtgctgaaaagccttccgtttgaggtacgtagcctgaaagacacggaaggattgccctggatcagtgatgaagtcaaagggattatggaagaaatcatcgaagtcggggagtcgcgtgaagtgcaggccgtgctcaatgatgagtggtatcaaagcttccacgcatttacgcgtgtctttggagtgggggtgaagacagcagacaagtggtaccgtatgggtctgcgcaccctcgaggatgttcgttccagcaagaccctgaagttgaccccgatgcagaaagtaggtctgctgtattatgaagatcttgctcgcggcgttacgcgtgccgaagctgacgcgatttggctgctggttcaggatgcagtcgcaactttcgacccggatgcgatcgtggagattgtcggtggatttcgtcgtgggaaacctcagggtcacgacgttgatctgcttatcagttctccgggagctgagaaagagcaagaagaccaactcctgcagaaagtgatgaatctgtggaagaaacaagggttgttgctgtgtggtcgtctggaatggagtcagtgggaagatgggggttcgccttccggtaaggctgatgagggtgacgcggaggcgtcgtgctttctgatcctcaaactttatgatcatctggtgcgtaaaagtaaacgcaatatgccgactggttcgaacatgggcgagtccaaaccgtggaaagcaattaaagtagatctgctgcgttgcccctatggcagttttgcgtttgcgatgttgcagtggaccggaagccgcatgttccgtcgtgatctgcgctggtacgccctggaagagaagaacatgatgctggacaatcattcgctgtatgacatgacccgcggtatcttcctccctgctaaatcggaagaggaaattttcgaacatctggggcttgaatacctggaaccgttcgaacgtaacgca

SEQ ID NO: 4060 - protein, 529 aa, synthetic construct
  REGION 1..529: note = Variant of terminal deoxynucleotidyltransferase
MHHHHHHGGSGSHGIRTIDSDFGKKQQKKGDNHDSSATYEIKFHEFVLFILEEKMGATRRTFLTDLARKKGFRVENELTDEVTHIVAENLSRSEVLAWLKEHKMEKTKQFELLDISWLIESMKVGKPVDTKGKYQLAESVEVSANPDPTEGRVNELPPTMKTVSPYACQRRTTLNNRNMRFTDSLEILRENYELKGNDDTALEFRRAISVLKSLPFEVRSLKDTEGLPWISDEVKGIMEEIIEVGESREVQAVLNDEWYQSFHAFTRVFGVGVKTADKWYRMGLRTLEDVRSSKTLKLTPMQKVGLLYYEDLARGVTRAEADAIWLLVQDAVATFDPDAIVEIVGGFRRGKPQGHDVDLLISSPGAEKEQEDQLLQKVMNLWKKQGLLLCGRLEWSQWEDGGSPSGKADEGDAEASCFLILKLYDHLVRKSKRNMPTGSNMGESKPWKAIKVDLLRCPYGSFAFAMLQWTGSRMFRRDLRWYALEEKNMMLDNHSLYDMTRGIFLPAKSEEEIFEHLGLEYLEPFERNA

SEQ ID NO: 4061 - DNA, 1587 bp, synthetic construct
  misc_feature 1..1587: note = Variant of terminal deoxynucleotidyltransferase
  source 1..1587: mol_type = other DNA
atgcaccatcatcatcatcatggcggtagcggcagccacggcattcgtaccatcgattcggacttcgggaagaaacagcagaaaaaaggcgataaccacgatagttccgccacttatgaaatcaaatttcacgagtttgtgctgttcattctcgaagaaaaaatgggtgcgacgcgtcgtacttttctgacagatttagcccgcaagaaagggttccgcgtcgagaatgaactgaccgacgaagttacccacatcgtggcagaaaatctgtcacgctctgaagtattggcttggctgaaagaacacaagatggagaagaccaagcaattcgaactgctggatattagctggcttatcgaaagcatgaaagttggtaaaccggtggacaccaaggggaaataccagttggcggaatcggttgaggtgagtgcgaacccagatccgacagaaggtcgtgtaaacgagctgcctcctactatgaaaaccgtttctccgtatgcgtgtcaacgccgcaccaccctgaacaaccgtaatcaacgttttacggactcgctggagattcttcgtgaaaatatggagctgaaaggcaacgatgatactgcgctggaatttcgtcgtgctatctccgtgctgaaaagccttccgtttgaggtacgtagcctgaaagacacggaaggattgccctggatcagtgatgaagtcaaagggattatggaagaaatcatcgaagtcggggagtcgcgtgaagtgcaggccgtgctcaatgatgagtggtatcaaagcttccacgcatttacgcgtgtctttggagtgggggtgaagacagcagacaagtggtaccgtatgggtctgcgcaccctcgaggatgttcgttccagcaagaccctgaagttgaccccgatgcagaaagtaggtctgctgtattatgaagatcttgctcgcggcgttacgcgtgccgaagctgacgcgatttggctgctggttcaggatgcagtcgcaactttcgacccggatgcgatcgtggagattgtcggtggatttcgtcgtgggaaacctcagggtcacgacgttgatctgcttatcagttctccgggagctgagaaagagcaagaagaccaactcctgcagaaagtgatgaatctgtggaagaaacaagggttgttgctgtgtggtcgtctggaatggagtcagtgggaagatgggggttcgccttccggtaaggctgatgagggtgacgcggaggcgtcgtgctttctgatcctcaaactttatgatcatctggtgcgtaaaagtaaacgcaatatgccgactggttcgaacatgggcgagtccaaaccgtggaaagcaattaaagtagatctgctgcgttgcccctatggcagttttgcgtttgcgatgttgcagtggaccggaagccgcatgttccgtcgtgatctgcgctggtacgccctggaagagaagaacatgatgctggacaatcattcgctgtatgacatgacccgcggtatcttcctccctgctaaatcggaagaggaaattttcgaacatctggggcttgaatacctggaaccgttcgaacgtaacgca

SEQ ID NO: 4062 - protein, 529 aa, synthetic construct
  REGION 1..529: note = Variant of terminal deoxynucleotidyltransferase
MHHHHHHGGSGSHGIRTIDSDFGKKQQKKGDNHDSSATYEIKFHEFVLFILEEKMGATRRTFLTDLARKKGFRVENELTDEVTHIVAENLSRSEVLAWLKEHKMEKTKQFELLDISWLIESMKVGKPVDTKGKYQLAESVEVSANPDPTEGRVNELPPTMKTVSPYACQRRTTLNNRNQRFTDSLEILRENMELKGNDDTALEFRRAISVLKSLPFEVRSLKDTEGLPWISDEVKGIMEEIIEVGESREVQAVLNDEWYQSFHAFTRVFGVGVKTADKWYRMGLRTLEDVRSSKTLKLTPMQKVGLLYYEDLARGVTRAEADAIWLLVQDAVATFDPDAIVEIVGGFRRGKPQGHDVDLLISSPGAEKEQEDQLLQKVMNLWKKQGLLLCGRLEWSQWEDGGSPSGKADEGDAEASCFLILKLYDHLVRKSKRNMPTGSNMGESKPWKAIKVDLLRCPYGSFAFAMLQWTGSRMFRRDLRWYALEEKNMMLDNHSLYDMTRGIFLPAKSEEEIFEHLGLEYLEPFERNA

SEQ ID NO: 4063 - DNA, 1587 bp, synthetic construct
  misc_feature 1..1587: note = Variant of terminal deoxynucleotidyltransferase
  source 1..1587: mol_type = other DNA
atgcaccatcatcatcatcatggcggtagcggcagccacggcattcgtaccatcgattcggacttcgggaagaaacagcagaaaaaaggcgataaccacgatagttccgccacttatgaaatcaaatttcacgagtttgtgctgttcattctcgaagaaaaaatgggtgcgacgcgtcgtacttttctgacagatttagcccgcaagaaagggttccgcgtcgagaatgaactgaccgacgaagttacccacatcgtggcagaaaatctgtcacgctctgaagtattggcttggctgaaagaacacaagatggagaagaccaagcaattcgaactgctggatattagctggcttatcgaaagcatgaaagttggtaaaccggtggacaccaaggggaaataccagttggcggaatcggttgaggtgagtgcgaacccagatccgacagaaggtcgtgtaaacgagctgcctcctactatgaaaaccgtttctccgtatgcgtgtcaacgcgggaccaccctgaacaaccgtaatcaacgttttacggactcgctggagattcttcgtgaaaattacgagctgaaaggcaacgacgatactgcgctggaatttcgtcgtgctatctccgtgctgaaaagccttccgtttgaggtacgtagcctgaaagacacggaaggattgccctggatcagtgatgaagtcaaagggattatggaagaaatcatcgaagtcggggagtcgcgtgaagtgcaggccgtgctcaatgatgagtggtatcaaagcttccacgcatttacgcgtgtctttggagtgggggtgaagacagcagacaagtggtaccgtatgggtctgcgcaccctcgaggatgttcgttccagcaagaccctgaagttgaccccgatgcagaaagtaggtctgctgtattatgaagatcttgctcgcggcgttacgcgtgccgaagctgacgcgatttggctgctggttcaggatgcagtcgcaactttcgacccggatgcgatcgtggagattgtcggtggatttcgtcgtgggaaacctcagggtcacgacgttgatctgcttatcagttctccgggagctgagaaagagcaagaagaccaactcctgcagaaagtgatgaatctgtggaagaaacaagggttgttgctgtgtggtcgtctggaatggagtcagtgggaagatgggggttcgccttccggtaaggctgatgagggtgacgcggaggcgtcgtgctttctgatcctcaaactttatgatcatctggtgcgtaaaagtaaacgcaatatgccgactggttcgaacatgggcgagtccaaaccgtggaaagcaattaaagtagatctgctgcgttgcccctatggcagttttgcgtttgcgatgttgcagtggaccggaagccgcatgttccgtcgtgatctgcgctggtacgccctggaagagaagaacatgatgctggacaatcattcgctgtatgacatgacccgcggtatcttcctccctgctaaatcggaagaggaaattttcgaacatctggggcttgaatacctggaaccgttcgaacgtaacgca

SEQ ID NO: 4064 - protein, 529 aa, synthetic construct
  REGION 1..529: note = Variant of terminal deoxynucleotidyltransferase
MHHHHHHGGSGSHGIRTIDSDFGKKQQKKGDNHDSSATYEIKFHEFVLFILEEKMGATRRTFLTDLARKKGFRVENELTDEVTHIVAENLSRSEVLAWLKEHKMEKTKQFELLDISWLIESMKVGKPVDTKGKYQLAESVEVSANPDPTEGRVNELPPTMKTVSPYACQRGTTLNNRNQRFTDSLEILRENYELKGNDDTALEFRRAISVLKSLPFEVRSLKDTEGLPWISDEVKGIMEEIIEVGESREVQAVLNDEWYQSFHAFTRVFGVGVKTADKWYRMGLRTLEDVRSSKTLKLTPMQKVGLLYYEDLARGVTRAEADAIWLLVQDAVATFDPDAIVEIVGGFRRGKPQGHDVDLLISSPGAEKEQEDQLLQKVMNLWKKQGLLLCGRLEWSQWEDGGSPSGKADEGDAEASCFLILKLYDHLVRKSKRNMPTGSNMGESKPWKAIKVDLLRCPYGSFAFAMLQWTGSRMFRRDLRWYALEEKNMMLDNHSLYDMTRGIFLPAKSEEEIFEHLGLEYLEPFERNA

SEQ ID NO: 4065 - DNA, 1587 bp, synthetic construct
  misc_feature 1..1587: note = Variant of terminal deoxynucleotidyltransferase
  source 1..1587: mol_type = other DNA
atgcaccatcatcatcatcatggcggtagcggcagccacggcattcgtaccatcgattcggacttcgggaagaaacagcagaaaaaaggcgataaccacgatagttccgccacttatgaaatcaaatttcacgagtttgtgctgttcattctcgaagaaaaaatgggtgcgacgcgtcgtacttttctgacagatttagcccgcaagaaagggttccgcgtcgagaatgaactgaccgacgaagttacccacatcgtggcagaaaatctgtcacgctctgaagtattggcttggctgaaagaacacaagatggagaagaccaagcaattcgaactgctggatattagctggcttatcgaaagcatgaaagttggtaaaccggtggacaccaaggggaaataccagttggcggaatcggttgaggtgagtgcgaacccagatccgacagaaggtcgtgtaaacgagctgcctcctactatgaaaaccgtttctccgtatgcgtgtcaacgccgcaccaccctgaacaaccgtaatcctcgttttacggactcgctggagattcttcgtgaaaattacgagctgaaaggcaacgacgatactgcgctggaatttcgtcgtgctatctccgtgctgaaaagccttccgtttgaggtacgtagcctgaaagacacggaaggattgccctggatcagtgatgaagtcaaagggattatggaagaaatcatcgaagtcggggagtcgcgtgaagtgcaggccgtgctcaatgatgagtggtatcaaagcttccacgcatttacgcgtgtctttggagtgggggtgaagacagcagacaagtggtaccgtatgggtctgcgcaccctcgaggatgttcgttccagcaagaccctgaagttgaccccgatgcagaaagtaggtctgctgtattatgaagatcttgctcgcggcgttacgcgtgccgaagctgacgcgatttggctgctggttcaggatgcagtcgcaactttcgacccggatgcgatcgtggagattgtcggtggatttcgtcgtgggaaacctcagggtcacgacgttgatctgcttatcagttctccgggagctgagaaagagcaagaagaccaactcctgcagaaagtgatgaatctgtggaagaaacaagggttgttgctgtgtggtcgtctggaatggagtcagtgggaagatgggggttcgccttccggtaaggctgatgagggtgacgcggaggcgtcgtgctttctgatcctcaaactttatgatcatctggtgcgtaaaagtaaacgcaatatgccgactggttcgaacatgggcgagtccaaaccgtggaaagcaattaaagtagatctgctgcgttgcccctatggcagttttgcgtttgcgatgttgcagtggaccggaagccgcatgttccgtcgtgatctgcgctggtacgccctggaagagaagaacatgatgctggacaatcattcgctgtatgacatgacccgcggtatcttcctccctgctaaatcggaagaggaaattttcgaacatctggggcttgaatacctggaaccgttcgaacgtaacgca

SEQ ID NO: 4066 - protein, 529 aa, synthetic construct
  REGION 1..529: note = Variant of terminal deoxynucleotidyltransferase
MHHHHHHGGSGSHGIRTIDSDFGKKQQKKGDNHDSSATYEIKFHEFVLFILEEKMGATRRTFLTDLARKKGFRVENELTDEVTHIVAENLSRSEVLAWLKEHKMEKTKQFELLDISWLIESMKVGKPVDTKGKYQLAESVEVSANPDPTEGRVNELPPTMKTVSPYACQRRTTLNNRNPRFTDSLEILRENYELKGNDDTALEFRRAISVLKSLPFEVRSLKDTEGLPWISDEVKGIMEEIIEVGESREVQAVLNDEWYQSFHAFTRVFGVGVKTADKWYRMGLRTLEDVRSSKTLKLTPMQKVGLLYYEDLARGVTRAEADAIWLLVQDAVATFDPDAIVEIVGGFRRGKPQGHDVDLLISSPGAEKEQEDQLLQKVMNLWKKQGLLLCGRLEWSQWEDGGSPSGKADEGDAEASCFLILKLYDHLVRKSKRNMPTGSNMGESKPWKAIKVDLLRCPYGSFAFAMLQWTGSRMFRRDLRWYALEEKNMMLDNHSLYDMTRGIFLPAKSEEEIFEHLGLEYLEPFERNA

SEQ ID NO: 4067 - DNA, 1587 bp, synthetic construct
  misc_feature 1..1587: note = Variant of terminal deoxynucleotidyltransferase
  source 1..1587: mol_type = other DNA
atgcaccatcatcatcatcatggcggtagcggcagccacggcattcgtaccatcgattcggacttcgggaagaaacagcagaaaaaaggcgataaccacgatagttccgccacttatgaaatcaaatttcacgagtttgtgctgttcattctcgaagaaaaaatgggtgcgacgcgtcgtacttttctgacagatttagcccgcaagaaagggttccgcgtcgagaatgaactgaccgacgaagttacccacatcgtggcagaaaatctgtcacgctctgaagtattggcttggctgaaagaacacaagatggagaagaccaagcaattcgaactgctggatattagctggcttatcgaaagcatgaaagttggtaaaccggtggacaccaaggggaaataccagttggcggaatcggttgaggtgagtgcgaacccagatccgacagaaggtcgtgtaaacgagctgcctcctactatgaaaaccgtttctccgtatgcgtgtcaacgccgcaccaccctgaacaaccgtaatcaacgttttacggactcgctggagattcttcgtgaaaattacgagctgaaaggcaacgacgatactgcgctggaatttcgtcgtgctatctccgtgctgaaaagccttccgtttgaggtacgtagcctgaaagacacggaaggattgccctggatcagtgatgaagtcaaagggattatggaagaaatcatcgaagtcggggagtcgcgtgaagtgcaggccgtgctcaatgatgagtggtatcaaagcttccacgcatttacgcgtgtctttggagtgggggtgaagacagcagacaagtggtaccgtatgggtctgcgcaccctcgaggatgttcgttccagcaagaccctgaagttgaccccgatgcagaaagtaggtctgctgtattatgaagatcttgctcgcggcgttacgcgtgccgaagctgacgcgatttggctgctggttcaggatgcagtcgcaactttcgacccggatgcgatcgtggagattgtcggtggatttcgtcgtgggaaacctcagggtcacgacgttgatctgcttatcagttctccgggagctgagaaagagcaagaagaccaactcctgcagaaagtgatgaatctgtggaagaaacaagggttgttgctgtgtggtcgtctggaatggagtcagtgggaagatgggggttcgccttccggtaaggctgatgagggtgacgcggaggcgtcgtgctttctgatcctcaaactttatgatcatctggtgcgtaaaagtaaacgcaatatgccgactggttcgaacatgggcgagtccaaaccgtggaaagcaattaaagtagatctgctgcgttgcccctatggcagttttgcgtttgcgatgttgcagtggaccggaagccgcatgttccgtcgtgatctgcgctggtacgccctggaagagaagaacatgaggctggacaatcattcgctgtatgacatgacccgcggtatcttcctccctgctaaatcggaagaggaaattttcgaacatctggggcttgaatacctggaaccgttcgaacgtaacgca

SEQ ID NO: 4068 - protein, 529 aa, synthetic construct
  REGION 1..529: note = Variant of terminal deoxynucleotidyltransferase
MHHHHHHGGSGSHGIRTIDSDFGKKQQKKGDNHDSSATYEIKFHEFVLFILEEKMGATRRTFLTDLARKKGFRVENELTDEVTHIVAENLSRSEVLAWLKEHKMEKTKQFELLDISWLIESMKVGKPVDTKGKYQLAESVEVSANPDPTEGRVNELPPTMKTVSPYACQRRTTLNNRNQRFTDSLEILRENYELKGNDDTALEFRRAISVLKSLPFEVRSLKDTEGLPWISDEVKGIMEEIIEVGESREVQAVLNDEWYQSFHAFTRVFGVGVKTADKWYRMGLRTLEDVRSSKTLKLTPMQKVGLLYYEDLARGVTRAEADAIWLLVQDAVATFDPDAIVEIVGGFRRGKPQGHDVDLLISSPGAEKEQEDQLLQKVMNLWKKQGLLLCGRLEWSQWEDGGSPSGKADEGDAEASCFLILKLYDHLVRKSKRNMPTGSNMGESKPWKAIKVDLLRCPYGSFAFAMLQWTGSRMFRRDLRWYALEEKNMRLDNHSLYDMTRGIFLPAKSEEEIFEHLGLEYLEPFERNA

SEQ ID NO: 4069 - DNA, 1587 bp, synthetic construct
  misc_feature 1..1587: note = Variant of terminal deoxynucleotidyltransferase
  source 1..1587: mol_type = other DNA
atgcaccatcatcatcatcatggcggtagcggcagccacggcattcgtaccatcgattcggacttcgggaagaaacagcagaaaaaaggcgataaccacgatagttccgccacttatgaaatcaaatttcacgagtttgtgctgttcattctcgaagaaaaaatgggtgcgacgcgtcgtacttttctgacagatttagcccgcaagaaagggttccgcgtcgagaatgaactgaccgacgaagttacccacatcgtggcagaaaatctgtcacgctctgaagtattggcttggctgaaagaacacaagatggagaagaccaagcaattcgaactgctggatattagctggcttatcgaaagcatgaaagttggtaaaccggtggacaccaaggggaaataccagttggcggaatcggttgaggtgagtgcgaacccagatccgacagaaggtcgtgtaaacgagctgcctcctactatgaaaaccgtttctccgtatgcgtgtacgcgccgcaccaccctgaacaaccgtaatcaacgttttacggactcgctggagattcttcgtgaaaattacgagctgaaaggcaacgacgatactgcgctggaatttcgtcgtgctatctccgtgctgaaaagccttccgtttgaggtacgtagcctgaaagacacggaaggattgccctggatcagtgatgaagtcaaagggattatggaagaaatcatcgaagtcggggagtcgcgtgaagtgcaggccgtgctcaatgatgagtggtatcaaagcttccacgcatttacgcgtgtctttggagtgggggtgaagacagcagacaagtggtaccgtatgggtctgcgcaccctcgaggatgttcgttccagcaagaccctgaagttgaccccgatgcagaaagtaggtctgctgtattatgaagatcttgctcgcggcgttacgcgtgccgaagctgacgcgatttggctgctggttcaggatgcagtcgcaactttcgacccggatgcgatcgtggagattgtcggtggatttcgtcgtgggaaacctcagggtcacgacgttgatctgcttatcagttctccgggagctgagaaagagcaagaagaccaactcctgcagaaagtgatgaatctgtggaagaaacaagggttgttgctgtgtggtcgtctggaatggagtcagtgggaagatgggggttcgccttccggtaaggctgatgagggtgacgcggaggcgtcgtgctttctgatcctcaaactttatgatcatctggtgcgtaaaagtaaacgcaatatgccgactggttcgaacatgggcgagtccaaaccgtggaaagcaattaaagtagatctgctgcgttgcccctatggcagttttgcgtttgcgatgttgcagtggaccggaagccgcatgttccgtcgtgatctgcgctggtacgccctggaagagaagaacatgatgctggacaatcattcgctgtatgacatgacccgcggtatcttcctccctgctaaatcggaagaggaaattttcgaacatctggggcttgaatacctggaaccgttcgaacgtaacgca

SEQ ID NO: 4070 - protein, 529 aa, synthetic construct
  REGION 1..529: note = Variant of terminal deoxynucleotidyltransferase
MHHHHHHGGSGSHGIRTIDSDFGKKQQKKGDNHDSSATYEIKFHEFVLFILEEKMGATRRTFLTDLARKKGFRVENELTDEVTHIVAENLSRSEVLAWLKEHKMEKTKQFELLDISWLIESMKVGKPVDTKGKYQLAESVEVSANPDPTEGRVNELPPTMKTVSPYACTRRTTLNNRNQRFTDSLEILRENYELKGNDDTALEFRRAISVLKSLPFEVRSLKDTEGLPWISDEVKGIMEEIIEVGESREVQAVLNDEWYQSFHAFTRVFGVGVKTADKWYRMGLRTLEDVRSSKTLKLTPMQKVGLLYYEDLARGVTRAEADAIWLLVQDAVATFDPDAIVEIVGGFRRGKPQGHDVDLLISSPGAEKEQEDQLLQKVMNLWKKQGLLLCGRLEWSQWEDGGSPSGKADEGDAEASCFLILKLYDHLVRKSKRNMPTGSNMGESKPWKAIKVDLLRCPYGSFAFAMLQWTGSRMFRRDLRWYALEEKNMMLDNHSLYDMTRGIFLPAKSEEEIFEHLGLEYLEPFERNA

SEQ ID NO: 4071 - DNA, 1587 bp, synthetic construct
  misc_feature 1..1587: note = Variant of terminal deoxynucleotidyltransferase
  source 1..1587: mol_type = other DNA
atgcaccatcatcatcatcatggcggtagcggcagccacggcattcgtaccatcgattcggacttcgggaagaaacagcagaaaaaaggcgataaccacgatagttccgccacttatgaaatcaaatttcacgagtttgtgctgttcattctcgaagaaaaaatgggtgcgacgcgtcgtacttttctgacagatttagcccgcaagaaagggttccgcgtcgagaatgaactgaccgacgaagttacccacatcgtggcagaaaatctgtcacgctctgaagtattggcttggctgaaagaacacaagatggagaagaccaagcaattcgaactgctggatattagctggcttatcgaaagcatgaaagttggtaaaccggtggacaccaaggggaaataccagttggcggaatcggttgaggtgagtgcgaacccagatccgacagaaggtcgtgtaaacgagctgcctcctactatgaaaaccgtttctccgtatgcgtgtcaacgccgcaccaccctgaacaaccgtaatcaacgttttacggactcgctggagattcttcgtgaaaattacgagctgaaaggcaacgacgatactgcgctggaatttcgtcgtgctatctccgtgctgaaaagccttccgtttgaggtacgtagcctgaaagacacggaaggattgccctggatcagtgatgaagtcaaagggattatggaagaaatcatcgaagtcggggagtcgcgtgaagtgcaggccgtgctcaatgatgagtggtatcaaagcttccacgcatttacgcgtgtctttggagtgggggtgaagacagcagacaagtggtaccgtatgggtctgcgcaccctcgaggatgttcgttccagcaagaccctgaagttgaccccgatgcagaaagtaggtctgctgtattatgaagatcttgctcgcggcgttacgcgtgccgaagctgacgcgatttggctgctggttcaggatgcagtcgcaactttcgacccggatgcgatcgtggagattgtcggtggatttcgtcgtgggaaacctcagggtcacgacgttgatctgcttatcagttctccgggagctgagaaagagcaagaagaccaactcctgcagaaagtgatgaatctgtggaagaaacaagggttgttgctgtgtggtcgtctggaatggagtcagtgggaagatgggggtacgccttccggtaaggctgatgagggtgacgcggaggcgtcgtgctttctgatcctcaaactttatgatcatctggtgcgtaaaagtaaacgcaatatgccgactggttcgaacatgggcgagtccaaaccgtggaaagcaattaaagtagatctgctgcgttgcccctatggcagttttgcgtttgcgatgttgcagtggaccggaagccgcatgttccgtcgtgatctgcgctggtacgccctggaagagaagaacatgatgctggacaatcattcgctgtatgacatgacccgcggtatcttcctccctgctaaatcggaagaggaaattttcgaacatctggggcttgaatacctggaaccgttcgaacgtaacgca

SEQ ID NO: 4072 - protein, 529 aa, synthetic construct
  REGION 1..529: note = Variant of terminal deoxynucleotidyltransferase
MHHHHHHGGSGSHGIRTIDSDFGKKQQKKGDNHDSSATYEIKFHEFVLFILEEKMGATRRTFLTDLARKKGFRVENELTDEVTHIVAENLSRSEVLAWLKEHKMEKTKQFELLDISWLIESMKVGKPVDTKGKYQLAESVEVSANPDPTEGRVNELPPTMKTVSPYACQRRTTLNNRNQRFTDSLEILRENYELKGNDDTALEFRRAISVLKSLPFEVRSLKDTEGLPWISDEVKGIMEEIIEVGESREVQAVLNDEWYQSFHAFTRVFGVGVKTADKWYRMGLRTLEDVRSSKTLKLTPMQKVGLLYYEDLARGVTRAEADAIWLLVQDAVATFDPDAIVEIVGGFRRGKPQGHDVDLLISSPGAEKEQEDQLLQKVMNLWKKQGLLLCGRLEWSQWEDGGTPSGKADEGDAEASCFLILKLYDHLVRKSKRNMPTGSNMGESKPWKAIKVDLLRCPYGSFAFAMLQWTGSRMFRRDLRWYALEEKNMMLDNHSLYDMTRGIFLPAKSEEEIFEHLGLEYLEPFERNA

SEQ ID NO: 4073 - DNA, 1587 bp, synthetic construct
  misc_feature 1..1587: note = Variant of terminal deoxynucleotidyltransferase
  source 1..1587: mol_type = other DNA
atgcaccatcatcatcatcatggcggtagcggcagccacggcattcgtaccatcgattcggacttcgggaagaaacagcagaaaaaaggcgataaccacgatagttccgccacttatgaaatcaaatttcacgagtttgtgctgttcattctcgaagaaaaaatgggtgcgacgcgtcgtacttttctgacagatttagcccgcaagaaagggttccgcgtcgagaatgaactgaccgacgaagttacccacatcgtggcagaaaatctgtcacgctctgaagtattggcttggctgaaagaacacaagatggagaagaccaagcaattcgaactgctggatattagctggcttatcgaaagcatgaaagttggtaaaccggtggacaccaaggggaaataccagttggcggaatcggttgaggtgagtgcgaacccagatccgacagaaggtcgtgtaaacgagctgcctcctactatgaaaaccgtttctccgtatgcgtgtcaacgccgcaccaccctgaacaaccgtaatcaacgttttacggactcgctggagattcttcgtgaaaattacgagctgaaaggcaacgacgatactgcgctggaatttcgtcgtgctatctccgtgctgaaaagccttccgtttgaggtacgtagcctgaaagacacggaaggattgccctggatcagtgatgaagtcaaagggattatggaagaaatcatcgaagtcggggagtcgcgtgaagtgcaggccgtgctcaatgatgagtggtatcaaagcttccacgcatttacgcgtgtctttggagtgggggtgaagacagcagacaagtggtaccgtatgggtctgcgcaccctcgaggatgttcgttccagcaagaccctgaagttgaccccgatgcagaaagtaggtctgctgtattatgaagatcttgctcgcggcgttacgcgtgccgaagctgacgcgatttggctgctggttcaggatgcagtcgcaactttcgacccggatgcgatcgtggagattgtcggtggatttcgtcgtgggaaacctcagggtcacgacgttgatctgcttatcagttctccgggagctgagaaagagcaagaagaccaactcctgcagaaagtgatgaatctgtggaagaaacaagggttgttgctgtgtggtcgtctggaatggagtcagtgggaagatgggggttcgccttccggtaaggctgatgagggtgacgcggaggcgtcgtgctttctgatcctcaaactttatgatcatctggtgcgtaaaagtaaacgcaatatgccgactggttcgaacatgggcgagtccaaaccgtggaaagcaattaaagtagatctgctgcgttgcccctatggcagttttgcgtttgcgatgttgcagtggaccggaagccgcatgttccgtcgtgatctgcgctggtacgccctggaagagaagaacatggagctggacaatcattcgctgtatgacatgacccgcggtatcttcctccctgctaaatcggaagaggaaattttcgaacatctggggcttgaatacctggaaccgttcgaacgtaacgca

SEQ ID NO: 4074 - protein, 529 aa, synthetic construct
  REGION 1..529: note = Variant of terminal deoxynucleotidyltransferase
MHHHHHHGGSGSHGIRTIDSDFGKKQQKKGDNHDSSATYEIKFHEFVLFILEEKMGATRRTFLTDLARKKGFRVENELTDEVTHIVAENLSRSEVLAWLKEHKMEKTKQFELLDISWLIESMKVGKPVDTKGKYQLAESVEVSANPDPTEGRVNELPPTMKTVSPYACQRRTTLNNRNQRFTDSLEILRENYELKGNDDTALEFRRAISVLKSLPFEVRSLKDTEGLPWISDEVKGIMEEIIEVGESREVQAVLNDEWYQSFHAFTRVFGVGVKTADKWYRMGLRTLEDVRSSKTLKLTPMQKVGLLYYEDLARGVTRAEADAIWLLVQDAVATFDPDAIVEIVGGFRRGKPQGHDVDLLISSPGAEKEQEDQLLQKVMNLWKKQGLLLCGRLEWSQWEDGGSPSGKADEGDAEASCFLILKLYDHLVRKSKRNMPTGSNMGESKPWKAIKVDLLRCPYGSFAFAMLQWTGSRMFRRDLRWYALEEKNMELDNHSLYDMTRGIFLPAKSEEEIFEHLGLEYLEPFERNA

SEQ ID NO: 4075 - DNA, 1587 bp, synthetic construct
  misc_feature 1..1587: note = Variant of terminal deoxynucleotidyltransferase
  source 1..1587: mol_type = other DNA
atgcaccatcatcatcatcatggcggtagcggcagccacggcattcgtaccatcgattcggacttcgggaagaaacagcagaaaaaaggcgataaccacgatagttccgccacttatgaaatcaaatttcacgagtttgtgctgttcattctcgaagaaaaaatgggtgcgacgcgtcgtacttttctgacagatttagcccgcaagaaagggttccgcgtcgagaatgaactgaccgacgaagttacccacatcgtggcagaaaatctgtcacgctctgaagtattggcttggctgaaagaacacaagatggagaagaccaagcaattcgaactgctggatattagctggcttatcgaaagcatgaaagttggtaaaccggtggacaccaaggggaaataccagttggcggaatcggttgaggtgagtgcgaacccagatccgacagaaggtcgtgtaaacgagctgcctcctactatgaaaaccgtttctccgtatgcgtgtcaacgccgcaccaccctgaacaaccgtaatcaacgttttacggactcgctggagattcttcgtgaaaatactgagctgaaaggcaacgatgatactgcgctggaatttcgtcgtgctatctccgtgctgaaaagccttccgtttgaggtacgtagcctgaaagacacggaaggattgccctggatcagtgatgaagtcaaagggattatggaagaaatcatcgaagtcggggagtcgcgtgaagtgcaggccgtgctcaatgatgagtggtatcaaagcttccacgcatttacgcgtgtctttggagtgggggtgaagacagcagacaagtggtaccgtatgggtctgcgcaccctcgaggatgttcgttccagcaagaccctgaagttgaccccgatgcagaaagtaggtctgctgtattatgaagatcttgctcgcggcgttacgcgtgccgaagctgacgcgatttggctgctggttcaggatgcagtcgcaactttcgacccggatgcgatcgtggagattgtcggtggatttcgtcgtgggaaacctcagggtcacgacgttgatctgcttatcagttctccgggagctgagaaagagcaagaagaccaactcctgcagaaagtgatgaatctgtggaagaaacaagggttgttgctgtgtggtcgtctggaatggagtcagtgggaagatgggggttcgccttccggtaaggctgatgagggtgacgcggaggcgtcgtgctttctgatcctcaaactttatgatcatctggtgcgtaaaagtaaacgcaatatgccgactggttcgaacatgggcgagtccaaaccgtggaaagcaattaaagtagatctgctgcgttgcccctatggcagttttgcgtttgcgatgttgcagtggaccggaagccgcatgttccgtcgtgatctgcgctggtacgccctggaagagaagaacatgatgctggacaatcattcgctgtatgacatgacccgcggtatcttcctccctgctaaatcggaagaggaaattttcgaacatctggggcttgaatacctggaaccgttcgaacgtaacgca

SEQ ID NO: 4076 - protein, 529 aa, synthetic construct
  REGION 1..529: note = Variant of terminal deoxynucleotidyltransferase
MHHHHHHGGSGSHGIRTIDSDFGKKQQKKGDNHDSSATYEIKFHEFVLFILEEKMGATRRTFLTDLARKKGFRVENELTDEVTHIVAENLSRSEVLAWLKEHKMEKTKQFELLDISWLIESMKVGKPVDTKGKYQLAESVEVSANPDPTEGRVNELPPTMKTVSPYACQRRTTLNNRNQRFTDSLEILRENTELKGNDDTALEFRRAISVLKSLPFEVRSLKDTEGLPWISDEVKGIMEEIIEVGESREVQAVLNDEWYQSFHAFTRVFGVGVKTADKWYRMGLRTLEDVRSSKTLKLTPMQKVGLLYYEDLARGVTRAEADAIWLLVQDAVATFDPDAIVEIVGGFRRGKPQGHDVDLLISSPGAEKEQEDQLLQKVMNLWKKQGLLLCGRLEWSQWEDGGSPSGKADEGDAEASCFLILKLYDHLVRKSKRNMPTGSNMGESKPWKAIKVDLLRCPYGSFAFAMLQWTGSRMFRRDLRWYALEEKNMMLDNHSLYDMTRGIFLPAKSEEEIFEHLGLEYLEPFERNA

SEQ ID NO: 4077 - DNA, 1587 bp, synthetic construct
  misc_feature 1..1587: note = Variant of terminal deoxynucleotidyltransferase
  source 1..1587: mol_type = other DNA
atgcaccatcatcatcatcatggcggtagcggcagccacggcattcgtaccatcgattcggacttcgggaagaaacagcagaaaaaaggcgataaccacgatagttccgccacttatgaaatcaaatttcacgagtttgtgctgttcattctcgaagaaaaaatgggtgcgacgcgtcgtacttttctgacagatttagcccgcaagaaagggttccgcgtcgagaatgaactgaccgacgaagttacccacatcgtggcagaaaatctgtcacgctctgaagtattggcttggctgaaagaacacaagatggagaagaccaagcaattcgaactgctggatattagctggcttatcgaaagcatgaaagttggtaaaccggtggacaccaaggggaaataccagttggcggaatcggttgaggtgagtgcgaacccagatccgacagaaggtcgtgtaaacgagctgcctcctactatgaaaaccgtttctccgtatgcgtgtcaacgccgcaccaccctgaacaaccgtaatcaacgttttacggactcgctggagattcttcgtgaaaattacgagctgaaaggcaacgatgatactgcgctggaagttcgtcgtgctatctccgtgctgaaaagccttccgtttgaggtacgtagcctgaaagacacggaaggattgccctggatcagtgatgaagtcaaagggattatggaagaaatcatcgaagtcggggagtcgcgtgaagtgcaggccgtgctcaatgatgagtggtatcaaagcttccacgcatttacgcgtgtctttggagtgggggtgaagacagcagacaagtggtaccgtatgggtctgcgcaccctcgaggatgttcgttccagcaagaccctgaagttgaccccgatgcagaaagtaggtctgctgtattatgaagatcttgctcgcggcgttacgcgtgccgaagctgacgcgatttggctgctggttcaggatgcagtcgcaactttcgacccggatgcgatcgtggagattgtcggtggatttcgtcgtgggaaacctcagggtcacgacgttgatctgcttatcagttctccgggagctgagaaagagcaagaagaccaactcctgcagaaagtgatgaatctgtggaagaaacaagggttgttgctgtgtggtcgtctggaatggagtcagtgggaagatgggggttcgccttccggtaaggctgatgagggtgacgcggaggcgtcgtgctttctgatcctcaaactttatgatcatctggtgcgtaaaagtaaacgcaatatgccgactggttcgaacatgggcgagtccaaaccgtggaaagcaattaaagtagatctgctgcgttgcccctatggcagttttgcgtttgcgatgttgcagtggaccggaagccgcatgttccgtcgtgatctgcgctggtacgccctggaagagaagaacatgatgctggacaatcattcgctgtatgacatgacccgcggtatcttcctccctgctaaatcggaagaggaaattttcgaacatctggggcttgaatacctggaaccgttcgaacgtaacgca

SEQ ID NO: 4078 - protein, 529 aa, synthetic construct
  REGION 1..529: note = Variant of terminal deoxynucleotidyltransferase
MHHHHHHGGSGSHGIRTIDSDFGKKQQKKGDNHDSSATYEIKFHEFVLFILEEKMGATRRTFLTDLARKKGFRVENELTDEVTHIVAENLSRSEVLAWLKEHKMEKTKQFELLDISWLIESMKVGKPVDTKGKYQLAESVEVSANPDPTEGRVNELPPTMKTVSPYACQRRTTLNNRNQRFTDSLEILRENYELKGNDDTALEVRRAISVLKSLPFEVRSLKDTEGLPWISDEVKGIMEEIIEVGESREVQAVLNDEWYQSFHAFTRVFGVGVKTADKWYRMGLRTLEDVRSSKTLKLTPMQKVGLLYYEDLARGVTRAEADAIWLLVQDAVATFDPDAIVEIVGGFRRGKPQGHDVDLLISSPGAEKEQEDQLLQKVMNLWKKQGLLLCGRLEWSQWEDGGSPSGKADEGDAEASCFLILKLYDHLVRKSKRNMPTGSNMGESKPWKAIKVDLLRCPYGSFAFAMLQWTGSRMFRRDLRWYALEEKNMMLDNHSLYDMTRGIFLPAKSEEEIFEHLGLEYLEPFERNA

SEQ ID NO: 4079 - DNA, 1587 bp, synthetic construct
  misc_feature 1..1587: note = Variant of terminal deoxynucleotidyltransferase
  source 1..1587: mol_type = other DNA
atgcaccatcatcatcatcatggcggtagcggcagccacggcattcgtaccatcgattcggacttcgggaagaaacagcagaaaaaaggcgataaccacgatagttccgccacttatgaaatcaaatttcacgagtttgtgctgttcattctcgaagaaaaaatgggtgcgacgcgtcgtacttttctgacagatttagcccgcaagaaagggttccgcgtcgagaatgaactgaccgacgaagttacccacatcgtggcagaaaatctgtcacgctctgaagtattggcttggctgaaagaacacaagatggagaagaccaagcaattcgaactgctggatattagctggcttatcgaaagcatgaaagttggtaaaccggtggacaccaaggggaaataccagttggcggaatcggttgaggtgagtgcgaacccagatccgacagaaggtcgtgtaaacgagctgcctcctactatgaaaaccgtttctccgtatgcgtgtcaacgccgcaccaccctgaacaaccgtaatcaacgttttacggactcgctggagattcttcgtgaaaattacgagctgaaaggcaacgacgatactgcgctggaatttcgtcgtgctatctccgtgctgaaaagccttccgtttgaggtacgtagcctgaaagacacggaaggattgccctggatcagtgatgaagtcaaagggattatggaagaaatcatcgaagtcggggagtcgcgtgaagtgcaggccgtgctcaatgatgagtggtatcaaagcttccacgcatttacgcgtgtctttggagtgggggtgaagacagcagacaagtggtaccgtatgggtctgcgcaccctcgaggatgttcgttccagcaagaccctgaagttgaccccgatgcagaaagtaggtctgctgtattatgaagatcttgctcgcggcgttacgcgtgccgaagctgacgcgatttggctgctggttcaggatgcagtcgcaactttcgacccggatgcgatcgtggagattgtcggtggatttcgtcgtgggaaacctcagggtcacgacgttgatctgcttatcagttctccgggagctgagaaagagcaagaagaccaactcctgcagaaagtgatgaatctgtggaagaaacaagggttgttgctgtgtggtcgtctggaatggagtcagtgggaagatgggggttcgccttccggtaaggctgatgagggtgacgcggaggcgtcgtgctttctgatcctcaaactttatgatcatctggtgcgtaaaagtaaacgcaatatgccgactggttcgaacatgggcgagtccaaaccgtggaaagcaattaaagtagatctgctgcgttgcccctatggcagttttgcgtttgcgatgttgcagtggaccggaagccgcatgttccgtcgtgatctgcgctggtacgccctggaagagaagaacatgatgctggacaatcattgtctgtatgacatgacccgcggtatcttcctccctgctaaatcggaagaggaaattttcgaacatctggggcttgaatacctggaaccgttcgaacgtaacgca

SEQ ID NO: 4080 - protein, 529 aa, synthetic construct
  REGION 1..529: note = Variant of terminal deoxynucleotidyltransferase
MHHHHHHGGSGSHGIRTIDSDFGKKQQKKGDNHDSSATYEIKFHEFVLFILEEKMGATRRTFLTDLARKKGFRVENELTDEVTHIVAENLSRSEVLAWLKEHKMEKTKQFELLDISWLIESMKVGKPVDTKGKYQLAESVEVSANPDPTEGRVNELPPTMKTVSPYACQRRTTLNNRNQRFTDSLEILRENYELKGNDDTALEFRRAISVLKSLPFEVRSLKDTEGLPWISDEVKGIMEEIIEVGESREVQAVLNDEWYQSFHAFTRVFGVGVKTADKWYRMGLRTLEDVRSSKTLKLTPMQKVGLLYYEDLARGVTRAEADAIWLLVQDAVATFDPDAIVEIVGGFRRGKPQGHDVDLLISSPGAEKEQEDQLLQKVMNLWKKQGLLLCGRLEWSQWEDGGSPSGKADEGDAEASCFLILKLYDHLVRKSKRNMPTGSNMGESKPWKAIKVDLLRCPYGSFAFAMLQWTGSRMFRRDLRWYALEEKNMMLDNHCLYDMTRGIFLPAKSEEEIFEHLGLEYLEPFERNA

SEQ ID NO: 4081 - DNA, 1587 bp, synthetic construct
  misc_feature 1..1587: note = Variant of terminal deoxynucleotidyltransferase
  source 1..1587: mol_type = other DNA
atgcaccatcatcatcatcatggcggtagcggcagccacggcattcgtaccatcgattcggacttcgggaagaaacagcagaaaaaaggcgataaccacgatagttccgccacttatgaaatcaaatttcacgagtttgtgctgttcattctcgaagaaaaaatgggtgcgacgcgtcgtacttttctgacagatttagcccgcaagaaagggttccgcgtcgagaatgaactgaccgacgaagttacccacatcgtggcagaaaatctgtcacgctctgaagtattggcttggctgaaagaacacaagatggagaagaccaagcaattcgaactgctggatattagctggcttatcgaaagcatgaaagttggtaaaccggtggacaccaaggggaaataccagttggcggaatcggttgaggtgagtgcgaacccagatccgacagaaggtcgtgtaaacgagctgcctcctactatgaaaaccgtttctccgtatgcgtgtcaacgccgcaccaccctgaacaaccgtaatcaacgttttacggactcgctggagattcttcgtgaaaattacgagctgaaaggcaacgacgatactgcgctggaatttcgtcgtgctatctccgtgctgaaaagccttccgtttgaggtacgtagcctgaaagacacggaaggattgccctggatcagtgatgaagtcaaagggattatggaagaaatcatcgaagtcggggagtcgcgtgaagtgcaggccgtgctcaatgatgagtggtatcaaagcttccacgcatttacgcgtgtctttggagtgggggtgaagacagcagacaagtggtaccgtatgggtctgcgcaccctcgaggatgttcgttccagcaagagtctgaagttgaccccgatgcagaaagtaggtctgctgtattatgaagatcttgctcgcggcgttacgcgtgccgaagctgacgcgatttggctgctggttcaggatgcagtcgcaactttcgacccggatgcgatcgtggagattgtcggtggatttcgtcgtgggaaacctcagggtcacgacgttgatctgcttatcagttctccgggagctgagaaagagcaagaagaccaactcctgcagaaagtgatgaatctgtggaagaaacaagggttgttgctgtgtggtcgtctggaatggagtcagtgggaagatgggggttcgccttccggtaaggctgatgagggtgacgcggaggcgtcgtgctttctgatcctcaaactttatgatcatctggtgcgtaaaagtaaacgcaatatgccgactggttcgaacatgggcgagtccaaaccgtggaaagcaattaaagtagatctgctgcgttgcccctatggcagttttgcgtttgcgatgttgcagtggaccggaagccgcatgttccgtcgtgatctgcgctggtacgccctggaagagaagaacatgatgctggacaatcattcgctgtatgacatgacccgcggtatcttcctccctgctaaatcggaagaggaaattttcgaacatctggggcttgaatacctggaaccgttcgaacgtaacgca

SEQ ID NO: 4082 - protein, 529 aa, synthetic construct
  REGION 1..529: note = Variant of terminal deoxynucleotidyltransferase
MHHHHHHGGSGSHGIRTIDSDFGKKQQKKGDNHDSSATYEIKFHEFVLFILEEKMGATRRTFLTDLARKKGFRVENELTDEVTHIVAENLSRSEVLAWLKEHKMEKTKQFELLDISWLIESMKVGKPVDTKGKYQLAESVEVSANPDPTEGRVNELPPTMKTVSPYACQRRTTLNNRNQRFTDSLEILRENYELKGNDDTALEFRRAISVLKSLPFEVRSLKDTEGLPWISDEVKGIMEEIIEVGESREVQAVLNDEWYQSFHAFTRVFGVGVKTADKWYRMGLRTLEDVRSSKSLKLTPMQKVGLLYYEDLARGVTRAEADAIWLLVQDAVATFDPDAIVEIVGGFRRGKPQGHDVDLLISSPGAEKEQEDQLLQKVMNLWKKQGLLLCGRLEWSQWEDGGSPSGKADEGDAEASCFLILKLYDHLVRKSKRNMPTGSNMGESKPWKAIKVDLLRCPYGSFAFAMLQWTGSRMFRRDLRWYALEEKNMMLDNHSLYDMTRGIFLPAKSEEEIFEHLGLEYLEPFERNA

SEQ ID NO: 4083 - DNA, 1587 bp, synthetic construct
  misc_feature 1..1587: note = Variant of terminal deoxynucleotidyltransferase
  source 1..1587: mol_type = other DNA
atgcaccatcatcatcatcatggcggtagcggcagccacggcattcgtaccatcgattcggacttcgggaagaaacagcagaaaaaaggcgataaccacgatagttccgccacttatgaaatcaaatttcacgagtttgtgctgttcattctcgaagaaaaaatgggtgcgacgcgtcgtacttttctgacagatttagcccgcaagaaagggttccgcgtcgagaatgaactgaccgacgaagttacccacatcgtggcagaaaatctgtcacgctctgaagtattggcttggctgaaagaacacaagatggagaagaccaagcaattcgaactgctggatattagctggcttatcgaaagcatgaaagttggtaaaccggtggacaccaaggggaaataccagttggcggaatcggttgaggtgagtgcgaacccagatccgacagaaggtcgtgtaaacgagctgcctcctactatgaaaaccgtttctccgtatgcgtgtcaacgccgcaccaccctgaacaaccgtaatcaacgttttacggactcgctggagattcttcgtgaaaattacgagctgaaaggcaacgacgatactgcgctggaatttcgtcgtgctatctccgtgctgaaaagccttccgtttgaggtacgtagcctgaaagacacggaaggattgccctggatcagtgatgaagtcaaagggattatggaagaaatcatcgaagtcggggagtcgcgtgaagtgcaggccgtgctcaatgatgagtggtatcaaagcttccacgcatttacgcgtgtctttggagtgggggtgaagacagcagacaagtggtaccgtatgggtctgcgcaccctcgaggatgttcgttccagcaagaccctgaagttgaccccgatgcagaaagtaggtctgctgtattatgaagatcttgctcgcggcgttacgcgtgccgaagctgacgcgatttggctgctggttcaggatgcagtcgcaactttcgacccggatgcgatcgtggagattgtcggtggatttcgtcgtgggaaacctcagggtcacgacgttgatctgcttatcagttctccgggagctgagaaagagcaagaagaccaactcctgcagaaagtgatgaatctgtggaagaaacaagggttgttgctgtgtggtcgtctggaatggagtcagtgggaagatgggggtctgccttccggtaaggctgacgagggtgacgcggaggcgtcgtgctttctgatcctcaaactttatgatcatctggtgcgtaaaagtaaacgcaatatgccgactggttcgaacatgggcgagtccaaaccgtggaaagcaattaaagtagatctgctgcgttgcccctatggcagttttgcgtttgcgatgttgcagtggaccggaagccgcatgttccgtcgtgatctgcgctggtacgccctggaagagaagaacatgatgctggacaatcattcgctgtatgacatgacccgcggtatcttcctccctgctaaatcggaagaggaaattttcgaacatctggggcttgaatacctggaaccgttcgaacgtaacgca

SEQ ID NO: 4084 - protein, 529 aa, synthetic construct
  REGION 1..529: note = Variant of terminal deoxynucleotidyltransferase
MHHHHHHGGSGSHGIRTIDSDFGKKQQKKGDNHDSSATYEIKFHEFVLFILEEKMGATRRTFLTDLARKKGFRVENELTDEVTHIVAENLSRSEVLAWLKEHKMEKTKQFELLDISWLIESMKVGKPVDTKGKYQLAESVEVSANPDPTEGRVNELPPTMKTVSPYACQRRTTLNNRNQRFTDSLEILRENYELKGNDDTALEFRRAISVLKSLPFEVRSLKDTEGLPWISDEVKGIMEEIIEVGESREVQAVLNDEWYQSFHAFTRVFGVGVKTADKWYRMGLRTLEDVRSSKTLKLTPMQKVGLLYYEDLARGVTRAEADAIWLLVQDAVATFDPDAIVEIVGGFRRGKPQGHDVDLLISSPGAEKEQEDQLLQKVMNLWKKQGLLLCGRLEWSQWEDGGLPSGKADEGDAEASCFLILKLYDHLVRKSKRNMPTGSNMGESKPWKAIKVDLLRCPYGSFAFAMLQWTGSRMFRRDLRWYALEEKNMMLDNHSLYDMTRGIFLPAKSEEEIFEHLGLEYLEPFERNA

SEQ ID NO: 4085 - DNA, 1587 bp, synthetic construct
  misc_feature 1..1587: note = Variant of terminal deoxynucleotidyltransferase
  source 1..1587: mol_type = other DNA
atgcaccatcatcatcatcatggcggtagcggcagccacggcattcgtaccatcgattcggacttcgggaagaaacagcagaaaaaaggcgataaccacgatagttccgccacttatgaaatcaaatttcacgagtttgtgctgttcattctcgaagaaaaaatgggtgcgacgcgtcgtacttttctgacagatttagcccgcaagaaagggttccgcgtcgagaatgaactgaccgacgaagttacccacatcgtggcagaaaatctgtcacgctctgaagtattggcttggctgaaagaacacaagatggagaagaccaagcaattcgaactgctggatattagctggcttatcgaaagcatgaaagttggtaaaccggtggacaccaaggggaaataccagttggcggaatcggttgaggtgagtgcgaacccagatccgacagaaggtcgtgtaaacgagctgcctcctactatgaaaaccgtttctccgtatgcgtgtcaacgccgcaccaccctgaacaaccgtaatcaacgttttacggactcgctggagattcttcgtgaaaattacgagctgaaaggcaacgacgatactgcgctggaatttcgtcgtgctatctccgtgctgaaaagccttccgtttgaggtacgtagcctgaaagacacggaaggattgccctggatcagtgatgaagtcaaagggattatggaagaaatcatcgaagtcggggagtcgcgtgaagtgcaggccgtgctcaatgatgagtggtatcaaagcttccacgcatttacgcgtgtctttggagtgggggtgaagacagcagacaagtggtaccgtatgggtctgcgcaccctcgaggatgttcgttccagcaagaccctgaagttgaccccgatgcagaaagtaggtctgctgtattatgaagatcttgctcgcggcgttacgcgtgccgaagctgacgcgatttggctgctggttcaggatgcagtcgcaactttcgacccggatgcgatcgtggagattgtcggtggatttcgtcgtgggaaacctcagggtcacgacgttgatctgcttatcagttctccgggagctgagaaagagcaagaagaccaactcctgcagaaagtgatgaatctgtggaagaaacaagggttgttgctgtgtggtcgtctggaatggagtcagtgggaagatgggggttcgccttccggtaaggctgatgagggtgacgcggaggcgtcgtgctttctgatcctcaaactttatgatcatctggtgcgtaaaagtaaacgcaatatgccgactggttcgaacatgggcgagtccaaaccgtggaaagcaattaaagtagatctgctgcgttgcccctatggcagttttgcgtttgcgatgttgcagtggaccggaagccgcatgttccgtcgtgatctgcgctggtacgccctggaagagaagaacatgcttctggacaatcattcgctgtatgacatgacccgcggtatcttcctccctgctaaatcggaagaggaaattttcgaacatctggggcttgaatacctggaaccgttcgaacgtaacgca

SEQ ID NO: 4086 - protein, 529 aa, synthetic construct
  REGION 1..529: note = Variant of terminal deoxynucleotidyltransferase
MHHHHHHGGSGSHGIRTIDSDFGKKQQKKGDNHDSSATYEIKFHEFVLFILEEKMGATRRTFLTDLARKKGFRVENELTDEVTHIVAENLSRSEVLAWLKEHKMEKTKQFELLDISWLIESMKVGKPVDTKGKYQLAESVEVSANPDPTEGRVNELPPTMKTVSPYACQRRTTLNNRNQRFTDSLEILRENYELKGNDDTALEFRRAISVLKSLPFEVRSLKDTEGLPWISDEVKGIMEEIIEVGESREVQAVLNDEWYQSFHAFTRVFGVGVKTADKWYRMGLRTLEDVRSSKTLKLTPMQKVGLLYYEDLARGVTRAEADAIWLLVQDAVATFDPDAIVEIVGGFRRGKPQGHDVDLLISSPGAEKEQEDQLLQKVMNLWKKQGLLLCGRLEWSQWEDGGSPSGKADEGDAEASCFLILKLYDHLVRKSKRNMPTGSNMGESKPWKAIKVDLLRCPYGSFAFAMLQWTGSRMFRRDLRWYALEEKNMLLDNHSLYDMTRGIFLPAKSEEEIFEHLGLEYLEPFERNA

SEQ ID NO: 4087 - DNA, 1587 bp, synthetic construct
  misc_feature 1..1587: note = Variant of terminal deoxynucleotidyltransferase
  source 1..1587: mol_type = other DNA
atgcaccatcatcatcatcatggcggtagcggcagccacggcattcgtaccatcgattcggacttcgggaagaaacagcagaaaaaaggcgataaccacgatagttccgccacttatgaaatcaaatttcacgagtttgtgctgttcattctcgaagaaaaaatgggtgcgacgcgtcgtacttttctgacagatttagcccgcaagaaagggttccgcgtcgagaatgaactgaccgacgaagttacccacatcgtggcagaaaatctgtcacgctctgaagtattggcttggctgaaagaacacaagatggagaagaccaagcaattcgaactgctggatattagctggcttatcgaaagcatgaaagttggtaaaccggtggacaccaaggggaaataccagttggcggaatcggttgaggtgagtgcgaacccagatccgacagaaggtcgtgtaaacgagctgcctcctactatgaaaaccgtttctccgtatgcgtgtcaacgccgcaccaccctgaacaaccgtaatcaacgttttacggactcgctggagattcttcgtgaaaattacgagctgaaaggcaacgacgatactgcgctggaatttcgtcgtgctatctccgtgctgaaaagccttccgtttgaggtacgtagcctgaaagacacggaaggattgccctggatcagtgatgaagtcaaagggattatggaagaaatcatcgaagtcggggagtcgcgtgaagtgcaggccgtgctcaatgatgagtggtatcaaagcttccacgcatttacgcgtgtctttggagtgggggtgaagacagcagacaagtggtaccgtatgggtctgcgcaccctcgaggatgttcgttccagcaagaccctgaagttgaccccgatgcagaaagtaggtctgctgtattatgaagatcttgctcgcggcgttacgcgtgccgaagctgacgcgatttggctgctggttcaggatgcagtcgcaactttcgacccggatgcgatcgtggagattgtcggtggatttcgtcgtgggaaacctcagggtcacgacgttgatctgcttatcagttctccgggagctgagaaagagcaagaagaccaactcctgcagaaagtgatgaatctgtggaagaaacaagggttgttgctgtgtggtcgtctggaatggagtcagtgggaagatgggggttcgccttccggtaaggctgatgagggtgacgcggaggcgtcgtgctttctgatcctcaaactttatgatcatctggtgcgtaaaagtaaacgcaatatgccgactggttcgaacatgggcgagtccaaaccgtggaaagcaattaaagtagatctgctgcgttgcccctatggcagttttgcgtttgcgatgttgcagtggaccggaagccgcatgttccgtcgtgatctgcgctggtacgccctggaagagaagaacatgatgctggacaatcattcgctgtatgacatgacccgcggtatcttcctccctgctaaatcggaagaggaaattttcgaacatctggggcttgaatacattgaaccgttcgaacgtaacgca

SEQ ID NO: 4088 - protein, 529 aa, synthetic construct
  REGION 1..529: note = Variant of terminal deoxynucleotidyltransferase
MHHHHHHGGSGSHGIRTIDSDFGKKQQKKGDNHDSSATYEIKFHEFVLFILEEKMGATRRTFLTDLARKKGFRVENELTDEVTHIVAENLSRSEVLAWLKEHKMEKTKQFELLDISWLIESMKVGKPVDTKGKYQLAESVEVSANPDPTEGRVNELPPTMKTVSPYACQRRTTLNNRNQRFTDSLEILRENYELKGNDDTALEFRRAISVLKSLPFEVRSLKDTEGLPWISDEVKGIMEEIIEVGESREVQAVLNDEWYQSFHAFTRVFGVGVKTADKWYRMGLRTLEDVRSSKTLKLTPMQKVGLLYYEDLARGVTRAEADAIWLLVQDAVATFDPDAIVEIVGGFRRGKPQGHDVDLLISSPGAEKEQEDQLLQKVMNLWKKQGLLLCGRLEWSQWEDGGSPSGKADEGDAEASCFLILKLYDHLVRKSKRNMPTGSNMGESKPWKAIKVDLLRCPYGSFAFAMLQWTGSRMFRRDLRWYALEEKNMMLDNHSLYDMTRGIFLPAKSEEEIFEHLGLEYIEPFERNA

SEQ ID NO: 4089 - DNA, 1587 bp, synthetic construct
  misc_feature 1..1587: note = Variant of terminal deoxynucleotidyltransferase
  source 1..1587: mol_type = other DNA
atgcaccatcatcatcatcatggcggtagcggcagccacggcattcgtaccatcgattcggacttcgggaagaaacagcagaaaaaaggcgataaccacgatagttccgccacttatgaaatcaaatttcacgagtttgtgctgttcattctcgaagaaaaaatgggtgcgacgcgtcgtacttttctgacagatttagcccgcaagaaagggttccgcgtcgagaatgaactgaccgacgaagttacccacatcgtggcagaaaatctgtcacgctctgaagtattggcttggctgaaagaacacaagatggagaagaccaagcaattcgaactgctggatattagctggcttatcgaaagcatgaaagttggtaaaccggtggacaccaaggggaaataccagttggcggaatcggttgaggtgagtgcgaacccagatccgacagaaggtcgtgtaaacgagctgcctcctactatgaaaaccgtttctccgtatgcgtgtcaacgccgcaccaccctgaacaaccgtaatcaacgttttacggactcgctggagattcttcgtgaaaattacgagctgaaaggcaacgatgggactgcgctggaatttcgtcgtgctatctccgtgctgaaaagccttccgtttgaggtacgtagcctgaaagacacggaaggattgccctggatcagtgatgaagtcaaagggattatggaagaaatcatcgaagtcggggagtcgcgtgaagtgcaggccgtgctcaatgatgagtggtatcaaagcttccacgcatttacgcgtgtctttggagtgggggtgaagacagcagacaagtggtaccgtatgggtctgcgcaccctcgaggatgttcgttccagcaagaccctgaagttgaccccgatgcagaaagtaggtctgctgtattatgaagatcttgctcgcggcgttacgcgtgccgaagctgacgcgatttggctgctggttcaggatgcagtcgcaactttcgacccggatgcgatcgtggagattgtcggtggatttcgtcgtgggaaacctcagggtcacgacgttgatctgcttatcagttctccgggagctgagaaagagcaagaagaccaactcctgcagaaagtgatgaatctgtggaagaaacaagggttgttgctgtgtggtcgtctggaatggagtcagtgggaagatgggggttcgccttccggtaaggctgatgagggtgacgcggaggcgtcgtgctttctgatcctcaaactttatgatcatctggtgcgtaaaagtaaacgcaatatgccgactggttcgaacatgggcgagtccaaaccgtggaaagcaattaaagtagatctgctgcgttgcccctatggcagttttgcgtttgcgatgttgcagtggaccggaagccgcatgttccgtcgtgatctgcgctggtacgccctggaagagaagaacatgatgctggacaatcattcgctgtatgacatgacccgcggtatcttcctccctgctaaatcggaagaggaaattttcgaacatctggggcttgaatacctggaaccgttcgaacgtaacgca

SEQ ID NO: 4090 - protein, 529 aa, synthetic construct
  REGION 1..529: note = Variant of terminal deoxynucleotidyltransferase
MHHHHHHGGSGSHGIRTIDSDFGKKQQKKGDNHDSSATYEIKFHEFVLFILEEKMGATRRTFLTDLARKKGFRVENELTDEVTHIVAENLSRSEVLAWLKEHKMEKTKQFELLDISWLIESMKVGKPVDTKGKYQLAESVEVSANPDPTEGRVNELPPTMKTVSPYACQRRTTLNNRNQRFTDSLEILRENYELKGNDGTALEFRRAISVLKSLPFEVRSLKDTEGLPWISDEVKGIMEEIIEVGESREVQAVLNDEWYQSFHAFTRVFGVGVKTADKWYRMGLRTLEDVRSSKTLKLTPMQKVGLLYYEDLARGVTRAEADAIWLLVQDAVATFDPDAIVEIVGGFRRGKPQGHDVDLLISSPGAEKEQEDQLLQKVMNLWKKQGLLLCGRLEWSQWEDGGSPSGKADEGDAEASCFLILKLYDHLVRKSKRNMPTGSNMGESKPWKAIKVDLLRCPYGSFAFAMLQWTGSRMFRRDLRWYALEEKNMMLDNHSLYDMTRGIFLPAKSEEEIFEHLGLEYLEPFERNA

SEQ ID NO: 4091 - DNA, 1587 bp, synthetic construct
  misc_feature 1..1587: note = Variant of terminal deoxynucleotidyltransferase
  source 1..1587: mol_type = other DNA
atgcaccatcatcatcatcatggcggtagcggcagccacggcattcgtaccatcgattcggacttcgggaagaaacagcagaaaaaaggcgataaccacgatagttccgccacttatgaaatcaaatttcacgagtttgtgctgttcattctcgaagaaaaaatgggtgcgacgcgtcgtacttttctgacagatttagcccgcaagaaagggttccgcgtcgagaatgaactgaccgacgaagttacccacatcgtggcagaaaatctgtcacgctctgaagtattggcttggctgaaagaacacaagatggagaagaccaagcaattcgaactgctggatattagctggcttatcgaaagcatgaaagttggtaaaccggtggacaccaaggggaaataccagttggcggaatcggttgaggtgagtgcgaacccagatccgacagaaggtcgtgtaaacgagctgcctcctactatgaaaaccgtttctccgtatgcgtgtcaacgccgcaccaccctgaacaaccgtaatcaacgttttacggactcgctggagattcttcgtgaaaattacgagctgaaaggcaacgacgatactgcgctggaatttcgtcgtgctatctccgtgctgaaaagccttccgtttgaggtacgtagcctgaaagacacggaaggattgccctggatcagtgatgaagtcaaagggattatggaagaaatcatcgaagtcggggagtcgcgtgaagtgcaggccgtgctcaatgatgagtggtatcaaagcttccacgcatttacgcgtgtctttggagtgggggtgaagacagcagacaagtggtaccgtatgggtctgcgcaccctcgaggatgttcgttccagcaaggggctgaagttgaccccgatgcagaaagtaggtctgctgtattatgaagatcttgctcgcggcgttacgcgtgccgaagctgacgcgatttggctgctggttcaggatgcagtcgcaactttcgacccggatgcgatcgtggagattgtcggtggatttcgtcgtgggaaacctcagggtcacgacgttgatctgcttatcagttctccgggagctgagaaagagcaagaagaccaactcctgcagaaagtgatgaatctgtggaagaaacaagggttgttgctgtgtggtcgtctggaatggagtcagtgggaagatgggggttcgccttccggtaaggctgatgagggtgacgcggaggcgtcgtgctttctgatcctcaaactttatgatcatctggtgcgtaaaagtaaacgcaatatgccgactggttcgaacatgggcgagtccaaaccgtggaaagcaattaaagtagatctgctgcgttgcccctatggcagttttgcgtttgcgatgttgcagtggaccggaagccgcatgttccgtcgtgatctgcgctggtacgccctggaagagaagaacatgatgctggacaatcattcgctgtatgacatgacccgcggtatcttcctccctgctaaatcggaagaggaaattttcgaacatctggggcttgaatacctggaaccgttcgaacgtaacgca

SEQ ID NO: 4092 - protein, 529 aa, synthetic construct
  REGION 1..529: note = Variant of terminal deoxynucleotidyltransferase
MHHHHHHGGSGSHGIRTIDSDFGKKQQKKGDNHDSSATYEIKFHEFVLFILEEKMGATRRTFLTDLARKKGFRVENELTDEVTHIVAENLSRSEVLAWLKEHKMEKTKQFELLDISWLIESMKVGKPVDTKGKYQLAESVEVSANPDPTEGRVNELPPTMKTVSPYACQRRTTLNNRNQRFTDSLEILRENYELKGNDDTALEFRRAISVLKSLPFEVRSLKDTEGLPWISDEVKGIMEEIIEVGESREVQAVLNDEWYQSFHAFTRVFGVGVKTADKWYRMGLRTLEDVRSSKGLKLTPMQKVGLLYYEDLARGVTRAEADAIWLLVQDAVATFDPDAIVEIVGGFRRGKPQGHDVDLLISSPGAEKEQEDQLLQKVMNLWKKQGLLLCGRLEWSQWEDGGSPSGKADEGDAEASCFLILKLYDHLVRKSKRNMPTGSNMGESKPWKAIKVDLLRCPYGSFAFAMLQWTGSRMFRRDLRWYALEEKNMMLDNHSLYDMTRGIFLPAKSEEEIFEHLGLEYLEPFERNA

SEQ ID NO: 4093 - DNA, 1587 bp, synthetic construct
  misc_feature 1..1587: note = Variant of terminal deoxynucleotidyltransferase
  source 1..1587: mol_type = other DNA
atgcaccatcatcatcatcatggcggtagcggcagccacggcattcgtaccatcgattcggacttcgggaagaaacagcagaaaaaaggcgataaccacgatagttccgccacttatgaaatcaaatttcacgagtttgtgctgttcattctcgaagaaaaaatgggtgcgacgcgtcgtacttttctgacagatttagcccgcaagaaagggttccgcgtcgagaatgaactgaccgacgaagttacccacatcgtggcagaaaatctgtcacgctctgaagtattggcttggctgaaagaacacaagatggagaagaccaagcaattcgaactgctggatattagctggcttatcgaaagcatgaaagttggtaaaccggtggacaccaaggggaaataccagttggcggaatcggttgaggtgagtgcgaacccagatccgacagaaggtcgtgtaaacgagctgcctcctactatgaaaaccgtttctgcgtatgcgtgtcaacgccgcaccaccctgaacaaccgtaatcaacgttttacggactcgctggagattcttcgtgaaaattacgagctgaaaggcaacgacgatactgcgctggaatttcgtcgtgctatctccgtgctgaaaagccttccgtttgaggtacgtagcctgaaagacacggaaggattgccctggatcagtgatgaagtcaaagggattatggaagaaatcatcgaagtcggggagtcgcgtgaagtgcaggccgtgctcaatgatgagtggtatcaaagcttccacgcatttacgcgtgtctttggagtgggggtgaagacagcagacaagtggtaccgtatgggtctgcgcaccctcgaggatgttcgttccagcaagaccctgaagttgaccccgatgcagaaagtaggtctgctgtattatgaagatcttgctcgcggcgttacgcgtgccgaagctgacgcgatttggctgctggttcaggatgcagtcgcaactttcgacccggatgcgatcgtggagattgtcggtggatttcgtcgtgggaaacctcagggtcacgacgttgatctgcttatcagttctccgggagctgagaaagagcaagaagaccaactcctgcagaaagtgatgaatctgtggaagaaacaagggttgttgctgtgtggtcgtctggaatggagtcagtgggaagatgggggttcgccttccggtaaggctgatgagggtgacgcggaggcgtcgtgctttctgatcctcaaactttatgatcatctggtgcgtaaaagtaaacgcaatatgccgactggttcgaacatgggcgagtccaaaccgtggaaagcaattaaagtagatctgctgcgttgcccctatggcagttttgcgtttgcgatgttgcagtggaccggaagccgcatgttccgtcgtgatctgcgctggtacgccctggaagagaagaacatgatgctggacaatcattcgctgtatgacatgacccgcggtatcttcctccctgctaaatcggaagaggaaattttcgaacatctggggcttgaatacctggaaccgttcgaacgtaacgca

SEQ ID NO: 4094 - protein, 529 aa, synthetic construct
  REGION 1..529: note = Variant of terminal deoxynucleotidyltransferase
MHHHHHHGGSGSHGIRTIDSDFGKKQQKKGDNHDSSATYEIKFHEFVLFILEEKMGATRRTFLTDLARKKGFRVENELTDEVTHIVAENLSRSEVLAWLKEHKMEKTKQFELLDISWLIESMKVGKPVDTKGKYQLAESVEVSANPDPTEGRVNELPPTMKTVSAYACQRRTTLNNRNQRFTDSLEILRENYELKGNDDTALEFRRAISVLKSLPFEVRSLKDTEGLPWISDEVKGIMEEIIEVGESREVQAVLNDEWYQSFHAFTRVFGVGVKTADKWYRMGLRTLEDVRSSKTLKLTPMQKVGLLYYEDLARGVTRAEADAIWLLVQDAVATFDPDAIVEIVGGFRRGKPQGHDVDLLISSPGAEKEQEDQLLQKVMNLWKKQGLLLCGRLEWSQWEDGGSPSGKADEGDAEASCFLILKLYDHLVRKSKRNMPTGSNMGESKPWKAIKVDLLRCPYGSFAFAMLQWTGSRMFRRDLRWYALEEKNMMLDNHSLYDMTRGIFLPAKSEEEIFEHLGLEYLEPFERNA

SEQ ID NO: 4095 - DNA, 1587 bp, synthetic construct
  misc_feature 1..1587: note = Variant of terminal deoxynucleotidyltransferase
  source 1..1587: mol_type = other DNA
atgcaccatcatcatcatcatggcggtagcggcagccacggcattcgtaccatcgattcggacttcgggaagaaacagcagaaaaaaggcgataaccacgatagttccgccacttatgaaatcaaatttcacgagtttgtgctgttcattctcgaagaaaaaatgggtgcgacgcgtcgtacttttctgacagatttagcccgcaagaaagggttccgcgtcgagaatgaactgaccgacgaagttacccacatcgtggcagaaaatctgtcacgctctgaagtattggcttggctgaaagaacacaagatggagaagaccaagcaattcgaactgctggatattagctggcttatcgaaagcatgaaagttggtaaaccggtggacaccaaggggaaataccagttggcggaatcggttgaggtgagtgcgaacccagatccgacagaaggtcgtgtaaacgagctgcctcctactatgaaaaccgtttctccgtatgcgtgtcaacgccgcaccaccctgaacaaccgtaatcaacgttttacggactcgctggagattcttcgtgaaaattacgagctgaaaggcgaggatgatactgcgctggaatttcgtcgtgctatctccgtgctgaaaagccttccgtttgaggtacgtagcctgaaagacacggaaggattgccctggatcagtgatgaagtcaaagggattatggaagaaatcatcgaagtcggggagtcgcgtgaagtgcaggccgtgctcaatgatgagtggtatcaaagcttccacgcatttacgcgtgtctttggagtgggggtgaagacagcagacaagtggtaccgtatgggtctgcgcaccctcgaggatgttcgttccagcaagaccctgaagttgaccccgatgcagaaagtaggtctgctgtattatgaagatcttgctcgcggcgttacgcgtgccgaagctgacgcgatttggctgctggttcaggatgcagtcgcaactttcgacccggatgcgatcgtggagattgtcggtggatttcgtcgtgggaaacctcagggtcacgacgttgatctgcttatcagttctccgggagctgagaaagagcaagaagaccaactcctgcagaaagtgatgaatctgtggaagaaacaagggttgttgctgtgtggtcgtctggaatggagtcagtgggaagatgggggttcgccttccggtaaggctgatgagggtgacgcggaggcgtcgtgctttctgatcctcaaactttatgatcatctggtgcgtaaaagtaaacgcaatatgccgactggttcgaacatgggcgagtccaaaccgtggaaagcaattaaagtagatctgctgcgttgcccctatggcagttttgcgtttgcgatgttgcagtggaccggaagccgcatgttccgtcgtgatctgcgctggtacgccctggaagagaagaacatgatgctggacaatcattcgctgtatgacatgacccgcggtatcttcctccctgctaaatcggaagaggaaattttcgaacatctggggcttgaatacctggaaccgttcgaacgtaacgca

SEQ ID NO: 4096 - protein, 529 aa, synthetic construct
  REGION 1..529: note = Variant of terminal deoxynucleotidyltransferase
MHHHHHHGGSGSHGIRTIDSDFGKKQQKKGDNHDSSATYEIKFHEFVLFILEEKMGATRRTFLTDLARKKGFRVENELTDEVTHIVAENLSRSEVLAWLKEHKMEKTKQFELLDISWLIESMKVGKPVDTKGKYQLAESVEVSANPDPTEGRVNELPPTMKTVSPYACQRRTTLNNRNQRFTDSLEILRENYELKGEDDTALEFRRAISVLKSLPFEVRSLKDTEGLPWISDEVKGIMEEIIEVGESREVQAVLNDEWYQSFHAFTRVFGVGVKTADKWYRMGLRTLEDVRSSKTLKLTPMQKVGLLYYEDLARGVTRAEADAIWLLVQDAVATFDPDAIVEIVGGFRRGKPQGHDVDLLISSPGAEKEQEDQLLQKVMNLWKKQGLLLCGRLEWSQWEDGGSPSGKADEGDAEASCFLILKLYDHLVRKSKRNMPTGSNMGESKPWKAIKVDLLRCPYGSFAFAMLQWTGSRMFRRDLRWYALEEKNMMLDNHSLYDMTRGIFLPAKSEEEIFEHLGLEYLEPFERNA

SEQ ID NO: 4097 - DNA, 1587 bp, synthetic construct
  misc_feature 1..1587: note = Variant of terminal deoxynucleotidyltransferase
  source 1..1587: mol_type = other DNA
atgcaccatcatcatcatcatggcggtagcggcagccacggcattcgtaccatcgattcggacttcgggaagaaacagcagaaaaaaggcgataaccacgatagttccgccacttatgaaatcaaatttcacgagtttgtgctgttcattctcgaagaaaaaatgggtgcgacgcgtcgtacttttctgacagatttagcccgcaagaaagggttccgcgtcgagaatgaactgaccgacgaagttacccacatcgtggcagaaaatctgtcacgctctgaagtattggcttggctgaaagaacacaagatggagaagaccaagcaattcgaactgctggatattagctggcttatcgaaagcatgaaagttggtaaaccggtggacaccaaggggaaataccagttggcggaatcggttgaggtgagtgcgaacccagatccgacagaaggtcgtgtaaacgagctgcctcctactatgaaaaccgtttctccgtatgcgtgtcaacgccgcaccaccctgaacaaccgtaatcaacgttttacggactcgctggagaggcttcgtgaaaattacgagctgaaaggcaacgacgatactgcgctggaatttcgtcgtgctatctccgtgctgaaaagccttccgtttgaggtacgtagcctgaaagacacggaaggattgccctggatcagtgatgaagtcaaagggattatggaagaaatcatcgaagtcggggagtcgcgtgaagtgcaggccgtgctcaatgatgagtggtatcaaagcttccacgcatttacgcgtgtctttggagtgggggtgaagacagcagacaagtggtaccgtatgggtctgcgcaccctcgaggatgttcgttccagcaagaccctgaagttgaccccgatgcagaaagtaggtctgctgtattatgaagatcttgctcgcggcgttacgcgtgccgaagctgacgcgatttggctgctggttcaggatgcagtcgcaactttcgacccggatgcgatcgtggagattgtcggtggatttcgtcgtgggaaacctcagggtcacgacgttgatctgcttatcagttctccgggagctgagaaagagcaagaagaccaactcctgcagaaagtgatgaatctgtggaagaaacaagggttgttgctgtgtggtcgtctggaatggagtcagtgggaagatgggggttcgccttccggtaaggctgatgagggtgacgcggaggcgtcgtgctttctgatcctcaaactttatgatcatctggtgcgtaaaagtaaacgcaatatgccgactggttcgaacatgggcgagtccaaaccgtggaaagcaattaaagtagatctgctgcgttgcccctatggcagttttgcgtttgcgatgttgcagtggaccggaagccgcatgttccgtcgtgatctgcgctggtacgccctggaagagaagaacatgatgctggacaatcattcgctgtatgacatgacccgcggtatcttcctccctgctaaatcggaagaggaaattttcgaacatctggggcttgaatacctggaaccgttcgaacgtaacgca

SEQ ID NO: 4098 - protein, 529 aa, synthetic construct
  REGION 1..529: note = Variant of terminal deoxynucleotidyltransferase
MHHHHHHGGSGSHGIRTIDSDFGKKQQKKGDNHDSSATYEIKFHEFVLFILEEKMGATRRTFLTDLARKKGFRVENELTDEVTHIVAENLSRSEVLAWLKEHKMEKTKQFELLDISWLIESMKVGKPVDTKGKYQLAESVEVSANPDPTEGRVNELPPTMKTVSPYACQRRTTLNNRNQRFTDSLERLRENYELKGNDDTALEFRRAISVLKSLPFEVRSLKDTEGLPWISDEVKGIMEEIIEVGESREVQAVLNDEWYQSFHAFTRVFGVGVKTADKWYRMGLRTLEDVRSSKTLKLTPMQKVGLLYYEDLARGVTRAEADAIWLLVQDAVATFDPDAIVEIVGGFRRGKPQGHDVDLLISSPGAEKEQEDQLLQKVMNLWKKQGLLLCGRLEWSQWEDGGSPSGKADEGDAEASCFLILKLYDHLVRKSKRNMPTGSNMGESKPWKAIKVDLLRCPYGSFAFAMLQWTGSRMFRRDLRWYALEEKNMMLDNHSLYDMTRGIFLPAKSEEEIFEHLGLEYLEPFERNA

SEQ ID NO: 4099 - DNA, 1587 bp, synthetic construct
  misc_feature 1..1587: note = Variant of terminal deoxynucleotidyltransferase
  source 1..1587: mol_type = other DNA
atgcaccatcatcatcatcatggcggtagcggcagccacggcattcgtaccatcgattcggacttcgggaagaaacagcagaaaaaaggcgataaccacgatagttccgccacttatgaaatcaaatttcacgagtttgtgctgttcattctcgaagaaaaaatgggtgcgacgcgtcgtacttttctgacagatttagcccgcaagaaagggttccgcgtcgagaatgaactgaccgacgaagttacccacatcgtggcagaaaatctgtcacgctctgaagtattggcttggctgaaagaacacaagatggagaagaccaagcaattcgaactgctggatattagctggcttatcgaaagcatgaaagttggtaaaccggtggacaccaaggggaaataccagttggcggaatcggttgaggtgagtgcgaacccagatccgacagaaggtcgtgtaaacgagctgcctcctactatgaaaaccgtttctccgtatgcgtgtcaacgccgcaccaccctgaacaaccgtaatcaacgttttacggactcgctggagattcttcgtgaaaattacgagctgaaaggcaacgacgatactgcgctggaatttcgtcgtgctatctccatgctgaaaagccttccgtttgaggtacgtagcctgaaagacacggaaggattgccctggatcagtgatgaagtcaaagggattatggaagaaatcatcgaagtcggggagtcgcgtgaagtgcaggccgtgctcaatgatgagtggtatcaaagcttccacgcatttacgcgtgtctttggagtgggggtgaagacagcagacaagtggtaccgtatgggtctgcgcaccctcgaggatgttcgttccagcaagaccctgaagttgaccccgatgcagaaagtaggtctgctgtattatgaagatcttgctcgcggcgttacgcgtgccgaagctgacgcgatttggctgctggttcaggatgcagtcgcaactttcgacccggatgcgatcgtggagattgtcggtggatttcgtcgtgggaaacctcagggtcacgacgttgatctgcttatcagttctccgggagctgagaaagagcaagaagaccaactcctgcagaaagtgatgaatctgtggaagaaacaagggttgttgctgtgtggtcgtctggaatggagtcagtgggaagatgggggttcgccttccggtaaggctgatgagggtgacgcggaggcgtcgtgctttctgatcctcaaactttatgatcatctggtgcgtaaaagtaaacgcaatatgccgactggttcgaacatgggcgagtccaaaccgtggaaagcaattaaagtagatctgctgcgttgcccctatggcagttttgcgtttgcgatgttgcagtggaccggaagccgcatgttccgtcgtgatctgcgctggtacgccctggaagagaagaacatgatgctggacaatcattcgctgtatgacatgacccgcggtatcttcctccctgctaaatcggaagaggaaattttcgaacatctggggcttgaatacctggaaccgttcgaacgtaacgca

SEQ ID NO: 4100 - protein, 529 aa, synthetic construct
  REGION 1..529: note = Variant of terminal deoxynucleotidyltransferase
MHHHHHHGGSGSHGIRTIDSDFGKKQQKKGDNHDSSATYEIKFHEFVLFILEEKMGATRRTFLTDLARKKGFRVENELTDEVTHIVAENLSRSEVLAWLKEHKMEKTKQFELLDISWLIESMKVGKPVDTKGKYQLAESVEVSANPDPTEGRVNELPPTMKTVSPYACQRRTTLNNRNQRFTDSLEILRENYELKGNDDTALEFRRAISMLKSLPFEVRSLKDTEGLPWISDEVKGIMEEIIEVGESREVQAVLNDEWYQSFHAFTRVFGVGVKTADKWYRMGLRTLEDVRSSKTLKLTPMQKVGLLYYEDLARGVTRAEADAIWLLVQDAVATFDPDAIVEIVGGFRRGKPQGHDVDLLISSPGAEKEQEDQLLQKVMNLWKKQGLLLCGRLEWSQWEDGGSPSGKADEGDAEASCFLILKLYDHLVRKSKRNMPTGSNMGESKPWKAIKVDLLRCPYGSFAFAMLQWTGSRMFRRDLRWYALEEKNMMLDNHSLYDMTRGIFLPAKSEEEIFEHLGLEYLEPFERNA

SEQ ID NO: 4101 - DNA, 1587 bp, synthetic construct
  misc_feature 1..1587: note = Variant of terminal deoxynucleotidyltransferase
  source 1..1587: mol_type = other DNA
atgcaccatcatcatcatcatggcggtagcggcagccacggcattcgtaccatcgattcggacttcgggaagaaacagcagaaaaaaggcgataaccacgatagttccgccacttatgaaatcaaatttcacgagtttgtgctgttcattctcgaagaaaaaatgggtgcgacgcgtcgtacttttctgacagatttagcccgcaagaaagggttccgcgtcgagaatgaactgaccgacgaagttacccacatcgtggcagaaaatctgtcacgctctgaagtattggcttggctgaaagaacacaagatggagaagaccaagcaattcgaactgctggatattagctggcttatcgaaagcatgaaagttggtaaaccggtggacaccaaggggaaataccagttggcggaatcggttgaggtgagtgcgaacccagatccgacagaaggtcgtgtaaacgagctgcctcctactatgaaaaccgtttctccgtatgcgtgtcaacgccgcaccaccctgaacaaccgtaatcaacgttttacggactcgctggagattcttcgtgaaaattacgagctgaaaggcaacgacgatactgcgctggaatttcgtcgtgctatctccgtgctgaaaagccttccgtttgaggtacgtagcctgaaagacacggaaggattgccctggatcagtgatgaagtcaaagggattatggaagaaatcatcgaagtcggggagtcgcgtgaagtgcaggccgtgctcaatgatgagtggtatcaaagcttccacgcatttacgcgtgtctttggagtgggggtgaagacagcagacaagtggtaccgtatgggtctgcgcaccctcgaggatgttcgttccagcaagaccctgaagttgaccccgatgcagaaagtaggtctgctgtattatgaagatcttgctcgcggcgttacgcgtgccgaagctgacgcgatttggctgctggttcaggatgcagtcgcaactttcgacccggatgcgatcgtggagattgtcggtggatttcgtcgtgggaaacctcagggtcacgacgttgatctgcttatcagttctccgggagctgagaaagagcaagaagaccaactcctgcagaaagtgatgaatctgtggaagaaacaagggttgttgctgtgtggtcgtctggaatggagtcagtgggaagatgggggttcgccttccggtaaggctgatgagggtgacgcggaggcgtcgtgctttctgatcctcaaactttatgatcatctggtgcgtaaaagtaaacgcaatatgccgactggttcgaacatgggcgagtccaaaccgtggaaagcaattaaagtagatctgctgcgttgcccctatggcagttttgcgtttgcgatgttgcagtggaccggaagccgcatgttccgtcgtgatctgcgctggtacgccctggaagagaagaacatgatgctggacaatcattcgctgtatgacatgacccgcggtatcttcctccctgctaaatcggaagaggaaattttcgaacatctggggcttgaagttctggaaccgttcgaacgtaacgca

SEQ ID NO: 4102 - protein, 529 aa, synthetic construct
  REGION 1..529: note = Variant of terminal deoxynucleotidyltransferase
MHHHHHHGGSGSHGIRTIDSDFGKKQQKKGDNHDSSATYEIKFHEFVLFILEEKMGATRRTFLTDLARKKGFRVENELTDEVTHIVAENLSRSEVLAWLKEHKMEKTKQFELLDISWLIESMKVGKPVDTKGKYQLAESVEVSANPDPTEGRVNELPPTMKTVSPYACQRRTTLNNRNQRFTDSLEILRENYELKGNDDTALEFRRAISVLKSLPFEVRSLKDTEGLPWISDEVKGIMEEIIEVGESREVQAVLNDEWYQSFHAFTRVFGVGVKTADKWYRMGLRTLEDVRSSKTLKLTPMQKVGLLYYEDLARGVTRAEADAIWLLVQDAVATFDPDAIVEIVGGFRRGKPQGHDVDLLISSPGAEKEQEDQLLQKVMNLWKKQGLLLCGRLEWSQWEDGGSPSGKADEGDAEASCFLILKLYDHLVRKSKRNMPTGSNMGESKPWKAIKVDLLRCPYGSFAFAMLQWTGSRMFRRDLRWYALEEKNMMLDNHSLYDMTRGIFLPAKSEEEIFEHLGLEVLEPFERNA

SEQ ID NO: 4103 - DNA, 1587 bp, synthetic construct
  misc_feature 1..1587: note = Variant of terminal deoxynucleotidyltransferase
  source 1..1587: mol_type = other DNA
atgcaccatcatcatcatcatggcggtagcggcagccacggcattcgtaccatcgattcggacttcgggaagaaacagcagaaaaaaggcgataaccacgatagttccgccacttatgaaatcaaatttcacgagtttgtgctgttcattctcgaagaaaaaatgggtgcgacgcgtcgtacttttctgacagatttagcccgcaagaaagggttccgcgtcgagaatgaactgaccgacgaagttacccacatcgtggcagaaaatctgtcacgctctgaagtattggcttggctgaaagaacacaagatggagaagaccaagcaattcgaactgctggatattagctggcttatcgaaagcatgaaagttggtaaaccggtggacaccaaggggaaataccagttggcggaatcggttgaggtgagtgcgaacccagatccgacagaaggtcgtgtaaacgagctgcctcctactatgaaaaccgtttctccgtatgcgtgtcaacgccgcaccaccctgaacaaccgtaatcaacgttttacggactcgctggagattcttcgtgaaaattacgagctgaaaggccgggatgatactgcgctggaatttcgtcgtgctatctccgtgctgaaaagccttccgtttgaggtacgtagcctgaaagacacggaaggattgccctggatcagtgatgaagtcaaagggattatggaagaaatcatcgaagtcggggagtcgcgtgaagtgcaggccgtgctcaatgatgagtggtatcaaagcttccacgcatttacgcgtgtctttggagtgggggtgaagacagcagacaagtggtaccgtatgggtctgcgcaccctcgaggatgttcgttccagcaagaccctgaagttgaccccgatgcagaaagtaggtctgctgtattatgaagatcttgctcgcggcgttacgcgtgccgaagctgacgcgatttggctgctggttcaggatgcagtcgcaactttcgacccggatgcgatcgtggagattgtcggtggatttcgtcgtgggaaacctcagggtcacgacgttgatctgcttatcagttctccgggagctgagaaagagcaagaagaccaactcctgcagaaagtgatgaatctgtggaagaaacaagggttgttgctgtgtggtcgtctggaatggagtcagtgggaagatgggggttcgccttccggtaaggctgatgagggtgacgcggaggcgtcgtgctttctgatcctcaaactttatgatcatctggtgcgtaaaagtaaacgcaatatgccgactggttcgaacatgggcgagtccaaaccgtggaaagcaattaaagtagatctgctgcgttgcccctatggcagttttgcgtttgcgatgttgcagtggaccggaagccgcatgttccgtcgtgatctgcgctggtacgccctggaagagaagaacatgatgctggacaatcattcgctgtatgacatgacccgcggtatcttcctccctgctaaatcggaagaggaaattttcgaacatctggggcttgaatacctggaaccgttcgaacgtaacgca

SEQ ID NO: 4104 - protein, 529 aa, synthetic construct
  REGION 1..529: note = Variant of terminal deoxynucleotidyltransferase
MHHHHHHGGSGSHGIRTIDSDFGKKQQKKGDNHDSSATYEIKFHEFVLFILEEKMGATRRTFLTDLARKKGFRVENELTDEVTHIVAENLSRSEVLAWLKEHKMEKTKQFELLDISWLIESMKVGKPVDTKGKYQLAESVEVSANPDPTEGRVNELPPTMKTVSPYACQRRTTLNNRNQRFTDSLEILRENYELKGRDDTALEFRRAISVLKSLPFEVRSLKDTEGLPWISDEVKGIMEEIIEVGESREVQAVLNDEWYQSFHAFTRVFGVGVKTADKWYRMGLRTLEDVRSSKTLKLTPMQKVGLLYYEDLARGVTRAEADAIWLLVQDAVATFDPDAIVEIVGGFRRGKPQGHDVDLLISSPGAEKEQEDQLLQKVMNLWKKQGLLLCGRLEWSQWEDGGSPSGKADEGDAEASCFLILKLYDHLVRKSKRNMPTGSNMGESKPWKAIKVDLLRCPYGSFAFAMLQWTGSRMFRRDLRWYALEEKNMMLDNHSLYDMTRGIFLPAKSEEEIFEHLGLEYLEPFERNA

SEQ ID NO: 4105 - DNA, 1587 bp, synthetic construct
  misc_feature 1..1587: note = Variant of terminal deoxynucleotidyltransferase
  source 1..1587: mol_type = other DNA
atgcaccatcatcatcatcatggcggtagcggcagccacggcattcgtaccatcgattcggacttcgggaagaaacagcagaaaaaaggcgataaccacgatagttccgccacttatgaaatcaaatttcacgagtttgtgctgttcattctcgaagaaaaaatgggtgcgacgcgtcgtacttttctgacagatttagcccgcaagaaagggttccgcgtcgagaatgaactgaccgacgaagttacccacatcgtggcagaaaatctgtcacgctctgaagtattggcttggctgaaagaacacaagatggagaagaccaagcaattcgaactgctggatattagctggcttatcgaaagcatgaaagttggtaaaccggtggacaccaaggggaaataccagttggcggaatcggttgaggtgagtgcgaacccagatccgacagaaggtcgtgtaaacgagctgcctcctactatgaaaaccgtttctccgtatgcgtgtcaacgccgcaccaccctgaacaaccgtaatcaacgttttacggactcgctggagattcttcgtgaaaattacgagctgaaaggcaacgacgatactgcgctggaatttcgtcgtgctatctccgtgctgaaaagccttccgtttgaggtacgtagcctgaaagacacggaaggattgccctggatcagtgatgaagtcaaagggattatggaagaaatcatcgaagtcggggagtcgcgtgaagtgcaggccgtgctcaatgatgagtggtatcaaagcttccacgcatttacgcgtgtctttggagtgggggtgaagacagcagacaagtggtaccgtatgggtctgcgcaccctcgaggatgttcgttccagcaagaccctgaagttgaccccgatgcagaaagtaggtctgctgtattatgaagatcttgctcgcggcgttacgcgtgccgaagctgacgcgatttggctgctggttcaggatgcagtcgcaactttcgacccggatgcgatcgtggagattgtcggtggatttcgtcgtgggaaacctcagggtcacgacgttgatctgcttatcagttctccgggagctgagaaagagcaagaagaccaactcctgcagaaagtgatgaatctgtggaagaaacaagggttgttgctgtgtggtcgtctggaatggagtcagtgggaagatgggggttcgccttccggtaaggctgatgagggtgacgcggaggcgtcgtgctttctgatcctcaaactttatgatcatctggtgcgtaaaagtaaacgcaatatgccgactggttcgaacatgggcgagtccaaaccgtggaaagcaattaaagtagatctgctgcgttgcccctatggcagttttgcgtttgcgatgttgcagtggaccggaagccgcatgttccgtcgtgatctgcgctggtacgccctggaagagaagaacatgatgctggacaagcattcgctgtatgacatgacccgcggtatcttcctccctgctaaatcggaagaggaaattttcgaacatctggggcttgaatacctggaaccgttcgaacgtaacgca

SEQ ID NO: 4106 - protein, 529 aa, synthetic construct
  REGION 1..529: note = Variant of terminal deoxynucleotidyltransferase
MHHHHHHGGSGSHGIRTIDSDFGKKQQKKGDNHDSSATYEIKFHEFVLFILEEKMGATRRTFLTDLARKKGFRVENELTDEVTHIVAENLSRSEVLAWLKEHKMEKTKQFELLDISWLIESMKVGKPVDTKGKYQLAESVEVSANPDPTEGRVNELPPTMKTVSPYACQRRTTLNNRNQRFTDSLEILRENYELKGNDDTALEFRRAISVLKSLPFEVRSLKDTEGLPWISDEVKGIMEEIIEVGESREVQAVLNDEWYQSFHAFTRVFGVGVKTADKWYRMGLRTLEDVRSSKTLKLTPMQKVGLLYYEDLARGVTRAEADAIWLLVQDAVATFDPDAIVEIVGGFRRGKPQGHDVDLLISSPGAEKEQEDQLLQKVMNLWKKQGLLLCGRLEWSQWEDGGSPSGKADEGDAEASCFLILKLYDHLVRKSKRNMPTGSNMGESKPWKAIKVDLLRCPYGSFAFAMLQWTGSRMFRRDLRWYALEEKNMMLDKHSLYDMTRGIFLPAKSEEEIFEHLGLEYLEPFERNA

SEQ ID NO: 4107 - DNA, 1587 bp, synthetic construct
  misc_feature 1..1587: note = Variant of terminal deoxynucleotidyltransferase
  source 1..1587: mol_type = other DNA
atgcaccatcatcatcatcatggcggtagcggcagccacggcattcgtaccatcgattcggacttcgggaagaaacagcagaaaaaaggcgataaccacgatagttccgccacttatgaaatcaaatttcacgagtttgtgctgttcattctcgaagaaaaaatgggtgcgacgcgtcgtacttttctgacagatttagcccgcaagaaagggttccgcgtcgagaatgaactgaccgacgaagttacccacatcgtggcagaaaatctgtcacgctctgaagtattggcttggctgaaagaacacaagatggagaagaccaagcaattcgaactgctggatattagctggcttatcgaaagcatgaaagttggtaaaccggtggacaccaaggggaaataccagttggcggaatcggttgaggtgagtgcgaacccagatccgacagaaggtcgtgtaaacgagctgcctcctactatgaaaaccgtttctccgtatgcgtgtcaacgccgcaccaccctgaacaaccgtaatcaacgttttacggactcgctggagattcttcgtgaaaattacgagctgaaaggcaacgacgatactgcgctggaatttcgtcgtgctatctccgtgctgaaaagccttccgtttgaggtacgtagcctgaaagacacggaaggattgccctggatcagtgatgaagtcaaagggattatggaagaaatcatcgaagtcggggagtcgcgtgaagtgcaggccgtgctcaatgatgagtggtatcaaagcttccacgcatttacgcgtgtctttggagtgggggtgaagacagcagacaagtggtaccgtatgggtctgcgcaccctcgaggatgttcgttccagcaagaccctgaagttgaccccgatgcagaaagtaggtctgctgtattatgaagatcttgctcgcggcgttacgcgtgccgaagctgacgcgatttggctgctggttcaggatgcagtcgcaactttcgacccggatgcgatcgtggagattgtcggtggatttcgtcgtgggaaacctcagggtcacgacgttgatctgcttatcagttctccgggagctgagaaagagcaagaagaccaactcctgcagaaagtgatgaatctgtggaagaaacaagggttgttgctgtgtggtcgtctggaatggagtcagtgggaagatgggggttcgccttccggtaaggctgatgagggtgacgcggaggcgtcgtgctttctgatcctcaaactttatgatcatctggtgcgtaaaagtaaacgcaatatgccgactggttcgaacatgggcgagtccaaaccgtggaaagcaattaaagtagatctgctgcgttgcccctatggcagttttgcgtttgcgatgttgcagtggaccggaagccgcatgttccgtcgtgatctgcgctggtacgccctggaagagaagaacatgtctctggacaatcattcgctgtatgacatgacccgcggtatcttcctccctgctaaatcggaagaggaaattttcgaacatctggggcttgaatacctggaaccgttcgaacgtaacgca

SEQ ID NO: 4108 - protein, 529 aa, synthetic construct
  REGION 1..529: note = Variant of terminal deoxynucleotidyltransferase
MHHHHHHGGSGSHGIRTIDSDFGKKQQKKGDNHDSSATYEIKFHEFVLFILEEKMGATRRTFLTDLARKKGFRVENELTDEVTHIVAENLSRSEVLAWLKEHKMEKTKQFELLDISWLIESMKVGKPVDTKGKYQLAESVEVSANPDPTEGRVNELPPTMKTVSPYACQRRTTLNNRNQRFTDSLEILRENYELKGNDDTALEFRRAISVLKSLPFEVRSLKDTEGLPWISDEVKGIMEEIIEVGESREVQAVLNDEWYQSFHAFTRVFGVGVKTADKWYRMGLRTLEDVRSSKTLKLTPMQKVGLLYYEDLARGVTRAEADAIWLLVQDAVATFDPDAIVEIVGGFRRGKPQGHDVDLLISSPGAEKEQEDQLLQKVMNLWKKQGLLLCGRLEWSQWEDGGSPSGKADEGDAEASCFLILKLYDHLVRKSKRNMPTGSNMGESKPWKAIKVDLLRCPYGSFAFAMLQWTGSRMFRRDLRWYALEEKNMSLDNHSLYDMTRGIFLPAKSEEEIFEHLGLEYLEPFERNA

SEQ ID NO: 4109 - DNA, 1587 bp, synthetic construct
  misc_feature 1..1587: note = Variant of terminal deoxynucleotidyltransferase
  source 1..1587: mol_type = other DNA
atgcaccatcatcatcatcatggcggtagcggcagccacggcattcgtaccatcgattcggacttcgggaagaaacagcagaaaaaaggcgataaccacgatagttccgccacttatgaaatcaaatttcacgagtttgtgctgttcattctcgaagaaaaaatgggtgcgacgcgtcgtacttttctgacagatttagcccgcaagaaagggttccgcgtcgagaatgaactgaccgacgaagttacccacatcgtggcagaaaatctgtcacgctctgaagtattggcttggctgaaagaacacaagatggagaagaccaagcaattcgaactgctggatattagctggcttatcgaaagcatgaaagttggtaaaccggtggacaccaaggggaaataccagttggcggaatcggttgaggtgagtgcgaacccagatccgacagaaggtcgtgtaaacgagctgcctcctactatgaaaaccgtttctccgtatgcgtgtcaacgccgcaccaccctgattaaccgtaatcaacgttttacggactcgctggagattcttcgtgaaaattacgagctgaaaggcaacgacgatactgcgctggaatttcgtcgtgctatctccgtgctgaaaagccttccgtttgaggtacgtagcctgaaagacacggaaggattgccctggatcagtgatgaagtcaaagggattatggaagaaatcatcgaagtcggggagtcgcgtgaagtgcaggccgtgctcaatgatgagtggtatcaaagcttccacgcatttacgcgtgtctttggagtgggggtgaagacagcagacaagtggtaccgtatgggtctgcgcaccctcgaggatgttcgttccagcaagaccctgaagttgaccccgatgcagaaagtaggtctgctgtattatgaagatcttgctcgcggcgttacgcgtgccgaagctgacgcgatttggctgctggttcaggatgcagtcgcaactttcgacccggatgcgatcgtggagattgtcggtggatttcgtcgtgggaaacctcagggtcacgacgttgatctgcttatcagttctccgggagctgagaaagagcaagaagaccaactcctgcagaaagtgatgaatctgtggaagaaacaagggttgttgctgtgtggtcgtctggaatggagtcagtgggaagatgggggttcgccttccggtaaggctgatgagggtgacgcggaggcgtcgtgctttctgatcctcaaactttatgatcatctggtgcgtaaaagtaaacgcaatatgccgactggttcgaacatgggcgagtccaaaccgtggaaagcaattaaagtagatctgctgcgttgcccctatggcagttttgcgtttgcgatgttgcagtggaccggaagccgcatgttccgtcgtgatctgcgctggtacgccctggaagagaagaacatgatgctggacaatcattcgctgtatgacatgacccgcggtatcttcctccctgctaaatcggaagaggaaattttcgaacatctggggcttgaatacctggaaccgttcgaacgtaacgca

SEQ ID NO: 4110 - protein, 529 aa, synthetic construct
  REGION 1..529: note = Variant of terminal deoxynucleotidyltransferase
MHHHHHHGGSGSHGIRTIDSDFGKKQQKKGDNHDSSATYEIKFHEFVLFILEEKMGATRRTFLTDLARKKGFRVENELTDEVTHIVAENLSRSEVLAWLKEHKMEKTKQFELLDISWLIESMKVGKPVDTKGKYQLAESVEVSANPDPTEGRVNELPPTMKTVSPYACQRRTTLINRNQRFTDSLEILRENYELKGNDDTALEFRRAISVLKSLPFEVRSLKDTEGLPWISDEVKGIMEEIIEVGESREVQAVLNDEWYQSFHAFTRVFGVGVKTADKWYRMGLRTLEDVRSSKTLKLTPMQKVGLLYYEDLARGVTRAEADAIWLLVQDAVATFDPDAIVEIVGGFRRGKPQGHDVDLLISSPGAEKEQEDQLLQKVMNLWKKQGLLLCGRLEWSQWEDGGSPSGKADEGDAEASCFLILKLYDHLVRKSKRNMPTGSNMGESKPWKAIKVDLLRCPYGSFAFAMLQWTGSRMFRRDLRWYALEEKNMMLDNHSLYDMTRGIFLPAKSEEEIFEHLGLEYLEPFERNA

SEQ ID NO: 4111 - DNA, 1587 bp, synthetic construct
  misc_feature 1..1587: note = Variant of terminal deoxynucleotidyltransferase
  source 1..1587: mol_type = other DNA
atgcaccatcatcatcatcatggcggtagcggcagccacggcattcgtaccatcgattcggacttcgggaagaaacagcagaaaaaaggcgataaccacgatagttccgccacttatgaaatcaaatttcacgagtttgtgctgttcattctcgaagaaaaaatgggtgcgacgcgtcgtacttttctgacagatttagcccgcaagaaagggttccgcgtcgagaatgaactgaccgacgaagttacccacatcgtggcagaaaatctgtcacgctctgaagtattggcttggctgaaagaacacaagatggagaagaccaagcaattcgaactgctggatattagctggcttatcgaaagcatgaaagttggtaaaccggtggacaccaaggggaaataccagttggcggaatcggttgaggtgagtgcgaacccagatccgacagaaggtcgtgtaaacgagctgcctcctactatgaaaaccgtttctccgtatgcgtgtcaacgccgcaccaccctgatgaaccgtaatcaacgttttacggactcgctggagattcttcgtgaaaattacgagctgaaaggcaacgacgatactgcgctggaatttcgtcgtgctatctccgtgctgaaaagccttccgtttgaggtacgtagcctgaaagacacggaaggattgccctggatcagtgatgaagtcaaagggattatggaagaaatcatcgaagtcggggagtcgcgtgaagtgcaggccgtgctcaatgatgagtggtatcaaagcttccacgcatttacgcgtgtctttggagtgggggtgaagacagcagacaagtggtaccgtatgggtctgcgcaccctcgaggatgttcgttccagcaagaccctgaagttgaccccgatgcagaaagtaggtctgctgtattatgaagatcttgctcgcggcgttacgcgtgccgaagctgacgcgatttggctgctggttcaggatgcagtcgcaactttcgacccggatgcgatcgtggagattgtcggtggatttcgtcgtgggaaacctcagggtcacgacgttgatctgcttatcagttctccgggagctgagaaagagcaagaagaccaactcctgcagaaagtgatgaatctgtggaagaaacaagggttgttgctgtgtggtcgtctggaatggagtcagtgggaagatgggggttcgccttccggtaaggctgatgagggtgacgcggaggcgtcgtgctttctgatcctcaaactttatgatcatctggtgcgtaaaagtaaacgcaatatgccgactggttcgaacatgggcgagtccaaaccgtggaaagcaattaaagtagatctgctgcgttgcccctatggcagttttgcgtttgcgatgttgcagtggaccggaagccgcatgttccgtcgtgatctgcgctggtacgccctggaagagaagaacatgatgctggacaatcattcgctgtatgacatgacccgcggtatcttcctccctgctaaatcggaagaggaaattttcgaacatctggggcttgaatacctggaaccgttcgaacgtaacgca

SEQ ID NO: 4112 - protein, 529 aa, synthetic construct
  REGION 1..529: note = Variant of terminal deoxynucleotidyltransferase
MHHHHHHGGSGSHGIRTIDSDFGKKQQKKGDNHDSSATYEIKFHEFVLFILEEKMGATRRTFLTDLARKKGFRVENELTDEVTHIVAENLSRSEVLAWLKEHKMEKTKQFELLDISWLIESMKVGKPVDTKGKYQLAESVEVSANPDPTEGRVNELPPTMKTVSPYACQRRTTLMNRNQRFTDSLEILRENYELKGNDDTALEFRRAISVLKSLPFEVRSLKDTEGLPWISDEVKGIMEEIIEVGESREVQAVLNDEWYQSFHAFTRVFGVGVKTADKWYRMGLRTLEDVRSSKTLKLTPMQKVGLLYYEDLARGVTRAEADAIWLLVQDAVATFDPDAIVEIVGGFRRGKPQGHDVDLLISSPGAEKEQEDQLLQKVMNLWKKQGLLLCGRLEWSQWEDGGSPSGKADEGDAEASCFLILKLYDHLVRKSKRNMPTGSNMGESKPWKAIKVDLLRCPYGSFAFAMLQWTGSRMFRRDLRWYALEEKNMMLDNHSLYDMTRGIFLPAKSEEEIFEHLGLEYLEPFERNA

SEQ ID NO: 4113 - DNA, 1587 bp, synthetic construct
  misc_feature 1..1587: note = Variant of terminal deoxynucleotidyltransferase
  source 1..1587: mol_type = other DNA
atgcaccatcatcatcatcatggcggtagcggcagccacggcattcgtaccatcgattcggacttcgggaagaaacagcagaaaaaaggcgataaccacgatagttccgccacttatgaaatcaaatttcacgagtttgtgctgttcattctcgaagaaaaaatgggtgcgacgcgtcgtacttttctgacagatttagcccgcaagaaagggttccgcgtcgagaatgaactgaccgacgaagttacccacatcgtggcagaaaatctgtcacgctctgaagtattggcttggctgaaagaacacaagatggagaagaccaagcaattcgaactgctggatattagctggcttatcgaaagcatgaaagttggtaaaccggtggacaccaaggggaaataccagttggcggaatcggttgaggtgagtgcgaacccagatccgacagaaggtcgtgtaaacgagctgcctcctactatgaaaaccgtttctccgtatgcgtgtcaacgccgcaccaccctgaacaaccgtaataagcgttttacggactcgctggagattcttcgtgaaaattacgagctgaaaggcaacgacgatactgcgctggaatttcgtcgtgctatctccgtgctgaaaagccttccgtttgaggtacgtagcctgaaagacacggaaggattgccctggatcagtgatgaagtcaaagggattatggaagaaatcatcgaagtcggggagtcgcgtgaagtgcaggccgtgctcaatgatgagtggtatcaaagcttccacgcatttacgcgtgtctttggagtgggggtgaagacagcagacaagtggtaccgtatgggtctgcgcaccctcgaggatgttcgttccagcaagaccctgaagttgaccccgatgcagaaagtaggtctgctgtattatgaagatcttgctcgcggcgttacgcgtgccgaagctgacgcgatttggctgctggttcaggatgcagtcgcaactttcgacccggatgcgatcgtggagattgtcggtggatttcgtcgtgggaaacctcagggtcacgacgttgatctgcttatcagttctccgggagctgagaaagagcaagaagaccaactcctgcagaaagtgatgaatctgtggaagaaacaagggttgttgctgtgtggtcgtctggaatggagtcagtgggaagatgggggttcgccttccggtaaggctgatgagggtgacgcggaggcgtcgtgctttctgatcctcaaactttatgatcatctggtgcgtaaaagtaaacgcaatatgccgactggttcgaacatgggcgagtccaaaccgtggaaagcaattaaagtagatctgctgcgttgcccctatggcagttttgcgtttgcgatgttgcagtggaccggaagccgcatgttccgtcgtgatctgcgctggtacgccctggaagagaagaacatgatgctggacaatcattcgctgtatgacatgacccgcggtatcttcctccctgctaaatcggaagaggaaattttcgaacatctggggcttgaatacctggaaccgttcgaacgtaacgca

SEQ ID NO: 4114 - protein, 529 aa, synthetic construct
  REGION 1..529: note = Variant of terminal deoxynucleotidyltransferase
MHHHHHHGGSGSHGIRTIDSDFGKKQQKKGDNHDSSATYEIKFHEFVLFILEEKMGATRRTFLTDLARKKGFRVENELTDEVTHIVAENLSRSEVLAWLKEHKMEKTKQFELLDISWLIESMKVGKPVDTKGKYQLAESVEVSANPDPTEGRVNELPPTMKTVSPYACQRRTTLNNRNKRFTDSLEILRENYELKGNDDTALEFRRAISVLKSLPFEVRSLKDTEGLPWISDEVKGIMEEIIEVGESREVQAVLNDEWYQSFHAFTRVFGVGVKTADKWYRMGLRTLEDVRSSKTLKLTPMQKVGLLYYEDLARGVTRAEADAIWLLVQDAVATFDPDAIVEIVGGFRRGKPQGHDVDLLISSPGAEKEQEDQLLQKVMNLWKKQGLLLCGRLEWSQWEDGGSPSGKADEGDAEASCFLILKLYDHLVRKSKRNMPTGSNMGESKPWKAIKVDLLRCPYGSFAFAMLQWTGSRMFRRDLRWYALEEKNMMLDNHSLYDMTRGIFLPAKSEEEIFEHLGLEYLEPFERNA

SEQ ID NO: 4115 - DNA, 1587 bp, synthetic construct
  misc_feature 1..1587: note = Variant of terminal deoxynucleotidyltransferase
  source 1..1587: mol_type = other DNA
atgcaccatcatcatcatcatggcggtagcggcagccacggcattcgtaccatcgattcggacttcgggaagaaacagcagaaaaaaggcgataaccacgatagttccgccacttatgaaatcaaatttcacgagtttgtgctgttcattctcgaagaaaaaatgggtgcgacgcgtcgtacttttctgacagatttagcccgcaagaaagggttccgcgtcgagaatgaactgaccgacgaagttacccacatcgtggcagaaaatctgtcacgctctgaagtattggcttggctgaaagaacacaagatggagaagaccaagcaattcgaactgctggatattagctggcttatcgaaagcatgaaagttggtaaaccggtggacaccaaggggaaataccagttggcggaatcggttgaggtgagtgcgaacccagatccgacagaaggtcgtgtaaacgagctgcctcctactatgaaaaccgtttctccgtatgcgtgtcaacgccgcaccaccctgaacaaccgtaatcaacgttttacggactcgctggagattcttcgtgaaatgtacgagctgaaaggcaacgacgatactgcgctggaatttcgtcgtgctatctccgtgctgaaaagccttccgtttgaggtacgtagcctgaaagacacggaaggattgccctggatcagtgatgaagtcaaagggattatggaagaaatcatcgaagtcggggagtcgcgtgaagtgcaggccgtgctcaatgatgagtggtatcaaagcttccacgcatttacgcgtgtctttggagtgggggtgaagacagcagacaagtggtaccgtatgggtctgcgcaccctcgaggatgttcgttccagcaagaccctgaagttgaccccgatgcagaaagtaggtctgctgtattatgaagatcttgctcgcggcgttacgcgtgccgaagctgacgcgatttggctgctggttcaggatgcagtcgcaactttcgacccggatgcgatcgtggagattgtcggtggatttcgtcgtgggaaacctcagggtcacgacgttgatctgcttatcagttctccgggagctgagaaagagcaagaagaccaactcctgcagaaagtgatgaatctgtggaagaaacaagggttgttgctgtgtggtcgtctggaatggagtcagtgggaagatgggggttcgccttccggtaaggctgatgagggtgacgcggaggcgtcgtgctttctgatcctcaaactttatgatcatctggtgcgtaaaagtaaacgcaatatgccgactggttcgaacatgggcgagtccaaaccgtggaaagcaattaaagtagatctgctgcgttgcccctatggcagttttgcgtttgcgatgttgcagtggaccggaagccgcatgttccgtcgtgatctgcgctggtacgccctggaagagaagaacatgatgctggacaatcattcgctgtatgacatgacccgcggtatcttcctccctgctaaatcggaagaggaaattttcgaacatctggggcttgaatacctggaaccgttcgaacgtaacgca

SEQ ID NO: 4116 - protein, 529 aa, synthetic construct
  REGION 1..529: note = Variant of terminal deoxynucleotidyltransferase
MHHHHHHGGSGSHGIRTIDSDFGKKQQKKGDNHDSSATYEIKFHEFVLFILEEKMGATRRTFLTDLARKKGFRVENELTDEVTHIVAENLSRSEVLAWLKEHKMEKTKQFELLDISWLIESMKVGKPVDTKGKYQLAESVEVSANPDPTEGRVNELPPTMKTVSPYACQRRTTLNNRNQRFTDSLEILREMYELKGNDDTALEFRRAISVLKSLPFEVRSLKDTEGLPWISDEVKGIMEEIIEVGESREVQAVLNDEWYQSFHAFTRVFGVGVKTADKWYRMGLRTLEDVRSSKTLKLTPMQKVGLLYYEDLARGVTRAEADAIWLLVQDAVATFDPDAIVEIVGGFRRGKPQGHDVDLLISSPGAEKEQEDQLLQKVMNLWKKQGLLLCGRLEWSQWEDGGSPSGKADEGDAEASCFLILKLYDHLVRKSKRNMPTGSNMGESKPWKAIKVDLLRCPYGSFAFAMLQWTGSRMFRRDLRWYALEEKNMMLDNHSLYDMTRGIFLPAKSEEEIFEHLGLEYLEPFERNA

SEQ ID NO: 4117 - DNA, 1587 bp, synthetic construct
  misc_feature 1..1587: note = Variant of terminal deoxynucleotidyltransferase
  source 1..1587: mol_type = other DNA
atgcaccatcatcatcatcatggcggtagcggcagccacggcattcgtaccatcgattcggacttcgggaagaaacagcagaaaaaaggcgataaccacgatagttccgccacttatgaaatcaaatttcacgagtttgtgctgttcattctcgaagaaaaaatgggtgcgacgcgtcgtacttttctgacagatttagcccgcaagaaagggttccgcgtcgagaatgaactgaccgacgaagttacccacatcgtggcagaaaatctgtcacgctctgaagtattggcttggctgaaagaacacaagatggagaagaccaagcaattcgaactgctggatattagctggcttatcgaaagcatgaaagttggtaaaccggtggacaccaaggggaaataccagttggcggaatcggttgaggtgagtgcgaacccagatccgacagaaggtcgtgtaaacgagctgcctcctactatgaaaaccgtttctccgtatgcgtgtcaacgccgcaccaccctgaacaaccgtaatcaacgttttacggactcgctggagattcttcgtgaaaattacgagctgaaaggcaacgacgatactgcgctggaatttcgtcgtgctatctccgtgctgaaaagccttccgtttgaggtacgtagcctgaaagacacggaaggattgccctggatcagtgatgaagtcaaagggattatggaagaaatcatcgaagtcggggagtcgcgtgaagtgcaggccgtgctcaatgatgagtggtatcaaagcttccacgcatttacgcgtgtctttggagtgggggtgaagacagcagacaagtggtaccgtatgggtctgcgcaccctcgaggatgttcgttccagcaagaccctgaagttgaccccgatgcagaaagtaggtctgctgtattatgaagatcttgctcgcggcgttacgcgtgccgaagctgacgcgatttggctgctggttcaggatgcagtcgcaactttcgacccggatgcgatctgtgagattgtcggtggatttcgtcgtgggaaacctcagggtcacgacgttgatctgcttatcagttctccgggagctgagaaagagcaagaagaccaactcctgcagaaagtgatgaatctgtggaagaaacaagggttgttgctgtgtggtcgtctggaatggagtcagtgggaagatgggggttcgccttccggtaaggctgatgagggtgacgcggaggcgtcgtgctttctgatcctcaaactttatgatcatctggtgcgtaaaagtaaacgcaatatgccgactggttcgaacatgggcgagtccaaaccgtggaaagcaattaaagtagatctgctgcgttgcccctatggcagttttgcgtttgcgatgttgcagtggaccggaagccgcatgttccgtcgtgatctgcgctggtacgccctggaagagaagaacatgatgctggacaatcattcgctgtatgacatgacccgcggtatcttcctccctgctaaatcggaagaggaaattttcgaacatctggggcttgaatacctggaaccgttcgaacgtaacgca

SEQ ID NO: 4118 - protein, 529 aa, synthetic construct
  REGION 1..529: note = Variant of terminal deoxynucleotidyltransferase
MHHHHHHGGSGSHGIRTIDSDFGKKQQKKGDNHDSSATYEIKFHEFVLFILEEKMGATRRTFLTDLARKKGFRVENELTDEVTHIVAENLSRSEVLAWLKEHKMEKTKQFELLDISWLIESMKVGKPVDTKGKYQLAESVEVSANPDPTEGRVNELPPTMKTVSPYACQRRTTLNNRNQRFTDSLEILRENYELKGNDDTALEFRRAISVLKSLPFEVRSLKDTEGLPWISDEVKGIMEEIIEVGESREVQAVLNDEWYQSFHAFTRVFGVGVKTADKWYRMGLRTLEDVRSSKTLKLTPMQKVGLLYYEDLARGVTRAEADAIWLLVQDAVATFDPDAICEIVGGFRRGKPQGHDVDLLISSPGAEKEQEDQLLQKVMNLWKKQGLLLCGRLEWSQWEDGGSPSGKADEGDAEASCFLILKLYDHLVRKSKRNMPTGSNMGESKPWKAIKVDLLRCPYGSFAFAMLQWTGSRMFRRDLRWYALEEKNMMLDNHSLYDMTRGIFLPAKSEEEIFEHLGLEYLEPFERNA

SEQ ID NO: 4119 - DNA, 1587 bp, synthetic construct
  misc_feature 1..1587: note = Variant of terminal deoxynucleotidyltransferase
  source 1..1587: mol_type = other DNA
atgcaccatcatcatcatcatggcggtagcggcagccacggcattcgtaccatcgattcggacttcgggaagaaacagcagaaaaaaggcgataaccacgatagttccgccacttatgaaatcaaatttcacgagtttgtgctgttcattctcgaagaaaaaatgggtgcgacgcgtcgtacttttctgacagatttagcccgcaagaaagggttccgcgtcgagaatgaactgaccgacgaagttacccacatcgtggcagaaaatctgtcacgctctgaagtattggcttggctgaaagaacacaagatggagaagaccaagcaattcgaactgctggatattagctggcttatcgaaagcatgaaagttggtaaaccggtggacaccaaggggaaataccagttggcggaatcggttgaggtgagtgcgaacccagatccgacagaaggtcgtgtaaacgagctgcctcctactatgaaaaccgtttctccgtatgcgtgtcaacgccgcaccaccctgaacaaccgtaatcaacgttttacggactcgctggagattcttcgtgaaaattacgagctgaaaggcaacgatgatactgcgctgttttttcgtcgtgctatctccgtgctgaaaagccttccgtttgaggtacgtagcctgaaagacacggaaggattgccctggatcagtgatgaagtcaaagggattatggaagaaatcatcgaagtcggggagtcgcgtgaagtgcaggccgtgctcaatgatgagtggtatcaaagcttccacgcatttacgcgtgtctttggagtgggggtgaagacagcagacaagtggtaccgtatgggtctgcgcaccctcgaggatgttcgttccagcaagaccctgaagttgaccccgatgcagaaagtaggtctgctgtattatgaagatcttgctcgcggcgttacgcgtgccgaagctgacgcgatttggctgctggttcaggatgcagtcgcaactttcgacccggatgcgatcgtggagattgtcggtggatttcgtcgtgggaaacctcagggtcacgacgttgatctgcttatcagttctccgggagctgagaaagagcaagaagaccaactcctgcagaaagtgatgaatctgtggaagaaacaagggttgttgctgtgtggtcgtctggaatggagtcagtgggaagatgggggttcgccttccggtaaggctgatgagggtgacgcggaggcgtcgtgctttctgatcctcaaactttatgatcatctggtgcgtaaaagtaaacgcaatatgccgactggttcgaacatgggcgagtccaaaccgtggaaagcaattaaagtagatctgctgcgttgcccctatggcagttttgcgtttgcgatgttgcagtggaccggaagccgcatgttccgtcgtgatctgcgctggtacgccctggaagagaagaacatgatgctggacaatcattcgctgtatgacatgacccgcggtatcttcctccctgctaaatcggaagaggaaattttcgaacatctggggcttgaatacctggaaccgttcgaacgtaacgca

SEQ ID NO: 4120 - protein, 529 aa, synthetic construct
  REGION 1..529: note = Variant of terminal deoxynucleotidyltransferase
MHHHHHHGGSGSHGIRTIDSDFGKKQQKKGDNHDSSATYEIKFHEFVLFILEEKMGATRRTFLTDLARKKGFRVENELTDEVTHIVAENLSRSEVLAWLKEHKMEKTKQFELLDISWLIESMKVGKPVDTKGKYQLAESVEVSANPDPTEGRVNELPPTMKTVSPYACQRRTTLNNRNQRFTDSLEILRENYELKGNDDTALFFRRAISVLKSLPFEVRSLKDTEGLPWISDEVKGIMEEIIEVGESREVQAVLNDEWYQSFHAFTRVFGVGVKTADKWYRMGLRTLEDVRSSKTLKLTPMQKVGLLYYEDLARGVTRAEADAIWLLVQDAVATFDPDAIVEIVGGFRRGKPQGHDVDLLISSPGAEKEQEDQLLQKVMNLWKKQGLLLCGRLEWSQWEDGGSPSGKADEGDAEASCFLILKLYDHLVRKSKRNMPTGSNMGESKPWKAIKVDLLRCPYGSFAFAMLQWTGSRMFRRDLRWYALEEKNMMLDNHSLYDMTRGIFLPAKSEEEIFEHLGLEYLEPFERNA

SEQ ID NO: 4121 - DNA, 1587 bp, synthetic construct
  misc_feature 1..1587: note = Variant of terminal deoxynucleotidyltransferase
  source 1..1587: mol_type = other DNA
atgcaccatcatcatcatcatggcggtagcggcagccacggcattcgtaccatcgattcggacttcgggaagaaacagcagaaaaaaggcgataaccacgatagttccgccacttatgaaatcaaatttcacgagtttgtgctgttcattctcgaagaaaaaatgggtgcgacgcgtcgtacttttctgacagatttagcccgcaagaaagggttccgcgtcgagaatgaactgaccgacgaagttacccacatcgtggcagaaaatctgtcacgctctgaagtattggcttggctgaaagaacacaagatggagaagaccaagcaattcgaactgctggatattagctggcttatcgaaagcatgaaagttggtaaaccggtggacaccaaggggaaataccagttggcggaatcggttgaggtgagtgcgaacccagatccgacagaaggtcgtgtaaacgagctgcctcctactatgaaaaccgtttctccgtatgcgtgtcaacgccgcaccaccctgaacaaccgtaatcaacgttttacggactcgctggagattcttcgtgaaaattacgagctgaaaggcaacgacgatactgcgctggaatttcgtcgtgctatctccgtgctgaaaagccttccgtttgaggtacgtagcctgaaagacacggaaggattgccctggatcagtgatgaagtcaaagggattatggaagaaatcatcgaagtcggggagtcgcgtgaagtgcaggccgtgctcaatgatgagtggtatcaaagcttccacgcatttacgcgtgtctttggagtgggggtgaagacagcagacaagtggtaccgtatgggtctgcgcaccctcgaggatgttcgttccagcaagaatctgaagttgaccccgatgcagaaagtaggtctgctgtattatgaagatcttgctcgcggcgttacgcgtgccgaagctgacgcgatttggctgctggttcaggatgcagtcgcaactttcgacccggatgcgatcgtggagattgtcggtggatttcgtcgtgggaaacctcagggtcacgacgttgatctgcttatcagttctccgggagctgagaaagagcaagaagaccaactcctgcagaaagtgatgaatctgtggaagaaacaagggttgttgctgtgtggtcgtctggaatggagtcagtgggaagatgggggttcgccttccggtaaggctgatgagggtgacgcggaggcgtcgtgctttctgatcctcaaactttatgatcatctggtgcgtaaaagtaaacgcaatatgccgactggttcgaacatgggcgagtccaaaccgtggaaagcaattaaagtagatctgctgcgttgcccctatggcagttttgcgtttgcgatgttgcagtggaccggaagccgcatgttccgtcgtgatctgcgctggtacgccctggaagagaagaacatgatgctggacaatcattcgctgtatgacatgacccgcggtatcttcctccctgctaaatcggaagaggaaattttcgaacatctggggcttgaatacctggaaccgttcgaacgtaacgca

SEQ ID NO: 4122 - protein, 529 aa, synthetic construct
  REGION 1..529: note = Variant of terminal deoxynucleotidyltransferase
MHHHHHHGGSGSHGIRTIDSDFGKKQQKKGDNHDSSATYEIKFHEFVLFILEEKMGATRRTFLTDLARKKGFRVENELTDEVTHIVAENLSRSEVLAWLKEHKMEKTKQFELLDISWLIESMKVGKPVDTKGKYQLAESVEVSANPDPTEGRVNELPPTMKTVSPYACQRRTTLNNRNQRFTDSLEILRENYELKGNDDTALEFRRAISVLKSLPFEVRSLKDTEGLPWISDEVKGIMEEIIEVGESREVQAVLNDEWYQSFHAFTRVFGVGVKTADKWYRMGLRTLEDVRSSKNLKLTPMQKVGLLYYEDLARGVTRAEADAIWLLVQDAVATFDPDAIVEIVGGFRRGKPQGHDVDLLISSPGAEKEQEDQLLQKVMNLWKKQGLLLCGRLEWSQWEDGGSPSGKADEGDAEASCFLILKLYDHLVRKSKRNMPTGSNMGESKPWKAIKVDLLRCPYGSFAFAMLQWTGSRMFRRDLRWYALEEKNMMLDNHSLYDMTRGIFLPAKSEEEIFEHLGLEYLEPFERNA

SEQ ID NO: 4123 - DNA, 1587 bp, synthetic construct
  misc_feature 1..1587: note = Variant of terminal deoxynucleotidyltransferase
  source 1..1587: mol_type = other DNA
atgcaccatcatcatcatcatggcggtagcggcagccacggcattcgtaccatcgattcggacttcgggaagaaacagcagaaaaaaggcgataaccacgatagttccgccacttatgaaatcaaatttcacgagtttgtgctgttcattctcgaagaaaaaatgggtgcgacgcgtcgtacttttctgacagatttagcccgcaagaaagggttccgcgtcgagaatgaactgaccgacgaagttacccacatcgtggcagaaaatctgtcacgctctgaagtattggcttggctgaaagaacacaagatggagaagaccaagcaattcgaactgctggatattagctggcttatcgaaagcatgaaagttggtaaaccggtggacaccaaggggaaataccagttggcggaatcggttgaggtgagtgcgaacccagatccgacagaaggtcgtgtaaacgagctgcctcctactatgaaaaccgtttctccgtatgcgtgtcaacgccgcaccaccctgaacaaccgtaatcaacgttttacggactcgctggagattcttcgtgaaaattacgagctgaaaggcaacgacgatactgcgctggaatttcgtcgtgctatctccgtgctgaaaagccttccgtttgaggtacgtagcctgaaagacacggaaggattgccctggatcagtgatgaagtcaaagggattatggaagaaatcatcgaagtcggggagtcgcgtgaagtgcaggccgtgctcaatgatgagtggtatcaaagcttccacgcatttacgcgtgtctttggagtgggggtgaagacagcagacaagtggtaccgtatgggtctgcgcaccctcgaggatgttcgttccagcaagaccctgaagttgaccccgatgcagaaagtaggtctgctgtattatgaagatcttgctcgcggcgttacgcgtgccgaagctgacgcgatttggctgctggttcaggatgcagtcgcaactttcgacccggatgcgatcgtggagattgtcggtggatttcgtcgtgggaaacctcagggtcacgacgttgatctgcttatcagttctccgggagctgagaaagagcaagaagaccaactcctgcagaaagtgatgaatctgtggaagaaacaagggttgttgctgtgtggtcgtctggaatggagtcagtgggaagatgggggttcgccttccggtaaggctgatgagggtgacgcggaggcgtcgtgctttctgatcctcaaactttatgatcatctggtgcgtaaaagtaaacgcaatatgccgactggttcgaacatgggcgagtccaaaccgtggaaagcaattaaagtagatctgctgcgttgcccctatggcagttttgcgtttgcgatgttgcagtggaccggaagccgcatgttccgtcgtgatctgcgctggtacgcctcggaagagaagaacatgatgctggacaatcattcgctgtatgacatgacccgcggtatcttcctccctgctaaatcggaagaggaaattttcgaacatctggggcttgaatacctggaaccgttcgaacgtaacgca

SEQ ID NO: 4124 - protein, 529 aa, synthetic construct
  REGION 1..529: note = Variant of terminal deoxynucleotidyltransferase
MHHHHHHGGSGSHGIRTIDSDFGKKQQKKGDNHDSSATYEIKFHEFVLFILEEKMGATRRTFLTDLARKKGFRVENELTDEVTHIVAENLSRSEVLAWLKEHKMEKTKQFELLDISWLIESMKVGKPVDTKGKYQLAESVEVSANPDPTEGRVNELPPTMKTVSPYACQRRTTLNNRNQRFTDSLEILRENYELKGNDDTALEFRRAISVLKSLPFEVRSLKDTEGLPWISDEVKGIMEEIIEVGESREVQAVLNDEWYQSFHAFTRVFGVGVKTADKWYRMGLRTLEDVRSSKTLKLTPMQKVGLLYYEDLARGVTRAEADAIWLLVQDAVATFDPDAIVEIVGGFRRGKPQGHDVDLLISSPGAEKEQEDQLLQKVMNLWKKQGLLLCGRLEWSQWEDGGSPSGKADEGDAEASCFLILKLYDHLVRKSKRNMPTGSNMGESKPWKAIKVDLLRCPYGSFAFAMLQWTGSRMFRRDLRWYASEEKNMMLDNHSLYDMTRGIFLPAKSEEEIFEHLGLEYLEPFERNA

SEQ ID NO: 4125 - DNA, 1587 bp, synthetic construct
  misc_feature 1..1587: note = Variant of terminal deoxynucleotidyltransferase
  source 1..1587: mol_type = other DNA
atgcaccatcatcatcatcatggcggtagcggcagccacggcattcgtaccatcgattcggacttcgggaagaaacagcagaaaaaaggcgataaccacgatagttccgccacttatgaaatcaaatttcacgagtttgtgctgttcattctcgaagaaaaaatgggtgcgacgcgtcgtacttttctgacagatttagcccgcaagaaagggttccgcgtcgagaatgaactgaccgacgaagttacccacatcgtggcagaaaatctgtcacgctctgaagtattggcttggctgaaagaacacaagatggagaagaccaagcaattcgaactgctggatattagctggcttatcgaaagcatgaaagttggtaaaccggtggacaccaaggggaaataccagttggcggaatcggttgaggtgagtgcgaacccagatccgacagaaggtcgtgtaaacgagctgcctcctactatgaaaaccgtttctccgtatgcgtgtcaacgccgcaccaccctgaacaaccgtaatcaacgttttacgtgttcgctggagattcttcgtgaaaattacgagctgaaaggcaacgacgatactgcgctggaatttcgtcgtgctatctccgtgctgaaaagccttccgtttgaggtacgtagcctgaaagacacggaaggattgccctggatcagtgatgaagtcaaagggattatggaagaaatcatcgaagtcggggagtcgcgtgaagtgcaggccgtgctcaatgatgagtggtatcaaagcttccacgcatttacgcgtgtctttggagtgggggtgaagacagcagacaagtggtaccgtatgggtctgcgcaccctcgaggatgttcgttccagcaagaccctgaagttgaccccgatgcagaaagtaggtctgctgtattatgaagatcttgctcgcggcgttacgcgtgccgaagctgacgcgatttggctgctggttcaggatgcagtcgcaactttcgacccggatgcgatcgtggagattgtcggtggatttcgtcgtgggaaacctcagggtcacgacgttgatctgcttatcagttctccgggagctgagaaagagcaagaagaccaactcctgcagaaagtgatgaatctgtggaagaaacaagggttgttgctgtgtggtcgtctggaatggagtcagtgggaagatgggggttcgccttccggtaaggctgatgagggtgacgcggaggcgtcgtgctttctgatcctcaaactttatgatcatctggtgcgtaaaagtaaacgcaatatgccgactggttcgaacatgggcgagtccaaaccgtggaaagcaattaaagtagatctgctgcgttgcccctatggcagttttgcgtttgcgatgttgcagtggaccggaagccgcatgttccgtcgtgatctgcgctggtacgccctggaagagaagaacatgatgctggacaatcattcgctgtatgacatgacccgcggtatcttcctccctgctaaatcggaagaggaaattttcgaacatctggggcttgaatacctggaaccgttcgaacgtaacgca

SEQ ID NO: 4126 - protein, 529 aa, synthetic construct
  REGION 1..529: note = Variant of terminal deoxynucleotidyltransferase
MHHHHHHGGSGSHGIRTIDSDFGKKQQKKGDNHDSSATYEIKFHEFVLFILEEKMGATRRTFLTDLARKKGFRVENELTDEVTHIVAENLSRSEVLAWLKEHKMEKTKQFELLDISWLIESMKVGKPVDTKGKYQLAESVEVSANPDPTEGRVNELPPTMKTVSPYACQRRTTLNNRNQRFTCSLEILRENYELKGNDDTALEFRRAISVLKSLPFEVRSLKDTEGLPWISDEVKGIMEEIIEVGESREVQAVLNDEWYQSFHAFTRVFGVGVKTADKWYRMGLRTLEDVRSSKTLKLTPMQKVGLLYYEDLARGVTRAEADAIWLLVQDAVATFDPDAIVEIVGGFRRGKPQGHDVDLLISSPGAEKEQEDQLLQKVMNLWKKQGLLLCGRLEWSQWEDGGSPSGKADEGDAEASCFLILKLYDHLVRKSKRNMPTGSNMGESKPWKAIKVDLLRCPYGSFAFAMLQWTGSRMFRRDLRWYALEEKNMMLDNHSLYDMTRGIFLPAKSEEEIFEHLGLEYLEPFERNA

SEQ ID NO: 4127 - DNA, 1587 bp, synthetic construct
  misc_feature 1..1587: note = Variant of terminal deoxynucleotidyltransferase
  source 1..1587: mol_type = other DNA
atgcaccatcatcatcatcatggcggtagcggcagccacggcattcgtaccatcgattcggacttcgggaagaaacagcagaaaaaaggcgataaccacgatagttccgccacttatgaaatcaaatttcacgagtttgtgctgttcattctcgaagaaaaaatgggtgcgacgcgtcgtacttttctgacagatttagcccgcaagaaagggttccgcgtcgagaatgaactgaccgacgaagttacccacatcgtggcagaaaatctgtcacgctctgaagtattggcttggctgaaagaacacaagatggagaagaccaagcaattcgaactgctggatattagctggcttatcgaaagcatgaaagttggtaaaccggtggacaccaaggggaaataccagttggcggaatcggttgaggtgagtgcgaacccagatccgacagaaggtcgtgtaaacgagctgcctcctactatgaaaaccgtttctccgtatgcgtgtcaacgccgcaccaccctgaacaaccgtaatcaacgttttacggactcgctggagattcttcgtgaaaattacgagctgaaaggcaacgacgatactgcgctggaatttcgtcgtgctatctccgtgctgaaaagccttccgtttgaggtacgtagcctgaaagacacggaaggattgccctggatcagtgatgaagtcaaagggattatggaagaaatcatcgaagtcggggagtcgcgtgaagtgcaggccgtgctcaatgatgagtggtatcaaagcttccacgcatttacgcgtgtctttggagtgggggtgaagacagcagacaagtggtaccgtatgggtctgcgcaccctcgaggatgttcgttccagcaagaccctgaagttgaccccgatgcagaaagtaggtctgctgtattatgaagatcttgctcgcggcgttacgcgtgccgaagctgacgcgatttggctgctggttcaggatgcagtcgcaactttcgacccggatgcgatcgtggagattgtcggtggatttcgtcgtgggaaacctcagggtcacgacgttgatctgcttatcagttctccgggagctgagaaagagcaagaagaccaactcctgcagaaagtgatgaatctgtggaagaaacaagggttgttgctgtgtggtcgtctggaatggagtcagtgggaagatgggggttcgccttccggtaaggctgatgagggtgacgcggaggcgtcgtgctttctgatcctcaaactttatgatcatctggtgcgtaaaagtaaacgcaatatgccgactggttcgaacatgggcgagtccaaaccgtggaaagcaattaaagtagatctgctgcgttgcccctatggcagttttgcgtttgcgatgttgcagtggaccggaagccgcatgttccgtcgtgatctgcgctggtacgccctggaagagaagaacatgatgctggacaatcattcgctgtatgacatgacccgcggtatcttcctccctgctaattcggaagaggaaattttcgaacatctggggcttgaatacctggaaccgttcgaacgtaacgca

SEQ ID NO: 4128 - protein, 529 aa, synthetic construct
  REGION 1..529: note = Variant of terminal deoxynucleotidyltransferase
MHHHHHHGGSGSHGIRTIDSDFGKKQQKKGDNHDSSATYEIKFHEFVLFILEEKMGATRRTFLTDLARKKGFRVENELTDEVTHIVAENLSRSEVLAWLKEHKMEKTKQFELLDISWLIESMKVGKPVDTKGKYQLAESVEVSANPDPTEGRVNELPPTMKTVSPYACQRRTTLNNRNQRFTDSLEILRENYELKGNDDTALEFRRAISVLKSLPFEVRSLKDTEGLPWISDEVKGIMEEIIEVGESREVQAVLNDEWYQSFHAFTRVFGVGVKTADKWYRMGLRTLEDVRSSKTLKLTPMQKVGLLYYEDLARGVTRAEADAIWLLVQDAVATFDPDAIVEIVGGFRRGKPQGHDVDLLISSPGAEKEQEDQLLQKVMNLWKKQGLLLCGRLEWSQWEDGGSPSGKADEGDAEASCFLILKLYDHLVRKSKRNMPTGSNMGESKPWKAIKVDLLRCPYGSFAFAMLQWTGSRMFRRDLRWYALEEKNMMLDNHSLYDMTRGIFLPANSEEEIFEHLGLEYLEPFERNA

SEQ ID NO: 4129 - DNA, 1587 bp, synthetic construct
  misc_feature 1..1587: note = Variant of terminal deoxynucleotidyltransferase
  source 1..1587: mol_type = other DNA
atgcaccatcatcatcatcatggcggtagcggcagccacggcattcgtaccatcgattcggacttcgggaagaaacagcagaaaaaaggcgataaccacgatagttccgccacttatgaaatcaaatttcacgagtttgtgctgttcattctcgaagaaaaaatgggtgcgacgcgtcgtacttttctgacagatttagcccgcaagaaagggttccgcgtcgagaatgaactgaccgacgaagttacccacatcgtggcagaaaatctgtcacgctctgaagtattggcttggctgaaagaacacaagatggagaagaccaagcaattcgaactgctggatattagctggcttatcgaaagcatgaaagttggtaaaccggtggacaccaaggggaaataccagttggcggaatcggttgaggtgagtgcgaacccagatccgacagaaggtcgtgtaaacgagctgcctcctactatgaaaaccgtttctccgtatgcgtgtcaacgccgcaccagtctgaacaaccgtaatcaacgttttacggactcgctggagattcttcgtgaaaattacgagctgaaaggcaacgacgatactgcgctggaatttcgtcgtgctatctccgtgctgaaaagccttccgtttgaggtacgtagcctgaaagacacggaaggattgccctggatcagtgatgaagtcaaagggattatggaagaaatcatcgaagtcggggagtcgcgtgaagtgcaggccgtgctcaatgatgagtggtatcaaagcttccacgcatttacgcgtgtctttggagtgggggtgaagacagcagacaagtggtaccgtatgggtctgcgcaccctcgaggatgttcgttccagcaagaccctgaagttgaccccgatgcagaaagtaggtctgctgtattatgaagatcttgctcgcggcgttacgcgtgccgaagctgacgcgatttggctgctggttcaggatgcagtcgcaactttcgacccggatgcgatcgtggagattgtcggtggatttcgtcgtgggaaacctcagggtcacgacgttgatctgcttatcagttctccgggagctgagaaagagcaagaagaccaactcctgcagaaagtgatgaatctgtggaagaaacaagggttgttgctgtgtggtcgtctggaatggagtcagtgggaagatgggggttcgccttccggtaaggctgatgagggtgacgcggaggcgtcgtgctttctgatcctcaaactttatgatcatctggtgcgtaaaagtaaacgcaatatgccgactggttcgaacatgggcgagtccaaaccgtggaaagcaattaaagtagatctgctgcgttgcccctatggcagttttgcgtttgcgatgttgcagtggaccggaagccgcatgttccgtcgtgatctgcgctggtacgccctggaagagaagaacatgatgctggacaatcattcgctgtatgacatgacccgcggtatcttcctccctgctaaatcggaagaggaaattttcgaacatctggggcttgaatacctggaaccgttcgaacgtaacgca

SEQ ID NO: 4130 - protein, 529 aa, synthetic construct
  REGION 1..529: note = Variant of terminal deoxynucleotidyltransferase
MHHHHHHGGSGSHGIRTIDSDFGKKQQKKGDNHDSSATYEIKFHEFVLFILEEKMGATRRTFLTDLARKKGFRVENELTDEVTHIVAENLSRSEVLAWLKEHKMEKTKQFELLDISWLIESMKVGKPVDTKGKYQLAESVEVSANPDPTEGRVNELPPTMKTVSPYACQRRTSLNNRNQRFTDSLEILRENYELKGNDDTALEFRRAISVLKSLPFEVRSLKDTEGLPWISDEVKGIMEEIIEVGESREVQAVLNDEWYQSFHAFTRVFGVGVKTADKWYRMGLRTLEDVRSSKTLKLTPMQKVGLLYYEDLARGVTRAEADAIWLLVQDAVATFDPDAIVEIVGGFRRGKPQGHDVDLLISSPGAEKEQEDQLLQKVMNLWKKQGLLLCGRLEWSQWEDGGSPSGKADEGDAEASCFLILKLYDHLVRKSKRNMPTGSNMGESKPWKAIKVDLLRCPYGSFAFAMLQWTGSRMFRRDLRWYALEEKNMMLDNHSLYDMTRGIFLPAKSEEEIFEHLGLEYLEPFERNA

SEQ ID NO: 4131 - DNA, 1587 bp, synthetic construct
  misc_feature 1..1587: note = Variant of terminal deoxynucleotidyltransferase
  source 1..1587: mol_type = other DNA
atgcaccatcatcatcatcatggcggtagcggcagccacggcattcgtaccatcgattcggacttcgggaagaaacagcagaaaaaaggcgataaccacgatagttccgccacttatgaaatcaaatttcacgagtttgtgctgttcattctcgaagaaaaaatgggtgcgacgcgtcgtacttttctgacagatttagcccgcaagaaagggttccgcgtcgagaatgaactgaccgacgaagttacccacatcgtggcagaaaatctgtcacgctctgaagtattggcttggctgaaagaacacaagatggagaagaccaagcaattcgaactgctggatattagctggcttatcgaaagcatgaaagttggtaaaccggtggacaccaaggggaaataccagttggcggaatcggttgaggtgagtgcgaacccagatccgacagaaggtcgtgtaaacgagctgcctcctactatgaaaaccgtttctccgtatgcgtgtcaacgccgcaccaccctgcttaaccgtaatcaacgttttacggactcgctggagattcttcgtgaaaattacgagctgaaaggcaacgacgatactgcgctggaatttcgtcgtgctatctccgtgctgaaaagccttccgtttgaggtacgtagcctgaaagacacggaaggattgccctggatcagtgatgaagtcaaagggattatggaagaaatcatcgaagtcggggagtcgcgtgaagtgcaggccgtgctcaatgatgagtggtatcaaagcttccacgcatttacgcgtgtctttggagtgggggtgaagacagcagacaagtggtaccgtatgggtctgcgcaccctcgaggatgttcgttccagcaagaccctgaagttgaccccgatgcagaaagtaggtctgctgtattatgaagatcttgctcgcggcgttacgcgtgccgaagctgacgcgatttggctgctggttcaggatgcagtcgcaactttcgacccggatgcgatcgtggagattgtcggtggatttcgtcgtgggaaacctcagggtcacgacgttgatctgcttatcagttctccgggagctgagaaagagcaagaagaccaactcctgcagaaagtgatgaatctgtggaagaaacaagggttgttgctgtgtggtcgtctggaatggagtcagtgggaagatgggggttcgccttccggtaaggctgatgagggtgacgcggaggcgtcgtgctttctgatcctcaaactttatgatcatctggtgcgtaaaagtaaacgcaatatgccgactggttcgaacatgggcgagtccaaaccgtggaaagcaattaaagtagatctgctgcgttgcccctatggcagttttgcgtttgcgatgttgcagtggaccggaagccgcatgttccgtcgtgatctgcgctggtacgccctggaagagaagaacatgatgctggacaatcattcgctgtatgacatgacccgcggtatcttcctccctgctaaatcggaagaggaaattttcgaacatctggggcttgaatacctggaaccgttcgaacgtaacgca

SEQ ID NO: 4132 - protein, 529 aa, synthetic construct
  REGION 1..529: note = Variant of terminal deoxynucleotidyltransferase
MHHHHHHGGSGSHGIRTIDSDFGKKQQKKGDNHDSSATYEIKFHEFVLFILEEKMGATRRTFLTDLARKKGFRVENELTDEVTHIVAENLSRSEVLAWLKEHKMEKTKQFELLDISWLIESMKVGKPVDTKGKYQLAESVEVSANPDPTEGRVNELPPTMKTVSPYACQRRTTLLNRNQRFTDSLEILRENYELKGNDDTALEFRRAISVLKSLPFEVRSLKDTEGLPWISDEVKGIMEEIIEVGESREVQAVLNDEWYQSFHAFTRVFGVGVKTADKWYRMGLRTLEDVRSSKTLKLTPMQKVGLLYYEDLARGVTRAEADAIWLLVQDAVATFDPDAIVEIVGGFRRGKPQGHDVDLLISSPGAEKEQEDQLLQKVMNLWKKQGLLLCGRLEWSQWEDGGSPSGKADEGDAEASCFLILKLYDHLVRKSKRNMPTGSNMGESKPWKAIKVDLLRCPYGSFAFAMLQWTGSRMFRRDLRWYALEEKNMMLDNHSLYDMTRGIFLPAKSEEEIFEHLGLEYLEPFERNA

SEQ ID NO: 4133 - DNA, 1587 bp, synthetic construct
  misc_feature 1..1587: note = Variant of terminal deoxynucleotidyltransferase
  source 1..1587: mol_type = other DNA
atgcaccatcatcatcatcatggcggtagcggcagccacggcattcgtaccatcgattcggacttcgggaagaaacagcagaaaaaaggcgataaccacgatagttccgccacttatgaaatcaaatttcacgagtttgtgctgttcattctcgaagaaaaaatgggtgcgacgcgtcgtacttttctgacagatttagcccgcaagaaagggttccgcgtcgagaatgaactgaccgacgaagttacccacatcgtggcagaaaatctgtcacgctctgaagtattggcttggctgaaagaacacaagatggagaagaccaagcaattcgaactgctggatattagctggcttatcgaaagcatgaaagttggtaaaccggtggacaccaaggggaaataccagttggcggaatcggttgaggtgagtgcgaacccagatccgacagaaggtcgtgtaaacgagctgcctcctactatgaaaaccgtttcttgttatgcgtgtcaacgccgcaccaccctgaacaaccgtaatcaacgttttacggactcgctggagattcttcgtgaaaattacgagctgaaaggcaacgacgatactgcgctggaatttcgtcgtgctatctccgtgctgaaaagccttccgtttgaggtacgtagcctgaaagacacggaaggattgccctggatcagtgatgaagtcaaagggattatggaagaaatcatcgaagtcggggagtcgcgtgaagtgcaggccgtgctcaatgatgagtggtatcaaagcttccacgcatttacgcgtgtctttggagtgggggtgaagacagcagacaagtggtaccgtatgggtctgcgcaccctcgaggatgttcgttccagcaagaccctgaagttgaccccgatgcagaaagtaggtctgctgtattatgaagatcttgctcgcggcgttacgcgtgccgaagctgacgcgatttggctgctggttcaggatgcagtcgcaactttcgacccggatgcgatcgtggagattgtcggtggatttcgtcgtgggaaacctcagggtcacgacgttgatctgcttatcagttctccgggagctgagaaagagcaagaagaccaactcctgcagaaagtgatgaatctgtggaagaaacaagggttgttgctgtgtggtcgtctggaatggagtcagtgggaagatgggggttcgccttccggtaaggctgatgagggtgacgcggaggcgtcgtgctttctgatcctcaaactttatgatcatctggtgcgtaaaagtaaacgcaatatgccgactggttcgaacatgggcgagtccaaaccgtggaaagcaattaaagtagatctgctgcgttgcccctatggcagttttgcgtttgcgatgttgcagtggaccggaagccgcatgttccgtcgtgatctgcgctggtacgccctggaagagaagaacatgatgctggacaatcattcgctgtatgacatgacccgcggtatcttcctccctgctaaatcggaagaggaaattttcgaacatctggggcttgaatacctggaaccgttcgaacgtaacgca

SEQ ID NO: 4134 - protein, 529 aa, synthetic construct
  REGION 1..529: note = Variant of terminal deoxynucleotidyltransferase
MHHHHHHGGSGSHGIRTIDSDFGKKQQKKGDNHDSSATYEIKFHEFVLFILEEKMGATRRTFLTDLARKKGFRVENELTDEVTHIVAENLSRSEVLAWLKEHKMEKTKQFELLDISWLIESMKVGKPVDTKGKYQLAESVEVSANPDPTEGRVNELPPTMKTVSCYACQRRTTLNNRNQRFTDSLEILRENYELKGNDDTALEFRRAISVLKSLPFEVRSLKDTEGLPWISDEVKGIMEEIIEVGESREVQAVLNDEWYQSFHAFTRVFGVGVKTADKWYRMGLRTLEDVRSSKTLKLTPMQKVGLLYYEDLARGVTRAEADAIWLLVQDAVATFDPDAIVEIVGGFRRGKPQGHDVDLLISSPGAEKEQEDQLLQKVMNLWKKQGLLLCGRLEWSQWEDGGSPSGKADEGDAEASCFLILKLYDHLVRKSKRNMPTGSNMGESKPWKAIKVDLLRCPYGSFAFAMLQWTGSRMFRRDLRWYALEEKNMMLDNHSLYDMTRGIFLPAKSEEEIFEHLGLEYLEPFERNA

SEQ ID NO: 4135 - DNA, 1587 bp, synthetic construct
  misc_feature 1..1587: note = Variant of terminal deoxynucleotidyltransferase
  source 1..1587: mol_type = other DNA
atgcaccatcatcatcatcatggcggtagcggcagccacggcattcgtaccatcgattcggacttcgggaagaaacagcagaaaaaaggcgataaccacgatagttccgccacttatgaaatcaaatttcacgagtttgtgctgttcattctcgaagaaaaaatgggtgcgacgcgtcgtacttttctgacagatttagcccgcaagaaagggttccgcgtcgagaatgaactgaccgacgaagttacccacatcgtggcagaaaatctgtcacgctctgaagtattggcttggctgaaagaacacaagatggagaagaccaagcaattcgaactgctggatattagctggcttatcgaaagcatgaaagttggtaaaccggtggacaccaaggggaaataccagttggcggaatcggttgaggtgagtgcgaacccagatccgacagaaggtcgtgtaaacgagctgcctcctactatgaaaaccgtttctccgtatgcgtgtcaacgccgcaccaccctgaacaaccgtaatcaacgttttacggactcgctggagattcttcgtgaaaattacgagctgaaaggctgtgatgatactgcgctggaatttcgtcgtgctatctccgtgctgaaaagccttccgtttgaggtacgtagcctgaaagacacggaaggattgccctggatcagtgatgaagtcaaagggattatggaagaaatcatcgaagtcggggagtcgcgtgaagtgcaggccgtgctcaatgatgagtggtatcaaagcttccacgcatttacgcgtgtctttggagtgggggtgaagacagcagacaagtggtaccgtatgggtctgcgcaccctcgaggatgttcgttccagcaagaccctgaagttgaccccgatgcagaaagtaggtctgctgtattatgaagatcttgctcgcggcgttacgcgtgccgaagctgacgcgatttggctgctggttcaggatgcagtcgcaactttcgacccggatgcgatcgtggagattgtcggtggatttcgtcgtgggaaacctcagggtcacgacgttgatctgcttatcagttctccgggagctgagaaagagcaagaagaccaactcctgcagaaagtgatgaatctgtggaagaaacaagggttgttgctgtgtggtcgtctggaatggagtcagtgggaagatgggggttcgccttccggtaaggctgatgagggtgacgcggaggcgtcgtgctttctgatcctcaaactttatgatcatctggtgcgtaaaagtaaacgcaatatgccgactggttcgaacatgggcgagtccaaaccgtggaaagcaattaaagtagatctgctgcgttgcccctatggcagttttgcgtttgcgatgttgcagtggaccggaagccgcatgttccgtcgtgatctgcgctggtacgccctggaagagaagaacatgatgctggacaatcattcgctgtatgacatgacccgcggtatcttcctccctgctaaatcggaagaggaaattttcgaacatctggggcttgaatacctggaaccgttcgaacgtaacgca

SEQ ID NO: 4136 - protein, 529 aa, synthetic construct
  REGION 1..529: note = Variant of terminal deoxynucleotidyltransferase
MHHHHHHGGSGSHGIRTIDSDFGKKQQKKGDNHDSSATYEIKFHEFVLFILEEKMGATRRTFLTDLARKKGFRVENELTDEVTHIVAENLSRSEVLAWLKEHKMEKTKQFELLDISWLIESMKVGKPVDTKGKYQLAESVEVSANPDPTEGRVNELPPTMKTVSPYACQRRTTLNNRNQRFTDSLEILRENYELKGCDDTALEFRRAISVLKSLPFEVRSLKDTEGLPWISDEVKGIMEEIIEVGESREVQAVLNDEWYQSFHAFTRVFGVGVKTADKWYRMGLRTLEDVRSSKTLKLTPMQKVGLLYYEDLARGVTRAEADAIWLLVQDAVATFDPDAIVEIVGGFRRGKPQGHDVDLLISSPGAEKEQEDQLLQKVMNLWKKQGLLLCGRLEWSQWEDGGSPSGKADEGDAEASCFLILKLYDHLVRKSKRNMPTGSNMGESKPWKAIKVDLLRCPYGSFAFAMLQWTGSRMFRRDLRWYALEEKNMMLDNHSLYDMTRGIFLPAKSEEEIFEHLGLEYLEPFERNA

SEQ ID NO: 4137 - DNA, 1587 bp, synthetic construct
  misc_feature 1..1587: note = Variant of terminal deoxynucleotidyltransferase
  source 1..1587: mol_type = other DNA
atgcaccatcatcatcatcatggcggtagcggcagccacggcattcgtaccatcgattcggacttcgggaagaaacagcagaaaaaaggcgataaccacgatagttccgccacttatgaaatcaaatttcacgagtttgtgctgttcattctcgaagaaaaaatgggtgcgacgcgtcgtacttttctgacagatttagcccgcaagaaagggttccgcgtcgagaatgaactgaccgacgaagttacccacatcgtggcagaaaatctgtcacgctctgaagtattggcttggctgaaagaacacaagatggagaagaccaagcaattcgaactgctggatattagctggcttatcgaaagcatgaaagttggtaaaccggtggacaccaaggggaaataccagttggcggaatcggttgaggtgagtgcgaacccagatccgacagaaggtcgtgtaaacgagctgcctcctactatgaaaaccgtttctccgtatgcgtgtcaacgccgcaccaccctgaacaaccgtaatcaacgttttacggactcgctggagattcttcgtgaaaattacgagctgaaaggcaacgacgatactgcgctggaatttcgtcgtgctatctccgtgctgaaaagccttccgtttgaggtacgtagcctgaaagacacggaaggattgccctggatcagtgatgaagtcaaagggattatggaagaaatcatcgaagtcggggagtcgcgtgaagtgcaggccgtgctcaatgatgagtggtatcaaagcttccacgcatttacgcgtgtctttggagtgggggtgaagacagcagacaagtggtaccgtatgggtctgcgcaccctcgaggatgttcgttccagcaagaccctgaagttgaccccgatgcagaaagtaggtctgctgtattatgaagatcttgctcgcggcgttacgcgtgccgaagctgacgcgatttggctgctggttcaggatgcagtcgcaactttcgacccggatgcgatcgtggagattgtcggtggatttcgtcgtgggaaacctcagggtcacgacgttgatctgcttatcagttctccgggagctgagaaagagcaagaagaccaactcctgcagaaagtgatgaatctgtggaagaaacaagggttgttgctgtgtggtcgtctggaatggagtcagtgggaagatgggggttcgccttcccggaaggctgacgagggtgacgcggaggcgtcgtgctttctgatcctcaaactttatgatcatctggtgcgtaaaagtaaacgcaatatgccgactggttcgaacatgggcgagtccaaaccgtggaaagcaattaaagtagatctgctgcgttgcccctatggcagttttgcgtttgcgatgttgcagtggaccggaagccgcatgttccgtcgtgatctgcgctggtacgccctggaagagaagaacatgatgctggacaatcattcgctgtatgacatgacccgcggtatcttcctccctgctaaatcggaagaggaaattttcgaacatctggggcttgaatacctggaaccgttcgaacgtaacgca

SEQ ID NO: 4138 - protein, 529 aa, synthetic construct
  REGION 1..529: note = Variant of terminal deoxynucleotidyltransferase
MHHHHHHGGSGSHGIRTIDSDFGKKQQKKGDNHDSSATYEIKFHEFVLFILEEKMGATRRTFLTDLARKKGFRVENELTDEVTHIVAENLSRSEVLAWLKEHKMEKTKQFELLDISWLIESMKVGKPVDTKGKYQLAESVEVSANPDPTEGRVNELPPTMKTVSPYACQRRTTLNNRNQRFTDSLEILRENYELKGNDDTALEFRRAISVLKSLPFEVRSLKDTEGLPWISDEVKGIMEEIIEVGESREVQAVLNDEWYQSFHAFTRVFGVGVKTADKWYRMGLRTLEDVRSSKTLKLTPMQKVGLLYYEDLARGVTRAEADAIWLLVQDAVATFDPDAIVEIVGGFRRGKPQGHDVDLLISSPGAEKEQEDQLLQKVMNLWKKQGLLLCGRLEWSQWEDGGSPSRKADEGDAEASCFLILKLYDHLVRKSKRNMPTGSNMGESKPWKAIKVDLLRCPYGSFAFAMLQWTGSRMFRRDLRWYALEEKNMMLDNHSLYDMTRGIFLPAKSEEEIFEHLGLEYLEPFERNA

SEQ ID NO: 4139 - DNA, 1587 bp, synthetic construct
  misc_feature 1..1587: note = Variant of terminal deoxynucleotidyltransferase
  source 1..1587: mol_type = other DNA
atgcaccatcatcatcatcatggcggtagcggcagccacggcattcgtaccatcgattcggacttcgggaagaaacagcagaaaaaaggcgataaccacgatagttccgccacttatgaaatcaaatttcacgagtttgtgctgttcattctcgaagaaaaaatgggtgcgacgcgtcgtacttttctgacagatttagcccgcaagaaagggttccgcgtcgagaatgaactgaccgacgaagttacccacatcgtggcagaaaatctgtcacgctctgaagtattggcttggctgaaagaacacaagatggagaagaccaagcaattcgaactgctggatattagctggcttatcgaaagcatgaaagttggtaaaccggtggacaccaaggggaaataccagttggcggaatcggttgaggtgagtgcgaacccagatccgacagaaggtcgtgtaaacgagctgcctcctactatgaaaaccgtttctccgtatgcgtgtcaacgccgcaccaccctgaacaaccgtaatcaacgttttacggactcgctggagattcttcgtgaacagtacgagctgaaaggcaacgacgatactgcgctggaatttcgtcgtgctatctccgtgctgaaaagccttccgtttgaggtacgtagcctgaaagacacggaaggattgccctggatcagtgatgaagtcaaagggattatggaagaaatcatcgaagtcggggagtcgcgtgaagtgcaggccgtgctcaatgatgagtggtatcaaagcttccacgcatttacgcgtgtctttggagtgggggtgaagacagcagacaagtggtaccgtatgggtctgcgcaccctcgaggatgttcgttccagcaagaccctgaagttgaccccgatgcagaaagtaggtctgctgtattatgaagatcttgctcgcggcgttacgcgtgccgaagctgacgcgatttggctgctggttcaggatgcagtcgcaactttcgacccggatgcgatcgtggagattgtcggtggatttcgtcgtgggaaacctcagggtcacgacgttgatctgcttatcagttctccgggagctgagaaagagcaagaagaccaactcctgcagaaagtgatgaatctgtggaagaaacaagggttgttgctgtgtggtcgtctggaatggagtcagtgggaagatgggggttcgccttccggtaaggctgatgagggtgacgcggaggcgtcgtgctttctgatcctcaaactttatgatcatctggtgcgtaaaagtaaacgcaatatgccgactggttcgaacatgggcgagtccaaaccgtggaaagcaattaaagtagatctgctgcgttgcccctatggcagttttgcgtttgcgatgttgcagtggaccggaagccgcatgttccgtcgtgatctgcgctggtacgccctggaagagaagaacatgatgctggacaatcattcgctgtatgacatgacccgcggtatcttcctccctgctaaatcggaagaggaaattttcgaacatctggggcttgaatacctggaaccgttcgaacgtaacgca

SEQ ID NO: 4140 - protein, 529 aa, synthetic construct
  REGION 1..529: note = Variant of terminal deoxynucleotidyltransferase
MHHHHHHGGSGSHGIRTIDSDFGKKQQKKGDNHDSSATYEIKFHEFVLFILEEKMGATRRTFLTDLARKKGFRVENELTDEVTHIVAENLSRSEVLAWLKEHKMEKTKQFELLDISWLIESMKVGKPVDTKGKYQLAESVEVSANPDPTEGRVNELPPTMKTVSPYACQRRTTLNNRNQRFTDSLEILREQYELKGNDDTALEFRRAISVLKSLPFEVRSLKDTEGLPWISDEVKGIMEEIIEVGESREVQAVLNDEWYQSFHAFTRVFGVGVKTADKWYRMGLRTLEDVRSSKTLKLTPMQKVGLLYYEDLARGVTRAEADAIWLLVQDAVATFDPDAIVEIVGGFRRGKPQGHDVDLLISSPGAEKEQEDQLLQKVMNLWKKQGLLLCGRLEWSQWEDGGSPSGKADEGDAEASCFLILKLYDHLVRKSKRNMPTGSNMGESKPWKAIKVDLLRCPYGSFAFAMLQWTGSRMFRRDLRWYALEEKNMMLDNHSLYDMTRGIFLPAKSEEEIFEHLGLEYLEPFERNA

SEQ ID NO: 4141 - DNA, 1587 bp, synthetic construct
  misc_feature 1..1587: note = Variant of terminal deoxynucleotidyltransferase
  source 1..1587: mol_type = other DNA
atgcaccatcatcatcatcatggcggtagcggcagccacggcattcgtaccatcgattcggacttcgggaagaaacagcagaaaaaaggcgataaccacgatagttccgccacttatgaaatcaaatttcacgagtttgtgctgttcattctcgaagaaaaaatgggtgcgacgcgtcgtacttttctgacagatttagcccgcaagaaagggttccgcgtcgagaatgaactgaccgacgaagttacccacatcgtggcagaaaatctgtcacgctctgaagtattggcttggctgaaagaacacaagatggagaagaccaagcaattcgaactgctggatattagctggcttatcgaaagcatgaaagttggtaaaccggtggacaccaaggggaaataccagttggcggaatcggttgaggtgagtgcgaacccagatccgacagaaggtcgtgtaaacgagctgcctcctactatgaaaaccgtttctccgtatgcgtgtcaacgccgcaccaccctgaacaaccgtaatcaacgttttacggactcgctggagattcttcgtgaaaattacgagctgaaaggcaacgacgatactgcgctggaatttcgtcgtgctatctccgtgctgaaaagccttccgtttgaggtacgtagcctgaaagacacggaaggattgccctggatcagtgatgaagtcaaagggattatggaagaaatcatcgaagtcggggagtcgcgtgaagtgcaggccgtgctcaatgatgagtggtatcaaagcttccacgcatttacgcgtgtctttggagtgggggtgaagacagcagacaagtggtaccgtatgggtctgcgcaccctcgaggatgttcgttccagcaagaccctgaagttgaccccgatgcagaaagtaggtctgctgtattatgaagatcttgctcgcggcgttacgcgtgccgaagctgacgcgatttggctgctggttcaggatgcagtcgcaactttcgacccggatgcgatcgtggagattgtcggtggatttcgtcgtgggaaacctcagggtcacgacgttgatctgcttatcagttctccgggagctgagaaagagcaagaagaccaactcctgcagaaagtgatgaatctgtggaagaaacaagggttgttgctgtgtggtcgtctggaatggagtcagtgggaagatgggggttcgccttccggtaaggctgatgagggtgacgcggaggcgtcgtgctttctgatcctcaaactttatgatcatctggtggtgaaaagtaaacgcaatatgccgactggttcgaacatgggcgagtccaaaccgtggaaagcaattaaagtagatctgctgcgttgcccctatggcagttttgcgtttgcgatgttgcagtggaccggaagccgcatgttccgtcgtgatctgcgctggtacgccctggaagagaagaacatgatgctggacaatcattcgctgtatgacatgacccgcggtatcttcctccctgctaaatcggaagaggaaattttcgaacatctggggcttgaatacctggaaccgttcgaacgtaacgca

SEQ ID NO: 4142 - protein, 529 aa, synthetic construct
  REGION 1..529: note = Variant of terminal deoxynucleotidyltransferase
MHHHHHHGGSGSHGIRTIDSDFGKKQQKKGDNHDSSATYEIKFHEFVLFILEEKMGATRRTFLTDLARKKGFRVENELTDEVTHIVAENLSRSEVLAWLKEHKMEKTKQFELLDISWLIESMKVGKPVDTKGKYQLAESVEVSANPDPTEGRVNELPPTMKTVSPYACQRRTTLNNRNQRFTDSLEILRENYELKGNDDTALEFRRAISVLKSLPFEVRSLKDTEGLPWISDEVKGIMEEIIEVGESREVQAVLNDEWYQSFHAFTRVFGVGVKTADKWYRMGLRTLEDVRSSKTLKLTPMQKVGLLYYEDLARGVTRAEADAIWLLVQDAVATFDPDAIVEIVGGFRRGKPQGHDVDLLISSPGAEKEQEDQLLQKVMNLWKKQGLLLCGRLEWSQWEDGGSPSGKADEGDAEASCFLILKLYDHLVVKSKRNMPTGSNMGESKPWKAIKVDLLRCPYGSFAFAMLQWTGSRMFRRDLRWYALEEKNMMLDNHSLYDMTRGIFLPAKSEEEIFEHLGLEYLEPFERNA

SEQ ID NO: 4143 - DNA, 1587 bp, synthetic construct
  misc_feature 1..1587: note = Variant of terminal deoxynucleotidyltransferase
  source 1..1587: mol_type = other DNA
atgcaccatcatcatcatcatggcggtagcggcagccacggcattcgtaccatcgattcggacttcgggaagaaacagcagaaaaaaggcgataaccacgatagttccgccacttatgaaatcaaatttcacgagtttgtgctgttcattctcgaagaaaaaatgggtgcgacgcgtcgtacttttctgacagatttagcccgcaagaaagggttccgcgtcgagaatgaactgaccgacgaagttacccacatcgtggcagaaaatctgtcacgctctgaagtattggcttggctgaaagaacacaagatggagaagaccaagcaattcgaactgctggatattagctggcttatcgaaagcatgaaagttggtaaaccggtggacaccaaggggaaataccagttggcggaatcggttgaggtgagtgcgaacccagatccgacagaaggtcgtgtaaacgagctgcctcctactatgaaaaccgtttctccgtatgcgtgtcaacgccgcaccaccctgaacaaccgtaatcaacgttttacggactcgctggagattcttcgtgaaaattacgagctgaaaggcaacgacgatactgcgctggaatttcgtcgtgctatctccgtgctgaaaagccttccgtttgaggtacgtagcctgaaagacacggaaggattgccctggatcagtgatgaagtcaaagggattatggaagaaatcatcgaagtcggggagtcgcgtgaagtgcaggccgtgctcaatgatgagtggtatcaaagcttccacgcatttacgcgtgtctttggagtgggggtgaagacagcagacaagtggtaccgtatgggtctgcgcaccctcgaggatgttcgttccagcaagaccctgaagttgaccccgatgcagaaagtaggtctgctgtattatgaagatcttgctcgcggcgttacgcgtgccgaagctgacgcgatttggctgctggttcaggatgcagtcgcaactttcgacccggatgcgatcgtggagattgtcggtggatttcgtcgtgggaaacctcagggtcacgacgttgatctgcttatcagttctccgggagctgagaaagagcaagaagaccaactcctgcagaaagtgatgaatctgtggaagaaacaagggttgttgctgtgtggtcgtctggaatggagtcagtgggaagatgggggttcgccttccggtaaggctgatgagggtgacgcggaggcgtcgtgctttctgatcctcaaactttatgatcatctggtgcgtaaaagtaaacgcaatatgccgactggttcgaacatgggcgagtccaaaccgtggaaagcaattaaagtagatctgctgcgttgcccctatggcagttttgcgtttgcgatgttgcagtggaccggaagccgcatgttccgtcgtgatctgcgctggtacgccctggaagagaagaacatgatgctggacaatcattcgctgtatgacatgacccgcggtatcttcctccctgctaaaagggaagaggaaattttcgaacatctggggcttgaatacctggaaccgttcgaacgtaacgca

SEQ ID NO: 4144 - protein, 529 aa, synthetic construct
  REGION 1..529: note = Variant of terminal deoxynucleotidyltransferase
MHHHHHHGGSGSHGIRTIDSDFGKKQQKKGDNHDSSATYEIKFHEFVLFILEEKMGATRRTFLTDLARKKGFRVENELTDEVTHIVAENLSRSEVLAWLKEHKMEKTKQFELLDISWLIESMKVGKPVDTKGKYQLAESVEVSANPDPTEGRVNELPPTMKTVSPYACQRRTTLNNRNQRFTDSLEILRENYELKGNDDTALEFRRAISVLKSLPFEVRSLKDTEGLPWISDEVKGIMEEIIEVGESREVQAVLNDEWYQSFHAFTRVFGVGVKTADKWYRMGLRTLEDVRSSKTLKLTPMQKVGLLYYEDLARGVTRAEADAIWLLVQDAVATFDPDAIVEIVGGFRRGKPQGHDVDLLISSPGAEKEQEDQLLQKVMNLWKKQGLLLCGRLEWSQWEDGGSPSGKADEGDAEASCFLILKLYDHLVRKSKRNMPTGSNMGESKPWKAIKVDLLRCPYGSFAFAMLQWTGSRMFRRDLRWYALEEKNMMLDNHSLYDMTRGIFLPAKREEEIFEHLGLEYLEPFERNA

SEQ ID NO: 4145 - DNA, 1587 bp, synthetic construct
  misc_feature 1..1587: note = Variant of terminal deoxynucleotidyltransferase
  source 1..1587: mol_type = other DNA
atgcaccatcatcatcatcatggcggtagcggcagccacggcattcgtaccatcgattcggacttcgggaagaaacagcagaaaaaaggcgataaccacgatagttccgccacttatgaaatcaaatttcacgagtttgtgctgttcattctcgaagaaaaaatgggtgcgacgcgtcgtacttttctgacagatttagcccgcaagaaagggttccgcgtcgagaatgaactgaccgacgaagttacccacatcgtggcagaaaatctgtcacgctctgaagtattggcttggctgaaagaacacaagatggagaagaccaagcaattcgaactgctggatattagctggcttatcgaaagcatgaaagttggtaaaccggtggacaccaaggggaaataccagttggcggaatcggttgaggtgagtgcgaacccagatccgacagaaggtcgtgtaaacgagctgcctcctactatgaaaaccgtttctccgtatgcgtgtcaacgccgcaccaccctgaacaaccgtaatcaacgttttacggactcgctggagattcttcgtgaaaattacgagctgaaaggcaacgacgatactgcgctggaatttcgtcgtgctatctccgtgctgaaaagccttccgtttgaggtacgtagcctgaaagacacggaaggattgccctggatcagtgatgaagtcaaagggattatggaagaaatcatcgaagtcggggagtcgcgtgaagtgcaggccgtgctcaatgatgagtggtatcaaagcttccacgcatttacgagtgtctttggagttggggtgaagacagcagacaagtggtaccgtatgggtctgcgcaccctcgaggatgttcgttccagcaagaccctgaagttgaccccgatgcagaaagtaggtctgctgtattatgaagatcttgctcgcggcgttacgcgtgccgaagctgacgcgatttggctgctggttcaggatgcagtcgcaactttcgacccggatgcgatcgtggagattgtcggtggatttcgtcgtgggaaacctcagggtcacgacgttgatctgcttatcagttctccgggagctgagaaagagcaagaagaccaactcctgcagaaagtgatgaatctgtggaagaaacaagggttgttgctgtgtggtcgtctggaatggagtcagtgggaagatgggggttcgccttccggtaaggctgatgagggtgacgcggaggcgtcgtgctttctgatcctcaaactttatgatcatctggtgcgtaaaagtaaacgcaatatgccgactggttcgaacatgggcgagtccaaaccgtggaaagcaattaaagtagatctgctgcgttgcccctatggcagttttgcgtttgcgatgttgcagtggaccggaagccgcatgttccgtcgtgatctgcgctggtacgccctggaagagaagaacatgatgctggacaatcattcgctgtatgacatgacccgcggtatcttcctccctgctaaatcggaagaggaaattttcgaacatctggggcttgaatacctggaaccgttcgaacgtaacgca

SEQ ID NO: 4146 - protein, 529 aa, synthetic construct; identical to SEQ ID NO: 3872
  REGION 1..529: note = Variant of terminal deoxynucleotidyltransferase

SEQ ID NO: 4147 - DNA, 1587 bp, synthetic construct
  misc_feature 1..1587: note = Variant of terminal deoxynucleotidyltransferase
  source 1..1587: mol_type = other DNA
atgcaccatcatcatcatcatggcggtagcggcagccacggcattcgtaccatcgattcggacttcgggaagaaacagcagaaaaaaggcgataaccacgatagttccgccacttatgaaatcaaatttcacgagtttgtgctgttcattctcgaagaaaaaatgggtgcgacgcgtcgtacttttctgacagatttagcccgcaagaaagggttccgcgtcgagaatgaactgaccgacgaagttacccacatcgtggcagaaaatctgtcacgctctgaagtattggcttggctgaaagaacacaagatggagaagaccaagcaattcgaactgctggatattagctggcttatcgaaagcatgaaagttggtaaaccggtggacaccaaggggaaataccagttggcggaatcggttgaggtgagtgcgaacccagatccgacagaaggtcgtgtaaacgagctgcctcctactatgaaaaccgtttctccgtatgcgtgtcaacgccgcaccaccctgaacaaccgtaatcaacgttttacggactcgctggagattcttcgtgaaaattacgagctgaaaggcaacgacgatactgcgctggaatttcgtcgtgctatctccgtgctgaaaagccttccgtttgaggtacgtagcctgaaagacacggaaggattgccctggatcagtgatgaagtcaaagggattatggaagaaatcatcgaagtcggggagtcgcgtgaagtgcaggccgtgctcaatgatgagtggtatcaaagcttccacgcatttacgcgtgtctttggagtgggggtgaagacagcagacaagtggtaccgtatgggtctgcgcaccctcgaggatgttcgttccagcaagaccctgaagttgaccccgatgcagaaagtaggtctgctgtattatgaagatcttgctcgcggcgttacgcgtgccgaagctgacgcgatttggctgctggttcaggatgcagtcgcaactttcgacccggatgcgatcgtggagattgtcggtggatttcgtcgtgggaaacctcagggtcacgacgttgatctgcttatcagttctccgggagctgagaaagagcaagaagaccaactcctgcagaaagtgatgaatctgtggaagaaacaagggttgttgctgtgtggtcgtctggaatggagtcagtgggaagatgggggttggccttccggtaaggctgacgagggtgacgcggaggcgtcgtgctttctgatcctcaaactttatgatcatctggtgcgtaaaagtaaacgcaatatgccgactggttcgaacatgggcgagtccaaaccgtggaaagcaattaaagtagatctgctgcgttgcccctatggcagttttgcgtttgcgatgttgcagtggaccggaagccgcatgttccgtcgtgatctgcgctggtacgccctggaagagaagaacatgatgctggacaatcattcgctgtatgacatgacccgcggtatcttcctccctgctaaatcggaagaggaaattttcgaacatctggggcttgaatacctggaaccgttcgaacgtaacgca

SEQ ID NO: 4148 - protein, 529 aa, synthetic construct
  REGION 1..529: note = Variant of terminal deoxynucleotidyltransferase
MHHHHHHGGSGSHGIRTIDSDFGKKQQKKGDNHDSSATYEIKFHEFVLFILEEKMGATRRTFLTDLARKKGFRVENELTDEVTHIVAENLSRSEVLAWLKEHKMEKTKQFELLDISWLIESMKVGKPVDTKGKYQLAESVEVSANPDPTEGRVNELPPTMKTVSPYACQRRTTLNNRNQRFTDSLEILRENYELKGNDDTALEFRRAISVLKSLPFEVRSLKDTEGLPWISDEVKGIMEEIIEVGESREVQAVLNDEWYQSFHAFTRVFGVGVKTADKWYRMGLRTLEDVRSSKTLKLTPMQKVGLLYYEDLARGVTRAEADAIWLLVQDAVATFDPDAIVEIVGGFRRGKPQGHDVDLLISSPGAEKEQEDQLLQKVMNLWKKQGLLLCGRLEWSQWEDGGWPSGKADEGDAEASCFLILKLYDHLVRKSKRNMPTGSNMGESKPWKAIKVDLLRCPYGSFAFAMLQWTGSRMFRRDLRWYALEEKNMMLDNHSLYDMTRGIFLPAKSEEEIFEHLGLEYLEPFERNA

SEQ ID NO: 4149 - DNA, 1587 bp, synthetic construct
  misc_feature 1..1587: note = Variant of terminal deoxynucleotidyltransferase
  source 1..1587: mol_type = other DNA
atgcaccatcatcatcatcatggcggtagcggcagccacggcattcgtaccatcgattcggacttcgggaagaaacagcagaaaaaaggcgataaccacgatagttccgccacttatgaaatcaaatttcacgagtttgtgctgttcattctcgaagaaaaaatgggtgcgacgcgtcgtacttttctgacagatttagcccgcaagaaagggttccgcgtcgagaatgaactgaccgacgaagttacccacatcgtggcagaaaatctgtcacgctctgaagtattggcttggctgaaagaacacaagatggagaagaccaagcaattcgaactgctggatattagctggcttatcgaaagcatgaaagttggtaaaccggtggacaccaaggggaaataccagttggcggaatcggttgaggtgagtgcgaacccagatccgacagaaggtcgtgtaaacgagctgcctcctactatgaaaaccgtttctccgtatgcgtgtcaacgccgcaccaccctgaacaaccgtaatcaacgttttacggactcgctggagattcttcgtgaaaattacgagctgaaaggcaacgacgatactgcgctggaatttcgtcgtgctatctccgtgctgaaaagccttccgtttgaggtacgtagcctgaaagacacggaaggattgccctggatcagtgatgaagtcaaagggattatggaagaaatcatcgaagtcggggagtcgcgtgaagtgcaggccgtgctcaatgatgagtggtatcaaagcttccacgcatttacgcgtgtctttggagtgggggtgaagacagcagacaagtggtaccgtatgggtctgcgcaccctcgaggatgttcgttccagcaagaccctgaagttgaccccgatgcagaaagtaggtctgctgtattatgaagatcttgctcgcggcgttacgcgtgccgaagctgacgcgatttggctgctggttcaggatgcagtcgcaactttcgacccggatgcgatcgtggagattgtcggtggatttcgtcgtgggaaacctcagggtcacgacgttgatctgcttatcagttctccgggagctgagaaagagcaagaagaccaactcctgcagaaagtgatgaatctgtggaagaaacaagggttgttgctgtgtggtcgtctggaatggagtcagtgggaagatgggggttcgccttccggtaaggctgatgagggtgacgcggaggcgtcgtgctttctgatcctcaaactttatgatcatctggtgcgtaaaagtaaacgcaatatgccgactggttcgaacatgggcgagtccaaaccgtggaaagcaattaaagtagatctgctgcgttgcccctatggcagttttgcgtttgcgatgttgcagtggaccggaagccgcatgttccgtcgtgatctgcgctggtacgccctggaagagaagaacatgatggtggacaatcattcgctgtatgacatgacccgcggtatcttcctccctgctaaatcggaagaggaaattttcgaacatctggggcttgaatacctggaaccgttcgaacgtaacgca

SEQ ID NO: 4150 - protein, 529 aa, synthetic construct
  REGION 1..529: note = Variant of terminal deoxynucleotidyltransferase
MHHHHHHGGSGSHGIRTIDSDFGKKQQKKGDNHDSSATYEIKFHEFVLFILEEKMGATRRTFLTDLARKKGFRVENELTDEVTHIVAENLSRSEVLAWLKEHKMEKTKQFELLDISWLIESMKVGKPVDTKGKYQLAESVEVSANPDPTEGRVNELPPTMKTVSPYACQRRTTLNNRNQRFTDSLEILRENYELKGNDDTALEFRRAISVLKSLPFEVRSLKDTEGLPWISDEVKGIMEEIIEVGESREVQAVLNDEWYQSFHAFTRVFGVGVKTADKWYRMGLRTLEDVRSSKTLKLTPMQKVGLLYYEDLARGVTRAEADAIWLLVQDAVATFDPDAIVEIVGGFRRGKPQGHDVDLLISSPGAEKEQEDQLLQKVMNLWKKQGLLLCGRLEWSQWEDGGSPSGKADEGDAEASCFLILKLYDHLVRKSKRNMPTGSNMGESKPWKAIKVDLLRCPYGSFAFAMLQWTGSRMFRRDLRWYALEEKNMMVDNHSLYDMTRGIFLPAKSEEEIFEHLGLEYLEPFERNA

SEQ ID NO: 4151 - DNA, 1587 bp, synthetic construct
  misc_feature 1..1587: note = Variant of terminal deoxynucleotidyltransferase
  source 1..1587: mol_type = other DNA
atgcaccatcatcatcatcatggcggtagcggcagccacggcattcgtaccatcgattcggacttcgggaagaaacagcagaaaaaaggcgataaccacgatagttccgccacttatgaaatcaaatttcacgagtttgtgctgttcattctcgaagaaaaaatgggtgcgacgcgtcgtacttttctgacagatttagcccgcaagaaagggttccgcgtcgagaatgaactgaccgacgaagttacccacatcgtggcagaaaatctgtcacgctctgaagtattggcttggctgaaagaacacaagatggagaagaccaagcaattcgaactgctggatattagctggcttatcgaaagcatgaaagttggtaaaccggtggacaccaaggggaaataccagttggcggaatcggttgaggtgagtgcgaacccagatccgacagaaggtcgtgtaaacgagctgcctcctactatgaaaaccgtttctccgtatgcgtgtcaacgccgcaccaccctgaacaaccgtaatcaacgttttacggactcgctggagattcttcgtgaaaattacgagctgaaaggcacggatgatactgcgctggaatttcgtcgtgctatctccgtgctgaaaagccttccgtttgaggtacgtagcctgaaagacacggaaggattgccctggatcagtgatgaagtcaaagggattatggaagaaatcatcgaagtcggggagtcgcgtgaagtgcaggccgtgctcaatgatgagtggtatcaaagcttccacgcatttacgcgtgtctttggagtgggggtgaagacagcagacaagtggtaccgtatgggtctgcgcaccctcgaggatgttcgttccagcaagaccctgaagttgaccccgatgcagaaagtaggtctgctgtattatgaagatcttgctcgcggcgttacgcgtgccgaagctgacgcgatttggctgctggttcaggatgcagtcgcaactttcgacccggatgcgatcgtggagattgtcggtggatttcgtcgtgggaaacctcagggtcacgacgttgatctgcttatcagttctccgggagctgagaaagagcaagaagaccaactcctgcagaaagtgatgaatctgtggaagaaacaagggttgttgctgtgtggtcgtctggaatggagtcagtgggaagatgggggttcgccttccggtaaggctgatgagggtgacgcggaggcgtcgtgctttctgatcctcaaactttatgatcatctggtgcgtaaaagtaaacgcaatatgccgactggttcgaacatgggcgagtccaaaccgtggaaagcaattaaagtagatctgctgcgttgcccctatggcagttttgcgtttgcgatgttgcagtggaccggaagccgcatgttccgtcgtgatctgcgctggtacgccctggaagagaagaacatgatgctggacaatcattcgctgtatgacatgacccgcggtatcttcctccctgctaaatcggaagaggaaattttcgaacatctggggcttgaatacctggaaccgttcgaacgtaacgca

SEQ ID NO: 4152 - protein, 529 aa, synthetic construct
  REGION 1..529: note = Variant of terminal deoxynucleotidyltransferase
MHHHHHHGGSGSHGIRTIDSDFGKKQQKKGDNHDSSATYEIKFHEFVLFILEEKMGATRRTFLTDLARKKGFRVENELTDEVTHIVAENLSRSEVLAWLKEHKMEKTKQFELLDISWLIESMKVGKPVDTKGKYQLAESVEVSANPDPTEGRVNELPPTMKTVSPYACQRRTTLNNRNQRFTDSLEILRENYELKGTDDTALEFRRAISVLKSLPFEVRSLKDTEGLPWISDEVKGIMEEIIEVGESREVQAVLNDEWYQSFHAFTRVFGVGVKTADKWYRMGLRTLEDVRSSKTLKLTPMQKVGLLYYEDLARGVTRAEADAIWLLVQDAVATFDPDAIVEIVGGFRRGKPQGHDVDLLISSPGAEKEQEDQLLQKVMNLWKKQGLLLCGRLEWSQWEDGGSPSGKADEGDAEASCFLILKLYDHLVRKSKRNMPTGSNMGESKPWKAIKVDLLRCPYGSFAFAMLQWTGSRMFRRDLRWYALEEKNMMLDNHSLYDMTRGIFLPAKSEEEIFEHLGLEYLEPFERNA

SEQ ID NO: 4153 - DNA, 1587 bp, synthetic construct
  misc_feature 1..1587: note = Variant of terminal deoxynucleotidyltransferase
  source 1..1587: mol_type = other DNA
atgcaccatcatcatcatcatggcggtagcggcagccacggcattcgtaccatcgattcggacttcgggaagaaacagcagaaaaaaggcgataaccacgatagttccgccacttatgaaatcaaatttcacgagtttgtgctgttcattctcgaagaaaaaatgggtgcgacgcgtcgtacttttctgacagatttagcccgcaagaaagggttccgcgtcgagaatgaactgaccgacgaagttacccacatcgtggcagaaaatctgtcacgctctgaagtattggcttggctgaaagaacacaagatggagaagaccaagcaattcgaactgctggatattagctggcttatcgaaagcatgaaagttggtaaaccggtggacaccaaggggaaataccagttggcggaatcggttgaggtgagtgcgaacccagatccgacagaaggtcgtgtaaacgagctgcctcctactatgaaaaccgtttctccgtatgcgtgtcaacgccgcaccaccctgaacaaccgtaatcaacgttttacggactcgctggagattcttcgtgaaaattacgagctgaaaggcaacgacgatactgcgctggaatttcgtcgtgctatctccgtgctgaaaagccttccgtttgaggtacgtagcctgaaagacacggaaggattgccctggatcagtgatgaagtcaaagggattatggaagaaatcatcgaagtcggggagtcgcgtgaagtgcaggccgtgctcaatgatgagtggtatcaaagcttccacgcatttacgcgtgtctttggagtgggggtgaagacagcagacaagtggtaccgtatgggtctgcgcaccctcgaggatgttcgttccagcaaggcgctgaagttgaccccgatgcagaaagtaggtctgctgtattatgaagatcttgctcgcggcgttacgcgtgccgaagctgacgcgatttggctgctggttcaggatgcagtcgcaactttcgacccggatgcgatcgtggagattgtcggtggatttcgtcgtgggaaacctcagggtcacgacgttgatctgcttatcagttctccgggagctgagaaagagcaagaagaccaactcctgcagaaagtgatgaatctgtggaagaaacaagggttgttgctgtgtggtcgtctggaatggagtcagtgggaagatgggggttcgccttccggtaaggctgatgagggtgacgcggaggcgtcgtgctttctgatcctcaaactttatgatcatctggtgcgtaaaagtaaacgcaatatgccgactggttcgaacatgggcgagtccaaaccgtggaaagcaattaaagtagatctgctgcgttgcccctatggcagttttgcgtttgcgatgttgcagtggaccggaagccgcatgttccgtcgtgatctgcgctggtacgccctggaagagaagaacatgatgctggacaatcattcgctgtatgacatgacccgcggtatcttcctccctgctaaatcggaagaggaaattttcgaacatctggggcttgaatacctggaaccgttcgaacgtaacgca

SEQ ID NO: 4154 - protein, 529 aa, synthetic construct
  REGION 1..529: note = Variant of terminal deoxynucleotidyltransferase
MHHHHHHGGSGSHGIRTIDSDFGKKQQKKGDNHDSSATYEIKFHEFVLFILEEKMGATRRTFLTDLARKKGFRVENELTDEVTHIVAENLSRSEVLAWLKEHKMEKTKQFELLDISWLIESMKVGKPVDTKGKYQLAESVEVSANPDPTEGRVNELPPTMKTVSPYACQRRTTLNNRNQRFTDSLEILRENYELKGNDDTALEFRRAISVLKSLPFEVRSLKDTEGLPWISDEVKGIMEEIIEVGESREVQAVLNDEWYQSFHAFTRVFGVGVKTADKWYRMGLRTLEDVRSSKALKLTPMQKVGLLYYEDLARGVTRAEADAIWLLVQDAVATFDPDAIVEIVGGFRRGKPQGHDVDLLISSPGAEKEQEDQLLQKVMNLWKKQGLLLCGRLEWSQWEDGGSPSGKADEGDAEASCFLILKLYDHLVRKSKRNMPTGSNMGESKPWKAIKVDLLRCPYGSFAFAMLQWTGSRMFRRDLRWYALEEKNMMLDNHSLYDMTRGIFLPAKSEEEIFEHLGLEYLEPFERNA

SEQ ID NO: 4155 - DNA, 1587 bp, synthetic construct
  misc_feature 1..1587: note = Variant of terminal deoxynucleotidyltransferase
  source 1..1587: mol_type = other DNA
atgcaccatcatcatcatcatggcggtagcggcagccacggcattcgtaccatcgattcggacttcgggaagaaacagcagaaaaaaggcgataaccacgatagttccgccacttatgaaatcaaatttcacgagtttgtgctgttcattctcgaagaaaaaatgggtgcgacgcgtcgtacttttctgacagatttagcccgcaagaaagggttccgcgtcgagaatgaactgaccgacgaagttacccacatcgtggcagaaaatctgtcacgctctgaagtattggcttggctgaaagaacacaagatggagaagaccaagcaattcgaactgctggatattagctggcttatcgaaagcatgaaagttggtaaaccggtggacaccaaggggaaataccagttggcggaatcggttgaggtgagtgcgaacccagatccgacagaaggtcgtgtaaacgagctgcctcctactatgaaaaccgtttctccgtatgcgtgtcaacgccgcaccaccctgaacaaccgtaatcaacgttttacggactcgctggagattcttcgtgaaaattacgagctgaaaggcaacgacgatactgcgctggaatttcgtcgtgctatctccgtgctgaaaagccttccgtttgaggtacgtagcctgaaagacacggaaggattgccctggatcagtgatgaagtcaaagggattatggaagaaatcatcgaagtcggggagtcgcgtgaagtgcaggccgtgctcaatgatgagtggtatcaaagcttccacgcatttacgcgtgtctttggagtgggggtgaagacagcagacaagtggtaccgtatgggtctgcgcaccctcgaggatgttcgttccagcaagaccctgaagttgaccccgatgcagaaagtaggtctgctgtattatgaagatcttgctcgcggcgttacgcgtgccgaagctgacgcgattttgctgctggttcaggatgcagtcgcaactttcgacccggatgcgatcgtggagattgtcggtggatttcgtcgtgggaaacctcagggtcacgacgttgatctgcttatcagttctccgggagctgagaaagagcaagaagaccaactcctgcagaaagtgatgaatctgtggaagaaacaagggttgttgctgtgtggtcgtctggaatggagtcagtgggaagatgggggttcgccttccggtaaggctgatgagggtgacgcggaggcgtcgtgctttctgatcctcaaactttatgatcatctggtgcgtaaaagtaaacgcaatatgccgactggttcgaacatgggcgagtccaaaccgtggaaagcaattaaagtagatctgctgcgttgcccctatggcagttttgcgtttgcgatgttgcagtggaccggaagccgcatgttccgtcgtgatctgcgctggtacgccctggaagagaagaacatgatgctggacaatcattcgctgtatgacatgacccgcggtatcttcctccctgctaaatcggaagaggaaattttcgaacatctggggcttgaatacctggaaccgttcgaacgtaacgca

SEQ ID NO: 4156 - protein, 529 aa, synthetic construct
  REGION 1..529: note = Variant of terminal deoxynucleotidyltransferase
MHHHHHHGGSGSHGIRTIDSDFGKKQQKKGDNHDSSATYEIKFHEFVLFILEEKMGATRRTFLTDLARKKGFRVENELTDEVTHIVAENLSRSEVLAWLKEHKMEKTKQFELLDISWLIESMKVGKPVDTKGKYQLAESVEVSANPDPTEGRVNELPPTMKTVSPYACQRRTTLNNRNQRFTDSLEILRENYELKGNDDTALEFRRAISVLKSLPFEVRSLKDTEGLPWISDEVKGIMEEIIEVGESREVQAVLNDEWYQSFHAFTRVFGVGVKTADKWYRMGLRTLEDVRSSKTLKLTPMQKVGLLYYEDLARGVTRAEADAILLLVQDAVATFDPDAIVEIVGGFRRGKPQGHDVDLLISSPGAEKEQEDQLLQKVMNLWKKQGLLLCGRLEWSQWEDGGSPSGKADEGDAEASCFLILKLYDHLVRKSKRNMPTGSNMGESKPWKAIKVDLLRCPYGSFAFAMLQWTGSRMFRRDLRWYALEEKNMMLDNHSLYDMTRGIFLPAKSEEEIFEHLGLEYLEPFERNA

SEQ ID NO: 4157 - DNA, 1587 bp, synthetic construct
  misc_feature 1..1587: note = Variant of terminal deoxynucleotidyltransferase
  source 1..1587: mol_type = other DNA
atgcaccatcatcatcatcatggcggtagcggcagccacggcattcgtaccatcgattcggacttcgggaagaaacagcagaaaaaaggcgataaccacgatagttccgccacttatgaaatcaaatttcacgagtttgtgctgttcattctcgaagaaaaaatgggtgcgacgcgtcgtacttttctgacagatttagcccgcaagaaagggttccgcgtcgagaatgaactgaccgacgaagttacccacatcgtggcagaaaatctgtcacgctctgaagtattggcttggctgaaagaacacaagatggagaagaccaagcaattcgaactgctggatattagctggcttatcgaaagcatgaaagttggtaaaccggtggacaccaaggggaaataccagttggcggaatcggttgaggtgagtgcgaacccagatccgacagaaggtcgtgtaaacgagctgcctcctactatgaaaaccgtttctccgtatgcgtgtcaacgccgcaccaccctgaacaaccgtaatcaacgttttacggactcgctggagattcttcgtgaaaattacgagctgaaaggcaacgacgatactgcgctggaatttcgtcgtgctatctccgtgctgaaaagccttccgtttgaggtacgtagcctgaaagacacggaaggattgccctggatcagtgatgaagtcaaagggattatggaagaaatcatcgaagtcggggagtcgcgtgaagtgcaggccgtgctcaatgatgagtggtatcaaagcttccacgcatttacgcgtgtctttggagtgggggtgaagacagcagacaagtggtaccgtatgggtctgcgcaccctcgaggatgttcgttccagcaagaccctgaagttgaccccgatgcagaaagtaggtctgctgtattatgaagatcttgctcgcggcgttacgcgtgccgaagctgacgcgatttggctgctggttcaggatgcagtcgcaactttcgacccggatgcgatcgtggagattgtcggtggatttcgtcgtgggaaacctcagggtcacgacgttgatctgcttatcagttctccgggagctgagaaagagcaagaagaccaactcctgcagaaagtgatgaatctgtggaagaaacaagggttgttgctgtgtggtcgtctggaatggagtcagtgggaagatgggggttcgccttccggtaaggctgatgagggtgacgcggaggcgtcgtgctttctgatcctcaaactttatgatcatctggtgcgtaaaagtaaacgcaatatgccgactggttcgaacatgggcgagtccaaaccgtggaaagcaattaaagtagatctgctgcgttgcccctatggcagttttgcgtttgcgatgttgcagtggaccggaagccgcatgttccgtcgtgatctgcgctggtacgccctggaagagaagaacatgatgctggacaatcattcgctgtatgacatgacccgcggtatcttcctccctgggaaatcggaagaggaaattttcgaacatctggggcttgaatacctggaaccgttcgaacgtaacgca

SEQ ID NO: 4158 - protein, 529 aa, synthetic construct
  REGION 1..529: note = Variant of terminal deoxynucleotidyltransferase
MHHHHHHGGSGSHGIRTIDSDFGKKQQKKGDNHDSSATYEIKFHEFVLFILEEKMGATRRTFLTDLARKKGFRVENELTDEVTHIVAENLSRSEVLAWLKEHKMEKTKQFELLDISWLIESMKVGKPVDTKGKYQLAESVEVSANPDPTEGRVNELPPTMKTVSPYACQRRTTLNNRNQRFTDSLEILRENYELKGNDDTALEFRRAISVLKSLPFEVRSLKDTEGLPWISDEVKGIMEEIIEVGESREVQAVLNDEWYQSFHAFTRVFGVGVKTADKWYRMGLRTLEDVRSSKTLKLTPMQKVGLLYYEDLARGVTRAEADAIWLLVQDAVATFDPDAIVEIVGGFRRGKPQGHDVDLLISSPGAEKEQEDQLLQKVMNLWKKQGLLLCGRLEWSQWEDGGSPSGKADEGDAEASCFLILKLYDHLVRKSKRNMPTGSNMGESKPWKAIKVDLLRCPYGSFAFAMLQWTGSRMFRRDLRWYALEEKNMMLDNHSLYDMTRGIFLPGKSEEEIFEHLGLEYLEPFERNA

SEQ ID NO: 4159 - DNA, 1587 bp, synthetic construct
  misc_feature 1..1587: note = Variant of terminal deoxynucleotidyltransferase
  source 1..1587: mol_type = other DNA
atgcaccatcatcatcatcatggcggtagcggcagccacggcattcgtaccatcgattcggacttcgggaagaaacagcagaaaaaaggcgataaccacgatagttccgccacttatgaaatcaaatttcacgagtttgtgctgttcattctcgaagaaaaaatgggtgcgacgcgtcgtacttttctgacagatttagcccgcaagaaagggttccgcgtcgagaatgaactgaccgacgaagttacccacatcgtggcagaaaatctgtcacgctctgaagtattggcttggctgaaagaacacaagatggagaagaccaagcaattcgaactgctggatattagctggcttatcgaaagcatgaaagttggtaaaccggtggacaccaaggggaaataccagttggcggaatcggttgaggtgagtgcgaacccagatccgacagaaggtcgtgtaaacgagctgcctcctactatgaaaaccgtttctccgtatgcgtgtcaacgccgcaccaccctgaacaaccgtaatcaacgttttacggactcgctggagattcttcgtgaaaattacgagctgaaaggcaacgacgatactgcgctggaatttcgtcgtgctatctccgtgctgaaaagccttccgtttgaggtacgtagcctgaaagacacggaaggattgccctggatcagtgatgaagtcaaagggattatggaagaaatcatcgaagtcggggagtcgcgtgaagtgcaggccgtgctcaatgatgagtggtatcaaagcttccacgcatttacgcgtgtctttggagtgggggtgaagacagcagacaagtggtaccgtatgggtctgcgcaccctcgaggatgttcgttccagcaagaccctgaagttgaccccgatgcagaaagtaggtctgctgtattatgaagatcttgctcgcggcgttacgcgtgccgaagctgacgcgatttggctgctggttcaggatgcagtcgcaactttcgacccggatgcgatcgtggagattgtcggtggatttcgtcgtgggaaacctcagggtcacgacgttgatctgcttatcagttctccgggagctgagaaagagcaagaagaccaactcctgcagaaagtgatgaatctgtggaagaaacaagggttgttgctgtgtggtcgtctggaatggagtcagtgggaagatgggggttcgccttccggtaaggctgatgagggtgacgcggaggcgtcgtgctttctgatcctcaaactttatgatcatctggtgcgtaaaagtaaacgcaatatgccgactggttcgaacatgggcgagtccaaaccgtggaaagcaattaaagtagatctgctgcgttgcccctatggcagttttgcgtttgcgatgttgcagtggaccggaagccgcatgttccgtcgtgatctgcgctggtacgccctggaagagaagaacatgatgctggacaatacgtcgctgtatgacatgacccgcggtatcttcctccctgctaaatcggaagaggaaattttcgaacatctggggcttgaatacctggaaccgttcgaacgtaacgca

SEQ ID NO: 4160 - protein, 529 aa, synthetic construct
  REGION 1..529: note = Variant of terminal deoxynucleotidyltransferase
MHHHHHHGGSGSHGIRTIDSDFGKKQQKKGDNHDSSATYEIKFHEFVLFILEEKMGATRRTFLTDLARKKGFRVENELTDEVTHIVAENLSRSEVLAWLKEHKMEKTKQFELLDISWLIESMKVGKPVDTKGKYQLAESVEVSANPDPTEGRVNELPPTMKTVSPYACQRRTTLNNRNQRFTDSLEILRENYELKGNDDTALEFRRAISVLKSLPFEVRSLKDTEGLPWISDEVKGIMEEIIEVGESREVQAVLNDEWYQSFHAFTRVFGVGVKTADKWYRMGLRTLEDVRSSKTLKLTPMQKVGLLYYEDLARGVTRAEADAIWLLVQDAVATFDPDAIVEIVGGFRRGKPQGHDVDLLISSPGAEKEQEDQLLQKVMNLWKKQGLLLCGRLEWSQWEDGGSPSGKADEGDAEASCFLILKLYDHLVRKSKRNMPTGSNMGESKPWKAIKVDLLRCPYGSFAFAMLQWTGSRMFRRDLRWYALEEKNMMLDNTSLYDMTRGIFLPAKSEEEIFEHLGLEYLEPFERNA

SEQ ID NO: 4161 - DNA, 1587 bp, synthetic construct
  misc_feature 1..1587: note = Variant of terminal deoxynucleotidyltransferase
  source 1..1587: mol_type = other DNA
atgcaccatcatcatcatcatggcggtagcggcagccacggcattcgtaccatcgattcggacttcgggaagaaacagcagaaaaaaggcgataaccacgatagttccgccacttatgaaatcaaatttcacgagtttgtgctgttcattctcgaagaaaaaatgggtgcgacgcgtcgtacttttctgacagatttagcccgcaagaaagggttccgcgtcgagaatgaactgaccgacgaagttacccacatcgtggcagaaaatctgtcacgctctgaagtattggcttggctgaaagaacacaagatggagaagaccaagcaattcgaactgctggatattagctggcttatcgaaagcatgaaagttggtaaaccggtggacaccaaggggaaataccagttggcggaatcggttgaggtgagtgcgaacccagatccgacagaaggtcgtgtaaacgagctgcctcctactatgaaaaccgtttctccgtatgcgtgtcaacgccgcaccaccctgaacaaccgtaatcaacgttttacggactcgctggagattcttcgtgaaaattacgagctgaaaggcaacgacgatactgcgctggaatttcgtcgtgctatctccgtgctgaaaagccttccgtttgaggtacgtagcctgaaagacacggaaggattgccctggatcagtgatgaagtcaaagggattatggaagaaatcatcgaagtcggggagtcgcgtgaagtgcaggccgtgctcaatgatgagtggtatcaaagcttccacgcatttacgcgtgtctttggagtgggggtgaagacagcagacaagtggtaccgtatgggtctgcgcaccctcgaggatgttcgttccagcaagaccctgaagttgaccccgatgcagaaagtaggtctgctgtattatgaagatcttgctcgcggcgttacgcgtgccgaagctgacgcgatttggctgctggttcaggatgcagtcgcaactttcgacccggatgcgagtgtggagattgtcggtggatttcgtcgtgggaaacctcagggtcacgacgttgatctgcttatcagttctccgggagctgagaaagagcaagaagaccaactcctgcagaaagtgatgaatctgtggaagaaacaagggttgttgctgtgtggtcgtctggaatggagtcagtgggaagatgggggttcgccttccggtaaggctgatgagggtgacgcggaggcgtcgtgctttctgatcctcaaactttatgatcatctggtgcgtaaaagtaaacgcaatatgccgactggttcgaacatgggcgagtccaaaccgtggaaagcaattaaagtagatctgctgcgttgcccctatggcagttttgcgtttgcgatgttgcagtggaccggaagccgcatgttccgtcgtgatctgcgctggtacgccctggaagagaagaacatgatgctggacaatcattcgctgtatgacatgacccgcggtatcttcctccctgctaaatcggaagaggaaattttcgaacatctggggcttgaatacctggaaccgttcgaacgtaacgca

SEQ ID NO: 4162 - protein, 529 aa, synthetic construct
  REGION 1..529: note = Variant of terminal deoxynucleotidyltransferase
MHHHHHHGGSGSHGIRTIDSDFGKKQQKKGDNHDSSATYEIKFHEFVLFILEEKMGATRRTFLTDLARKKGFRVENELTDEVTHIVAENLSRSEVLAWLKEHKMEKTKQFELLDISWLIESMKVGKPVDTKGKYQLAESVEVSANPDPTEGRVNELPPTMKTVSPYACQRRTTLNNRNQRFTDSLEILRENYELKGNDDTALEFRRAISVLKSLPFEVRSLKDTEGLPWISDEVKGIMEEIIEVGESREVQAVLNDEWYQSFHAFTRVFGVGVKTADKWYRMGLRTLEDVRSSKTLKLTPMQKVGLLYYEDLARGVTRAEADAIWLLVQDAVATFDPDASVEIVGGFRRGKPQGHDVDLLISSPGAEKEQEDQLLQKVMNLWKKQGLLLCGRLEWSQWEDGGSPSGKADEGDAEASCFLILKLYDHLVRKSKRNMPTGSNMGESKPWKAIKVDLLRCPYGSFAFAMLQWTGSRMFRRDLRWYALEEKNMMLDNHSLYDMTRGIFLPAKSEEEIFEHLGLEYLEPFERNA

SEQ ID NO: 4163 - DNA, 1587 bp, synthetic construct
  misc_feature 1..1587: note = Variant of terminal deoxynucleotidyltransferase
  source 1..1587: mol_type = other DNA
atgcaccatcatcatcatcatggcggtagcggcagccacggcattcgtaccatcgattcggacttcgggaagaaacagcagaaaaaaggcgataaccacgatagttccgccacttatgaaatcaaatttcacgagtttgtgctgttcattctcgaagaaaaaatgggtgcgacgcgtcgtacttttctgacagatttagcccgcaagaaagggttccgcgtcgagaatgaactgaccgacgaagttacccacatcgtggcagaaaatctgtcacgctctgaagtattggcttggctgaaagaacacaagatggagaagaccaagcaattcgaactgctggatattagctggcttatcgaaagcatgaaagttggtaaaccggtggacaccaaggggaaataccagttggcggaatcggttgaggtgagtgcgaacccagatccgacagaaggtcgtgtaaacgagctgcctcctactatgaaaaccgtttctccgtatgcgtgtcaacgccgcaccaccctgaacaaccgtaatcaacgttttacggactcgctggagattcttcgtgaaaattacgagctgaaaggcaacgatgatactgcgctgggttttcgtcgtgctatctccgtgctgaaaagccttccgtttgaggtacgtagcctgaaagacacggaaggattgccctggatcagtgatgaagtcaaagggattatggaagaaatcatcgaagtcggggagtcgcgtgaagtgcaggccgtgctcaatgatgagtggtatcaaagcttccacgcatttacgcgtgtctttggagtgggggtgaagacagcagacaagtggtaccgtatgggtctgcgcaccctcgaggatgttcgttccagcaagaccctgaagttgaccccgatgcagaaagtaggtctgctgtattatgaagatcttgctcgcggcgttacgcgtgccgaagctgacgcgatttggctgctggttcaggatgcagtcgcaactttcgacccggatgcgatcgtggagattgtcggtggatttcgtcgtgggaaacctcagggtcacgacgttgatctgcttatcagttctccgggagctgagaaagagcaagaagaccaactcctgcagaaagtgatgaatctgtggaagaaacaagggttgttgctgtgtggtcgtctggaatggagtcagtgggaagatgggggttcgccttccggtaaggctgatgagggtgacgcggaggcgtcgtgctttctgatcctcaaactttatgatcatctggtgcgtaaaagtaaacgcaatatgccgactggttcgaacatgggcgagtccaaaccgtggaaagcaattaaagtagatctgctgcgttgcccctatggcagttttgcgtttgcgatgttgcagtggaccggaagccgcatgttccgtcgtgatctgcgctggtacgccctggaagagaagaacatgatgctggacaatcattcgctgtatgacatgacccgcggtatcttcctccctgctaaatcggaagaggaaattttcgaacatctggggcttgaatacctggaaccgttcgaacgtaacgca

SEQ ID NO: 4164 - protein, 529 aa, synthetic construct
  REGION 1..529: note = Variant of terminal deoxynucleotidyltransferase
MHHHHHHGGSGSHGIRTIDSDFGKKQQKKGDNHDSSATYEIKFHEFVLFILEEKMGATRRTFLTDLARKKGFRVENELTDEVTHIVAENLSRSEVLAWLKEHKMEKTKQFELLDISWLIESMKVGKPVDTKGKYQLAESVEVSANPDPTEGRVNELPPTMKTVSPYACQRRTTLNNRNQRFTDSLEILRENYELKGNDDTALGFRRAISVLKSLPFEVRSLKDTEGLPWISDEVKGIMEEIIEVGESREVQAVLNDEWYQSFHAFTRVFGVGVKTADKWYRMGLRTLEDVRSSKTLKLTPMQKVGLLYYEDLARGVTRAEADAIWLLVQDAVATFDPDAIVEIVGGFRRGKPQGHDVDLLISSPGAEKEQEDQLLQKVMNLWKKQGLLLCGRLEWSQWEDGGSPSGKADEGDAEASCFLILKLYDHLVRKSKRNMPTGSNMGESKPWKAIKVDLLRCPYGSFAFAMLQWTGSRMFRRDLRWYALEEKNMMLDNHSLYDMTRGIFLPAKSEEEIFEHLGLEYLEPFERNA

SEQ ID NO: 4165 - DNA, 1587 bp, synthetic construct
  misc_feature 1..1587: note = Variant of terminal deoxynucleotidyltransferase
  source 1..1587: mol_type = other DNA
atgcaccatcatcatcatcatggcggtagcggcagccacggcattcgtaccatcgattcggacttcgggaagaaacagcagaaaaaaggcgataaccacgatagttccgccacttatgaaatcaaatttcacgagtttgtgctgttcattctcgaagaaaaaatgggtgcgacgcgtcgtacttttctgacagatttagcccgcaagaaagggttccgcgtcgagaatgaactgaccgacgaagttacccacatcgtggcagaaaatctgtcacgctctgaagtattggcttggctgaaagaacacaagatggagaagaccaagcaattcgaactgctggatattagctggcttatcgaaagcatgaaagttggtaaaccggtggacaccaaggggaaataccagttggcggaatcggttgaggtgagtgcgaacccagatccgacagaaggtcgtgtaaacgagctgcctcctactatgaaaaccgtttctccgtatgcgtgtcaacgccgcaccaccctgaacaaccgtaatcaacgttttacggactcgctggagattcttcgtgaaaattacgagctgaaaggcaacgacgatactgcgctggaatttcgtcgtgctatctccgtgctgaaaagccttccgtttgaggtacgtagcctgaaagacacggaaggattgccctggatcagtgatgaagtcaaagggattatggaagaaatcatcgaagtcggggagtcgcgtgaagtgcaggccgtgctcaatgatgagtggtatcaaagcttccacgcatttacgcgtgtctttggagtgggggtgaagacagcagacaagtggtaccgtatgggtctgcgcaccctcgaggatgttcgttccagcaagaccctgaagttgaccccgatgcagaaagtaggtctgctgtattatgaagatcttgctcgcggcgttacgcgtgccgaagctgacgcgatttggctgctggttcaggatgcagtcgcaactttcgacccggatgcgatcgtggagattgtcggtggatttcgtcgtgggaaacctcagggtcacgacgttgatctgcttatcagttctccgggagctgagaaagagcaagaagaccaactcctgcagaaagtgatgaatctgtggaagaaacaagggttgttgctgtgtggtcgtctggaatggagtcagtgggaagatgggggttcgccttccggtaaggctgatgagggtgacgcggaggcgtcgtgctttctgatcctcaaactttatgatcatctggtgcgtaaaagtaaacgcaatatgccgactggttcgaacatgggcgagtccaaaccgtggaaagcaattaaagtagatctgctgcgttgcccctatggcagttttgcgtttgcgatgttgcagtggaccggaagccgcatgttccgtcgtgatctgcgccagtacgccctggaagagaagaacatgatgctggacaatcattcgctgtatgacatgacccgcggtatcttcctccctgctaaatcggaagaggaaattttcgaacatctggggcttgaatacctggaaccgttcgaacgtaacgca

SEQ ID NO: 4166 - protein, 529 aa, synthetic construct
  REGION 1..529: note = Variant of terminal deoxynucleotidyltransferase
MHHHHHHGGSGSHGIRTIDSDFGKKQQKKGDNHDSSATYEIKFHEFVLFILEEKMGATRRTFLTDLARKKGFRVENELTDEVTHIVAENLSRSEVLAWLKEHKMEKTKQFELLDISWLIESMKVGKPVDTKGKYQLAESVEVSANPDPTEGRVNELPPTMKTVSPYACQRRTTLNNRNQRFTDSLEILRENYELKGNDDTALEFRRAISVLKSLPFEVRSLKDTEGLPWISDEVKGIMEEIIEVGESREVQAVLNDEWYQSFHAFTRVFGVGVKTADKWYRMGLRTLEDVRSSKTLKLTPMQKVGLLYYEDLARGVTRAEADAIWLLVQDAVATFDPDAIVEIVGGFRRGKPQGHDVDLLISSPGAEKEQEDQLLQKVMNLWKKQGLLLCGRLEWSQWEDGGSPSGKADEGDAEASCFLILKLYDHLVRKSKRNMPTGSNMGESKPWKAIKVDLLRCPYGSFAFAMLQWTGSRMFRRDLRQYALEEKNMMLDNHSLYDMTRGIFLPAKSEEEIFEHLGLEYLEPFERNA

SEQ ID NO: 4167 - DNA, 1587 bp, synthetic construct
  misc_feature 1..1587: note = Variant of terminal deoxynucleotidyltransferase
  source 1..1587: mol_type = other DNA
atgcaccatcatcatcatcatggcggtagcggcagccacggcattcgtaccatcgattcggacttcgggaagaaacagcagaaaaaaggcgataaccacgatagttccgccacttatgaaatcaaatttcacgagtttgtgctgttcattctcgaagaaaaaatgggtgcgacgcgtcgtacttttctgacagatttagcccgcaagaaagggttccgcgtcgagaatgaactgaccgacgaagttacccacatcgtggcagaaaatctgtcacgctctgaagtattggcttggctgaaagaacacaagatggagaagaccaagcaattcgaactgctggatattagctggcttatcgaaagcatgaaagttggtaaaccggtggacaccaaggggaaataccagttggcggaatcggttgaggtgagtgcgaacccagatccgacagaaggtcgtgtaaacgagctgcctcctactatgaaaaccgtttctccgtatgcgtgtcaacgccgcaccaccctgaacaaccgtaatcaacgttttacggactcgctggagattcttcgtgaaaattacgagctgaggggcaacgatgatactgcgctggaatttcgtcgtgctatctccgtgctgaaaagccttccgtttgaggtacgtagcctgaaagacacggaaggattgccctggatcagtgatgaagtcaaagggattatggaagaaatcatcgaagtcggggagtcgcgtgaagtgcaggccgtgctcaatgatgagtggtatcaaagcttccacgcatttacgcgtgtctttggagtgggggtgaagacagcagacaagtggtaccgtatgggtctgcgcaccctcgaggatgttcgttccagcaagaccctgaagttgaccccgatgcagaaagtaggtctgctgtattatgaagatcttgctcgcggcgttacgcgtgccgaagctgacgcgatttggctgctggttcaggatgcagtcgcaactttcgacccggatgcgatcgtggagattgtcggtggatttcgtcgtgggaaacctcagggtcacgacgttgatctgcttatcagttctccgggagctgagaaagagcaagaagaccaactcctgcagaaagtgatgaatctgtggaagaaacaagggttgttgctgtgtggtcgtctggaatggagtcagtgggaagatgggggttcgccttccggtaaggctgatgagggtgacgcggaggcgtcgtgctttctgatcctcaaactttatgatcatctggtgcgtaaaagtaaacgcaatatgccgactggttcgaacatgggcgagtccaaaccgtggaaagcaattaaagtagatctgctgcgttgcccctatggcagttttgcgtttgcgatgttgcagtggaccggaagccgcatgttccgtcgtgatctgcgctggtacgccctggaagagaagaacatgatgctggacaatcattcgctgtatgacatgacccgcggtatcttcctccctgctaaatcggaagaggaaattttcgaacatctggggcttgaatacctggaaccgttcgaacgtaacgca

SEQ ID NO: 4168 - protein, 529 aa, synthetic construct
  REGION 1..529: note = Variant of terminal deoxynucleotidyltransferase
MHHHHHHGGSGSHGIRTIDSDFGKKQQKKGDNHDSSATYEIKFHEFVLFILEEKMGATRRTFLTDLARKKGFRVENELTDEVTHIVAENLSRSEVLAWLKEHKMEKTKQFELLDISWLIESMKVGKPVDTKGKYQLAESVEVSANPDPTEGRVNELPPTMKTVSPYACQRRTTLNNRNQRFTDSLEILRENYELRGNDDTALEFRRAISVLKSLPFEVRSLKDTEGLPWISDEVKGIMEEIIEVGESREVQAVLNDEWYQSFHAFTRVFGVGVKTADKWYRMGLRTLEDVRSSKTLKLTPMQKVGLLYYEDLARGVTRAEADAIWLLVQDAVATFDPDAIVEIVGGFRRGKPQGHDVDLLISSPGAEKEQEDQLLQKVMNLWKKQGLLLCGRLEWSQWEDGGSPSGKADEGDAEASCFLILKLYDHLVRKSKRNMPTGSNMGESKPWKAIKVDLLRCPYGSFAFAMLQWTGSRMFRRDLRWYALEEKNMMLDNHSLYDMTRGIFLPAKSEEEIFEHLGLEYLEPFERNA

SEQ ID NO: 4169 - DNA, 1587 bp, synthetic construct
  misc_feature 1..1587: note = Variant of terminal deoxynucleotidyltransferase
  source 1..1587: mol_type = other DNA
atgcaccatcatcatcatcatggcggtagcggcagccacggcattcgtaccatcgattcggacttcgggaagaaacagcagaaaaaaggcgataaccacgatagttccgccacttatgaaatcaaatttcacgagtttgtgctgttcattctcgaagaaaaaatgggtgcgacgcgtcgtacttttctgacagatttagcccgcaagaaagggttccgcgtcgagaatgaactgaccgacgaagttacccacatcgtggcagaaaatctgtcacgctctgaagtattggcttggctgaaagaacacaagatggagaagaccaagcaattcgaactgctggatattagctggcttatcgaaagcatgaaagttggtaaaccggtggacaccaaggggaaataccagttggcggaatcggttgaggtgagtgcgaacccagatccgacagaaggtcgtgtaaacgagctgcctcctactatgaaaaccgtttctccgtatgcgtgtcaacgccgcaccaccctgaacaaccgtaatcaacgttttacgtggtcgctggagattcttcgtgaaaattacgagctgaaaggcaacgacgatactgcgctggaatttcgtcgtgctatctccgtgctgaaaagccttccgtttgaggtacgtagcctgaaagacacggaaggattgccctggatcagtgatgaagtcaaagggattatggaagaaatcatcgaagtcggggagtcgcgtgaagtgcaggccgtgctcaatgatgagtggtatcaaagcttccacgcatttacgcgtgtctttggagtgggggtgaagacagcagacaagtggtaccgtatgggtctgcgcaccctcgaggatgttcgttccagcaagaccctgaagttgaccccgatgcagaaagtaggtctgctgtattatgaagatcttgctcgcggcgttacgcgtgccgaagctgacgcgatttggctgctggttcaggatgcagtcgcaactttcgacccggatgcgatcgtggagattgtcggtggatttcgtcgtgggaaacctcagggtcacgacgttgatctgcttatcagttctccgggagctgagaaagagcaagaagaccaactcctgcagaaagtgatgaatctgtggaagaaacaagggttgttgctgtgtggtcgtctggaatggagtcagtgggaagatgggggttcgccttccggtaaggctgatgagggtgacgcggaggcgtcgtgctttctgatcctcaaactttatgatcatctggtgcgtaaaagtaaacgcaatatgccgactggttcgaacatgggcgagtccaaaccgtggaaagcaattaaagtagatctgctgcgttgcccctatggcagttttgcgtttgcgatgttgcagtggaccggaagccgcatgttccgtcgtgatctgcgctggtacgccctggaagagaagaacatgatgctggacaatcattcgctgtatgacatgacccgcggtatcttcctccctgctaaatcggaagaggaaattttcgaacatctggggcttgaatacctggaaccgttcgaacgtaacgca

SEQ ID NO: 4170 - protein, 529 aa, synthetic construct
  REGION 1..529: note = Variant of terminal deoxynucleotidyltransferase
MHHHHHHGGSGSHGIRTIDSDFGKKQQKKGDNHDSSATYEIKFHEFVLFILEEKMGATRRTFLTDLARKKGFRVENELTDEVTHIVAENLSRSEVLAWLKEHKMEKTKQFELLDISWLIESMKVGKPVDTKGKYQLAESVEVSANPDPTEGRVNELPPTMKTVSPYACQRRTTLNNRNQRFTWSLEILRENYELKGNDDTALEFRRAISVLKSLPFEVRSLKDTEGLPWISDEVKGIMEEIIEVGESREVQAVLNDEWYQSFHAFTRVFGVGVKTADKWYRMGLRTLEDVRSSKTLKLTPMQKVGLLYYEDLARGVTRAEADAIWLLVQDAVATFDPDAIVEIVGGFRRGKPQGHDVDLLISSPGAEKEQEDQLLQKVMNLWKKQGLLLCGRLEWSQWEDGGSPSGKADEGDAEASCFLILKLYDHLVRKSKRNMPTGSNMGESKPWKAIKVDLLRCPYGSFAFAMLQWTGSRMFRRDLRWYALEEKNMMLDNHSLYDMTRGIFLPAKSEEEIFEHLGLEYLEPFERNA

SEQ ID NO: 4171 - DNA, 1587 bp, synthetic construct
  misc_feature 1..1587: note = Variant of terminal deoxynucleotidyltransferase
  source 1..1587: mol_type = other DNA
atgcaccatcatcatcatcatggcggtagcggcagccacggcattcgtaccatcgattcggacttcgggaagaaacagcagaaaaaaggcgataaccacgatagttccgccacttatgaaatcaaatttcacgagtttgtgctgttcattctcgaagaaaaaatgggtgcgacgcgtcgtacttttctgacagatttagcccgcaagaaagggttccgcgtcgagaatgaactgaccgacgaagttacccacatcgtggcagaaaatctgtcacgctctgaagtattggcttggctgaaagaacacaagatggagaagaccaagcaattcgaactgctggatattagctggcttatcgaaagcatgaaagttggtaaaccggtggacaccaaggggaaataccagttggcggaatcggttgaggtgagtgcgaacccagatccgacagaaggtcgtgtaaacgagctgcctcctactatgaaaaccgtttctcgttatgcgtgtcaacgccgcaccaccctgaacaaccgtaatcaacgttttacggactcgctggagattcttcgtgaaaattacgagctgaaaggcaacgacgatactgcgctggaatttcgtcgtgctatctccgtgctgaaaagccttccgtttgaggtacgtagcctgaaagacacggaaggattgccctggatcagtgatgaagtcaaagggattatggaagaaatcatcgaagtcggggagtcgcgtgaagtgcaggccgtgctcaatgatgagtggtatcaaagcttccacgcatttacgcgtgtctttggagtgggggtgaagacagcagacaagtggtaccgtatgggtctgcgcaccctcgaggatgttcgttccagcaagaccctgaagttgaccccgatgcagaaagtaggtctgctgtattatgaagatcttgctcgcggcgttacgcgtgccgaagctgacgcgatttggctgctggttcaggatgcagtcgcaactttcgacccggatgcgatcgtggagattgtcggtggatttcgtcgtgggaaacctcagggtcacgacgttgatctgcttatcagttctccgggagctgagaaagagcaagaagaccaactcctgcagaaagtgatgaatctgtggaagaaacaagggttgttgctgtgtggtcgtctggaatggagtcagtgggaagatgggggttcgccttccggtaaggctgatgagggtgacgcggaggcgtcgtgctttctgatcctcaaactttatgatcatctggtgcgtaaaagtaaacgcaatatgccgactggttcgaacatgggcgagtccaaaccgtggaaagcaattaaagtagatctgctgcgttgcccctatggcagttttgcgtttgcgatgttgcagtggaccggaagccgcatgttccgtcgtgatctgcgctggtacgccctggaagagaagaacatgatgctggacaatcattcgctgtatgacatgacccgcggtatcttcctccctgctaaatcggaagaggaaattttcgaacatctggggcttgaatacctggaaccgttcgaacgtaacgca

SEQ ID NO: 4172 - protein, 529 aa, synthetic construct
  REGION 1..529: note = Variant of terminal deoxynucleotidyltransferase
MHHHHHHGGSGSHGIRTIDSDFGKKQQKKGDNHDSSATYEIKFHEFVLFILEEKMGATRRTFLTDLARKKGFRVENELTDEVTHIVAENLSRSEVLAWLKEHKMEKTKQFELLDISWLIESMKVGKPVDTKGKYQLAESVEVSANPDPTEGRVNELPPTMKTVSRYACQRRTTLNNRNQRFTDSLEILRENYELKGNDDTALEFRRAISVLKSLPFEVRSLKDTEGLPWISDEVKGIMEEIIEVGESREVQAVLNDEWYQSFHAFTRVFGVGVKTADKWYRMGLRTLEDVRSSKTLKLTPMQKVGLLYYEDLARGVTRAEADAIWLLVQDAVATFDPDAIVEIVGGFRRGKPQGHDVDLLISSPGAEKEQEDQLLQKVMNLWKKQGLLLCGRLEWSQWEDGGSPSGKADEGDAEASCFLILKLYDHLVRKSKRNMPTGSNMGESKPWKAIKVDLLRCPYGSFAFAMLQWTGSRMFRRDLRWYALEEKNMMLDNHSLYDMTRGIFLPAKSEEEIFEHLGLEYLEPFERNA

SEQ ID NO: 4173 - DNA, 1587 bp, synthetic construct
  misc_feature 1..1587: note = Variant of terminal deoxynucleotidyltransferase
  source 1..1587: mol_type = other DNA
atgcaccatcatcatcatcatggcggtagcggcagccacggcattcgtaccatcgattcggacttcgggaagaaacagcagaaaaaaggcgataaccacgatagttccgccacttatgaaatcaaatttcacgagtttgtgctgttcattctcgaagaaaaaatgggtgcgacgcgtcgtacttttctgacagatttagcccgcaagaaagggttccgcgtcgagaatgaactgaccgacgaagttacccacatcgtggcagaaaatctgtcacgctctgaagtattggcttggctgaaagaacacaagatggagaagaccaagcaattcgaactgctggatattagctggcttatcgaaagcatgaaagttggtaaaccggtggacaccaaggggaaataccagttggcggaatcggttgaggtgagtgcgaacccagatccgacagaaggtcgtgtaaacgagctgcctcctactatgaaaaccgtttctccgtatgcgtgtcaacgccgcaccaccctgaacaaccgtaatcaacgttttacggactcgctggagattcttcgtgaaaattacgagctgaaaggcaacgatgatatggcgctggaatttcgtcgtgctatctccgtgctgaaaagccttccgtttgaggtacgtagcctgaaagacacggaaggattgccctggatcagtgatgaagtcaaagggattatggaagaaatcatcgaagtcggggagtcgcgtgaagtgcaggccgtgctcaatgatgagtggtatcaaagcttccacgcatttacgcgtgtctttggagtgggggtgaagacagcagacaagtggtaccgtatgggtctgcgcaccctcgaggatgttcgttccagcaagaccctgaagttgaccccgatgcagaaagtaggtctgctgtattatgaagatcttgctcgcggcgttacgcgtgccgaagctgacgcgatttggctgctggttcaggatgcagtcgcaactttcgacccggatgcgatcgtggagattgtcggtggatttcgtcgtgggaaacctcagggtcacgacgttgatctgcttatcagttctccgggagctgagaaagagcaagaagaccaactcctgcagaaagtgatgaatctgtggaagaaacaagggttgttgctgtgtggtcgtctggaatggagtcagtgggaagatgggggttcgccttccggtaaggctgatgagggtgacgcggaggcgtcgtgctttctgatcctcaaactttatgatcatctggtgcgtaaaagtaaacgcaatatgccgactggttcgaacatgggcgagtccaaaccgtggaaagcaattaaagtagatctgctgcgttgcccctatggcagttttgcgtttgcgatgttgcagtggaccggaagccgcatgttccgtcgtgatctgcgctggtacgccctggaagagaagaacatgatgctggacaatcattcgctgtatgacatgacccgcggtatcttcctccctgctaaatcggaagaggaaattttcgaacatctggggcttgaatacctggaaccgttcgaacgtaacgca

SEQ ID NO: 4174 - protein, 529 aa, synthetic construct
  REGION 1..529: note = Variant of terminal deoxynucleotidyltransferase
MHHHHHHGGSGSHGIRTIDSDFGKKQQKKGDNHDSSATYEIKFHEFVLFILEEKMGATRRTFLTDLARKKGFRVENELTDEVTHIVAENLSRSEVLAWLKEHKMEKTKQFELLDISWLIESMKVGKPVDTKGKYQLAESVEVSANPDPTEGRVNELPPTMKTVSPYACQRRTTLNNRNQRFTDSLEILRENYELKGNDDMALEFRRAISVLKSLPFEVRSLKDTEGLPWISDEVKGIMEEIIEVGESREVQAVLNDEWYQSFHAFTRVFGVGVKTADKWYRMGLRTLEDVRSSKTLKLTPMQKVGLLYYEDLARGVTRAEADAIWLLVQDAVATFDPDAIVEIVGGFRRGKPQGHDVDLLISSPGAEKEQEDQLLQKVMNLWKKQGLLLCGRLEWSQWEDGGSPSGKADEGDAEASCFLILKLYDHLVRKSKRNMPTGSNMGESKPWKAIKVDLLRCPYGSFAFAMLQWTGSRMFRRDLRWYALEEKNMMLDNHSLYDMTRGIFLPAKSEEEIFEHLGLEYLEPFERNA

SEQ ID NO: 4175 - DNA, 1587 bp, synthetic construct
  misc_feature 1..1587: note = Variant of terminal deoxynucleotidyltransferase
  source 1..1587: mol_type = other DNA
atgcaccatcatcatcatcatggcggtagcggcagccacggcattcgtaccatcgattcggacttcgggaagaaacagcagaaaaaaggcgataaccacgatagttccgccacttatgaaatcaaatttcacgagtttgtgctgttcattctcgaagaaaaaatgggtgcgacgcgtcgtacttttctgacagatttagcccgcaagaaagggttccgcgtcgagaatgaactgaccgacgaagttacccacatcgtggcagaaaatctgtcacgctctgaagtattggcttggctgaaagaacacaagatggagaagaccaagcaattcgaactgctggatattagctggcttatcgaaagcatgaaagttggtaaaccggtggacaccaaggggaaataccagttggcggaatcggttgaggtgagtgcgaacccagatccgacagaaggtcgtgtaaacgagctgcctcctactatgaaaaccgtttctccgtatgcgtgtcaacgccgcaccaccctgaacaaccgtaatcaacgttttacggactcgctggagattcttcgtgaaaattacgagctgaaaggcaacgacgatactgcgctggaatttcgtcgtgctatctccgtgctgaaaagccttccgtttgaggtacgtagcctgaaagacacggaaggattgccctggatcagtgatgaagtcaaagggattatggaagaaatcatcgaagtcggggagtcgcgtgaagtgcaggccgtgctcaatgatgagtggtatcaaagcttccacgcatttacgcgtgtctttggagtgggggtgaagacagcagacaagtggtaccgtatgggtctgcgcaccctcgaggatgttcgttccagcaagaccctgaagttgaccccgatgcagaaagtaggtctgctgtattatgaagatcttgctcgcggcgttacgcgtgaggaagctgacgcgatttggctgctggttcaggatgcagtcgcaactttcgacccggatgcgatcgtggagattgtcggtggatttcgtcgtgggaaacctcagggtcacgacgttgatctgcttatcagttctccgggagctgagaaagagcaagaagaccaactcctgcagaaagtgatgaatctgtggaagaaacaagggttgttgctgtgtggtcgtctggaatggagtcagtgggaagatgggggttcgccttccggtaaggctgatgagggtgacgcggaggcgtcgtgctttctgatcctcaaactttatgatcatctggtgcgtaaaagtaaacgcaatatgccgactggttcgaacatgggcgagtccaaaccgtggaaagcaattaaagtagatctgctgcgttgcccctatggcagttttgcgtttgcgatgttgcagtggaccggaagccgcatgttccgtcgtgatctgcgctggtacgccctggaagagaagaacatgatgctggacaatcattcgctgtatgacatgacccgcggtatcttcctccctgctaaatcggaagaggaaattttcgaacatctggggcttgaatacctggaaccgttcgaacgtaacgca

SEQ ID NO: 4176 - protein, 529 aa, synthetic construct
  REGION 1..529: note = Variant of terminal deoxynucleotidyltransferase
MHHHHHHGGSGSHGIRTIDSDFGKKQQKKGDNHDSSATYEIKFHEFVLFILEEKMGATRRTFLTDLARKKGFRVENELTDEVTHIVAENLSRSEVLAWLKEHKMEKTKQFELLDISWLIESMKVGKPVDTKGKYQLAESVEVSANPDPTEGRVNELPPTMKTVSPYACQRRTTLNNRNQRFTDSLEILRENYELKGNDDTALEFRRAISVLKSLPFEVRSLKDTEGLPWISDEVKGIMEEIIEVGESREVQAVLNDEWYQSFHAFTRVFGVGVKTADKWYRMGLRTLEDVRSSKTLKLTPMQKVGLLYYEDLARGVTREEADAIWLLVQDAVATFDPDAIVEIVGGFRRGKPQGHDVDLLISSPGAEKEQEDQLLQKVMNLWKKQGLLLCGRLEWSQWEDGGSPSGKADEGDAEASCFLILKLYDHLVRKSKRNMPTGSNMGESKPWKAIKVDLLRCPYGSFAFAMLQWTGSRMFRRDLRWYALEEKNMMLDNHSLYDMTRGIFLPAKSEEEIFEHLGLEYLEPFERNA

SEQ ID NO: 4177 - DNA, 1587 bp, synthetic construct
  misc_feature 1..1587: note = Variant of terminal deoxynucleotidyltransferase
  source 1..1587: mol_type = other DNA
atgcaccatcatcatcatcatggcggtagcggcagccacggcattcgtaccatcgattcggacttcgggaagaaacagcagaaaaaaggcgataaccacgatagttccgccacttatgaaatcaaatttcacgagtttgtgctgttcattctcgaagaaaaaatgggtgcgacgcgtcgtacttttctgacagatttagcccgcaagaaagggttccgcgtcgagaatgaactgaccgacgaagttacccacatcgtggcagaaaatctgtcacgctctgaagtattggcttggctgaaagaacacaagatggagaagaccaagcaattcgaactgctggatattagctggcttatcgaaagcatgaaagttggtaaaccggtggacaccaaggggaaataccagttggcggaatcggttgaggtgagtgcgaacccagatccgacagaaggtcgtgtaaacgagctgcctcctactatgaaaaccgtttctccgtatgcgtgtcaacgccgcaccaccctgaacaaccgtaatcaacgttttacggactcgctggagattcttcgtgaaaattacgagctgaaaggcaacgatgatactgcgctgatgtttcgtcgtgctatctccgtgctgaaaagccttccgtttgaggtacgtagcctgaaagacacggaaggattgccctggatcagtgatgaagtcaaagggattatggaagaaatcatcgaagtcggggagtcgcgtgaagtgcaggccgtgctcaatgatgagtggtatcaaagcttccacgcatttacgcgtgtctttggagtgggggtgaagacagcagacaagtggtaccgtatgggtctgcgcaccctcgaggatgttcgttccagcaagaccctgaagttgaccccgatgcagaaagtaggtctgctgtattatgaagatcttgctcgcggcgttacgcgtgccgaagctgacgcgatttggctgctggttcaggatgcagtcgcaactttcgacccggatgcgatcgtggagattgtcggtggatttcgtcgtgggaaacctcagggtcacgacgttgatctgcttatcagttctccgggagctgagaaagagcaagaagaccaactcctgcagaaagtgatgaatctgtggaagaaacaagggttgttgctgtgtggtcgtctggaatggagtcagtgggaagatgggggttcgccttccggtaaggctgatgagggtgacgcggaggcgtcgtgctttctgatcctcaaactttatgatcatctggtgcgtaaaagtaaacgcaatatgccgactggttcgaacatgggcgagtccaaaccgtggaaagcaattaaagtagatctgctgcgttgcccctatggcagttttgcgtttgcgatgttgcagtggaccggaagccgcatgttccgtcgtgatctgcgctggtacgccctggaagagaagaacatgatgctggacaatcattcgctgtatgacatgacccgcggtatcttcctccctgctaaatcggaagaggaaattttcgaacatctggggcttgaatacctggaaccgttcgaacgtaacgca

SEQ ID NO: 4178 - protein, 529 aa, synthetic construct
  REGION 1..529: note = Variant of terminal deoxynucleotidyltransferase
MHHHHHHGGSGSHGIRTIDSDFGKKQQKKGDNHDSSATYEIKFHEFVLFILEEKMGATRRTFLTDLARKKGFRVENELTDEVTHIVAENLSRSEVLAWLKEHKMEKTKQFELLDISWLIESMKVGKPVDTKGKYQLAESVEVSANPDPTEGRVNELPPTMKTVSPYACQRRTTLNNRNQRFTDSLEILRENYELKGNDDTALMFRRAISVLKSLPFEVRSLKDTEGLPWISDEVKGIMEEIIEVGESREVQAVLNDEWYQSFHAFTRVFGVGVKTADKWYRMGLRTLEDVRSSKTLKLTPMQKVGLLYYEDLARGVTRAEADAIWLLVQDAVATFDPDAIVEIVGGFRRGKPQGHDVDLLISSPGAEKEQEDQLLQKVMNLWKKQGLLLCGRLEWSQWEDGGSPSGKADEGDAEASCFLILKLYDHLVRKSKRNMPTGSNMGESKPWKAIKVDLLRCPYGSFAFAMLQWTGSRMFRRDLRWYALEEKNMMLDNHSLYDMTRGIFLPAKSEEEIFEHLGLEYLEPFERNA

SEQ ID NO: 4179 - DNA, 1587 bp, synthetic construct
  misc_feature 1..1587: note = Variant of terminal deoxynucleotidyltransferase
  source 1..1587: mol_type = other DNA
atgcaccatcatcatcatcatggcggtagcggcagccacggcattcgtaccatcgattcggacttcgggaagaaacagcagaaaaaaggcgataaccacgatagttccgccacttatgaaatcaaatttcacgagtttgtgctgttcattctcgaagaaaaaatgggtgcgacgcgtcgtacttttctgacagatttagcccgcaagaaagggttccgcgtcgagaatgaactgaccgacgaagttacccacatcgtggcagaaaatctgtcacgctctgaagtattggcttggctgaaagaacacaagatggagaagaccaagcaattcgaactgctggatattagctggcttatcgaaagcatgaaagttggtaaaccggtggacaccaaggggaaataccagttggcggaatcggttgaggtgagtgcgaacccagatccgacagaaggtcgtgtaaacgagctgcctcctactatgaaaaccgtttctccgtatgcgtgtcaacgccgcaccaccctggttaaccgtaatcaacgttttacggactcgctggagattcttcgtgaaaattacgagctgaaaggcaacgacgatactgcgctggaatttcgtcgtgctatctccgtgctgaaaagccttccgtttgaggtacgtagcctgaaagacacggaaggattgccctggatcagtgatgaagtcaaagggattatggaagaaatcatcgaagtcggggagtcgcgtgaagtgcaggccgtgctcaatgatgagtggtatcaaagcttccacgcatttacgcgtgtctttggagtgggggtgaagacagcagacaagtggtaccgtatgggtctgcgcaccctcgaggatgttcgttccagcaagaccctgaagttgaccccgatgcagaaagtaggtctgctgtattatgaagatcttgctcgcggcgttacgcgtgccgaagctgacgcgatttggctgctggttcaggatgcagtcgcaactttcgacccggatgcgatcgtggagattgtcggtggatttcgtcgtgggaaacctcagggtcacgacgttgatctgcttatcagttctccgggagctgagaaagagcaagaagaccaactcctgcagaaagtgatgaatctgtggaagaaacaagggttgttgctgtgtggtcgtctggaatggagtcagtgggaagatgggggttcgccttccggtaaggctgatgagggtgacgcggaggcgtcgtgctttctgatcctcaaactttatgatcatctggtgcgtaaaagtaaacgcaatatgccgactggttcgaacatgggcgagtccaaaccgtggaaagcaattaaagtagatctgctgcgttgcccctatggcagttttgcgtttgcgatgttgcagtggaccggaagccgcatgttccgtcgtgatctgcgctggtacgccctggaagagaagaacatgatgctggacaatcattcgctgtatgacatgacccgcggtatcttcctccctgctaaatcggaagaggaaattttcgaacatctggggcttgaatacctggaaccgttcgaacgtaacgca

SEQ ID NO: 4180 - protein, 529 aa, synthetic construct
  REGION 1..529: note = Variant of terminal deoxynucleotidyltransferase
MHHHHHHGGSGSHGIRTIDSDFGKKQQKKGDNHDSSATYEIKFHEFVLFILEEKMGATRRTFLTDLARKKGFRVENELTDEVTHIVAENLSRSEVLAWLKEHKMEKTKQFELLDISWLIESMKVGKPVDTKGKYQLAESVEVSANPDPTEGRVNELPPTMKTVSPYACQRRTTLVNRNQRFTDSLEILRENYELKGNDDTALEFRRAISVLKSLPFEVRSLKDTEGLPWISDEVKGIMEEIIEVGESREVQAVLNDEWYQSFHAFTRVFGVGVKTADKWYRMGLRTLEDVRSSKTLKLTPMQKVGLLYYEDLARGVTRAEADAIWLLVQDAVATFDPDAIVEIVGGFRRGKPQGHDVDLLISSPGAEKEQEDQLLQKVMNLWKKQGLLLCGRLEWSQWEDGGSPSGKADEGDAEASCFLILKLYDHLVRKSKRNMPTGSNMGESKPWKAIKVDLLRCPYGSFAFAMLQWTGSRMFRRDLRWYALEEKNMMLDNHSLYDMTRGIFLPAKSEEEIFEHLGLEYLEPFERNA

SEQ ID NO: 4181 - DNA, 1587 bp, synthetic construct
  misc_feature 1..1587: note = Variant of terminal deoxynucleotidyltransferase
  source 1..1587: mol_type = other DNA
atgcaccatcatcatcatcatggcggtagcggcagccacggcattcgtaccatcgattcggacttcgggaagaaacagcagaaaaaaggcgataaccacgatagttccgccacttatgaaatcaaatttcacgagtttgtgctgttcattctcgaagaaaaaatgggtgcgacgcgtcgtacttttctgacagatttagcccgcaagaaagggttccgcgtcgagaatgaactgaccgacgaagttacccacatcgtggcagaaaatctgtcacgctctgaagtattggcttggctgaaagaacacaagatggagaagaccaagcaattcgaactgctggatattagctggcttatcgaaagcatgaaagttggtaaaccggtggacaccaaggggaaataccagttggcggaatcggttgaggtgagtgcgaacccagatccgacagaaggtcgtgtaaacgagctgcctcctactatgaaaaccgtttctccgtatgcgtgtcaacgccgcaccaccctgaacaaccgtaatcaacgttttacggactcgctggagattcttcgtgaaaatgctgagctgaaaggcaacgatgatactgcgctggaatttcgtcgtgctatctccgtgctgaaaagccttccgtttgaggtacgtagcctgaaagacacggaaggattgccctggatcagtgatgaagtcaaagggattatggaagaaatcatcgaagtcggggagtcgcgtgaagtgcaggccgtgctcaatgatgagtggtatcaaagcttccacgcatttacgcgtgtctttggagtgggggtgaagacagcagacaagtggtaccgtatgggtctgcgcaccctcgaggatgttcgttccagcaagaccctgaagttgaccccgatgcagaaagtaggtctgctgtattatgaagatcttgctcgcggcgttacgcgtgccgaagctgacgcgatttggctgctggttcaggatgcagtcgcaactttcgacccggatgcgatcgtggagattgtcggtggatttcgtcgtgggaaacctcagggtcacgacgttgatctgcttatcagttctccgggagctgagaaagagcaagaagaccaactcctgcagaaagtgatgaatctgtggaagaaacaagggttgttgctgtgtggtcgtctggaatggagtcagtgggaagatgggggttcgccttccggtaaggctgatgagggtgacgcggaggcgtcgtgctttctgatcctcaaactttatgatcatctggtgcgtaaaagtaaacgcaatatgccgactggttcgaacatgggcgagtccaaaccgtggaaagcaattaaagtagatctgctgcgttgcccctatggcagttttgcgtttgcgatgttgcagtggaccggaagccgcatgttccgtcgtgatctgcgctggtacgccctggaagagaagaacatgatgctggacaatcattcgctgtatgacatgacccgcggtatcttcctccctgctaaatcggaagaggaaattttcgaacatctggggcttgaatacctggaaccgttcgaacgtaacgca

SEQ ID NO: 4182 - protein, 529 aa, synthetic construct
  REGION 1..529: note = Variant of terminal deoxynucleotidyltransferase
MHHHHHHGGSGSHGIRTIDSDFGKKQQKKGDNHDSSATYEIKFHEFVLFILEEKMGATRRTFLTDLARKKGFRVENELTDEVTHIVAENLSRSEVLAWLKEHKMEKTKQFELLDISWLIESMKVGKPVDTKGKYQLAESVEVSANPDPTEGRVNELPPTMKTVSPYACQRRTTLNNRNQRFTDSLEILRENAELKGNDDTALEFRRAISVLKSLPFEVRSLKDTEGLPWISDEVKGIMEEIIEVGESREVQAVLNDEWYQSFHAFTRVFGVGVKTADKWYRMGLRTLEDVRSSKTLKLTPMQKVGLLYYEDLARGVTRAEADAIWLLVQDAVATFDPDAIVEIVGGFRRGKPQGHDVDLLISSPGAEKEQEDQLLQKVMNLWKKQGLLLCGRLEWSQWEDGGSPSGKADEGDAEASCFLILKLYDHLVRKSKRNMPTGSNMGESKPWKAIKVDLLRCPYGSFAFAMLQWTGSRMFRRDLRWYALEEKNMMLDNHSLYDMTRGIFLPAKSEEEIFEHLGLEYLEPFERNA

SEQ ID NO: 4183 - DNA, 1587 bp, synthetic construct
  misc_feature 1..1587: note = Variant of terminal deoxynucleotidyltransferase
  source 1..1587: mol_type = other DNA
atgcaccatcatcatcatcatggcggtagcggcagccacggcattcgtaccatcgattcggacttcgggaagaaacagcagaaaaaaggcgataaccacgatagttccgccacttatgaaatcaaatttcacgagtttgtgctgttcattctcgaagaaaaaatgggtgcgacgcgtcgtacttttctgacagatttagcccgcaagaaagggttccgcgtcgagaatgaactgaccgacgaagttacccacatcgtggcagaaaatctgtcacgctctgaagtattggcttggctgaaagaacacaagatggagaagaccaagcaattcgaactgctggatattagctggcttatcgaaagcatgaaagttggtaaaccggtggacaccaaggggaaataccagttggcggaatcggttgaggtgagtgcgaacccagatccgacagaaggtcgtgtaaacgagctgcctcctactatgaaaaccgtttctccgtatgcgtgtcaacgccgcaccaccctgaacaaccgtaattcgcgttttacggactcgctggagattcttcgtgaaaattacgagctgaaaggcaacgacgatactgcgctggaatttcgtcgtgctatctccgtgctgaaaagccttccgtttgaggtacgtagcctgaaagacacggaaggattgccctggatcagtgatgaagtcaaagggattatggaagaaatcatcgaagtcggggagtcgcgtgaagtgcaggccgtgctcaatgatgagtggtatcaaagcttccacgcatttacgcgtgtctttggagtgggggtgaagacagcagacaagtggtaccgtatgggtctgcgcaccctcgaggatgttcgttccagcaagaccctgaagttgaccccgatgcagaaagtaggtctgctgtattatgaagatcttgctcgcggcgttacgcgtgccgaagctgacgcgatttggctgctggttcaggatgcagtcgcaactttcgacccggatgcgatcgtggagattgtcggtggatttcgtcgtgggaaacctcagggtcacgacgttgatctgcttatcagttctccgggagctgagaaagagcaagaagaccaactcctgcagaaagtgatgaatctgtggaagaaacaagggttgttgctgtgtggtcgtctggaatggagtcagtgggaagatgggggttcgccttccggtaaggctgatgagggtgacgcggaggcgtcgtgctttctgatcctcaaactttatgatcatctggtgcgtaaaagtaaacgcaatatgccgactggttcgaacatgggcgagtccaaaccgtggaaagcaattaaagtagatctgctgcgttgcccctatggcagttttgcgtttgcgatgttgcagtggaccggaagccgcatgttccgtcgtgatctgcgctggtacgccctggaagagaagaacatgatgctggacaatcattcgctgtatgacatgacccgcggtatcttcctccctgctaaatcggaagaggaaattttcgaacatctggggcttgaatacctggaaccgttcgaacgtaacgca

SEQ ID NO: 4184 - protein, 529 aa, synthetic construct
  REGION 1..529: note = Variant of terminal deoxynucleotidyltransferase
MHHHHHHGGSGSHGIRTIDSDFGKKQQKKGDNHDSSATYEIKFHEFVLFILEEKMGATRRTFLTDLARKKGFRVENELTDEVTHIVAENLSRSEVLAWLKEHKMEKTKQFELLDISWLIESMKVGKPVDTKGKYQLAESVEVSANPDPTEGRVNELPPTMKTVSPYACQRRTTLNNRNSRFTDSLEILRENYELKGNDDTALEFRRAISVLKSLPFEVRSLKDTEGLPWISDEVKGIMEEIIEVGESREVQAVLNDEWYQSFHAFTRVFGVGVKTADKWYRMGLRTLEDVRSSKTLKLTPMQKVGLLYYEDLARGVTRAEADAIWLLVQDAVATFDPDAIVEIVGGFRRGKPQGHDVDLLISSPGAEKEQEDQLLQKVMNLWKKQGLLLCGRLEWSQWEDGGSPSGKADEGDAEASCFLILKLYDHLVRKSKRNMPTGSNMGESKPWKAIKVDLLRCPYGSFAFAMLQWTGSRMFRRDLRWYALEEKNMMLDNHSLYDMTRGIFLPAKSEEEIFEHLGLEYLEPFERNA

SEQ ID NO: 4185 - DNA, 1587 bp, synthetic construct
  misc_feature 1..1587: note = Variant of terminal deoxynucleotidyltransferase
  source 1..1587: mol_type = other DNA
atgcaccatcatcatcatcatggcggtagcggcagccacggcattcgtaccatcgattcggacttcgggaagaaacagcagaaaaaaggcgataaccacgatagttccgccacttatgaaatcaaatttcacgagtttgtgctgttcattctcgaagaaaaaatgggtgcgacgcgtcgtacttttctgacagatttagcccgcaagaaagggttccgcgtcgagaatgaactgaccgacgaagttacccacatcgtggcagaaaatctgtcacgctctgaagtattggcttggctgaaagaacacaagatggagaagaccaagcaattcgaactgctggatattagctggcttatcgaaagcatgaaagttggtaaaccggtggacaccaaggggaaataccagttggcggaatcggttgaggtgagtgcgaacccagatccgacagaaggtcgtgtaaacgagctgcctcctactatgaaaaccgtttctccgtatgcgtgtcaacgccgcaccaccctgaacaaccgtaatcaacgttttacggactcgctggagattcttcgtgaaaattacgagctgaaaggcaacgacgatactgcgctggaatttcgtcgtgctatctccgtgctgaaaagccttccgtttgaggtacgtagcctgaaagacacggaaggattgccctggatcagtgatgaagtcaaagggattatggaagaaatcatcgaagtcggggagtcgcgtgaagtgcaggccgtgctcaatgatgagtggtatcaaagcttccacgcatttacgcgtgtctttggagtgggggtgaagacagcagacaagtggtaccgtatgggtctgcgcaccctcgaggatgttcgttccagcaagaccctgaagttgaccccgatgcagaaagtaggtctgctgtattatgaagatcttgctcgcggcgttacgcgtgccgaagctgacgcgattggtctgctggttcaggatgcagtcgcaactttcgacccggatgcgatcgtggagattgtcggtggatttcgtcgtgggaaacctcagggtcacgacgttgatctgcttatcagttctccgggagctgagaaagagcaagaagaccaactcctgcagaaagtgatgaatctgtggaagaaacaagggttgttgctgtgtggtcgtctggaatggagtcagtgggaagatgggggttcgccttccggtaaggctgatgagggtgacgcggaggcgtcgtgctttctgatcctcaaactttatgatcatctggtgcgtaaaagtaaacgcaatatgccgactggttcgaacatgggcgagtccaaaccgtggaaagcaattaaagtagatctgctgcgttgcccctatggcagttttgcgtttgcgatgttgcagtggaccggaagccgcatgttccgtcgtgatctgcgctggtacgccctggaagagaagaacatgatgctggacaatcattcgctgtatgacatgacccgcggtatcttcctccctgctaaatcggaagaggaaattttcgaacatctggggcttgaatacctggaaccgttcgaacgtaacgca

SEQ ID NO: 4186 - protein, 529 aa, synthetic construct
  REGION 1..529: note = Variant of terminal deoxynucleotidyltransferase
MHHHHHHGGSGSHGIRTIDSDFGKKQQKKGDNHDSSATYEIKFHEFVLFILEEKMGATRRTFLTDLARKKGFRVENELTDEVTHIVAENLSRSEVLAWLKEHKMEKTKQFELLDISWLIESMKVGKPVDTKGKYQLAESVEVSANPDPTEGRVNELPPTMKTVSPYACQRRTTLNNRNQRFTDSLEILRENYELKGNDDTALEFRRAISVLKSLPFEVRSLKDTEGLPWISDEVKGIMEEIIEVGESREVQAVLNDEWYQSFHAFTRVFGVGVKTADKWYRMGLRTLEDVRSSKTLKLTPMQKVGLLYYEDLARGVTRAEADAIGLLVQDAVATFDPDAIVEIVGGFRRGKPQGHDVDLLISSPGAEKEQEDQLLQKVMNLWKKQGLLLCGRLEWSQWEDGGSPSGKADEGDAEASCFLILKLYDHLVRKSKRNMPTGSNMGESKPWKAIKVDLLRCPYGSFAFAMLQWTGSRMFRRDLRWYALEEKNMMLDNHSLYDMTRGIFLPAKSEEEIFEHLGLEYLEPFERNA

SEQ ID NO: 4187 - DNA, 1587 bp, synthetic construct
  misc_feature 1..1587: note = Variant of terminal deoxynucleotidyltransferase
  source 1..1587: mol_type = other DNA
atgcaccatcatcatcatcatggcggtagcggcagccacggcattcgtaccatcgattcggacttcgggaagaaacagcagaaaaaaggcgataaccacgatagttccgccacttatgaaatcaaatttcacgagtttgtgctgttcattctcgaagaaaaaatgggtgcgacgcgtcgtacttttctgacagatttagcccgcaagaaagggttccgcgtcgagaatgaactgaccgacgaagttacccacatcgtggcagaaaatctgtcacgctctgaagtattggcttggctgaaagaacacaagatggagaagaccaagcaattcgaactgctggatattagctggcttatcgaaagcatgaaagttggtaaaccggtggacaccaaggggaaataccagttggcggaatcggttgaggtgagtgcgaacccagatccgacagaaggtcgtgtaaacgagctgcctcctactatgaaaaccgtttctccgtatgcgtgtcaacgccgcaccaccctgaacaaccgtaatcaacgttttacggactcgctggagattcttcgtgaaaattacgagctgaaaggcaacgacgatactgcgctggaatttcgtcgtgctatctccgtgctgaaaagccttccgtttgaggtacgtagcctgaaagacacggaaggattgccctggatcagtgatgaagtcaaagggattatggaagaaatcatcgaagtcggggagtcgcgtgaagtgcaggccgtgctcaatgatgagtggtttcaaagcttccacgcatttacgcgtgtctttggagtgggggtgaagacagcagacaagtggtaccgtatgggtctgcgcaccctcgaggatgttcgttccagcaagaccctgaagttgaccccgatgcagaaagtaggtctgctgtattatgaagatcttgctcgcggcgttacgcgtgccgaagctgacgcgatttggctgctggttcaggatgcagtcgcaactttcgacccggatgcgatcgtggagattgtcggtggatttcgtcgtgggaaacctcagggtcacgacgttgatctgcttatcagttctccgggagctgagaaagagcaagaagaccaactcctgcagaaagtgatgaatctgtggaagaaacaagggttgttgctgtgtggtcgtctggaatggagtcagtgggaagatgggggttcgccttccggtaaggctgatgagggtgacgcggaggcgtcgtgctttctgatcctcaaactttatgatcatctggtgcgtaaaagtaaacgcaatatgccgactggttcgaacatgggcgagtccaaaccgtggaaagcaattaaagtagatctgctgcgttgcccctatggcagttttgcgtttgcgatgttgcagtggaccggaagccgcatgttccgtcgtgatctgcgctggtacgccctggaagagaagaacatgatgctggacaatcattcgctgtatgacatgacccgcggtatcttcctccctgctaaatcggaagaggaaattttcgaacatctggggcttgaatacctggaaccgttcgaacgtaacgca

SEQ ID NO: 4188 - protein, 529 aa, synthetic construct
  REGION 1..529: note = Variant of terminal deoxynucleotidyltransferase
MHHHHHHGGSGSHGIRTIDSDFGKKQQKKGDNHDSSATYEIKFHEFVLFILEEKMGATRRTFLTDLARKKGFRVENELTDEVTHIVAENLSRSEVLAWLKEHKMEKTKQFELLDISWLIESMKVGKPVDTKGKYQLAESVEVSANPDPTEGRVNELPPTMKTVSPYACQRRTTLNNRNQRFTDSLEILRENYELKGNDDTALEFRRAISVLKSLPFEVRSLKDTEGLPWISDEVKGIMEEIIEVGESREVQAVLNDEWFQSFHAFTRVFGVGVKTADKWYRMGLRTLEDVRSSKTLKLTPMQKVGLLYYEDLARGVTRAEADAIWLLVQDAVATFDPDAIVEIVGGFRRGKPQGHDVDLLISSPGAEKEQEDQLLQKVMNLWKKQGLLLCGRLEWSQWEDGGSPSGKADEGDAEASCFLILKLYDHLVRKSKRNMPTGSNMGESKPWKAIKVDLLRCPYGSFAFAMLQWTGSRMFRRDLRWYALEEKNMMLDNHSLYDMTRGIFLPAKSEEEIFEHLGLEYLEPFERNA

SEQ ID NO: 4189 - DNA, 1587 bp, synthetic construct
  misc_feature 1..1587: note = Variant of terminal deoxynucleotidyltransferase
  source 1..1587: mol_type = other DNA
atgcaccatcatcatcatcatggcggtagcggcagccacggcattcgtaccatcgattcggacttcgggaagaaacagcagaaaaaaggcgataaccacgatagttccgccacttatgaaatcaaatttcacgagtttgtgctgttcattctcgaagaaaaaatgggtgcgacgcgtcgtacttttctgacagatttagcccgcaagaaagggttccgcgtcgagaatgaactgaccgacgaagttacccacatcgtggcagaaaatctgtcacgctctgaagtattggcttggctgaaagaacacaagatggagaagaccaagcaattcgaactgctggatattagctggcttatcgaaagcatgaaagttggtaaaccggtggacaccaaggggaaataccagttggcggaatcggttgaggtgagtgcgaacccagatccgacagaaggtcgtgtaaacgagctgcctcctactatgaaaaccgtttctccgtatgcgtgtcaacgccgcaccaccctgaacgtgcgtaatcaacgttttacggactcgctggagattcttcgtgaaaattacgagctgaaaggcaacgacgatactgcgctggaatttcgtcgtgctatctccgtgctgaaaagccttccgtttgaggtacgtagcctgaaagacacggaaggattgccctggatcagtgatgaagtcaaagggattatggaagaaatcatcgaagtcggggagtcgcgtgaagtgcaggccgtgctcaatgatgagtggtatcaaagcttccacgcatttacgcgtgtctttggagtgggggtgaagacagcagacaagtggtaccgtatgggtctgcgcaccctcgaggatgttcgttccagcaagaccctgaagttgaccccgatgcagaaagtaggtctgctgtattatgaagatcttgctcgcggcgttacgcgtgccgaagctgacgcgatttggctgctggttcaggatgcagtcgcaactttcgacccggatgcgatcgtggagattgtcggtggatttcgtcgtgggaaacctcagggtcacgacgttgatctgcttatcagttctccgggagctgagaaagagcaagaagaccaactcctgcagaaagtgatgaatctgtggaagaaacaagggttgttgctgtgtggtcgtctggaatggagtcagtgggaagatgggggttcgccttccggtaaggctgatgagggtgacgcggaggcgtcgtgctttctgatcctcaaactttatgatcatctggtgcgtaaaagtaaacgcaatatgccgactggttcgaacatgggcgagtccaaaccgtggaaagcaattaaagtagatctgctgcgttgcccctatggcagttttgcgtttgcgatgttgcagtggaccggaagccgcatgttccgtcgtgatctgcgctggtacgccctggaagagaagaacatgatgctggacaatcattcgctgtatgacatgacccgcggtatcttcctccctgctaaatcggaagaggaaattttcgaacatctggggcttgaatacctggaaccgttcgaacgtaacgca

SEQ ID NO: 4190 - protein, 529 aa, synthetic construct
  REGION 1..529: note = Variant of terminal deoxynucleotidyltransferase
MHHHHHHGGSGSHGIRTIDSDFGKKQQKKGDNHDSSATYEIKFHEFVLFILEEKMGATRRTFLTDLARKKGFRVENELTDEVTHIVAENLSRSEVLAWLKEHKMEKTKQFELLDISWLIESMKVGKPVDTKGKYQLAESVEVSANPDPTEGRVNELPPTMKTVSPYACQRRTTLNVRNQRFTDSLEILRENYELKGNDDTALEFRRAISVLKSLPFEVRSLKDTEGLPWISDEVKGIMEEIIEVGESREVQAVLNDEWYQSFHAFTRVFGVGVKTADKWYRMGLRTLEDVRSSKTLKLTPMQKVGLLYYEDLARGVTRAEADAIWLLVQDAVATFDPDAIVEIVGGFRRGKPQGHDVDLLISSPGAEKEQEDQLLQKVMNLWKKQGLLLCGRLEWSQWEDGGSPSGKADEGDAEASCFLILKLYDHLVRKSKRNMPTGSNMGESKPWKAIKVDLLRCPYGSFAFAMLQWTGSRMFRRDLRWYALEEKNMMLDNHSLYDMTRGIFLPAKSEEEIFEHLGLEYLEPFERNA

SEQ ID NO: 4191 - DNA, 1587 bp, synthetic construct
  misc_feature 1..1587: note = Variant of terminal deoxynucleotidyltransferase
  source 1..1587: mol_type = other DNA
atgcaccatcatcatcatcatggcggtagcggcagccacggcattcgtaccatcgattcggacttcgggaagaaacagcagaaaaaaggcgataaccacgatagttccgccacttatgaaatcaaatttcacgagtttgtgctgttcattctcgaagaaaaaatgggtgcgacgcgtcgtacttttctgacagatttagcccgcaagaaagggttccgcgtcgagaatgaactgaccgacgaagttacccacatcgtggcagaaaatctgtcacgctctgaagtattggcttggctgaaagaacacaagatggagaagaccaagcaattcgaactgctggatattagctggcttatcgaaagcatgaaagttggtaaaccggtggacaccaaggggaaataccagttggcggaatcggttgaggtgagtgcgaacccagatccgacagaaggtcgtgtaaacgagctgcctcctactatgaaaaccgtttctccgtatgcgtgtcaacgccgcaccaccctgaacaaccgtaatactcgttttacggactcgctggagattcttcgtgaaaattacgagctgaaaggcaacgacgatactgcgctggaatttcgtcgtgctatctccgtgctgaaaagccttccgtttgaggtacgtagcctgaaagacacggaaggattgccctggatcagtgatgaagtcaaagggattatggaagaaatcatcgaagtcggggagtcgcgtgaagtgcaggccgtgctcaatgatgagtggtatcaaagcttccacgcatttacgcgtgtctttggagtgggggtgaagacagcagacaagtggtaccgtatgggtctgcgcaccctcgaggatgttcgttccagcaagaccctgaagttgaccccgatgcagaaagtaggtctgctgtattatgaagatcttgctcgcggcgttacgcgtgccgaagctgacgcgatttggctgctggttcaggatgcagtcgcaactttcgacccggatgcgatcgtggagattgtcggtggatttcgtcgtgggaaacctcagggtcacgacgttgatctgcttatcagttctccgggagctgagaaagagcaagaagaccaactcctgcagaaagtgatgaatctgtggaagaaacaagggttgttgctgtgtggtcgtctggaatggagtcagtgggaagatgggggttcgccttccggtaaggctgatgagggtgacgcggaggcgtcgtgctttctgatcctcaaactttatgatcatctggtgcgtaaaagtaaacgcaatatgccgactggttcgaacatgggcgagtccaaaccgtggaaagcaattaaagtagatctgctgcgttgcccctatggcagttttgcgtttgcgatgttgcagtggaccggaagccgcatgttccgtcgtgatctgcgctggtacgccctggaagagaagaacatgatgctggacaatcattcgctgtatgacatgacccgcggtatcttcctccctgctaaatcggaagaggaaattttcgaacatctggggcttgaatacctggaaccgttcgaacgtaacgca

SEQ ID NO: 4192 - protein, 529 aa, synthetic construct
  REGION 1..529: note = Variant of terminal deoxynucleotidyltransferase
MHHHHHHGGSGSHGIRTIDSDFGKKQQKKGDNHDSSATYEIKFHEFVLFILEEKMGATRRTFLTDLARKKGFRVENELTDEVTHIVAENLSRSEVLAWLKEHKMEKTKQFELLDISWLIESMKVGKPVDTKGKYQLAESVEVSANPDPTEGRVNELPPTMKTVSPYACQRRTTLNNRNTRFTDSLEILRENYELKGNDDTALEFRRAISVLKSLPFEVRSLKDTEGLPWISDEVKGIMEEIIEVGESREVQAVLNDEWYQSFHAFTRVFGVGVKTADKWYRMGLRTLEDVRSSKTLKLTPMQKVGLLYYEDLARGVTRAEADAIWLLVQDAVATFDPDAIVEIVGGFRRGKPQGHDVDLLISSPGAEKEQEDQLLQKVMNLWKKQGLLLCGRLEWSQWEDGGSPSGKADEGDAEASCFLILKLYDHLVRKSKRNMPTGSNMGESKPWKAIKVDLLRCPYGSFAFAMLQWTGSRMFRRDLRWYALEEKNMMLDNHSLYDMTRGIFLPAKSEEEIFEHLGLEYLEPFERNA

SEQ ID NO: 4193 - DNA, 1587 bp, synthetic construct
  misc_feature 1..1587: note = Variant of terminal deoxynucleotidyltransferase
  source 1..1587: mol_type = other DNA
atgcaccatcatcatcatcatggcggtagcggcagccacggcattcgtaccatcgattcggacttcgggaagaaacagcagaaaaaaggcgataaccacgatagttccgccacttatgaaatcaaatttcacgagtttgtgctgttcattctcgaagaaaaaatgggtgcgacgcgtcgtacttttctgacagatttagcccgcaagaaagggttccgcgtcgagaatgaactgaccgacgaagttacccacatcgtggcagaaaatctgtcacgctctgaagtattggcttggctgaaagaacacaagatggagaagaccaagcaattcgaactgctggatattagctggcttatcgaaagcatgaaagttggtaaaccggtggacaccaaggggaaataccagttggcggaatcggttgaggtgagtgcgaacccagatccgacagaaggtcgtgtaaacgagctgcctcctactatgaaaaccgtttctccgtatgcgtgtcaacgccgcaccaccctgaacaaccgtaatcaacgttttacggactcgctggagattcttcgtgaaaattacgagctgaaaggcaacgacgatactgcgctggaatttcgtcgtgctatctccgtgctgaaaagccttccgtttgaggtacgtagcctgaaagacacggaaggattgccctggatcagtgatgaagtcaaagggattatggaagaaatcatcgaagtcggggagtcgcgtgaagtgcaggccgtgctcaatgatgagtggtatcaaagcttccacgcatttacgcgtgtctttggagtgggggtgaagacagcagacaagtggtaccgtatgggtctgcgcaccctcgaggatgttcgttccagcaagaccctgaagttgaccccgatgcagaaagtaggtctgctgtattatgaagatcttgctcgcggcgttacgcgtgccgaagctgacgcgatttggctgctggttcaggatgcagtcgcaactttcgacccggatgcgatcgtggagattgtcggtggatttcgtcgtgggaaacctcagggtcacgacgttgatctgcttatcagttctccgggagctgagaaagagcaagaagaccaactcctgcagaaagtgatgaatctgtggaagaaacaagggttgttgctgtgtggtcgtctggaatggagtcagtgggaagatgggggttcgccttccggtaaggctgatgagggtgacgcggaggcgtcgtgctttctgatcctcaaactttatgatcatctggtgcgtaaaagtaaacgcaatatgccgactggttcgaacatgggcgagtccaaaccgtggaaagcaattaaagtagatctgctgcgttgcccctatggcagttttgcgtttgcgatgttgcagtggaccggaagccgcatgttccgtcgtgatctggcgtggtacgccctggaagagaagaacatgatgctggacaatcattcgctgtatgacatgacccgcggtatcttcctccctgctaaatcggaagaggaaattttcgaacatctggggcttgaatacctggaaccgttcgaacgtaacgca

SEQ ID NO: 4194 - protein, 529 aa, synthetic construct
  REGION 1..529: note = Variant of terminal deoxynucleotidyltransferase
MHHHHHHGGSGSHGIRTIDSDFGKKQQKKGDNHDSSATYEIKFHEFVLFILEEKMGATRRTFLTDLARKKGFRVENELTDEVTHIVAENLSRSEVLAWLKEHKMEKTKQFELLDISWLIESMKVGKPVDTKGKYQLAESVEVSANPDPTEGRVNELPPTMKTVSPYACQRRTTLNNRNQRFTDSLEILRENYELKGNDDTALEFRRAISVLKSLPFEVRSLKDTEGLPWISDEVKGIMEEIIEVGESREVQAVLNDEWYQSFHAFTRVFGVGVKTADKWYRMGLRTLEDVRSSKTLKLTPMQKVGLLYYEDLARGVTRAEADAIWLLVQDAVATFDPDAIVEIVGGFRRGKPQGHDVDLLISSPGAEKEQEDQLLQKVMNLWKKQGLLLCGRLEWSQWEDGGSPSGKADEGDAEASCFLILKLYDHLVRKSKRNMPTGSNMGESKPWKAIKVDLLRCPYGSFAFAMLQWTGSRMFRRDLAWYALEEKNMMLDNHSLYDMTRGIFLPAKSEEEIFEHLGLEYLEPFERNA

SEQ ID NO: 4195 - DNA, 1587 bp, synthetic construct
  misc_feature 1..1587: note = Variant of terminal deoxynucleotidyltransferase
  source 1..1587: mol_type = other DNA
atgcaccatcatcatcatcatggcggtagcggcagccacggcattcgtaccatcgattcggacttcgggaagaaacagcagaaaaaaggcgataaccacgatagttccgccacttatgaaatcaaatttcacgagtttgtgctgttcattctcgaagaaaaaatgggtgcgacgcgtcgtacttttctgacagatttagcccgcaagaaagggttccgcgtcgagaatgaactgaccgacgaagttacccacatcgtggcagaaaatctgtcacgctctgaagtattggcttggctgaaagaacacaagatggagaagaccaagcaattcgaactgctggatattagctggcttatcgaaagcatgaaagttggtaaaccggtggacaccaaggggaaataccagttggcggaatcggttgaggtgagtgcgaacccagatccgacagaaggtcgtgtaaacgagctgcctcctactatgaaaaccgtttctccgtatgcgtgtcaacgccgcaccaccctgaacaaccgtaatcaacgttttacggactcgctggagattcttcgtgaaaattacgagctgaaaggcaacgacgatactgcgctggaatttcgtcgtgctatctccgtgctgaaaagccttccgtttgaggtacgtagcctgaaagacacggaaggattgccctggatcagtgatgaagtcaaagggattatggaagaaatcatcgaagtcggggagtcgcgtgaagtgcaggccgtgctcaatgatgagtggtatcaaagcttccacgcatttacgcgtgtctttggagtgggggtgaagacagcagacaagtggtaccgtatgggtctgcgcaccctcgaggatgttatgtccagcaagaccctgaagttgaccccgatgcagaaagtaggtctgctgtattatgaagatcttgctcgcggcgttacgcgtgccgaagctgacgcgatttggctgctggttcaggatgcagtcgcaactttcgacccggatgcgatcgtggagattgtcggtggatttcgtcgtgggaaacctcagggtcacgacgttgatctgcttatcagttctccgggagctgagaaagagcaagaagaccaactcctgcagaaagtgatgaatctgtggaagaaacaagggttgttgctgtgtggtcgtctggaatggagtcagtgggaagatgggggttcgccttccggtaaggctgatgagggtgacgcggaggcgtcgtgctttctgatcctcaaactttatgatcatctggtgcgtaaaagtaaacgcaatatgccgactggttcgaacatgggcgagtccaaaccgtggaaagcaattaaagtagatctgctgcgttgcccctatggcagttttgcgtttgcgatgttgcagtggaccggaagccgcatgttccgtcgtgatctgcgctggtacgccctggaagagaagaacatgatgctggacaatcattcgctgtatgacatgacccgcggtatcttcctccctgctaaatcggaagaggaaattttcgaacatctggggcttgaatacctggaaccgttcgaacgtaacgca

SEQ ID NO: 4196 - protein, 529 aa, synthetic construct
  REGION 1..529: note = Variant of terminal deoxynucleotidyltransferase
MHHHHHHGGSGSHGIRTIDSDFGKKQQKKGDNHDSSATYEIKFHEFVLFILEEKMGATRRTFLTDLARKKGFRVENELTDEVTHIVAENLSRSEVLAWLKEHKMEKTKQFELLDISWLIESMKVGKPVDTKGKYQLAESVEVSANPDPTEGRVNELPPTMKTVSPYACQRRTTLNNRNQRFTDSLEILRENYELKGNDDTALEFRRAISVLKSLPFEVRSLKDTEGLPWISDEVKGIMEEIIEVGESREVQAVLNDEWYQSFHAFTRVFGVGVKTADKWYRMGLRTLEDVMSSKTLKLTPMQKVGLLYYEDLARGVTRAEADAIWLLVQDAVATFDPDAIVEIVGGFRRGKPQGHDVDLLISSPGAEKEQEDQLLQKVMNLWKKQGLLLCGRLEWSQWEDGGSPSGKADEGDAEASCFLILKLYDHLVRKSKRNMPTGSNMGESKPWKAIKVDLLRCPYGSFAFAMLQWTGSRMFRRDLRWYALEEKNMMLDNHSLYDMTRGIFLPAKSEEEIFEHLGLEYLEPFERNA

SEQ ID NO: 4197 - DNA, 1587 bp, synthetic construct
  misc_feature 1..1587: note = Variant of terminal deoxynucleotidyltransferase
  source 1..1587: mol_type = other DNA
atgcaccatcatcatcatcatggcggtagcggcagccacggcattcgtaccatcgattcggacttcgggaagaaacagcagaaaaaaggcgataaccacgatagttccgccacttatgaaatcaaatttcacgagtttgtgctgttcattctcgaagaaaaaatgggtgcgacgcgtcgtacttttctgacagatttagcccgcaagaaagggttccgcgtcgagaatgaactgaccgacgaagttacccacatcgtggcagaaaatctgtcacgctctgaagtattggcttggctgaaagaacacaagatggagaagaccaagcaattcgaactgctggatattagctggcttatcgaaagcatgaaagttggtaaaccggtggacaccaaggggaaataccagttggcggaatcggttgaggtgagtgcgaacccagatccgacagaaggtcgtgtaaacgagctgcctcctactatgaaaaccgtttctccgtatgcgtgtcaacgccgcaccaccctgaacaaccgtaatcaacgttttacggactcgctggagattcttcgtgaaaattacgagctgaaaggcaacgacgatactgcgctggaatttcgtcgtgctatctccgtgctgaaaagccttccgtttgaggtacgtagcctgaaagacacggaaggattgccctggatcagtgatgaagtcaaagggattatggaagaaatcatcgaagtcggggagtcgcgtgaagtgcaggccgtgctcaatgatgagtggtatcaaagcttccacgcatttacgcgtgtctttggagtgggggtgaagacagcagacaagtggtaccgtatgggtctgcgcaccctcgaggatgttcgttccagcaagaccctgaagttgaccccgatgcagaaagtaggtctgctgtattatgaagatcttgctcgcggcgttacgcgtgccgaagctgacgcgatttggctgctggttcaggatgcagtcgcaactttcgacccggatgcgatcgtggagattgtcggtggatttcgtcgtgggaaacctcagggtcacgacgttgatctgcttatcagttctccgggagctgagaaagagcaagaagaccaactcctgcagaaagtgatgaatctgtggaagaaacaagggttgttgctgtgtggtcgtctggaatggagtcagtgggaagatgggggttcgccttccggtaaggctgatgagggtgacgcggaggcgtcgtgctttctgatcctcaaactttatgatcatctggtgcgtaaaagtaaacgcaatatgccgactggttcgaacatgggcgagtccaaaccgtggaaagcaattaaagtagatctgctgcgttgcccctatggcagttttgcgtttgcgatgttgcagtggaccggaagccgcatgttccgtcgtgatctgcgctggtacgccctggaagagaagaacatgatgctggacaatcatcggctgtatgacatgacccgcggtatcttcctccctgctaaatcggaagaggaaattttcgaacatctggggcttgaatacctggaaccgttcgaacgtaacgca

SEQ ID NO: 4198 - protein, 529 aa, synthetic construct
  REGION 1..529: note = Variant of terminal deoxynucleotidyltransferase
MHHHHHHGGSGSHGIRTIDSDFGKKQQKKGDNHDSSATYEIKFHEFVLFILEEKMGATRRTFLTDLARKKGFRVENELTDEVTHIVAENLSRSEVLAWLKEHKMEKTKQFELLDISWLIESMKVGKPVDTKGKYQLAESVEVSANPDPTEGRVNELPPTMKTVSPYACQRRTTLNNRNQRFTDSLEILRENYELKGNDDTALEFRRAISVLKSLPFEVRSLKDTEGLPWISDEVKGIMEEIIEVGESREVQAVLNDEWYQSFHAFTRVFGVGVKTADKWYRMGLRTLEDVRSSKTLKLTPMQKVGLLYYEDLARGVTRAEADAIWLLVQDAVATFDPDAIVEIVGGFRRGKPQGHDVDLLISSPGAEKEQEDQLLQKVMNLWKKQGLLLCGRLEWSQWEDGGSPSGKADEGDAEASCFLILKLYDHLVRKSKRNMPTGSNMGESKPWKAIKVDLLRCPYGSFAFAMLQWTGSRMFRRDLRWYALEEKNMMLDNHRLYDMTRGIFLPAKSEEEIFEHLGLEYLEPFERNA

SEQ ID NO: 4199 - DNA, 1587 bp, synthetic construct
  misc_feature 1..1587: note = Variant of terminal deoxynucleotidyltransferase
  source 1..1587: mol_type = other DNA
atgcaccatcatcatcatcatggcggtagcggcagccacggcattcgtaccatcgattcggacttcgggaagaaacagcagaaaaaaggcgataaccacgatagttccgccacttatgaaatcaaatttcacgagtttgtgctgttcattctcgaagaaaaaatgggtgcgacgcgtcgtacttttctgacagatttagcccgcaagaaagggttccgcgtcgagaatgaactgaccgacgaagttacccacatcgtggcagaaaatctgtcacgctctgaagtattggcttggctgaaagaacacaagatggagaagaccaagcaattcgaactgctggatattagctggcttatcgaaagcatgaaagttggtaaaccggtggacaccaaggggaaataccagttggcggaatcggttgaggtgagtgcgaacccagatccgacagaaggtcgtgtaaacgagctgcctcctactatgaaaaccgtttctccgtatgcgtgtcaacgccgcaccaccctgaacaaccgtaatcaacgttttacggactcgctggagattcttcgtgaaaattacgagctgaaaggcaacgacgatactgcgctggaatttcgtcgtgctatctccgtgctgaaaagccttccgtttgaggtacgtagcctgaaagacacggaaggattgccctggatcagtgatgaagtcaaagggattatggaagaaatcatcgaagtcggggagtcgcgtgaagtgcaggccgtgctcaatgatgagtggtatcaaagcttccacgcatttacgcgtgtctttggagtgggggtgaagacagcagacaagtggtaccgtatgggtctgcgcaccctcgaggatgttcgttccagcaagaccctgaagttgaccccgatgcagaaagtaggtctgctgtattatgaagatcttgctcgcggcgttacgcgtgccgaagctgacgcgatttggctgctggttcaggatgcagtcgcaactttcgacccggatgcgatcgtggagattgtcggtggatttcgtcgtgggaaacctcagggtcacgacgttgatctgcttatcagttctccgggagctgagaaagagcaagaagaccaactcctgcagaaagtgatgaatctgtggaagaaacaagggttgttgctgtgtggtcgtctggaatggagtcagtgggaagatgggggttcgccttccactaaggctgacgagggtgacgcggaggcgtcgtgctttctgatcctcaaactttatgatcatctggtgcgtaaaagtaaacgcaatatgccgactggttcgaacatgggcgagtccaaaccgtggaaagcaattaaagtagatctgctgcgttgcccctatggcagttttgcgtttgcgatgttgcagtggaccggaagccgcatgttccgtcgtgatctgcgctggtacgccctggaagagaagaacatgatgctggacaatcattcgctgtatgacatgacccgcggtatcttcctccctgctaaatcggaagaggaaattttcgaacatctggggcttgaatacctggaaccgttcgaacgtaacgca

SEQ ID NO: 4200 - protein, 529 aa, synthetic construct
  REGION 1..529: note = Variant of terminal deoxynucleotidyltransferase
MHHHHHHGGSGSHGIRTIDSDFGKKQQKKGDNHDSSATYEIKFHEFVLFILEEKMGATRRTFLTDLARKKGFRVENELTDEVTHIVAENLSRSEVLAWLKEHKMEKTKQFELLDISWLIESMKVGKPVDTKGKYQLAESVEVSANPDPTEGRVNELPPTMKTVSPYACQRRTTLNNRNQRFTDSLEILRENYELKGNDDTALEFRRAISVLKSLPFEVRSLKDTEGLPWISDEVKGIMEEIIEVGESREVQAVLNDEWYQSFHAFTRVFGVGVKTADKWYRMGLRTLEDVRSSKTLKLTPMQKVGLLYYEDLARGVTRAEADAIWLLVQDAVATFDPDAIVEIVGGFRRGKPQGHDVDLLISSPGAEKEQEDQLLQKVMNLWKKQGLLLCGRLEWSQWEDGGSPSTKADEGDAEASCFLILKLYDHLVRKSKRNMPTGSNMGESKPWKAIKVDLLRCPYGSFAFAMLQWTGSRMFRRDLRWYALEEKNMMLDNHSLYDMTRGIFLPAKSEEEIFEHLGLEYLEPFERNA

SEQ ID NO: 4201 - DNA, 1587 bp, synthetic construct
  misc_feature 1..1587: note = Variant of terminal deoxynucleotidyltransferase
  source 1..1587: mol_type = other DNA
atgcaccatcatcatcatcatggcggtagcggcagccacggcattcgtaccatcgattcggacttcgggaagaaacagcagaaaaaaggcgataaccacgatagttccgccacttatgaaatcaaatttcacgagtttgtgctgttcattctcgaagaaaaaatgggtgcgacgcgtcgtacttttctgacagatttagcccgcaagaaagggttccgcgtcgagaatgaactgaccgacgaagttacccacatcgtggcagaaaatctgtcacgctctgaagtattggcttggctgaaagaacacaagatggagaagaccaagcaattcgaactgctggatattagctggcttatcgaaagcatgaaagttggtaaaccggtggacaccaaggggaaataccagttggcggaatcggttgaggtgagtgcgaacccagatccgacagaaggtcgtgtaaacgagctgcctcctactatgaaaaccgtttctccgtatgcgtgtcaacgccgcaccaccctgaacaaccgtaatcaacgttttacggactcgctggagattcttcgtgaaaattacgagctgaaaggcaacgacgatactgcgctggaatttcgtcgtgctatctccgtgctgaaaagccttccgtttgaggtacgtagcctgaaagacacggaaggattgccctggatcagtgatgaagtcaaagggattatggaagaaatcatcgaagtcggggagtcgcgtgaagtgcaggccgtgctcaatgatgagtggtatcaaagcttccacgcatttacgcgtgtctttggagtgggggtgaagacagcagacaagtggtaccgtatgggtctgcgcaccctcgaggatgttcgttccagcaagaccctgaagttgaccccgatgcagaaagtaggtctgctgtattatgaagatcttgctcgcggcgttacgcgtgccgaagctgacgcgatttggctgctggttcaggatgcagtcgcaactttcgacccggatgcgatcgtggagattgtcggtggatttcgtcgtgggaaacctcagggtcacgacgttgatctgcttatcagttctccgggagctgagaaagagcaagaagaccaactcctgcagaaagtgatgaatctgtggaagaaacaagggattttgctgtgtggtcgtctggaatggagtcagtgggaagatgggggttcgccttccggtaaggctgatgagggtgacgcggaggcgtcgtgctttctgatcctcaaactttatgatcatctggtgcgtaaaagtaaacgcaatatgccgactggttcgaacatgggcgagtccaaaccgtggaaagcaattaaagtagatctgctgcgttgcccctatggcagttttgcgtttgcgatgttgcagtggaccggaagccgcatgttccgtcgtgatctgcgctggtacgccctggaagagaagaacatgatgctggacaatcattcgctgtatgacatgacccgcggtatcttcctccctgctaaatcggaagaggaaattttcgaacatctggggcttgaatacctggaaccgttcgaacgtaacgca

SEQ ID NO: 4202 - protein, 529 aa, synthetic construct
  REGION 1..529: note = Variant of terminal deoxynucleotidyltransferase
MHHHHHHGGSGSHGIRTIDSDFGKKQQKKGDNHDSSATYEIKFHEFVLFILEEKMGATRRTFLTDLARKKGFRVENELTDEVTHIVAENLSRSEVLAWLKEHKMEKTKQFELLDISWLIESMKVGKPVDTKGKYQLAESVEVSANPDPTEGRVNELPPTMKTVSPYACQRRTTLNNRNQRFTDSLEILRENYELKGNDDTALEFRRAISVLKSLPFEVRSLKDTEGLPWISDEVKGIMEEIIEVGESREVQAVLNDEWYQSFHAFTRVFGVGVKTADKWYRMGLRTLEDVRSSKTLKLTPMQKVGLLYYEDLARGVTRAEADAIWLLVQDAVATFDPDAIVEIVGGFRRGKPQGHDVDLLISSPGAEKEQEDQLLQKVMNLWKKQGILLCGRLEWSQWEDGGSPSGKADEGDAEASCFLILKLYDHLVRKSKRNMPTGSNMGESKPWKAIKVDLLRCPYGSFAFAMLQWTGSRMFRRDLRWYALEEKNMMLDNHSLYDMTRGIFLPAKSEEEIFEHLGLEYLEPFERNA

SEQ ID NO: 4203 - DNA, 1587 bp, synthetic construct
  misc_feature 1..1587: note = Variant of terminal deoxynucleotidyltransferase
  source 1..1587: mol_type = other DNA
atgcaccatcatcatcatcatggcggtagcggcagccacggcattcgtaccatcgattcggacttcgggaagaaacagcagaaaaaaggcgataaccacgatagttccgccacttatgaaatcaaatttcacgagtttgtgctgttcattctcgaagaaaaaatgggtgcgacgcgtcgtacttttctgacagatttagcccgcaagaaagggttccgcgtcgagaatgaactgaccgacgaagttacccacatcgtggcagaaaatctgtcacgctctgaagtattggcttggctgaaagaacacaagatggagaagaccaagcaattcgaactgctggatattagctggcttatcgaaagcatgaaagttggtaaaccggtggacaccaaggggaaataccagttggcggaatcggttgaggtgagtgcgaacccagatccgacagaaggtcgtgtaaacgagctgcctcctactatgaaaaccgtttctccgtatgcgtgtcaacgccgcaccaccctgaacaaccgtaatcaacgttttacggactcgctggagattcttcgtgaaaattacgagctgaaaggcaacgacgatactgcgctggaatttcgtcgtgctatctccgtgctgaaaagccttccgtttgaggtacgtagcctgaaagacacggaaggattgccctggatcagtgatgaagtcaaagggattatggaagaaatcatcgaagtcggggagtcgcgtgaagtgcaggccgtgctcaatgatgagtggtatcaaagcttccacgcatttacgcgtgtctttggagtgggggtgaagacagcagacaagtggtaccgtatgggtctgcgcaccctcgaggatgttcgttccagcaagaccctgaagttgaccccgatgcagaaagtaggtctgctgtattatgaagatcttgctcgcggcgttacgcgtgccgaagctgacgcgatttggctgctggttcaggatgcagtcgcaactttcgacccggatgcgatcgtggagattgtcggtggatttcgtcgtgggaaacctcagggtcacgacgttgatctgcttatcagttctccgggagctgagaaagagcaagaagaccaactcctgcagaaagtgatgaatctgtggaagaaacaagggttgttgctgtgtggtcgtctggaatggagtcagtgggaagatgggggtaagccttccggtaaggctgatgagggtgacgcggaggcgtcgtgctttctgatcctcaaactttatgatcatctggtgcgtaaaagtaaacgcaatatgccgactggttcgaacatgggcgagtccaaaccgtggaaagcaattaaagtagatctgctgcgttgcccctatggcagttttgcgtttgcgatgttgcagtggaccggaagccgcatgttccgtcgtgatctgcgctggtacgccctggaagagaagaacatgatgctggacaatcattcgctgtatgacatgacccgcggtatcttcctccctgctaaatcggaagaggaaattttcgaacatctggggcttgaatacctggaaccgttcgaacgtaacgca

SEQ ID NO: 4204 - protein, 529 aa, synthetic construct
  REGION 1..529: note = Variant of terminal deoxynucleotidyltransferase
MHHHHHHGGSGSHGIRTIDSDFGKKQQKKGDNHDSSATYEIKFHEFVLFILEEKMGATRRTFLTDLARKKGFRVENELTDEVTHIVAENLSRSEVLAWLKEHKMEKTKQFELLDISWLIESMKVGKPVDTKGKYQLAESVEVSANPDPTEGRVNELPPTMKTVSPYACQRRTTLNNRNQRFTDSLEILRENYELKGNDDTALEFRRAISVLKSLPFEVRSLKDTEGLPWISDEVKGIMEEIIEVGESREVQAVLNDEWYQSFHAFTRVFGVGVKTADKWYRMGLRTLEDVRSSKTLKLTPMQKVGLLYYEDLARGVTRAEADAIWLLVQDAVATFDPDAIVEIVGGFRRGKPQGHDVDLLISSPGAEKEQEDQLLQKVMNLWKKQGLLLCGRLEWSQWEDGGKPSGKADEGDAEASCFLILKLYDHLVRKSKRNMPTGSNMGESKPWKAIKVDLLRCPYGSFAFAMLQWTGSRMFRRDLRWYALEEKNMMLDNHSLYDMTRGIFLPAKSEEEIFEHLGLEYLEPFERNA

SEQ ID NO: 4205 - DNA, 1587 bp, synthetic construct
  misc_feature 1..1587: note = Variant of terminal deoxynucleotidyltransferase
  source 1..1587: mol_type = other DNA
atgcaccatcatcatcatcatggcggtagcggcagccacggcattcgtaccatcgattcggacttcgggaagaaacagcagaaaaaaggcgataaccacgatagttccgccacttatgaaatcaaatttcacgagtttgtgctgttcattctcgaagaaaaaatgggtgcgacgcgtcgtacttttctgacagatttagcccgcaagaaagggttccgcgtcgagaatgaactgaccgacgaagttacccacatcgtggcagaaaatctgtcacgctctgaagtattggcttggctgaaagaacacaagatggagaagaccaagcaattcgaactgctggatattagctggcttatcgaaagcatgaaagttggtaaaccggtggacaccaaggggaaataccagttggcggaatcggttgaggtgagtgcgaacccagatccgacagaaggtcgtgtaaacgagctgcctcctactatgaaaaccgtttctccgtatgcgtgtcaacgccgcaccaccctgaacaaccgtaatcaacgttttacggactcgctggagattcttcgtgaaaattacgagctgaaaggcaacgacgatactgcgctggaatttcgtcgtgctatctccgtgctgaaaagccttccgtttgaggtacgtagcctgaaagacacggaaggattgccctggatcagtgatgaagtcaaagggattatggaagaaatcatcgaagtcggggagtcgcgtgaagtgcaggccgtgctcaatgatgagtggtatcaaagcttccacgcatttacgcgtgtctttggagtgggggtgaagacagcagacaagtggtaccgtatgggtctgcgcaccctcgaggatgttcgttccagcaagaccctgaagttgaccccgatgcagaaagtaggtctgctgtattatgaagatcttgctcgcggcgttacgcgtgccgaagctgacgcgatttggctgctggttcaggatgcagtcgcaactttcgacccggatgcgatcgtggagattgtcggtggatttcgtcgtgggaaacctcagggtcacgacgttgatctgcttatcagttctccgggagctgagaaagagcaagaagaccaactcctgcagaaagtgatgaatctgtggaagaaacaagggttgttgctgtgtggtcgtctggaatggagtcagtgggaagatgggggttcgatgtccggtaaggctgacgagggtgacgcggaggcgtcgtgctttctgatcctcaaactttatgatcatctggtgcgtaaaagtaaacgcaatatgccgactggttcgaacatgggcgagtccaaaccgtggaaagcaattaaagtagatctgctgcgttgcccctatggcagttttgcgtttgcgatgttgcagtggaccggaagccgcatgttccgtcgtgatctgcgctggtacgccctggaagagaagaacatgatgctggacaatcattcgctgtatgacatgacccgcggtatcttcctccctgctaaatcggaagaggaaattttcgaacatctggggcttgaatacctggaaccgttcgaacgtaacgca

SEQ ID NO: 4206 - protein, 529 aa, synthetic construct
  REGION 1..529: note = Variant of terminal deoxynucleotidyltransferase
MHHHHHHGGSGSHGIRTIDSDFGKKQQKKGDNHDSSATYEIKFHEFVLFILEEKMGATRRTFLTDLARKKGFRVENELTDEVTHIVAENLSRSEVLAWLKEHKMEKTKQFELLDISWLIESMKVGKPVDTKGKYQLAESVEVSANPDPTEGRVNELPPTMKTVSPYACQRRTTLNNRNQRFTDSLEILRENYELKGNDDTALEFRRAISVLKSLPFEVRSLKDTEGLPWISDEVKGIMEEIIEVGESREVQAVLNDEWYQSFHAFTRVFGVGVKTADKWYRMGLRTLEDVRSSKTLKLTPMQKVGLLYYEDLARGVTRAEADAIWLLVQDAVATFDPDAIVEIVGGFRRGKPQGHDVDLLISSPGAEKEQEDQLLQKVMNLWKKQGLLLCGRLEWSQWEDGGSMSGKADEGDAEASCFLILKLYDHLVRKSKRNMPTGSNMGESKPWKAIKVDLLRCPYGSFAFAMLQWTGSRMFRRDLRWYALEEKNMMLDNHSLYDMTRGIFLPAKSEEEIFEHLGLEYLEPFERNA

SEQ ID NO: 4207 - DNA, 1587 bp, synthetic construct
  misc_feature 1..1587: note = Variant of terminal deoxynucleotidyltransferase
  source 1..1587: mol_type = other DNA
atgcaccatcatcatcatcatggcggtagcggcagccacggcattcgtaccatcgattcggacttcgggaagaaacagcagaaaaaaggcgataaccacgatagttccgccacttatgaaatcaaatttcacgagtttgtgctgttcattctcgaagaaaaaatgggtgcgacgcgtcgtacttttctgacagatttagcccgcaagaaagggttccgcgtcgagaatgaactgaccgacgaagttacccacatcgtggcagaaaatctgtcacgctctgaagtattggcttggctgaaagaacacaagatggagaagaccaagcaattcgaactgctggatattagctggcttatcgaaagcatgaaagttggtaaaccggtggacaccaaggggaaataccagttggcggaatcggttgaggtgagtgcgaacccagatccgacagaaggtcgtgtaaacgagctgcctcctactatgaaaaccgtttctccgtatgcgtgtcaacgccgcaccaccctgaacaaccgtaatcaacgttttacggactcgctggagattcttcgtgaaaattacgagctgaaaggcaacgacgatactgcgctggaatttcgtcgtgctatctccgtgctgaaaagccttccgtttgaggtacgtagcctgaaagacacggaaggattgccctggatcagtgatgaagtcaaagggattatggaagaaatcatcgaagtcggggagtcgcgtgaagtgcaggccgtgctcaatgattcgtggtatcaaagcttccacgcatttacgcgtgtctttggagtgggggtgaagacagcagacaagtggtaccgtatgggtctgcgcaccctcgaggatgttcgttccagcaagaccctgaagttgaccccgatgcagaaagtaggtctgctgtattatgaagatcttgctcgcggcgttacgcgtgccgaagctgacgcgatttggctgctggttcaggatgcagtcgcaactttcgacccggatgcgatcgtggagattgtcggtggatttcgtcgtgggaaacctcagggtcacgacgttgatctgcttatcagttctccgggagctgagaaagagcaagaagaccaactcctgcagaaagtgatgaatctgtggaagaaacaagggttgttgctgtgtggtcgtctggaatggagtcagtgggaagatgggggttcgccttccggtaaggctgatgagggtgacgcggaggcgtcgtgctttctgatcctcaaactttatgatcatctggtgcgtaaaagtaaacgcaatatgccgactggttcgaacatgggcgagtccaaaccgtggaaagcaattaaagtagatctgctgcgttgcccctatggcagttttgcgtttgcgatgttgcagtggaccggaagccgcatgttccgtcgtgatctgcgctggtacgccctggaagagaagaacatgatgctggacaatcattcgctgtatgacatgacccgcggtatcttcctccctgctaaatcggaagaggaaattttcgaacatctggggcttgaatacctggaaccgttcgaacgtaacgca

SEQ ID NO: 4208 - protein, 529 aa, synthetic construct
  REGION 1..529: note = Variant of terminal deoxynucleotidyltransferase
MHHHHHHGGSGSHGIRTIDSDFGKKQQKKGDNHDSSATYEIKFHEFVLFILEEKMGATRRTFLTDLARKKGFRVENELTDEVTHIVAENLSRSEVLAWLKEHKMEKTKQFELLDISWLIESMKVGKPVDTKGKYQLAESVEVSANPDPTEGRVNELPPTMKTVSPYACQRRTTLNNRNQRFTDSLEILRENYELKGNDDTALEFRRAISVLKSLPFEVRSLKDTEGLPWISDEVKGIMEEIIEVGESREVQAVLNDSWYQSFHAFTRVFGVGVKTADKWYRMGLRTLEDVRSSKTLKLTPMQKVGLLYYEDLARGVTRAEADAIWLLVQDAVATFDPDAIVEIVGGFRRGKPQGHDVDLLISSPGAEKEQEDQLLQKVMNLWKKQGLLLCGRLEWSQWEDGGSPSGKADEGDAEASCFLILKLYDHLVRKSKRNMPTGSNMGESKPWKAIKVDLLRCPYGSFAFAMLQWTGSRMFRRDLRWYALEEKNMMLDNHSLYDMTRGIFLPAKSEEEIFEHLGLEYLEPFERNA

SEQ ID NO: 4209 - DNA, 1587 bp, synthetic construct
  misc_feature 1..1587: note = Variant of terminal deoxynucleotidyltransferase
  source 1..1587: mol_type = other DNA
atgcaccatcatcatcatcatggcggtagcggcagccacggcattcgtaccatcgattcggacttcgggaagaaacagcagaaaaaaggcgataaccacgatagttccgccacttatgaaatcaaatttcacgagtttgtgctgttcattctcgaagaaaaaatgggtgcgacgcgtcgtacttttctgacagatttagcccgcaagaaagggttccgcgtcgagaatgaactgaccgacgaagttacccacatcgtggcagaaaatctgtcacgctctgaagtattggcttggctgaaagaacacaagatggagaagaccaagcaattcgaactgctggatattagctggcttatcgaaagcatgaaagttggtaaaccggtggacaccaaggggaaataccagttggcggaatcggttgaggtgagtgcgaacccagatccgacagaaggtcgtgtaaacgagctgcctcctactatgaaaaccgtttctccgtatgcgtgtcaacgccgcaccaccctgaacaaccgtaatcaacgttttacggactcgctggagattcttcgtgaaaattacgagctgaaaggcaacgacgatactgcgctggaatttcgtcgtgctatctccgtgctgaaaagccttccgtttgaggtacgtagcctgaaagacacggaaggattgccctggatcagtgatgaagtcaaagggattatggaagaaatcatcgaagtcggggagtcgcgtgaagtgcaggccgtgctcaatgatgagtggtatcaaagcttccacgcatttacgcgtgtctttggagtgggggtgaagacagcagacaagtggtaccgtatgggtctgcgcaccctcgaggatgttcgttccagcaagaccctgaagttgaccccgatgcagaaagtaggtctgctgtattatgaagatcttgctcgcggcgttacgcgtgccgaagctgacgcgatttggctgctggttcaggatgcagtcgcaactttcgacccggatgcgatcgtggagattgtcggtggatttcgtcgtgggaaacctcagggtcacgacgttgatctgcttatcagttctccgggagctgagaaagagcaagaagaccaactcctgcagaaagtgatgaatctgtggaagaaacaagggttgttgctgtgtggtcgtctggaatggagtcagtgggaagatgggggtcggccttccggtaaggctgatgagggtgacgcggaggcgtcgtgctttctgatcctcaaactttatgatcatctggtgcgtaaaagtaaacgcaatatgccgactggttcgaacatgggcgagtccaaaccgtggaaagcaattaaagtagatctgctgcgttgcccctatggcagttttgcgtttgcgatgttgcagtggaccggaagccgcatgttccgtcgtgatctgcgctggtacgccctggaagagaagaacatgatgctggacaatcattcgctgtatgacatgacccgcggtatcttcctccctgctaaatcggaagaggaaattttcgaacatctggggcttgaatacctggaaccgttcgaacgtaacgca

SEQ ID NO: 4210 - protein, 529 aa, synthetic construct
  REGION 1..529: note = Variant of terminal deoxynucleotidyltransferase
MHHHHHHGGSGSHGIRTIDSDFGKKQQKKGDNHDSSATYEIKFHEFVLFILEEKMGATRRTFLTDLARKKGFRVENELTDEVTHIVAENLSRSEVLAWLKEHKMEKTKQFELLDISWLIESMKVGKPVDTKGKYQLAESVEVSANPDPTEGRVNELPPTMKTVSPYACQRRTTLNNRNQRFTDSLEILRENYELKGNDDTALEFRRAISVLKSLPFEVRSLKDTEGLPWISDEVKGIMEEIIEVGESREVQAVLNDEWYQSFHAFTRVFGVGVKTADKWYRMGLRTLEDVRSSKTLKLTPMQKVGLLYYEDLARGVTRAEADAIWLLVQDAVATFDPDAIVEIVGGFRRGKPQGHDVDLLISSPGAEKEQEDQLLQKVMNLWKKQGLLLCGRLEWSQWEDGGRPSGKADEGDAEASCFLILKLYDHLVRKSKRNMPTGSNMGESKPWKAIKVDLLRCPYGSFAFAMLQWTGSRMFRRDLRWYALEEKNMMLDNHSLYDMTRGIFLPAKSEEEIFEHLGLEYLEPFERNA

SEQ ID NO: 4211 - DNA, 1587 bp, synthetic construct
  misc_feature 1..1587: note = Variant of terminal deoxynucleotidyltransferase
  source 1..1587: mol_type = other DNA
atgcaccatcatcatcatcatggcggtagcggcagccacggcattcgtaccatcgattcggacttcgggaagaaacagcagaaaaaaggcgataaccacgatagttccgccacttatgaaatcaaatttcacgagtttgtgctgttcattctcgaagaaaaaatgggtgcgacgcgtcgtacttttctgacagatttagcccgcaagaaagggttccgcgtcgagaatgaactgaccgacgaagttacccacatcgtggcagaaaatctgtcacgctctgaagtattggcttggctgaaagaacacaagatggagaagaccaagcaattcgaactgctggatattagctggcttatcgaaagcatgaaagttggtaaaccggtggacaccaaggggaaataccagttggcggaatcggttgaggtgagtgcgaacccagatccgacagaaggtcgtgtaaacgagctgcctcctactatgaaaaccgtttctccgtatgcgtgtcaacgccgcaccaccctgaacaaccgtaatcaacgttttacggactcgctggagattcttcgtgaaaattacgagctgaaaggcaacgataggactgcgctggaatttcgtcgtgctatctccgtgctgaaaagccttccgtttgaggtacgtagcctgaaagacacggaaggattgccctggatcagtgatgaagtcaaagggattatggaagaaatcatcgaagtcggggagtcgcgtgaagtgcaggccgtgctcaatgatgagtggtatcaaagcttccacgcatttacgcgtgtctttggagtgggggtgaagacagcagacaagtggtaccgtatgggtctgcgcaccctcgaggatgttcgttccagcaagaccctgaagttgaccccgatgcagaaagtaggtctgctgtattatgaagatcttgctcgcggcgttacgcgtgccgaagctgacgcgatttggctgctggttcaggatgcagtcgcaactttcgacccggatgcgatcgtggagattgtcggtggatttcgtcgtgggaaacctcagggtcacgacgttgatctgcttatcagttctccgggagctgagaaagagcaagaagaccaactcctgcagaaagtgatgaatctgtggaagaaacaagggttgttgctgtgtggtcgtctggaatggagtcagtgggaagatgggggttcgccttccggtaaggctgatgagggtgacgcggaggcgtcgtgctttctgatcctcaaactttatgatcatctggtgcgtaaaagtaaacgcaatatgccgactggttcgaacatgggcgagtccaaaccgtggaaagcaattaaagtagatctgctgcgttgcccctatggcagttttgcgtttgcgatgttgcagtggaccggaagccgcatgttccgtcgtgatctgcgctggtacgccctggaagagaagaacatgatgctggacaatcattcgctgtatgacatgacccgcggtatcttcctccctgctaaatcggaagaggaaattttcgaacatctggggcttgaatacctggaaccgttcgaacgtaacgca

SEQ ID NO: 4212 - protein, 529 aa, synthetic construct
  REGION 1..529: note = Variant of terminal deoxynucleotidyltransferase
MHHHHHHGGSGSHGIRTIDSDFGKKQQKKGDNHDSSATYEIKFHEFVLFILEEKMGATRRTFLTDLARKKGFRVENELTDEVTHIVAENLSRSEVLAWLKEHKMEKTKQFELLDISWLIESMKVGKPVDTKGKYQLAESVEVSANPDPTEGRVNELPPTMKTVSPYACQRRTTLNNRNQRFTDSLEILRENYELKGNDRTALEFRRAISVLKSLPFEVRSLKDTEGLPWISDEVKGIMEEIIEVGESREVQAVLNDEWYQSFHAFTRVFGVGVKTADKWYRMGLRTLEDVRSSKTLKLTPMQKVGLLYYEDLARGVTRAEADAIWLLVQDAVATFDPDAIVEIVGGFRRGKPQGHDVDLLISSPGAEKEQEDQLLQKVMNLWKKQGLLLCGRLEWSQWEDGGSPSGKADEGDAEASCFLILKLYDHLVRKSKRNMPTGSNMGESKPWKAIKVDLLRCPYGSFAFAMLQWTGSRMFRRDLRWYALEEKNMMLDNHSLYDMTRGIFLPAKSEEEIFEHLGLEYLEPFERNA

SEQ ID NO: 4213 - DNA, 1587 bp, synthetic construct
  misc_feature 1..1587: note = Variant of terminal deoxynucleotidyltransferase
  source 1..1587: mol_type = other DNA
atgcaccatcatcatcatcatggcggtagcggcagccacggcattcgtaccatcgattcggacttcgggaagaaacagcagaaaaaaggcgataaccacgatagttccgccacttatgaaatcaaatttcacgagtttgtgctgttcattctcgaagaaaaaatgggtgcgacgcgtcgtacttttctgacagatttagcccgcaagaaagggttccgcgtcgagaatgaactgaccgacgaagttacccacatcgtggcagaaaatctgtcacgctctgaagtattggcttggctgaaagaacacaagatggagaagaccaagcaattcgaactgctggatattagctggcttatcgaaagcatgaaagttggtaaaccggtggacaccaaggggaaataccagttggcggaatcggttgaggtgagtgcgaacccagatccgacagaaggtcgtgtaaacgagctgcctcctactatgaaaaccgtttctccgtatgcgtgtcaacgccgcaccaccctgaacaaccgtaatcaacgttttacggactcgctggagattcttcgtgaaaattacgagctgaaaggcaacgacgatactgcgctggaatttcgtcgtgctatctccgtgctgaaaagccttccgtttgaggtacgtagcctgaaagacacggaaggattgccctggatcagtgatgaagtcaaagggattatggaagaaatcatcgaagtcggggagtcgcgtgaagtgcaggccgtgctcaatgatgagtggtatcaaagcttccacgcatttacgcgtgtctttggagtgggggtgaagacagcagacaagtggtaccgtatgggtctgcgcaccctcgaggatgttcgttccagcaagaccctgaagttgaccccgatgcagaaagtaggtctgctgtattatgaagatcttgctcgcggcgttacgcgtgccgaagctgacgcgatttggctgctggttcaggatgcagtcgcaactttcgacccggatgcgatcgtggagattgtcggtggatttcgtcgtgggaaacctcagggtcacgacgttgatctgcttatcagttctccgggagctgagaaagagcaagaagaccaactcctgcagaaagtgatgaatctgtggaagaaacaagggttgttgctgtgtggtcgtctggaatggagtcagtgggaagatgggggttcgccttccggtaaggctgatgagggtgacgcggaggcgtcgtgctttctgatcctcaaactttatgatcatctggtgcgtaaaagtaaacgcaatatgccgactggttcgaacatgggcgagtccaaaccgtggaaagcaattaaagtagatctgctgcgttgcccctatggcagttttgcgtttgcgatgttgcagtggaccggaagccgcatgttccgtcgtgatctgcgctggtactgtctggaagagaagaacatgatgctggacaatcattcgctgtatgacatgacccgcggtatcttcctccctgctaaatcggaagaggaaattttcgaacatctggggcttgaatacctggaaccgttcgaacgtaacgca

SEQ ID NO: 4214 - protein, 529 aa, synthetic construct
  REGION 1..529: note = Variant of terminal deoxynucleotidyltransferase
MHHHHHHGGSGSHGIRTIDSDFGKKQQKKGDNHDSSATYEIKFHEFVLFILEEKMGATRRTFLTDLARKKGFRVENELTDEVTHIVAENLSRSEVLAWLKEHKMEKTKQFELLDISWLIESMKVGKPVDTKGKYQLAESVEVSANPDPTEGRVNELPPTMKTVSPYACQRRTTLNNRNQRFTDSLEILRENYELKGNDDTALEFRRAISVLKSLPFEVRSLKDTEGLPWISDEVKGIMEEIIEVGESREVQAVLNDEWYQSFHAFTRVFGVGVKTADKWYRMGLRTLEDVRSSKTLKLTPMQKVGLLYYEDLARGVTRAEADAIWLLVQDAVATFDPDAIVEIVGGFRRGKPQGHDVDLLISSPGAEKEQEDQLLQKVMNLWKKQGLLLCGRLEWSQWEDGGSPSGKADEGDAEASCFLILKLYDHLVRKSKRNMPTGSNMGESKPWKAIKVDLLRCPYGSFAFAMLQWTGSRMFRRDLRWYCLEEKNMMLDNHSLYDMTRGIFLPAKSEEEIFEHLGLEYLEPFERNA

SEQ ID NO: 4215 - DNA, 1587 bp, synthetic construct
  misc_feature 1..1587: note = Variant of terminal deoxynucleotidyltransferase
  source 1..1587: mol_type = other DNA
atgcaccatcatcatcatcatggcggtagcggcagccacggcattcgtaccatcgattcggacttcgggaagaaacagcagaaaaaaggcgataaccacgatagttccgccacttatgaaatcaaatttcacgagtttgtgctgttcattctcgaagaaaaaatgggtgcgacgcgtcgtacttttctgacagatttagcccgcaagaaagggttccgcgtcgagaatgaactgaccgacgaagttacccacatcgtggcagaaaatctgtcacgctctgaagtattggcttggctgaaagaacacaagatggagaagaccaagcaattcgaactgctggatattagctggcttatcgaaagcatgaaagttggtaaaccggtggacaccaaggggaaataccagttggcggaatcggttgaggtgagtgcgaacccagatccgacagaaggtcgtgtaaacgagctgcctcctactatgaaaaccgtttctccgtatgcgtgtcaacgccgcaccaccctgaacaaccgtaatcaacgttttacggactcgctggagattcttcgtgaaaattacgagctgaaaggcaacgacgatactgcgctggaatttcgtcgtgctatctccgtgctgaaaagccttccgtttgaggtacgtagcctgaaagacacggaaggattgccctggatcagtgatgaagtcaaagggattatggaagaaatcatcgaagtcggggagtcgcgtgaagtgcaggccgtgctcaatgatgagtggtatcaaagcttccacgcatttacgcgtgtctttggagtgggggtgaagacagcagacaagtggtaccgtatgggtctgcgcaccctcgaggatgttcgttccagcaagaccctgaagttgaccccgatgcagaaagtaggtctgctgtattatgaagatcttgctcgcggcgttacgcgtgccgaagctgacgcgatttggctgctggttcaggatgcagtcgcaactttcgacccggatgcgatcgtggagattgtcggtggatttcgtcgtgggaaacctcagggtcacgacgttgatctgcttatcagttctccgggagctgagaaagagcaagaagaccaactcctgcagaaagtgatgaatctgtggaagaaacaagggttgttgctgtgtggtcgtctggaatggagtcagtgggaagatgggggttcgccttccggtaaggctgatgagggtgacgcggaggcgtcgtgctttctgatcctcaaactttatgatcatctggtgcgtaaaagtaaacgcaatatgccgactggttcgaacatgggcgagtccaaaccgtggaaagcaattaaagtagatctgctgcgttgcccctatggcagttttgcgtttgcgatgttgcagtggaccggaagccgcatgttccgtcgtgatctgcgctggtacgccctggaagagaagaacatgatgctggacaatcatatgctgtatgacatgacccgcggtatcttcctccctgctaaatcggaagaggaaattttcgaacatctggggcttgaatacctggaaccgttcgaacgtaacgca

SEQ ID NO: 4216 - protein, 529 aa, synthetic construct
  REGION 1..529: note = Variant of terminal deoxynucleotidyltransferase
MHHHHHHGGSGSHGIRTIDSDFGKKQQKKGDNHDSSATYEIKFHEFVLFILEEKMGATRRTFLTDLARKKGFRVENELTDEVTHIVAENLSRSEVLAWLKEHKMEKTKQFELLDISWLIESMKVGKPVDTKGKYQLAESVEVSANPDPTEGRVNELPPTMKTVSPYACQRRTTLNNRNQRFTDSLEILRENYELKGNDDTALEFRRAISVLKSLPFEVRSLKDTEGLPWISDEVKGIMEEIIEVGESREVQAVLNDEWYQSFHAFTRVFGVGVKTADKWYRMGLRTLEDVRSSKTLKLTPMQKVGLLYYEDLARGVTRAEADAIWLLVQDAVATFDPDAIVEIVGGFRRGKPQGHDVDLLISSPGAEKEQEDQLLQKVMNLWKKQGLLLCGRLEWSQWEDGGSPSGKADEGDAEASCFLILKLYDHLVRKSKRNMPTGSNMGESKPWKAIKVDLLRCPYGSFAFAMLQWTGSRMFRRDLRWYALEEKNMMLDNHMLYDMTRGIFLPAKSEEEIFEHLGLEYLEPFERNA

SEQ ID NO: 4217 - DNA, 1587 bp, synthetic construct
  misc_feature 1..1587: note = Variant of terminal deoxynucleotidyltransferase
  source 1..1587: mol_type = other DNA
atgcaccatcatcatcatcatggcggtagcggcagccacggcattcgtaccatcgattcggacttcgggaagaaacagcagaaaaaaggcgataaccacgatagttccgccacttatgaaatcaaatttcacgagtttgtgctgttcattctcgaagaaaaaatgggtgcgacgcgtcgtacttttctgacagatttagcccgcaagaaagggttccgcgtcgagaatgaactgaccgacgaagttacccacatcgtggcagaaaatctgtcacgctctgaagtattggcttggctgaaagaacacaagatggagaagaccaagcaattcgaactgctggatattagctggcttatcgaaagcatgaaagttggtaaaccggtggacaccaaggggaaataccagttggcggaatcggttgaggtgagtgcgaacccagatccgacagaaggtcgtgtaaacgagctgcctcctactatgaaaaccgtttctccgtatgcgtgtcaacgccgcaccaccctgaacaaccgtaatcaacgttttacggactcgctggagattcttcgtgaaaattacgagctgaaaggcaacgacgatactgcgctggaatttcgtcgtgctatctccgtgctgaaaagccttccgtttgaggtacgtagcctgaaagacacggaaggattgccctggatcagtgatgaagtcaaagggattatggaagaaatcatcgaagtcggggagtcgcgtgaagtgcaggccgtgctcaatgatgagtggtatcaaagcttccacgcatttacgcgtgtctttggagtgggggtgaagacagcagacaagtggtaccgtatgggtctgcgcaccctcgaggatgttcgttccagcaagaccctgaagttgaccccgatgcagaaagtaggtctgctgtattatgaagatcttgctcgcggcgttacgcgtgccgaagctgacgcgatttggctgctggttcaggatgcagtcgcaactttcgacccggatgcgatcgtggagattgtcggtggatttcgtcgtgggaaacctcagggtcacgacgttgatctgcttatcagttctccgggagctgagaaagagcaagaagaccaactcctgcagaaagtgatgaatctgtggaagaaacaagggttgttgctgtgtggtcgtctggaatggagtcagtgggaagatgggggttcgccttccggtaaggctgatgagggtgacgcggaggcgtcgtgctttctgatcctcaaactttatgatcatctggtgcgtaaaagtaaacgcaatatgccgactggttcgaacatgggcgagtccaaaccgtggaaagcaattaaagtagatctgctgcgttgcccctatggcagttttgcgtttgcgatgttgcagtggaccggaagccgcatgttccgtcgtgatctgcgctggtacgccctggaagagaagaacatggttctggacaatcattcgctgtatgacatgacccgcggtatcttcctccctgctaaatcggaagaggaaattttcgaacatctggggcttgaatacctggaaccgttcgaacgtaacgca

SEQ ID NO: 4218 - protein, 529 aa, synthetic construct
  REGION 1..529: note = Variant of terminal deoxynucleotidyltransferase
MHHHHHHGGSGSHGIRTIDSDFGKKQQKKGDNHDSSATYEIKFHEFVLFILEEKMGATRRTFLTDLARKKGFRVENELTDEVTHIVAENLSRSEVLAWLKEHKMEKTKQFELLDISWLIESMKVGKPVDTKGKYQLAESVEVSANPDPTEGRVNELPPTMKTVSPYACQRRTTLNNRNQRFTDSLEILRENYELKGNDDTALEFRRAISVLKSLPFEVRSLKDTEGLPWISDEVKGIMEEIIEVGESREVQAVLNDEWYQSFHAFTRVFGVGVKTADKWYRMGLRTLEDVRSSKTLKLTPMQKVGLLYYEDLARGVTRAEADAIWLLVQDAVATFDPDAIVEIVGGFRRGKPQGHDVDLLISSPGAEKEQEDQLLQKVMNLWKKQGLLLCGRLEWSQWEDGGSPSGKADEGDAEASCFLILKLYDHLVRKSKRNMPTGSNMGESKPWKAIKVDLLRCPYGSFAFAMLQWTGSRMFRRDLRWYALEEKNMVLDNHSLYDMTRGIFLPAKSEEEIFEHLGLEYLEPFERNA

SEQ ID NO: 4219 - DNA, 1587 bp, synthetic construct
  misc_feature 1..1587: note = Variant of terminal deoxynucleotidyltransferase
  source 1..1587: mol_type = other DNA
atgcaccatcatcatcatcatggcggtagcggcagccacggcattcgtaccatcgattcggacttcgggaagaaacagcagaaaaaaggcgataaccacgatagttccgccacttatgaaatcaaatttcacgagtttgtgctgttcattctcgaagaaaaaatgggtgcgacgcgtcgtacttttctgacagatttagcccgcaagaaagggttccgcgtcgagaatgaactgaccgacgaagttacccacatcgtggcagaaaatctgtcacgctctgaagtattggcttggctgaaagaacacaagatggagaagaccaagcaattcgaactgctggatattagctggcttatcgaaagcatgaaagttggtaaaccggtggacaccaaggggaaataccagttggcggaatcggttgaggtgagtgcgaacccagatccgacagaaggtcgtgtaaacgagctgcctcctactatgaaaaccgtttctccgtatgcgtgtcaacgccgcaccaccctgaacaaccgtaatcaacgttttacggactcgctggagattcttcgtgaagtttacgagctgaaaggcaacgacgatactgcgctggaatttcgtcgtgctatctccgtgctgaaaagccttccgtttgaggtacgtagcctgaaagacacggaaggattgccctggatcagtgatgaagtcaaagggattatggaagaaatcatcgaagtcggggagtcgcgtgaagtgcaggccgtgctcaatgatgagtggtatcaaagcttccacgcatttacgcgtgtctttggagtgggggtgaagacagcagacaagtggtaccgtatgggtctgcgcaccctcgaggatgttcgttccagcaagaccctgaagttgaccccgatgcagaaagtaggtctgctgtattatgaagatcttgctcgcggcgttacgcgtgccgaagctgacgcgatttggctgctggttcaggatgcagtcgcaactttcgacccggatgcgatcgtggagattgtcggtggatttcgtcgtgggaaacctcagggtcacgacgttgatctgcttatcagttctccgggagctgagaaagagcaagaagaccaactcctgcagaaagtgatgaatctgtggaagaaacaagggttgttgctgtgtggtcgtctggaatggagtcagtgggaagatgggggttcgccttccggtaaggctgatgagggtgacgcggaggcgtcgtgctttctgatcctcaaactttatgatcatctggtgcgtaaaagtaaacgcaatatgccgactggttcgaacatgggcgagtccaaaccgtggaaagcaattaaagtagatctgctgcgttgcccctatggcagttttgcgtttgcgatgttgcagtggaccggaagccgcatgttccgtcgtgatctgcgctggtacgccctggaagagaagaacatgatgctggacaatcattcgctgtatgacatgacccgcggtatcttcctccctgctaaatcggaagaggaaattttcgaacatctggggcttgaatacctggaaccgttcgaacgtaacgca

SEQ ID NO: 4220 - protein, 529 aa, synthetic construct
  REGION 1..529: note = Variant of terminal deoxynucleotidyltransferase
MHHHHHHGGSGSHGIRTIDSDFGKKQQKKGDNHDSSATYEIKFHEFVLFILEEKMGATRRTFLTDLARKKGFRVENELTDEVTHIVAENLSRSEVLAWLKEHKMEKTKQFELLDISWLIESMKVGKPVDTKGKYQLAESVEVSANPDPTEGRVNELPPTMKTVSPYACQRRTTLNNRNQRFTDSLEILREVYELKGNDDTALEFRRAISVLKSLPFEVRSLKDTEGLPWISDEVKGIMEEIIEVGESREVQAVLNDEWYQSFHAFTRVFGVGVKTADKWYRMGLRTLEDVRSSKTLKLTPMQKVGLLYYEDLARGVTRAEADAIWLLVQDAVATFDPDAIVEIVGGFRRGKPQGHDVDLLISSPGAEKEQEDQLLQKVMNLWKKQGLLLCGRLEWSQWEDGGSPSGKADEGDAEASCFLILKLYDHLVRKSKRNMPTGSNMGESKPWKAIKVDLLRCPYGSFAFAMLQWTGSRMFRRDLRWYALEEKNMMLDNHSLYDMTRGIFLPAKSEEEIFEHLGLEYLEPFERNA

SEQ ID NO: 4221 - DNA, 1587 bp, synthetic construct
  misc_feature 1..1587: note = Variant of terminal deoxynucleotidyltransferase
  source 1..1587: mol_type = other DNA
atgcaccatcatcatcatcatggcggtagcggcagccacggcattcgtaccatcgattcggacttcgggaagaaacagcagaaaaaaggcgataaccacgatagttccgccacttatgaaatcaaatttcacgagtttgtgctgttcattctcgaagaaaaaatgggtgcgacgcgtcgtacttttctgacagatttagcccgcaagaaagggttccgcgtcgagaatgaactgaccgacgaagttacccacatcgtggcagaaaatctgtcacgctctgaagtattggcttggctgaaagaacacaagatggagaagaccaagcaattcgaactgctggatattagctggcttatcgaaagcatgaaagttggtaaaccggtggacaccaaggggaaataccagttggcggaatcggttgaggtgagtgcgaacccagatccgacagaaggtcgtgtaaacgagctgcctcctactatgaaaaccgtttctccgtatgcgtgtcaacgccgcaccaccctgaacaaccgtaatcaacgttttacggactcgctggagattcttcgtgaaaattacgagctgaaaggcaacgacgatactgcgctggaatttcgtcgtgctatctccgtgctgaaaagccttccgtttgaggtacgtagcctgaaagacacggaaggattgccctggatcagtgatgaagtcaaagggattatggaagaaatcatcgaagtcggggagtcgcgtgaagtgcaggccgtgctcaatgatccttggtatcaaagcttccacgcatttacgcgtgtctttggagtgggggtgaagacagcagacaagtggtaccgtatgggtctgcgcaccctcgaggatgttcgttccagcaagaccctgaagttgaccccgatgcagaaagtaggtctgctgtattatgaagatcttgctcgcggcgttacgcgtgccgaagctgacgcgatttggctgctggttcaggatgcagtcgcaactttcgacccggatgcgatcgtggagattgtcggtggatttcgtcgtgggaaacctcagggtcacgacgttgatctgcttatcagttctccgggagctgagaaagagcaagaagaccaactcctgcagaaagtgatgaatctgtggaagaaacaagggttgttgctgtgtggtcgtctggaatggagtcagtgggaagatgggggttcgccttccggtaaggctgatgagggtgacgcggaggcgtcgtgctttctgatcctcaaactttatgatcatctggtgcgtaaaagtaaacgcaatatgccgactggttcgaacatgggcgagtccaaaccgtggaaagcaattaaagtagatctgctgcgttgcccctatggcagttttgcgtttgcgatgttgcagtggaccggaagccgcatgttccgtcgtgatctgcgctggtacgccctggaagagaagaacatgatgctggacaatcattcgctgtatgacatgacccgcggtatcttcctccctgctaaatcggaagaggaaattttcgaacatctggggcttgaatacctggaaccgttcgaacgtaacgca

SEQ ID NO: 4222 - protein, 529 aa, synthetic construct
  REGION 1..529: note = Variant of terminal deoxynucleotidyltransferase
MHHHHHHGGSGSHGIRTIDSDFGKKQQKKGDNHDSSATYEIKFHEFVLFILEEKMGATRRTFLTDLARKKGFRVENELTDEVTHIVAENLSRSEVLAWLKEHKMEKTKQFELLDISWLIESMKVGKPVDTKGKYQLAESVEVSANPDPTEGRVNELPPTMKTVSPYACQRRTTLNNRNQRFTDSLEILRENYELKGNDDTALEFRRAISVLKSLPFEVRSLKDTEGLPWISDEVKGIMEEIIEVGESREVQAVLNDPWYQSFHAFTRVFGVGVKTADKWYRMGLRTLEDVRSSKTLKLTPMQKVGLLYYEDLARGVTRAEADAIWLLVQDAVATFDPDAIVEIVGGFRRGKPQGHDVDLLISSPGAEKEQEDQLLQKVMNLWKKQGLLLCGRLEWSQWEDGGSPSGKADEGDAEASCFLILKLYDHLVRKSKRNMPTGSNMGESKPWKAIKVDLLRCPYGSFAFAMLQWTGSRMFRRDLRWYALEEKNMMLDNHSLYDMTRGIFLPAKSEEEIFEHLGLEYLEPFERNA

SEQ ID NO: 4223 - DNA, 1587 bp, synthetic construct
  misc_feature 1..1587: note = Variant of terminal deoxynucleotidyltransferase
  source 1..1587: mol_type = other DNA
atgcaccatcatcatcatcatggcggtagcggcagccacggcattcgtaccatcgattcggacttcgggaagaaacagcagaaaaaaggcgataaccacgatagttccgccacttatgaaatcaaatttcacgagtttgtgctgttcattctcgaagaaaaaatgggtgcgacgcgtcgtacttttctgacagatttagcccgcaagaaagggttccgcgtcgagaatgaactgaccgacgaagttacccacatcgtggcagaaaatctgtcacgctctgaagtattggcttggctgaaagaacacaagatggagaagaccaagcaattcgaactgctggatattagctggcttatcgaaagcatgaaagttggtaaaccggtggacaccaaggggaaataccagttggcggaatcggttgaggtgagtgcgaacccagatccgacagaaggtcgtgtaaacgagctgcctcctactatgaaaaccgtttctccgtatgcgtgtcaacgccgcaccaccctgaacaaccgtaatcaacgttttacggactcgctggagattcttcgtgaaaattacgagctgaaaggcaacgacgatactgcgctggaatttcgtcgtgctatctccgtgctgaaaagccttccgtttgaggtacgtagcctgaaagacacggaaggattgccctggatcagtgatgaagtcaaagggattatggaagaaatcatcgaagtcggggagtcgcgtgaagtgcaggccgtgctcaatgatgagtggtatcaaagcttccacgcatttacgcgtgtctttggagtgggggtgaagacagcagacaagtggtaccgtatgggtctgcgcaccctcgaggatgttcgttccagcaagaccctgaagttgaccccgatgcagaaagtaggtctgctgtattatgaagatcttgctcgcggcgttacgcgtgccgaagctgacgcgatttggctgctggttcaggatgcagtcgcaactttcgacccggatgcgatcgtggagattgtcggtggatttcgtcgtgggaaacctcagggtcacgacgttgatctgcttatcagttctccgggagctgagaaagagcaagaagaccaactcctgcagaaagtgatgaatctgtggaagaaacaagggttgttgctgtgtggtcgtctggaatggagtcaggtggaagatgggggttcgccttccggtaaggctgatgagggtgacgcggaggcgtcgtgctttctgatcctcaaactttatgatcatctggtgcgtaaaagtaaacgcaatatgccgactggttcgaacatgggcgagtccaaaccgtggaaagcaattaaagtagatctgctgcgttgcccctatggcagttttgcgtttgcgatgttgcagtggaccggaagccgcatgttccgtcgtgatctgcgctggtacgccctggaagagaagaacatgatgctggacaatcattcgctgtatgacatgacccgcggtatcttcctccctgctaaatcggaagaggaaattttcgaacatctggggcttgaatacctggaaccgttcgaacgtaacgca

SEQ ID NO: 4224 - protein, 529 aa, synthetic construct
  REGION 1..529: note = Variant of terminal deoxynucleotidyltransferase
MHHHHHHGGSGSHGIRTIDSDFGKKQQKKGDNHDSSATYEIKFHEFVLFILEEKMGATRRTFLTDLARKKGFRVENELTDEVTHIVAENLSRSEVLAWLKEHKMEKTKQFELLDISWLIESMKVGKPVDTKGKYQLAESVEVSANPDPTEGRVNELPPTMKTVSPYACQRRTTLNNRNQRFTDSLEILRENYELKGNDDTALEFRRAISVLKSLPFEVRSLKDTEGLPWISDEVKGIMEEIIEVGESREVQAVLNDEWYQSFHAFTRVFGVGVKTADKWYRMGLRTLEDVRSSKTLKLTPMQKVGLLYYEDLARGVTRAEADAIWLLVQDAVATFDPDAIVEIVGGFRRGKPQGHDVDLLISSPGAEKEQEDQLLQKVMNLWKKQGLLLCGRLEWSQVEDGGSPSGKADEGDAEASCFLILKLYDHLVRKSKRNMPTGSNMGESKPWKAIKVDLLRCPYGSFAFAMLQWTGSRMFRRDLRWYALEEKNMMLDNHSLYDMTRGIFLPAKSEEEIFEHLGLEYLEPFERNA

SEQ ID NO: 4225 - DNA, 1587 bp, synthetic construct
  misc_feature 1..1587: note = Variant of terminal deoxynucleotidyltransferase
  source 1..1587: mol_type = other DNA
atgcaccatcatcatcatcatggcggtagcggcagccacggcattcgtaccatcgattcggacttcgggaagaaacagcagaaaaaaggcgataaccacgatagttccgccacttatgaaatcaaatttcacgagtttgtgctgttcattctcgaagaaaaaatgggtgcgacgcgtcgtacttttctgacagatttagcccgcaagaaagggttccgcgtcgagaatgaactgaccgacgaagttacccacatcgtggcagaaaatctgtcacgctctgaagtattggcttggctgaaagaacacaagatggagaagaccaagcaattcgaactgctggatattagctggcttatcgaaagcatgaaagttggtaaaccggtggacaccaaggggaaataccagttggcggaatcggttgaggtgagtgcgaacccagatccgacagaaggtcgtgtaaacgagctgcctcctactatgaaaaccgtttctccgtatgcgtgtcaacgccgcaccaccctgaacaaccgtaatcaacgttttacggactcgctggagattcttcgtgaaaattacgagctgaaaggcaacgacgatactgcgctggaatttcgtcgtgctatctccgtgctgaaaagccttccgtttgaggtacgtagcctgaaagacacggaaggattgccctggatcagtgatgaagtcaaagggattatggaagaaatcatcgaagtcggggagtcgcgtgaagtgcaggccgtgctcaatgatgagtggtatcaaagcttccacgcatttacgcgtgtctttggagtgggggtgaagacagcagacaagtggtaccgtatgggtctgcgcaccctcgaggatgttcgttccagcaagaccctgaagttgaccccgatgcagaaagtaggtctgctgtattatgaagatcttgctcgcggcgttacgcgtgccgaagctgacgcgatttggctgctggttcaggatgcagtcgcaactttcgacccggatgcgatcgtggagattgtcggtggatttcgtcgtgggaaacctcagggtcacgacgttgatctgcttatcagttctccgggagctgagaaagagcaagaagaccaactcctgcagaaagtgatgaatctgtggaagaaacaagggttgttgctgtgtggtcgtctggaatggagtcagtgggaagatgggggttcgccttccggtaaggctgatgagggtgacgcggaggcgtcgtgctttctgatcctcaaactttatgatcatctggtgcgtaaaagtaaacgcaatatgccgactggttcgaacatgggcgagtccaaaccgtggaaagcaattaaagtagatctgctgcgttgcccctatggcagttttgcgtttgcgatgttgcagtggaccggaagccgcatgttccgtcgtgatctgcgctggtacgccctggaagagaagaacatgatgctggacaatgcttcgctgtatgacatgacccgcggtatcttcctccctgctaaatcggaagaggaaattttcgaacatctggggcttgaatacctggaaccgttcgaacgtaacgca

SEQ ID NO: 4226 - protein, 529 aa, synthetic construct
  REGION 1..529: note = Variant of terminal deoxynucleotidyltransferase
MHHHHHHGGSGSHGIRTIDSDFGKKQQKKGDNHDSSATYEIKFHEFVLFILEEKMGATRRTFLTDLARKKGFRVENELTDEVTHIVAENLSRSEVLAWLKEHKMEKTKQFELLDISWLIESMKVGKPVDTKGKYQLAESVEVSANPDPTEGRVNELPPTMKTVSPYACQRRTTLNNRNQRFTDSLEILRENYELKGNDDTALEFRRAISVLKSLPFEVRSLKDTEGLPWISDEVKGIMEEIIEVGESREVQAVLNDEWYQSFHAFTRVFGVGVKTADKWYRMGLRTLEDVRSSKTLKLTPMQKVGLLYYEDLARGVTRAEADAIWLLVQDAVATFDPDAIVEIVGGFRRGKPQGHDVDLLISSPGAEKEQEDQLLQKVMNLWKKQGLLLCGRLEWSQWEDGGSPSGKADEGDAEASCFLILKLYDHLVRKSKRNMPTGSNMGESKPWKAIKVDLLRCPYGSFAFAMLQWTGSRMFRRDLRWYALEEKNMMLDNASLYDMTRGIFLPAKSEEEIFEHLGLEYLEPFERNA

SEQ ID NO: 4227 - DNA, 1587 bp, synthetic construct
  misc_feature 1..1587: note = Variant of terminal deoxynucleotidyltransferase
  source 1..1587: mol_type = other DNA
atgcaccatcatcatcatcatggcggtagcggcagccacggcattcgtaccatcgattcggacttcgggaagaaacagcagaaaaaaggcgataaccacgatagttccgccacttatgaaatcaaatttcacgagtttgtgctgttcattctcgaagaaaaaatgggtgcgacgcgtcgtacttttctgacagatttagcccgcaagaaagggttccgcgtcgagaatgaactgaccgacgaagttacccacatcgtggcagaaaatctgtcacgctctgaagtattggcttggctgaaagaacacaagatggagaagaccaagcaattcgaactgctggatattagctggcttatcgaaagcatgaaagttggtaaaccggtggacaccaaggggaaataccagttggcggaatcggttgaggtgagtgcgaacccagatccgacagaaggtcgtgtaaacgagctgcctcctactatgaaaaccgtttctccgtatgcgtgtcaacgccgcaccaccctgaacaaccgtaatcaacgttttacggactcgctggagattcttcgtgaaaattacgagctgaaaggcaacgacgatactgcgctggaatttcgtcgtgctatctccgtgctgaaaagccttccgtttgaggtacgtagcctgaaagacacggaaggattgccctggatcagtgatgaagtcaaagggattatggaagaaatcatcgaagtcggggagtcgcgtgaagtgcaggccgtgctcaatgatgagtggtatcaaagcttccacgcatttacgcgtgtctttggagtgggggtgaagacagcagacaagtggtaccgtatgggtctgcgcaccctcgaggatgttcgttccagcaagaccctgaagttgaccccgatgcagaaagtaggtctgctgtattatgaagatcttgctcgcggcgttacgcgtgccgaagctgacgcgatttggctgctggttcaggatgcagtcgcaactttcgacccggatgcgatcgtggagattgtcggtggatttcgtcgtgggaaacctcagggtcacgacgttgatctgcttatcagttctccgggagctgagaaagagcaagaagaccaagtgctgcagaaagtgatgaatctgtggaagaaacaagggttgttgctgtgtggtcgtctggaatggagtcagtgggaagatgggggttcgccttccggtaaggctgatgagggtgacgcggaggcgtcgtgctttctgatcctcaaactttatgatcatctggtgcgtaaaagtaaacgcaatatgccgactggttcgaacatgggcgagtccaaaccgtggaaagcaattaaagtagatctgctgcgttgcccctatggcagttttgcgtttgcgatgttgcagtggaccggaagccgcatgttccgtcgtgatctgcgctggtacgccctggaagagaagaacatgatgctggacaatcattcgctgtatgacatgacccgcggtatcttcctccctgctaaatcggaagaggaaattttcgaacatctggggcttgaatacctggaaccgttcgaacgtaacgca

SEQ ID NO: 4228 - protein, 529 aa, synthetic construct
  REGION 1..529: note = Variant of terminal deoxynucleotidyltransferase
MHHHHHHGGSGSHGIRTIDSDFGKKQQKKGDNHDSSATYEIKFHEFVLFILEEKMGATRRTFLTDLARKKGFRVENELTDEVTHIVAENLSRSEVLAWLKEHKMEKTKQFELLDISWLIESMKVGKPVDTKGKYQLAESVEVSANPDPTEGRVNELPPTMKTVSPYACQRRTTLNNRNQRFTDSLEILRENYELKGNDDTALEFRRAISVLKSLPFEVRSLKDTEGLPWISDEVKGIMEEIIEVGESREVQAVLNDEWYQSFHAFTRVFGVGVKTADKWYRMGLRTLEDVRSSKTLKLTPMQKVGLLYYEDLARGVTRAEADAIWLLVQDAVATFDPDAIVEIVGGFRRGKPQGHDVDLLISSPGAEKEQEDQVLQKVMNLWKKQGLLLCGRLEWSQWEDGGSPSGKADEGDAEASCFLILKLYDHLVRKSKRNMPTGSNMGESKPWKAIKVDLLRCPYGSFAFAMLQWTGSRMFRRDLRWYALEEKNMMLDNHSLYDMTRGIFLPAKSEEEIFEHLGLEYLEPFERNA

SEQ ID NO: 4229 - DNA, 1587 bp, synthetic construct
  misc_feature 1..1587: note = Variant of terminal deoxynucleotidyltransferase
  source 1..1587: mol_type = other DNA
atgcaccatcatcatcatcatggcggtagcggcagccacggcattcgtaccatcgattcggacttcgggaagaaacagcagaaaaaaggcgataaccacgatagttccgccacttatgaaatcaaatttcacgagtttgtgctgttcattctcgaagaaaaaatgggtgcgacgcgtcgtacttttctgacagatttagcccgcaagaaagggttccgcgtcgagaatgaactgaccgacgaagttacccacatcgtggcagaaaatctgtcacgctctgaagtattggcttggctgaaagaacacaagatggagaagaccaagcaattcgaactgctggatattagctggcttatcgaaagcatgaaagttggtaaaccggtggacaccaaggggaaataccagttggcggaatcggttgaggtgagtgcgaacccagatccgacagaaggtcgtgtaaacgagctgcctcctactatgaaaaccgtttctccgtatgcgtgtcaacgccgcaccaccctgaacaaccgtaatcaacgttttacggactcgctggagattcttcgtgaaaattacgagctgaaaggcaacgacgatactgcgctggaatttcgtcgtgctatctccgtgctgaaaagccttccgtttgaggtacgtagcctgaaagacacggaaggattgccctggatcagtgatgaagtcaaagggattatggaagaaatcatcgaagtcggggagtcgcgtgaagtgcaggccgtgctcaatgatgagtggtatcaaagcttccacgcatttacgcgtgtctttggagtgggggtgaagacagcagacaagtggtaccgtatgggtctgcgcaccctcgaggatgttcgttccagcaagaccctgaagttgaccccgatgcagaaagtaggtctgctgtattatgaagatcttgctcgcggcgttacgcgtgccgaagctgacgcgatttggctgctggttcaggatgcagtcgcaactttcgacccggatgcgatcgtggagattgtcggtggatttcgtcgtgggaaacctcagggtcacgacgttgatctgcttatcagttctccgggagctgagaaagagcaagaagaccaactcctgcagaaagtgatgaatctgtggaagaaacaagggttgttgctgtgtggtcgtctggaatggagtcagtgggaagatgggggttcgccttccggtaaggctgatgagggtgacgcggaggcgtcgtgctttctgatcctcaaactttatgatcatctggtgtttaaaagtaaacgcaatatgccgactggttcgaacatgggcgagtccaaaccgtggaaagcaattaaagtagatctgctgcgttgcccctatggcagttttgcgtttgcgatgttgcagtggaccggaagccgcatgttccgtcgtgatctgcgctggtacgccctggaagagaagaacatgatgctggacaatcattcgctgtatgacatgacccgcggtatcttcctccctgctaaatcggaagaggaaattttcgaacatctggggcttgaatacctggaaccgttcgaacgtaacgca

SEQ ID NO: 4230 - protein, 529 aa, synthetic construct
  REGION 1..529: note = Variant of terminal deoxynucleotidyltransferase
MHHHHHHGGSGSHGIRTIDSDFGKKQQKKGDNHDSSATYEIKFHEFVLFILEEKMGATRRTFLTDLARKKGFRVENELTDEVTHIVAENLSRSEVLAWLKEHKMEKTKQFELLDISWLIESMKVGKPVDTKGKYQLAESVEVSANPDPTEGRVNELPPTMKTVSPYACQRRTTLNNRNQRFTDSLEILRENYELKGNDDTALEFRRAISVLKSLPFEVRSLKDTEGLPWISDEVKGIMEEIIEVGESREVQAVLNDEWYQSFHAFTRVFGVGVKTADKWYRMGLRTLEDVRSSKTLKLTPMQKVGLLYYEDLARGVTRAEADAIWLLVQDAVATFDPDAIVEIVGGFRRGKPQGHDVDLLISSPGAEKEQEDQLLQKVMNLWKKQGLLLCGRLEWSQWEDGGSPSGKADEGDAEASCFLILKLYDHLVFKSKRNMPTGSNMGESKPWKAIKVDLLRCPYGSFAFAMLQWTGSRMFRRDLRWYALEEKNMMLDNHSLYDMTRGIFLPAKSEEEIFEHLGLEYLEPFERNA

SEQ ID NO: 4231 - DNA, 1587 bp, synthetic construct
  misc_feature 1..1587: note = Variant of terminal deoxynucleotidyltransferase
  source 1..1587: mol_type = other DNA
atgcaccatcatcatcatcatggcggtagcggcagccacggcattcgtaccatcgattcggacttcgggaagaaacagcagaaaaaaggcgataaccacgatagttccgccacttatgaaatcaaatttcacgagtttgtgctgttcattctcgaagaaaaaatgggtgcgacgcgtcgtacttttctgacagatttagcccgcaagaaagggttccgcgtcgagaatgaactgaccgacgaagttacccacatcgtggcagaaaatctgtcacgctctgaagtattggcttggctgaaagaacacaagatggagaagaccaagcaattcgaactgctggatattagctggcttatcgaaagcatgaaagttggtaaaccggtggacaccaaggggaaataccagttggcggaatcggttgaggtgagtgcgaacccagatccgacagaaggtcgtgtaaacgagctgcctcctactatgaaaaccgtttctccgtatgcgtgtatgcgccgcaccaccctgaacaaccgtaatcaacgttttacggactcgctggagattcttcgtgaaaattacgagctgaaaggcaacgacgatactgcgctggaatttcgtcgtgctatctccgtgctgaaaagccttccgtttgaggtacgtagcctgaaagacacggaaggattgccctggatcagtgatgaagtcaaagggattatggaagaaatcatcgaagtcggggagtcgcgtgaagtgcaggccgtgctcaatgatgagtggtatcaaagcttccacgcatttacgcgtgtctttggagtgggggtgaagacagcagacaagtggtaccgtatgggtctgcgcaccctcgaggatgttcgttccagcaagaccctgaagttgaccccgatgcagaaagtaggtctgctgtattatgaagatcttgctcgcggcgttacgcgtgccgaagctgacgcgatttggctgctggttcaggatgcagtcgcaactttcgacccggatgcgatcgtggagattgtcggtggatttcgtcgtgggaaacctcagggtcacgacgttgatctgcttatcagttctccgggagctgagaaagagcaagaagaccaactcctgcagaaagtgatgaatctgtggaagaaacaagggttgttgctgtgtggtcgtctggaatggagtcagtgggaagatgggggttcgccttccggtaaggctgatgagggtgacgcggaggcgtcgtgctttctgatcctcaaactttatgatcatctggtgcgtaaaagtaaacgcaatatgccgactggttcgaacatgggcgagtccaaaccgtggaaagcaattaaagtagatctgctgcgttgcccctatggcagttttgcgtttgcgatgttgcagtggaccggaagccgcatgttccgtcgtgatctgcgctggtacgccctggaagagaagaacatgatgctggacaatcattcgctgtatgacatgacccgcggtatcttcctccctgctaaatcggaagaggaaattttcgaacatctggggcttgaatacctggaaccgttcgaacgtaacgca

SEQ ID NO: 4232 - protein, 529 aa, synthetic construct
  REGION 1..529: note = Variant of terminal deoxynucleotidyltransferase
MHHHHHHGGSGSHGIRTIDSDFGKKQQKKGDNHDSSATYEIKFHEFVLFILEEKMGATRRTFLTDLARKKGFRVENELTDEVTHIVAENLSRSEVLAWLKEHKMEKTKQFELLDISWLIESMKVGKPVDTKGKYQLAESVEVSANPDPTEGRVNELPPTMKTVSPYACMRRTTLNNRNQRFTDSLEILRENYELKGNDDTALEFRRAISVLKSLPFEVRSLKDTEGLPWISDEVKGIMEEIIEVGESREVQAVLNDEWYQSFHAFTRVFGVGVKTADKWYRMGLRTLEDVRSSKTLKLTPMQKVGLLYYEDLARGVTRAEADAIWLLVQDAVATFDPDAIVEIVGGFRRGKPQGHDVDLLISSPGAEKEQEDQLLQKVMNLWKKQGLLLCGRLEWSQWEDGGSPSGKADEGDAEASCFLILKLYDHLVRKSKRNMPTGSNMGESKPWKAIKVDLLRCPYGSFAFAMLQWTGSRMFRRDLRWYALEEKNMMLDNHSLYDMTRGIFLPAKSEEEIFEHLGLEYLEPFERNA

SEQ ID NO: 4233 - DNA, 1587 bp, synthetic construct
  misc_feature 1..1587: note = Variant of terminal deoxynucleotidyltransferase
  source 1..1587: mol_type = other DNA
atgcaccatcatcatcatcatggcggtagcggcagccacggcattcgtaccatcgattcggacttcgggaagaaacagcagaaaaaaggcgataaccacgatagttccgccacttatgaaatcaaatttcacgagtttgtgctgttcattctcgaagaaaaaatgggtgcgacgcgtcgtacttttctgacagatttagcccgcaagaaagggttccgcgtcgagaatgaactgaccgacgaagttacccacatcgtggcagaaaatctgtcacgctctgaagtattggcttggctgaaagaacacaagatggagaagaccaagcaattcgaactgctggatattagctggcttatcgaaagcatgaaagttggtaaaccggtggacaccaaggggaaataccagttggcggaatcggttgaggtgagtgcgaacccagatccgacagaaggtcgtgtaaacgagctgcctcctactatgaaaaccgtttctccgtatgcgtgtcaacgccgcaccaccctgaacaaccgtaatcaacgttttacggactcgctggagattcttcgtgaaaattacgagctgaaaggcaacgacgatactgcgctggaatttcgtcgtgctatctccgtgctgaaaagccttccgtttgaggtacgtagcctgaaagacacggaaggattgccctggatcagtgatgaagtcaaagggattatggaagaaatcatcgaagtcggggagtcgcgtgaagtgcaggccgtgctcaatgatgagtggtatcaaagcttccacgcatttacgcgtgtctttggagtgggggtgaagacagcagacaagtggtaccgtatgggtctgcgcaccctcgaggatgttcgttccagcaagaccctgaagttgaccccgatgcagaaagtaggtctgctgtattatgaagatcttgctcgcggcgttacgcgtgccgaagctgacgcgatttggctgctggttcaggatgcagtcgcaactttcgacccggatgcgatcgtggagattgtcggtggatttcgtcgtgggaaacctcagggtcacgacgttgatctgcttatcagttctccgggagctgagaaagagcaagaagaccaactcctgcagaaagtgatgaatctgtggaagaaacaagggttgttgctgtgtggtcgtctggaatggagtcagtgggaagatgggggttcgccttccggtaaggctgatgagggtgacgcggaggcgtcgtgctttctgatcctcaaactttatgatcatctggtgcataaaagtaaacgcaatatgccgactggttcgaacatgggcgagtccaaaccgtggaaagcaattaaagtagatctgctgcgttgcccctatggcagttttgcgtttgcgatgttgcagtggaccggaagccgcatgttccgtcgtgatctgcgctggtacgccctggaagagaagaacatgatgctggacaatcattcgctgtatgacatgacccgcggtatcttcctccctgctaaatcggaagaggaaattttcgaacatctggggcttgaatacctggaaccgttcgaacgtaacgca
